(19) United States
(12) Patent Application Publication
(10) Pub. No.: US 2021/0071252 A1
(43) Pub. Date: Mar. 11, 2021

(54) NON-CODING RNAS (NCRNA) FOR THE DIAGNOSIS OF COGNITIVE DISORDERS

(71) Applicants: Hueseyin FIRAT, Huningue (FR); Saliha MOUSSAOUI, Bartenheim (FR); Eric SCHORDAN, Wentzwiller (FR); AMONETA DIAGNOSTICS, Huningue (FR)

(72) Inventors: Hueseyin FIRAT, Huningue (FR); Saliha MOUSSAOUI, Bartenheim (FR); Eric SCHORDAN, Wentzwiller (FR)

(21) Appl. No.: 16/644,812

(22) PCT Filed: Sep. 5, 2018
(86) PCT No.: PCT/EP2018/073905

§ 371 Date: Mar. 5, 2020

Related U.S. Application Data
(60) Provisional application No. 62/554,427, filed on Sep. 5, 2017.

(51) Int. Cl. C12Q 1/6883

(52) U.S. Cl. CPC C12Q 1/6883; C12Q 2600/158; C12Q 2600/178

(57) ABSTRACT

The present invention describes a method for the diagnosis of a cognitive disorder including but not limited to Alzheimer disease in a subject at risk of having or developing a cognitive disorder.

### CROSS REFERENCE TO RELATED APPLICATIONS

[0001] This application claims the benefit and priority of U.S. provisional application 62/554,427, filed on Sep. 5, 2017.

### FIELD OF THE INVENTION

[0002] The present invention relates to the field of human medicine and specifically to the diagnosis of cognitive disorder including Alzheimer disease. This invention relates to a biomarker for cognitive disorders, in particular Alzheimer's disease, consisting of circulating non-coding RNAs (ncRNA) such as microRNA (miRNA) and long non-coding RNAs (lncRNA), or their combination in a peripheral body fluid and representing a non-invasive method for diagnosing the cognitive disorder in particular Alzheimer's disease or for monitoring its development or progression using this biomarker. It further relates to associated kits, methods, protocols and transmittable forms of information for diagnosis purposes and/or for other human medicine applications including the patient stratification in clinical trials and/or monitoring the efficacy of therapeutic strategies using this biomarker and peripheral body fluids from patients. The present invention will thus have a strong impact on the quality of life of patients and a significant impact on the healthcare system and economy.

### BACKGROUND ART

[0003] Alzheimer's disease (AD) is a chronic neurodegenerative disease characterized by progressive loss of cognitive function and pathologically by extracellular deposition of amyloid-beta peptide (Aβ) and intracellular deposition of hyper-phosphorylated tau protein in neurofibrillary tangles in the brain, associated with progressive neuronal degeneration (Marcus et al. J Neurogenet. 2011; 25(4):127-33; Gotz et al, Br J Pharmacol. 2012; 165(5):1246-59).

[0004] AD is the most common form of dementia. Approximately 46.8 million people worldwide currently live with AD or other type of dementia. With an ageing population, this number is estimated to increase to 131.5 million by 2050 (World Alzheimer Report, 2015: http://www.alz.co.uk/research/WorldAlzheimerReport2015.pdf). As such, AD is becoming an increasingly important burden on the affected individuals and their families as well as economic and social costs on medical and healthcare resources in both developed and emerging countries.

[0005] Currently, there is no cure for AD. Symptomatic treatments exist for this disease all trying to counterbalance neurotransmitter's disturbance. Although a number of new potential disease-modifying therapeutic candidates are currently being studied in clinical trials, none has been approved yet. From 2002 to 2012, there was a failure of 99.6% of AD clinical trials that were 289 Phases 2 and 3 trials on symptomatic agents (36.6%), disease-modifying small molecules (35.1%) and disease-modifying immunotherapies (18%) (Cummings et al., Expert Rev Clin Pharmacol. 2014;7(2):161-5). Among the strategies proposed by worldwide experts in the AD field and by pharmaceutical industries to improve the success rate for AD drug development, are: a) intervening earlier in the disease process before neurodegeneration begins, b) identifying and developing accurate biomarkers for early diagnosis, non-invasive and suitable for stratification of subject populations and for longitudinal monitoring of drug efficacy in clinical trials.

[0006] The AD pathological features are defined in post-mortem histopathological analysis. The presence of amyloid plaques remains an absolutely required feature for the definitive diagnosis of AD, as accepted by the American Academy of Neurology, American Psychiatric Association (DSM-IV) and both the CERAD and NIA-Reagan Institute neuropathological criteria.

[0007] Current diagnosis of the disease remains uncertain (Dubois et al Lancet Neurol. 2014;13(6):614-29) and it is based on combination of battery of clinical and neuropsychological tests and neuroimaging, such as structural imaging using Magnetic Resonance Imaging (MRI) and/or glucose metabolism using Positron emission tomography (PET) of fluorodeoxyglucose F18 (¹⁸F-FDG), with an accuracy of less than 70%-85% depending on the method and the severity stage of the disease (Frisoni et al., Nat Rev Neurol. 2010; 6(2): 67-77; Tahmasian et al., J Nucl Med. 2016 ;57(3):410-5).

[0008] Sometimes, detection of AD-associated biomarkers Aβ42 and tau or phosphorylated-tau in cerebrospinal fluid (CSF) is additionally performed (Sunderland et al., JAMA. 2003;289(16):2094-2103), but CSF tests request a lumbar puncture, which is an invasive procedure and often requires hospitalization of subjects. In addition, the accuracy of these CSF tests remains insufficient as up to 30% of subjects can be misdiagnosed and the test cannot be longitudinally practiced to be followed up for confirmation of diagnostic purposes.

[0009] Longitudinal confirmatory diagnosis test is essential for applications to early detection of the preclinical stages of AD and mild cognitive impairment (MCI; defined as an early stage during which the first subtle symptoms manifest) and thus detecting early and calculating the risk of conversion of MCI into AD. Due to its limits (invasive), a CSF test is not rarely used as a biomarker for early diagnosis in preclinical AD stages before symptoms appear, nor it is suitable as a companion biomarker repeatedly practiced at several time points in same subjects recruited in longitudinal clinical trials.

[0010] Recently, specific neuroimaging methods relevant for AD pathology are being developed, notably with ligands for in vivo amyloid-beta (Aβ) ligands for Positron Emission Tomography (PET) neuroimaging including F-18 florbetapir and F-18 flutemetamol which have been approved by FDA and/or EMA (Choi et al., 2009 and Wong et al., 2010). However, their practice is costly and very limited (available only in some hospitals of large cities equipped with PET technology, still mainly for research purposes as not reimbursed by health insurances) and their diagnosis accuracy is still under studies for further understanding. Thus, the use of these Aβ PET neuroimaging methods remains very limited and the vast majority of patients do not profit from such tests even in rich countries.

[0011] There is a need for better definition of AD patient population to be included for the drug-development trials: PET imaging using Aβ ligands showed that up to 30% of subjects diagnosed with AD show a negative Aβ scan and that up to 35% of subjects with normal cognition status show a positive Aβ scan (Gaël Chételat et al, NeuroImage Clinical 2013; 2:356-65). Thus, PET Aβ scan is being used to guide for recruitment of subjects in the desired cohorts in some clinical trials by the large pharmaceutical companies. Anti-Aβ antibody e.g. Solanezumab tested in patients with mixed mild to moderate AD failed to show clear efficacy, however with some encouraging data in only mild AD patients subgroup. In mild AD patients selected based on CSF biomarker profile, the results showed a promising efficacy (Carlson et al., Alzheimers Dement (Amst). 2016; 2:75-85; Siemers et al., Alzheimers Dement. 2016;12(2):110-20). However, the use of CSF biomarker is invasive, dramatically limiting its use as a biomarker for drug development. For example, it is not suitable for repeated use to monitor the stability and/or the progression of the disease, nor it is suitable to monitor in clinical longitudinal trials the efficacy of disease-modifying therapeutic drug candidates or preventive strategies.

[0012] Overall, the existing tests either lack an easy accessibility and simplicity for use for diagnosis of the large AD population and/or lack accuracy (sensitivity and specificity). This represents a major impediment and bottleneck to develop reliable and rapid diagnosis test for AD. Another impediment is the identification of a biomarker that does not require invasive sample collecting, such as a spinal tap. The lack of such an accessible, sensitive and specific biomarker that could be validated by cellular, animal model, pre-clinical models, and human testing impedes the development of therapies and drugs for AD or for the studies on pathological processes triggering AD or involved in the progression of AD.

[0013] Today, clearly there is an unmet need for an accurate and non-invasive peripheral biomarker test for diagnosis of AD including preclinical and early AD and for applications in drug development (patient stratification and monitoring drug efficacy in clinical trials).

[0014] ncRNAs include small microRNAs (miRNAs) and long non-coding RNAs (lncRNAs).
[0015] miRNAs are small non-coding RNA molecules (18-23 nucleotide) that modulate gene expression negatively at the post-transcriptional level. About 70% of the currently identified miRNAs are expressed in the brain. miRNAs play a major role in neural development, differentiation and synaptic plasticity. Some specific miRNAs are aberrantly expressed in AD brain, CSF and blood (for review: Hu et al., 2016, Front Aging Neurosci. 9(8):13), revealing their potential value in the diagnosis of AD.
[0016] lncRNAs are typically defined as transcripts longer than 200 nucleotides and expressed in a tissue-specific manner. In the brain, lncRNAs can regulate gene expression at epigenetic, transcriptional, and posttranscriptional levels of proteins with diverse functions including neuronal transmission and synaptic plasticity. Recent studies identified lncRNA candidates in AD postmortem brain tissue; some lncRNA candidates directly or indirectly regulate the formation of the neurotoxic Aβ, synaptic activity or the neuronal DNA repair (for review: Luo K and Chen Y, Clin Intery Aging 2016; 11: 867-872).

[0017] Expression levels of miRNAs may have potential as diagnostic biomarkers as they are known to circulate and tissue specific profiles can be identified in a number of body fluids such as plasma, CSF and urine. Recent developments in deep sequencing technology present a viable approach to develop biomarker pipelines in order to profile peripheral miRNA signatures specific to neurodegenerative diseases.

[0018] We previously showed that the lncRNAs expressed or highly enriched in tissues such as cardiac tissue or brain tissue, can be released into the peripheral circulation and be easily quantifiable by classical RT-PCR in different peripheral samples (PCT/EP2018/065492). In addition of the RT-PCR, we performed also total RNA sequencing on peripheral samples and quantified significant proportion of lncRNAs in the peripheral samples such as serum, plasma and Paxgene-RNA-tube collected whole blood (PCT/EP2018/065492).

[0019] According to the invention, new miRNA signatures and lncRNA signatures specific of neurodegenerative diseases, especially of AD, have been identified, using a method set up combining most recent technology and samples collected in non-invasively manner, including Paxgene whole blood tube, serum and plasma.

### BRIEF DESCRIPTION OF THE FIGURES

[0020] FIG. 1 shows the expression level of miR.99a.5p, MiR.1229.3p, miR.378d and miR.6880.5p on human plasma lithium heparin samples from patients with early to moderate Alzheimer (AD) and age-matched healthy controls. Y axis: mean+/−SD of the mean of concentration of the miRNAs in log2 of the normalized number of reads. X axis: AD: Alzheimer patient group, HV: Healthy control group.

[0021] FIG. 2 shows a predictive model using random forest for the diagnosis of AD patients. Three miRNAs were used in this example of results and show a good AUC of 0.839 and an accuracy of 0.818.

[0022] FIG. 3 shows the expression level of lncRNA candidates lnc-TPPP-1:2, lnc-TMEM185B-12:7, lnc-NAXD-6:5 and lnc-HECA-6:1 on human serum samples from patients with early to moderate

[0023] Alzheimer (AD) and age-matched healthy controls. Y axis: mean+/−standard error of the mean of concentration of the lncRNAs in CPM (count per million). X axis: AD: Alzheimer patient group, HV: Healthy control group.

[0024] FIG. 4 shows Volcano plot of the comparison. The volcano plot shows the 1008 lncRNAs that are differentially expressed in AD group versus HV (healthy control) group with statistical significance (p<0.05) above the line. 33 lncRNAs show both p value of <0.05 and fold change of ≥2 or ≤0.5. The lncRNAs that are differentially expressed but do not reach a statistical significance are shown below the line.

[0025] FIG. 5 shows a predictive modelling based on the random forest algorithm enabling the identification of the signature of the 13-top ranked lncRNAs candidates selected out of 19867 lncRNAs.

[0026] FIG. 6 shows a predictive modelling based on the random forest algorithm enabling the identification of the signature of the 7-top ranked lncRNAs candidates out of 90 lncRNAs with a p value of <0.05 and fold change of ≥2 or ≤0.5 or an AUC of ≥0.85 or ≤0.15.

[0027] FIG. 7 shows a predictive modelling based on the random forest algorithm enabling identification of the signature of the 12 top lncRNAs candidates selected out of the 90 lncRNAs (with a p value of <0.05 and fold change of ≥1,6 or ≤0.6 and an AUC of ≥0.85 or ≤0.15.

[0028] FIG. 8 shows a predictive modelling based on the random forest algorithm enabling identification of the signature of the 3 top lncRNA candidates selected out of the lncRNAs with a p value of <0.05 and a good correlation (Pearson) with scores of neurocognitive tests including MMSE and/or MoCA out of 7 neuropsychological tests performed.

[0029] FIG. 9 shows a predictive modelling based on the random forest algorithm enabling the identification of the signature of the 7 top lncRNA candidates selected out of lncRNAs with a p value of <0.05 and a good correlation (Pearson) with neuroimaging scores (volume of brain structures of relevance for cognition and memory such as the mediotemporal area, left and right hippocampus, left and right amygdala, entorhinal cortex out of more than 120 structures measured.

[0030] FIG. 10 shows a predictive modelling based on the random forest algorithm enabling the identification of the signature of the 18 top lncRNA candidates selected out of lncRNAs that show a p value of <0.05 and a good correlation (Pearson) with CSF biomarkers Aβ42 and tau (total tau or phosphorylated tau).

[0031] FIG. 11 shows examples of results on correlation between the level of lncRNAs and the volumetric neuroimaging score of brain structures implicated in cognition such as the mediotemporal area and the hippocampus.

[0032] FIG. 12 shows examples of results on correlation between lncRNAs and CSF biomarkers Aβ42 or Tau.

### DESCRIPTION OF THE INVENTION

[0033] The invention relates to a method for the diagnosis of a cognitive disorder including but not limited to Alzheimer disease in a subject at risk of having or developing mild cognitive impairment or a cognitive disorder, comprising:
[0034] (a) isolating a biological sample from the subject;
[0035] (b) detecting a level of expression in a ncRNA (miRNA and/or lncRNA) signature, the ncRNA signature comprising or consisting of at least one ncRNA (miRNA and/or lncRNA) selected from 406 miRNAs listed in Table 1 and 1008 lncRNAs listed in Table 5 in the biological sample from said subject;
[0036] (c) comparing the level of expression of miRNA and/or lncRNA in the sample to a level of expression in a reference,
[0037] wherein an increased or decreased level of expression in the sample compared to the level in the reference identifies the subject having a cognitive disorder or being at risk of developing a cognitive disorder.

[0038] In some embodiments, the ncRNA signature comprises or consists of ncRNAs selected from the group consisting of:
[0039] (i) miR.99a.5p;
[0040] (ii) 7 miRNAs of miR.99a.5p, miR.378d, miR.100.5p, miR.193b.3p, miR.34a.5p, miR.1306.5p, and miR.1229.3p;
[0041] (iii) 3 miRNAs of miR1220.3p, miR378d and miR99a.5p;
[0042] (iv) 11 mRNAs of miR.99a.5p, miR.1229.3p, miR.100.5p, miR.378d, miR.193b.3p, miR.1306.5p, miR.195.5p, miR.532.3p, miR.125b.5p, miR.34a.5p, and miR.6880.5p;
[0043] (v) 15 miRNAs of miR.23a.5p, miR.6880.5p, miR.7111.5p, miR.6812.5p, miR.6738.5p, miR.5196.5p, miR.6894.5p, miR.8085, miR.4463, miR.2392, miR.144.3p, miR.192.5p, miR.193b.3p, miR.194.5p, and miR.122.5p;
[0044] (vi) 13 lncRNAs of lnc-DLG5-1:1, lnc-EBLN1-1:4, lnc-FAT1-7:2, lnc-PRR5-5:1, lnc-RBKS-6:1, lnc-FOXD4L5-35:1, lnc-TENM3-3:3, lnc-FAM133B-2:1, lnc-ZNF726-1:3, lnc-AP3M1-1:1, lnc-DUSP10-6:1, lnc-TPPP-1:2, and LINC01206:20;
[0045] (vii) 7 lncRNAs of LINC02345:11, lnc-EBLN1-1:4, lnc-TPPP-1:2, lnc-TENM3-3:3, lnc-FAT1-7:2, lnc-DKK1-5:3, and lnc-TACSTD2-2:4;
[0046] (viii) 12 Inc RNAs of lnc-TPPP-1:2, ARRDC3-AS1:7, lnc-TENM3-3:5, lnc-TENM3-3:4, lnc-QRFP-5:1, lnc-CRYBB1-1:1, lnc-MGST3-1:3, lnc-FAM49B-8:1, HAND2-AS1:70, lnc-TMEM185B-12:7, lnc-CNDP1-7:1, and lnc-C21orf58-1:2;
[0047] (ix) 3 lncRNAs of lnc-TENM3-3:3, lnc-MARCH4-2:7, and lnc-LRRC1-5:2;
[0048] (x) 7 lncRNAs of lnc-TPPP-1:2, lnc-TENM3-3:3, lnc-TMEM185B-12:7, lnc-NAXD-6:5, lnc-HECA-6:1, lnc-COMMD6-10:1, and MIR29B2CHG:46;
[0049] (xi) 18 lncRNAs of lnc-TPPP-1:2, LINC02345:11, lnc-ZNF273-4:4, lnc-TACC2-8:6, LINC01206:20, lnc-05orf67-3:1, HAND2-AS1:58, lnc-PRDM9-20:1, lnc-CLK1-1:7, lnc-DNALI1-5:4, RORB-AS1:6, lnc-TPPP-1:3, lnc-BMS1-2:1, lnc-ADRB1-4:1, lnc-XXYLT1-5:1, MIR99AHG:104, LINC01748:17, and lnc-AKR1E2-15:1;
[0050] (xii) 28 miRNAs listed in Table 2;
[0051] (xiii) 74 miRNAs listed in Table 3;
[0052] (xiv) 33 lncRNAs listed in Table 6;
[0053] (xv) 60 lncRNAs listed in Table 7;
[0054] (xvi) 32 lncRNAs listed in Table 8;
[0055] (xvii) 84 lncRNAs listed in Table 9; and
[0056] (xviii) 94 lncRNAS listed in Table 10.

[0057] The invention also relates to a method for monitoring the development or progression of a cognitive disorder in a subject suffering from a loss or impairment of cognitive function or dementia, said method comprising the following steps:
[0058] (a) isolating a biological sample from the subject;
[0059] (b) detecting a level of expression in a ncRNA signature, the ncRNA signature comprising or consisting of at least one ncRNA (miRNA and/or lncRNA) selected from 406 miRNAs listed in Table 1 and 1008 lncRNAs listed in Table 5 in the biological sample;
[0060] (c) comparing the level of expression of miRNA and/or lncRNA in the sample to a level of expression in a reference,
[0061] wherein an increased or decreased level of expression in the sample compared to the level in the reference identifies the subject having a cognitive disorder or being at risk of developing a cognitive disorder, and
[0062] (d) designing the therapeutic treatment according to the said identified cognitive disorder.

[0063] In some embodiments, the ncRNA signature comprises or consists of ncRNAs selected from the group consisting of:
[0064] (i) miR.99a.5p;
[0065] (ii) 7 miRNAs of miR.99a.5p, miR.378d, miR.100.5p, miR.193b.3p, miR.34a.5p, miR.1306.5p, and miR.1229.3p;
[0066] (iii) 3 miRNAs of miR1220.3p, miR378d and miR99a.5p;
[0067] (iv) 11 mRNAs of miR.99a.5p, miR.1229.3p, miR.100.5p, miR.378d, miR.193b.3p, miR.1306.5p, miR.195.5p, miR.532.3p, miR.125b.5p, miR.34a.5p, and miR.6880.5p;
[0068] (v) 15 miRNAs of miR.23a.5p, miR.6880.5p, miR.7111.5p, miR.6812.5p, miR.6738.5p, miR.5196.5p, miR.6894.5p, miR.8085, miR.4463, miR.2392, miR.144.3p, miR.192.5p, miR.193b.3p, miR.194.5p, and miR.122.5p;
[0069] (vi) 13 lncRNAs of lnc-DLG5-1:1, lnc-EBLN1-1:4, lnc-FAT1-7:2, lnc-PRR5-5:1, lnc-RBKS-6:1, lnc-FOXD4L5-35:1, lnc-TENM3-3:3, lnc-FAM133B-2:1, lnc-ZNF726-1:3, lnc-AP3M1-1:1, lnc-DUSP10-6:1, lnc-TPPP-1:2, and LINC01206:20;
[0070] (vii) 7 lncRNAs of LINC02345:11, lnc-EBLN1-1:4, lnc-TPPP-1:2, lnc-TENM3-3:3, lnc-FAT1-7:2, lnc-DKK1-5:3, and lnc-TACSTD2-2:4;
[0071] (viii) 12 Inc RNAs of lnc-TPPP-1:2, ARRDC3-AS1:7, lnc-TENM3-3:5, lnc-TENM3-3:4, lnc-QRFP-5:1, lnc-CRYBB1-1:1, lnc-MGST3-1:3, lnc-FAM49B-8:1, HAND2-AS1:70, lnc-TMEM185B-12:7, lnc-CNDP1-7:1, and lnc-C21orf58-1:2;
[0072] (ix) 3 lncRNAs of lnc-TENM3-3:3, lnc-MARCH4-2:7, and lnc-LRRC1-5:2;
[0073] (x) 7 lncRNAs of lnc-TPPP-1:2, lnc-TENM3-3:3, lnc-TMEM185B-12:7, lnc-NAXD-6:5, lnc-HECA-6:1, lnc-COMMD6-10:1, and MIR29B2CHG:46;
[0074] (xi) 18 lncRNAs of lnc-TPPP-1:2, LINC02345:11, lnc-ZNF273-4:4, lnc-TACC2-8:6,

[0075] LINC01206:20, lnc-05orf67-3:1, HAND2-AS1:58, lnc-PRDM9-20:1, lnc-CLK1-1:7, lnc-DNALI1-5:4, RORB-AS1:6, lnc-TPPP-1:3, lnc-BMS1-2:1, lnc-ADRB1-4:1, lnc-XXYLT1-5:1, MIR99AHG:104, LINC01748:17, and lnc-AKR1E2-15:1;
[0076] (xii) 28 miRNAs listed in Table 2;
[0077] (xiii) 74 miRNAs listed in Table 3;
[0078] (xiv) 33 lncRNAs listed in Table 6;
[0079] (xv) 60 lncRNAs listed in Table 7;
[0080] (xvi) 32 lncRNAs listed in Table 8;
[0081] (xvii) 84 lncRNAs listed in Table 9; and
[0082] (xviii) 94 lncRNAS listed in Table 10.

[0083] A biological sample may be a small part of a subject obtained from a body fluid, e.g. blood, plasma, serum, urine or cerebrospinal fluid. Suitably the biological sample are plasma or serum or Paxgene-RNA-tube.

[0084] By cognitive disorder is meant e.g. progressive impairment or progressive loss of a cognitive function, for example AD.

### For Diagnosis of Cognitive Impairment or Dementia:

[0085] The “reference” may be suitable control sample such as for example a sample from a normal, healthy subject having no cognitive impairment symptoms and no abnormal neuroimaging findings and being age-matched to the patient to be diagnosed with the method of the present invention. The reference may be a sample from the same subject prior to demonstration of disorder or disease symptoms or prior to diagnosis of the impairment or loss of cognitive function or dementia. The reference may be a standardized sample, e.g. a sample comprising material or data from several samples of healthy subjects who have no cognitive impairment symptoms and no abnormal neuroimaging findings.

[0086] For Differential Diagnosis of a Specific Dementia Type or Its Mild Cognitive Impairment (MCI) Versus Other Dementia Types and Their MCI:

[0087] Dementia types and subtypes are numerous and include e.g.
[0088] Alzheimer (AD) and MCI of AD type
[0089] Frontotemporal dementia (FTD) and MCI of FTD type

[0090] Dementia with Lewy body (DLB) and MCI of DLB type
[0091] Parkinson's disease dementia (PDD) and MCI of PDD type
[0092] Vascular dementia
[0093] Progressive supranuclear palsy (PSP),
[0094] Corticobasal degeneration (CBD)

[0095] For differential diagnosis of one dementia subtype, the reference sample may be sample(s) from patient(s) suffering dementia of other type(s). For example, for differential diagnosis of AD or MCI of AD type, the sample(s) shall be from patient(s) with MCI/dementia of non-AD type (i.e. sample(s) from subject(s) with FTD and/or DLB and/or PDD and/or vascular dementia and/or PSP and/or CBD and/or other dementia), or from subject(s) who may suffer another disease but have no cognitive impairment or dementia.

[0096] The invention also relates to a method of diagnosing a cognitive disorder including but not limited to Alzheimer disease and monitoring its development or progression in a subject suffering from progressive impairment or loss of cognitive function or dementia, comprising:
[0097] (a) determining the presence of a cognitive disorder using a biological sample of the said subject using a method according to the invention, and
[0098] (b) adapting a therapeutic treatment in function of the results of step (a).

[0099] The invention also relates to a method of diagnosing a cognitive disorder including but not limited to early MCI and very mild Alzheimer disease in a subject with no apparent and/or no measurable symptoms when using the available methods such as MMSE, MoCA and other neurocognitive tests, but with abnormal changes of biomarkers of the present invention preceding the symptoms, comprising:
[0100] (a) determining the risk of developing a cognitive disorder using a biological sample of the said subject using a method according to the invention, and
[0101] (b) adapting a therapeutic treatment in function of the results of step (a).

[0102] The invention further relates to a method of predictive diagnosing a cognitive disorder including but not limited to early MCI and very mild Alzheimer disease in a subject with no apparent and/or no measurable abnormality by neuroimaging methods as MRI and/or CT scans, comprising:
[0103] (a) determining the risk of developing a cognitive disorder using a biological sample of the said subject using a method according to the invention, and
[0104] (b) adapting a therapeutic treatment in function of the results of step (a).

[0105] The invention also relates to a method for treating a subject suffering from a progressive impairment or loss of cognitive function or dementia, said method comprising:
[0106] (a) diagnosing the cognitive disorder associated to the progressive impairment or loss of cognitive function or dementia in said patient using the method according to the invention, and
[0107] (b) adapting the therapeutic treatment to the results obtained in step (a).

[0108] Examples of therapeutic treatment of cognitive disorders may comprise the administration of:
[0109] a drug already approved for treatment of cognitive disorders in particular Alzheimer's disease, e.g. cholinesterase inhibitors, for example donenepezil, rivastigmine or galantamine, or a NMDA receptor antagonist, e.g. memantine, or a combination of drugs, for example donepezil and memantine, and/or
[0110] a novel therapeutic candidate or combination under clinical development, for example as currently tested in the anti-amyloid field, e.g. beta-secretase inhibitors and anti-beta-amyloid monoclonal antibodies, and anti-tau approaches, for example as currently tested in the anti-tau field, e.g. modulators of kinases or phosphatases that regulate tau phosphorylation status and anti-tau antibodies; and drug candidates modulating the molecular pathways such as neurodegeneration, synaptic plasticity, oxidative stress, autophagy, mitochondrial dysfunction and immuno-inflammation pathways where ncRNAs of the present invention are implicated.

[0111] Furthermore, the invention comprises a kit for diagnosing and/or monitoring a cognitive disorder including but not limited to AD, comprising at least one reagent for the determination of a ncRNA expression profile comprising or consisting of at least one ncRNA (miRNA and/or lncRNA) selected from 406 miRNAs listed in Table 1 and 1008 lncRNAs listed in Table 5 in the biological sample.

[0112] In some embodiments, the ncRNA expression profile comprises or consists of ncRNAs selected from the group consisting of:
[0113] (i) miR.99a.5p;
[0114] (ii) 7 miRNAs of miR.99a.5p, miR.378d, miR.100.5p, miR.193b.3p, miR.34a.5p, miR.1306.5p, and miR.1229.3p;
[0115] (iii) 3 miRNAs of miR1220.3p, miR378d and miR99a.5p;
[0116] (iv) 11 mRNAs of miR.99a.5p, miR.1229.3p, miR.100.5p, miR.378d, miR.193b.3p, miR.1306.5p, miR.195.5p, miR.532.3p, miR.125b.5p, miR.34a.5p, and miR.6880.5p;
[0117] (v) 15 miRNAs of miR.23a.5p, miR.6880.5p, miR.7111.5p, miR.6812.5p, miR.6738.5p, miR.5196.5p, miR.6894.5p, miR.8085, miR.4463, miR.2392, miR.144.3p, miR.192.5p, miR.193b.3p, miR.194.5p, and miR.122.5p;
[0118] (vi) 13 lncRNAs of lnc-DLG5-1:1, lnc-EBLN1-1:4, lnc-FAT1-7:2, lnc-PRR5-5:1, lnc-RBKS-6:1, lnc-FOXD4L5-35:1, lnc-TENM3-3:3, lnc-FAM133B-2:1, lnc-ZNF726-1:3, lnc-AP3M1-1:1, lnc-DUSP10-6:1, lnc-TPPP-1:2, and LINC01206:20;
[0119] (vii) 7 lncRNAs of LINC02345:11, lnc-EBLN1-1:4, lnc-TPPP-1:2, lnc-TENM3-3:3, lnc-FAT1-7:2, lnc-DKK1-5:3, and lnc-TACSTD2-2:4;
[0120] (viii) 12 Inc RNAs of lnc-TPPP-1:2, ARRDC3-AS1:7, lnc-TENM3-3:5, lnc-TENM3-3:4, lnc-QRFP-5:1, lnc-CRYBB1-1:1, lnc-MGST3-1:3, lnc-FAM49B-8:1, HAND2-AS1:70, lnc-TMEM185B-12:7, lnc-CNDP1-7:1, and lnc-C21orf58-1:2;
[0121] (ix) 3 lncRNAs of lnc-TENM3-3:3, lnc-MARCH4-2:7, and lnc-LRRC1-5:2;
[0122] (x) 7 lncRNAs of lnc-TPPP-1:2, lnc-TENM3-3:3, lnc-TMEM185B-12:7, lnc-NAXD-6:5, lnc-HECA-6:1, lnc-COMMD6-10:1, and MIR29B2CHG:46;
[0123] (xi) 18 ncRNAs of lnc-TPPP-1:2, LINC02345:11, lnc-ZNF273-4:4, lnc-TACC2-8:6, LINC01206:20, lnc-05orf67-3:1, HAND2-AS1:58, lnc-PRDM9-20:1, lnc-CLK1-1:7, lnc-DNALI1-5:4, RORB-AS1:6, lnc-TPPP-1:3, lnc-BMS1-2:1, lnc-ADRB1-4:1, lnc-XXYLT1-5:1, MIR99AHG:104, LINC01748:17, and lnc-AKR1E2-15:1;
[0124] (xii) 28 miRNAs listed in Table 2;
[0125] (xiii) 74 miRNAs listed in Table 3;
[0126] (xiv) 33 lncRNAs listed in Table 6;
[0127] (xv) 60 lncRNAs listed in Table 7;
[0128] (xvi) 32 lncRNAs listed in Table 8;
[0129] (xvii) 84 lncRNAs listed in Table 9; and
[0130] (xviii) 94 lncRNAS listed in Table 10.

[0131] The kit of the invention allows performing the measurement of the miRNA signature and/or the lncRNA signature of the invention, wherein the kit comprises at least one reagent for measuring at least one ncRNA (miRNA and/or lncRNA) as indicated above.

[0132] By “reagent” is meant a reagent which specifically allows the determination of the miRNA/gene expression profile, i.e. a reagent specifically intended for the specific determination of the expression level of the miRNA/gene present in the miRNA/gene expression profile. Examples include e.g. amplification primer pairs (forward and reward) and/or probes specific for the miRNA/gene present in the miRNA/gene expression profile. This definition excludes generic reagents useful for the determination of the expression level of any other miRNA/gene.

[0133] By “reagent” is also meant a reagent which specifically allows the determination of the lncRNA expression profile, i.e. a reagent specifically intended for the specific determination of the expression level of the lncRNA present in the lncRNA expression profile. Examples include e.g. amplification primer pairs (forward and reward) and/or probes specific for the lncRNA present in the lncRNA expression profile. This definition excludes generic reagents useful for the determination of the expression level of any other lncRNA.

[0134] In some embodiments, the kit for diagnosing and/or monitoring a cognitive disorder comprises one or more oligonucleotide probes specific for ncRNAs of interest and a reagent for purifying the probe- target nucleic acid complexes. The oligonucleotide probes comprise a sequence complementary to a region of the ncRNAs of interest. The oligonucleotide probes may be DNA or RNA. The oligonucleotide probes are preferably DNA. In a preferred embodiment, the oligonucleotide probes are biotinylated and the reagent for purifying the probe-target complexes is a streptavidin-coated substrate, e.g, a streptavidin-coated magnetic particle, e.g., T1 streptavidin coated magnetic bead. In a preferred embodiment, the ncRNAs of interest is lncRNAs. The length of oligonucleotide probes specific for lncRNAs may be from 30 to 80 nucleotides, e.g., from 40 to 70, from 40 to 60, or about 50 nucleotides.

[0135] A further embodiment of the invention relates to a targeted sequencing panel for next generation sequencing, comprising nucleic acids specific for at least one ncRNA (miRNA and/or lncRNA) selected from 406 miRNAs listed in Table 1 and 1008 lncRNAs listed in Table 5 in the biological sample.

[0136] In some embodiments, the at least one ncRNA (miRNA and/or lncRNA) comprises or consists of ncRNAs selected from the group consisting of:
[0137] (i) miR.99a.5p;
[0138] (ii) 7 miRNAs of miR.99a.5p, miR.378d, miR.100.5p, miR.193b.3p, miR.34a.5p, miR.1306.5p, and miR.1229.3p;
[0139] (iii) 3 miRNAs of miR1220.3p, miR378d and miR99a.5p;
[0140] (iv) 11 mRNAs of miR.99a.5p, miR.1229.3p, miR.100.5p, miR.378d, miR.193b.3p, miR.1306.5p, miR.195.5p, miR.532.3p, miR.125b.5p, miR.34a.5p, and miR.6880.5p;
[0141] (v) 15 miRNAs of miR.23a.5p, miR.6880.5p, miR.7111.5p, miR.6812.5p, miR.6738.5p, miR.5196.5p, miR.6894.5p, miR.8085, miR.4463, miR.2392, miR.144.3p, miR.192.5p, miR.193b.3p, miR.194.5p, and miR.122.5p;
[0142] (vi) 13 lncRNAs of lnc-DLG5-1:1, lnc-EBLN1-1:4, lnc-FAT1-7:2, lnc-PRR5-5:1, lnc-RBKS-6:1, lnc-FOXD4L5-35:1, lnc-TENM3-3:3, lnc-FAM133B-2:1, lnc-ZNF726-1:3, lnc-AP3M1-1:1, lnc-DUSP10-6:1, lnc-TPPP-1:2, and LINC01206:20;
[0143] (vii) 7 lncRNAs of LINC02345:11, lnc-EBLN1-1:4, lnc-TPPP-1:2, lnc-TENM3-3:3, lnc-FAT1-7:2, lnc-DKK1-5:3, and lnc-TACSTD2-2:4;
[0144] (viii) 12 Inc RNAs of lnc-TPPP-1:2, ARRDC3-AS1:7, lnc-TENM3-3:5, lnc-TENM3-3:4, lnc-QRFP-5:1, lnc-CRYBB1-1:1, lnc-MGST3-1:3, lnc-FAM49B-8:1, HAND2-AS1:70, lnc-TMEM185B-12:7, lnc-CNDP1-7:1, and lnc-C21orf58-1:2;
[0145] (ix) 3 lncRNAs of lnc-TENM3-3:3, lnc-MARCH4-2:7, and lnc-LRRC1-5:2;
[0146] (x) 7 lncRNAs of lnc-TPPP-1:2, lnc-TENM3-3:3, lnc-TMEM185B-12:7, lnc-NAXD-6:5, lnc-HECA-6:1, lnc-COMMD6-10:1, and MIR29B2CHG:46;
[0147] (xi) 18 lncRNAs of lnc-TPPP-1:2, LINC02345:11, lnc-ZNF273-4:4, lnc-TACC2-8:6, LINC01206:20, lnc-05orf67-3:1, HAND2-AS1:58, lnc-PRDM9-20:1, lnc-CLK1-1:7, lnc-DNALI1-5:4, RORB-AS1:6, lnc-TPPP-1:3, lnc-BMS1-2:1, lnc-ADRB1-4:1, lnc-XXYLT1-5:1, MIR99AHG:104, LINC01748:17, and lnc-AKR1E2-15:1;
[0148] (xii) 28 miRNAs listed in Table 2;
[0149] (xiii) 74 miRNAs listed in Table 3;
[0150] (xiv) 33 lncRNAs listed in Table 6;
[0151] (xv) 60 lncRNAs listed in Table 7;
[0152] (xvi) 32 lncRNAs listed in Table 8;
[0153] (xvii) 84 lncRNAs listed in Table 9; and
[0154] (xviii) 94 lncRNAS listed in Table 10.

[0155] The invention also relates to the applications of the method for development of new therapeutic strategies (drug candidates) tested in clinical trials for the treatment of a cognitive disorder including but not limited to Alzheimer disease, wherein the method can be used (a) before starting the treatment for the selection of patients who would then be recruited in clinical trial; thus the test will enhance the likelihood for treating patient population that benefits from the tested therapeutic strategy(ies) while avoiding recruitment of patient subpopulation patients who do not benefit from this tested new drug candidate(s) and/or (b) for monitoring the response(s) including efficacy of the tested therapeutic strategy(ies) once treatment with the new tested drug candidate starts.

[0156] In a further aspect, the invention also relates to methods of detection. For example, the invention contemplates a method for the detection of at least one ncRNA (miRNA and/or lncRNA). In one aspect, the method comprises:
[0157] (a) isolating a biological sample from the subject;
[0158] (b) detecting a level of expression in a ncRNA signature, the ncRNA signature comprising or consisting of at least one ncRNA selected from 406 miRNAs listed in Table 1 and 1008 lncRNAs listed in Table 5 in the biological sample from said subject.

[0159] In some embodiments, the ncRNA signature comprises or consists of ncRNAs selected from the group consisting of:
[0160] (i) miR.99a.5p;
[0161] (ii) 7 miRNAs of miR.99a.5p, miR.378d, miR.100.5p, miR.193b.3p, miR.34a.5p, miR.1306.5p, and miR.1229.3p;
[0162] (iii) 3 miRNAs of miR1220.3p, miR378d and miR99a.5p;
[0163] (iv) 11 mRNAs of miR.99a.5p, miR.1229.3p, miR.100.5p, miR.378d, miR.193b.3p, miR.1306.5p, miR.195.5p, miR.532.3p, miR.125b.5p, miR.34a.5p, and miR.6880.5p;
[0164] (v) 15 miRNAs of miR.23a.5p, miR.6880.5p, miR.7111.5p, miR.6812.5p, miR.6738.5p, miR.5196.5p, miR.6894.5p, miR.8085, miR.4463, miR.2392, miR.144.3p, miR.192.5p, miR.193b.3p, miR.194.5p, and miR.122.5p;
[0165] (vi) 13 lncRNAs of lnc-DLG5-1:1, lnc-EBLN1-1:4, lnc-FAT1-7:2, lnc-PRR5-5:1, lnc-RBKS-6:1, lnc-FOXD4L5-35:1, lnc-TENM3-3:3, lnc-FAM133B-2:1, lnc-ZNF726-1:3, lnc-AP3M1-1:1, lnc-DUSP10-6:1, lnc-TPPP-1:2, and LINC01206:20;
[0166] (vii) 7 lncRNAs of LINC02345:11, lnc-EBLN1-1:4, lnc-TPPP-1:2, lnc-TENM3-3:3, lnc-FAT1-7:2, lnc-DKK1-5:3, and lnc-TACSTD2-2:4;
[0167] (viii) 12 Inc RNAs of lnc-TPPP-1:2, ARRDC3-AS1:7, lnc-TENM3-3:5, lnc-TENM3-3:4, lnc-QRFP-5:1, lnc-CRYBB1-1:1, lnc-MGST3-1:3, lnc-FAM49B-8:1, HAND2-AS1:70, lnc-TMEM185B-12:7, lnc-CNDP1-7:1, and lnc-C21orf58-1:2;
[0168] (ix) 3 lncRNAs of lnc-TENM3-3:3, lnc-MARCH4-2:7, and lnc-LRRC1-5:2;
[0169] (x) 7 lncRNAs of lnc-TPPP-1:2, lnc-TENM3-3:3, lnc-TMEM185B-12:7, lnc-NAXD-6:5, lnc-HECA-6:1, lnc-COMMD6-10:1, and MIR29B2CHG:46;
[0170] (xi) 18 lncRNAs of lnc-TPPP-1:2, LINC02345:11, lnc-ZNF273-4:4, lnc-TACC2-8:6, LINC01206:20, lnc-05orf67-3:1, HAND2-AS1:58, lnc-PRDM9-20:1, lnc-CLK1-1:7, lnc-DNALI1-5:4, RORB-AS1:6, lnc-TPPP-1:3, lnc-BMS1-2:1, lnc-ADRB1-4:1, lnc-XXYLT1-5:1, MIR99AHG:104, LINC01748:17, and lnc-AKR1E2-15:1;
[0171] (xii) 28 miRNAs listed in Table 2;
[0172] (xiii) 74 miRNAs listed in Table 3;
[0173] (xiv) 33 lncRNAs listed in Table 6;
[0174] (xv) 60 lncRNAs listed in Table 7;
[0175] (xvi) 32 lncRNAs listed in Table 8;
[0176] (xvii) 84 lncRNAs listed in Table 9; and
[0177] (xviii) 94 lncRNAS listed in Table 10.

[0178] The expression level of miRNAs and/or lncRNAs may be determined by any technology known by a man skilled in the art. In particular, the expression level of miRNAs and/or lncRNAs is determined by measuring the amount of nucleic acid transcripts of each miRNA or lncRNAs. The amount of nucleic acid transcripts can be measured by any technology known by a man skilled in the art. The measure may be carried out directly on an extracted RNA sample or on retrotranscribed complementary DNA (cDNA) prepared from extracted RNA by technologies well-known in the art. From the RNA or cDNA sample, the amount of nucleic acid transcripts may be measured using any technology known by a man skilled in the art, including nucleic acid microarrays, quantitative PCR, sequencing (e.g., next generation sequencing), FIMAP quantification, and hybridization with a labeled probe.

[0179] In some embodiments, the expression level of miRNAs and/or lncRNAs is determined using sequencing, e.g., next generation sequencing. Sequencing may be carried out after converting extracted RNA to cDNA using reverse transcriptase or RNA molecules may be directly sequenced. In a particular embodiment, which should not be considered as limiting the scope of the invention, the measurement of the expression level using next generation sequencing may be performed as follows. Briefly, RNA is extracted from a sample (e.g., blood sample). After removing rRNA, RNA samples are then reverse transcribed into cDNA. To ensure strand specificity, single stranded cDNA is first synthetized using Super-Script II reverse transcriptase and random primers in the presence of Actinomycin D, and then converted to double stranded cDNA with the second strand marking mix that incorporates dUTP in place of dTTP. Resulting blunt ended cDNA are purified using AMPure XP magnetic beads. After a 3′end adenylation step, adaptor is attached to cDNA. So obtained cDNA (sequencing library) may be amplified by PCR. The sequencing libraries can be sequenced by any next generation sequencing technology known by a man skilled in the art.

[0180] In some embodiments, the measurement of the expression level of ncRNAs, e.g., by sequencing (e.g., next generation sequencing), is facilitated by capturing and enriching nucleic acids (RNA or cDNA) corresponding to ncRNAs of interest prior to the measurement. As used herein, enrichment refers to increasing the percentage of the nucleic acids of interest in the sample relative to the initial sample by selectively purifying the nucleic acids of interest. The enrichment of nucleic acids corresponding to ncRNAs of interest can be carried out on extracted RNA sample or cDNA sample prepared from extracted RNA. In some embodiments, nucleic acids corresponding to ncRNAs of interest are captured and enriched by hybridizing RNA or cDNA sample to oligonucleotide probes specific for ncRNAs of interest (e.g. oligonucleotide probes comprising a sequence complementary to a region of ncRNAs of interest) under conditions allowing for hybridization of the probes and target nucleic acids to form probe-target nucleic acid complexes. Probes may be DNA or RNA, preferably DNA. The probe-target nucleic acid complexes can be purified by any technology known by a man skilled in the art. In a preferred embodiment, probes are biotinylated. The biotinylated probe-target nucleic acid complexes can be purified by using a streptavidin-coated substrate, e.g, a streptavidin-coated magnetic particle, e.g., T1 streptavidin coated magnetic bead. In a preferred embodiment, the ncRNAs measured by this method are lncRNAs. The length of probes specific for lncRNAs may be from 30 to 80 nucleotides, e.g., from 40 to 70, from 40 to 60, or about 50 nucleotides.

[0181] In some embodiments, the expression level of miRNAs and/or lncRNAs may be determined using quantitative PCR. Quantitative, or real-time, PCR is a well-known and easily available technology for those skilled in the art and does not need a precise description. In a particular embodiment, which should not be considered as limiting the scope of the invention, the determination of the expression profile using quantitative PCR may be performed as follows. Briefly, the real-time PCR reactions are carried out using the TaqMan Universal PCR Master Mix (Applied Biosystems). 6 μl cDNA is added to a 9 μl PCR mixture containing 7.5 μl TaqMan Universal PCR Master Mix, 0.75 μl of a 20X mixture of probe and primers and 0.75μ1 water. The reaction consists of one initiating step of 2 min at 50 deg. C., followed by 10 min at 95 deg. C., and 40 cycles of amplification including 15 sec at 95 deg. C. and 1 min at 60 deg. C. The reaction and data acquisition can be performed using the ABI 7900HT Fast Real-Time PCR System (Applied Biosystems). The number of template transcript molecules in a sample is determined by recording the amplification cycle in the exponential phase (cycle threshold or C_{Q} or C_{T}), at which time the fluorescence signal can be detected above background fluorescence. Thus, the starting number of template transcript molecules is inversely related to C_{T}.

[0182] In some embodiments, the expression level of miRNAs and/or lncRNAs may be determined by the use of a nucleic acid microarray. A nucleic acid microarray consists of different nucleic acid probes that are attached to a substrate, which can be a microchip, a glass slide or a microsphere-sized bead. A microchip may be constituted of polymers, plastics, resins, polysaccharides, silica or silica-based materials, carbon, metals, inorganic glasses, or nitrocellulose. Probes can be nucleic acids such as cDNAs (“cDNA microarray”) or oligonucleotides (“oligonucleotide microarray”). To determine the expression profile of a target nucleic acid sample, said sample is labelled, contacted with the microarray in hybridization conditions, leading to the formation of complexes between target nucleic acids that are complementary to probe sequences attached to the microarray surface. The presence of labelled hybridized complexes is then detected. Many variants of the microarray hybridization technology are available to the man skilled in the art.

[0183] In some embodiments, the expression level of miRNAs and/or lncRNAs may be determined by FIMAP quantification. Briefly, lncRNAs and miRNAs are amplified by PCR using primers with the same sequences as for qPCR that are chemically modified. Forward primers are phosphorylated in 5′ and Reverse primers biotinylated in 5′. PCR products are digested with exonuclease to eliminate the phosphorylated strand and keep only the biotinylated ones. Biotinylated PCR products are incubated with coded silica microdisks coated with oligos complementary to the RNAs of interest (one code per target oligo), and hybridized products are revealed by addition of a fluorescent streptavidin conjugate. The expression level of miRNAs and/or lncRNAs is determined by measuring fluorescence signal.

[0184] In a still further aspect, the method of detection contemplates the use of a reagent to measure or detect the one or more miRNAs and/or one or more lncRNA. By “reagent” is meant a reagent that specifically allows the determination of the miRNA/gene or the lncRNA expression profile, i.e. a reagent specifically intended for the specific determination of the expression level of the miRNA/gene present in the miRNA/gene expression profile or the lncRNA present in the lncRNA expression profile. Examples include e.g. amplification primer pairs (forward and reward) and/or probes specific for the miRNA/gene present in the miRNA/gene expression profile and/or or the lncRNA present in the lncRNA expression profile. This definition excludes generic reagents useful for the determination of the expression level of any other miRNA/gene and generic reagents useful for the determination of the expression level of any other lncRNA.

[0185] In yet a further aspect, the method of detection comprises detecting one or more miRNAs and/or lncRNA from a biological sample, wherein the biological sample is selected from blood, plasma, serum, urine, cerebrospinal fluid, tear, saliva. In some embodiments, the biological sample is blood.

[0186] By “treating” or “treatment” of a subject being at risk to develop or having a cognitive disorder, particularly a progressive impairment or loss of cognitive function or dementia, e.g. AD, is meant administering or administration of a regimen to the subject in need thereof such that at least one symptom of the disorder or disease is cured, alleviated, remedied or improved. According to the present invention, depending on the diagnosing results, the subject is submitted to an adapted therapeutic treatment and is further monitored. The monitoring of the subject based on the miRNA signature and/or lncRNA signature of the invention allows to further adapt or modify the therapeutic treatment, e.g. increasing the drug amount, administering a combination of drugs to obtain a synergy effect, or replacing the drug by an effective amount of another drug.

[0187] The invention also relates to the modification of a therapeutic strategy in subjects suffering from cognitive disorder who have been diagnosed and/or monitored using a method for (in vitro) diagnosis or monitoring of a progressive impairment or loss of cognitive function or dementia according to the invention.

[0188] According to the invention, the miRNAs and/or the lncRNAs of the invention may be used in combination with one or more biomarkers currently used for diagnosing a cognitive disorder including but not limited to AD. Examples of such biomarkers include without any limitation the biomarkers as disclosed in U.S. Pat. Nos. 9,377,472, 7,897,786 and in U.S. Pat. No. 6,703,212, the contents thereof being included herein by reference. The method of the invention combining the miRNAs and/or the lncRNAs of the invention with one or more known biomarkers may allow enhanced accuracy of diagnosis; or differential diagnosis; and a more efficient and successful drug development, e.g.

[0189] enhanced accuracy for patient stratification before recruitment in clinical trials and monitoring of the efficacy of approved therapies or novel drugs under development.

[0190] According to the invention, the miRNAs and/or the lncRNAs of the invention may be used in combination with one or more tests currently used for diagnosing a cognitive disorder including but not limited to AD and/or for differential diagnostic purposes. Examples of such tests include without any limitation the neuropsychological tests, such as MMSE, MoCA, and the neuroimaging methods, in particular volumetric MRI. The method of the invention combining the miRNAs and/or the lncRNAs of the invention with one or more known biomarkers may allow enhanced accuracy of diagnosis; or differential diagnosis; and a more efficient and successful drug development, e.g. enhanced accuracy for patient stratification before recruitment in clinical trials and monitoring of the efficacy of approved therapies or novel drugs under development.

[0191] To identify miRNA signatures involved specifically in the pathogenesis of AD and mild cognitive impairment (MCI) of AD type, a total of 2083 miRNAs in samples from different groups, including a group of patients with AD or MCI of AD type and group of cognitively intact healthy controls with no brain imaging abnormalities, have been screened. Subsequently miRNA profiling in all samples, 406 miRNAs have been detected above the threshold. By comparison of miRNA-expression levels measured in the samples of the different groups, the miRNA differentially expressed in the samples of the control group as compared to the expression level in the samples of patient group diagnosed as having AD or cognitive impairment of AD type (at the Neurology department of clinical site, based on neurocognitive and neuropsychological tests and neuroimaging tests and on cerebrospinal fluid biomarkers: beta-amyloid peptide 1-42 (Aβ42) and tau (total and/or phosphorylated) were identified as miRNA biomarker candidates.

[0192] To identify lncRNA signatures involved specifically in the pathogenesis of AD and mild cognitive impairment (MCI) of AD type, a total of 127802 lncRNAs in samples from different groups, including a group of patients with AD or MCI of AD type and group of cognitively intact healthy controls with no brain imaging abnormalities, have been screened. Subsequently lncRNA profiling in all samples, 19867 lncRNAs have been detected above the threshold. By comparison of lncRNA-expression levels measured in the samples of the different groups, the lncRNA differentially expressed in the samples of the control group as compared to the expression level in the samples of patient group diagnosed as having AD or cognitive impairment of AD type (at the Neurology department of clinical sites, based on neurocognitive and neuropsychological tests and neuroimaging tests and on cerebrospinal fluid biomarkers: beta-amyloid peptide 1-42 (Aβ42) and tau (total and/or phosphorylated) were identified as lncRNA biomarker candidates.

[0193] Expression levels were analyzed using a two-tailed Welch t test and/or Wilcoxon Mann-Whitney test between two groups. Significant differential expression was identified as p<0.05. Fold change and AUC (Area Under the Curve) are calculated for each miRNA and lncRNA and for each tested condition. miRNA candidates were also selected when differential expression was determined based on fold-changes ≥1.49-fold or ≤0.75-fold changes and/or AUC>0.6 or <0.4, are indicated in Tables 2, 3 and 4.

[0194] lncRNA candidates were also selected when differential expression was determined based on fold-changes ≥1.6 (or ≤0.6) and/or an AUC≥0.80 (or <0.20), are indicated in Tables 6 and 7. Random Forest algorithm (Breimann 2001, Breiman and Cutler 2001) was used to build the model and also used to select the top miRNAs and/or the top lncRNAs. A predictive model based on the combination of the top 2-20 miRNAs and/or lncRNAs enables to predict the disease with an accuracy of ≥80%.

[0195] Out of the 2083 miRNA measured, 406 miRNA showed expression levels above threshold. Sequences of the 406 miRNAs are shown in Table 1.

TABLE 1
Sequences of 406 miRNAs

| miRNA | Sequence | miRNA | Sequence |
|---|---|---|---|
| let.7a.5p | UGAGGUAGUAGGUUGUAUAGUU | miR.376a.3p | AUCAUAGAGGAAAAUCCACGU |
| let.7b.5p | UGAGGUAGUAGGUUGUGUGGUU | miR.376c.3p | AACAUAGAGGAAAUUCCACGU |
| let.7c.5p | UGAGGUAGUAGGUUGUAUGGUU | miR.377.3p | AUCACACAAAGGCAACUUUUGU |
| let.7d.3p | CUAUACGACCUGCUGCCUUUCU | miR.378a.3p | ACUGGACUUGGAGUCAGAAGGC |
| let.7d.5p | AGAGGUAGUAGGUUGCAUAGUU | miR.378d | ACUGGACUUGGAGUCAGAAA |
| let.7e.5p | UGAGGUAGGAGGUUGUAUAGUU | miR.378f | ACUGGACUUGGAGCCAGAAG |
| let.7f.5p | UGAGGUAGUAGAUUGUAUAGUU | miR.378g | ACUGGGCUUGGAGUCAGAAG |
| let.7g.5p | UGAGGUAGUAGUUUGUACAGUU | miR.378i | ACUGGACUAGGAGUCAGAAGG |
| let.7i.5p | UGAGGUAGUAGUUUGUGCUGUU | miR.381.3p | UAUACAAGGGCAAGCUCUCUGU |
| miR.100.5p | AACCCGUAGAUCCGAACUUGUG | miR.382.5p | GAAGUUGUUCGUGGUGGAUUCG |
| miR.101.3p | UACAGUACUGUGAUAACUGAA | miR.3912.3p | UAACGCAUAAUAUGGACAUGU |
| miR.103a.2.5p | AGCUUCUUUACAGUGCUGCCUUG | miR.3912.5p | AUGUCCAUAUUAUGGGUUAGU |
| miR.103a.3p | AGCAGCAUUGUACAGGGCUAUGA | miR.3937 | ACAGGCGGCUGUAGCAAUGGGG |
| | | | G |
| miR.106a.5p | AAAAGUGCUUACAGUGCAGGUAG | miR.3940.5p | GUGGGUUGGGGCGGGCUCUG |
| miR.106b.3p | CCGCACUGUGGGUACUUGCUGC | miR.409.3p | GAAUGUUGCUCGGUGAACCCCU |
| miR.106b.5p | UAAAGUGCUGACAGUGCAGAU | miR.410.3p | AAUAUAACACAGAUGGCCUGU |
| miR.107 | AGCAGCAUUGUACAGGGCUAUCA | miR.424.3p | CAAAACGUGAGGCGCUGCUAU |
| miR.10a.5p | UACCCUGUAGAUCCGAAUUUGUG | miR.425.3p | AUCGGGAAUGUCGUGUCCGCCC |
| miR.10b.5p | UACCCUGUAGAACCGAAUUUGUG | miR.425.5p | AAUGACACGAUCACUCCCGUUG |
| | | | A |
| miR.1202 | GUGCCAGCUGCAGUGGGGGAG | miR.4257 | CCAGAGGUGGGGACUGAG |
| miR.1207.5p | UGGCAGGGAGGCUGGGAGGGG | miR.4270 | UCAGGGAGUCAGGGGAGGGC |
| miR.122.5p | UGAGCCCCUGUGCCGCCCCCAG | miR.4274 | CAGCAGUCCCUCCCCCUG |
| miR.1225.3p | GUGGGUACGGCCCAGUGGGGGG | miR.4279 | CUCUCCUCCCGGCUUC |
| miR.1225.5p | UGGAGUGUGACAAUGGUGUUUG | miR.4291 | UUCAGCAGGAACAGCU |
| miR.1228.3p | UCACACCUGCCUCGCCCCCC | miR.4292 | CCCCUGGGCCGGCCUUGG |
| miR.1229.3p | CUCUCACCACUGCCCUCCCACAG | miR.4306 | UGGAGAGAAAGGCAGUA |
| miR.1233.3p | UGAGCCCUGUCCUCCCGCAG | miR.431.5p | UGUCUUGCAGGCCGUCAUGCA |
| miR.1234.3p | UCGGCCUGACCACCCACCCCAC | miR.432.5p | UCUUGGAGUAGGUCAUUGGGU |
| | | | GG |
| miR.1237.5p | CGGGGGCGGGGCCGAAGCGCG | miR.4417 | GGUGGGCUUCCCGGAGGG |
| miR.1244 | AAGUAGUUGGUUUGUAUGAGAU | miR.4429 | AAAAGCUGGGCUGAGAGGCG |
| | GGUU | | |
| miR.1247.3p | CCCCGGGAACGUCGAGACUGGAG | miR.4430 | AGGCUGGAGUGAGCGGAG |
| | C | | |
| miR.1249 | AGGAGGGAGGAGAUGGGCCAAGU | miR.4433b.5p | AUGUCCCACCCCCACUCCUGU |
| | U | | |
| miR.1254 | AGCCUGGAAGCUGGAGCCUGCAG | miR.4442 | GCCGGACAAGAGGGAGG |
| | U | | |
| miR.1255b.2.3p | AACCACUUUCUUUGCUCAUCCA | miR.4449 | CGUCCCGGGGCUGCGCGAGGCA |
| miR.125a.5p | UCCCUGAGACCCUUUAACCUGUG | miR.4459 | CCAGGAGGCGGAGGAGGUGGAG |
| | A | | |
| miR.125b.5p | UCCCUGAGACCCUAACUUGUGA | miR.4461 | GAUUGAGACUAGUAGGGCUAGG |
| | | | C |
| miR.126.3p | UCGUACCGUGAGUAAUAAUGCG | miR.4463 | GAGACUGGGGUGGGGCC |
| miR.126.5p | CAUUAUUACUUUUGGUACGCG | miR.4478 | GAGGCUGAGCUGAGGAG |
| miR.1273a | GGGCGACAAAGCAAGACUCUUUC | miR.4481 | GGAGUGGGCUGGUGGUU |
| | UU | | |
| miR.1273c | GGCGACAAAACGAGACCCUGUC | miR.4484 | AAAAGGCGGGAGAAGCCCCA |
| miR.1273d | GAACCCAUGAGGUUGAGGCUGCA | miR.4486 | GCUGGGCGAGGCUGGCA |
| | GU | | |
| miR.1273e | UUGCUUGAACCCAGGAAGUGGA | miR.4496 | GAGGAAACUGAAGCUGAGAGGG |
| miR.1273g.5p | GGUGGUUGAGGCUGCAGUAAGU | miR.4505 | AGGCUGGGCUGGGACGGA |
| miR.1273h.5p | CUGGGAGGUCAAGGCUGCAGU | miR.4507 | CUGGGUUGGGCUGGGCUGGG |
| miR.1275 | GUGGGGGAGAGGCUGUC | miR.451a | AAACCGUUACCAUUACUGAGUU |
| miR.128.3p | UCACAGUGAACCGGUCUCUUU | miR.4530 | CCCAGCAGGACGGGAGCG |
| miR.1285.5p | GAUCUCACUUUGUUGCCCAGG | miR.4534 | GGAUGGAGGAGGGGUCU |
| miR.1287.5p | UGCUGGAUCAGUGGUUCGAGUC | miR.4539 | GCUGAACUGGGCUGAGCUGGGC |
| miR.1290 | UGGAUUUUUGGAUCAGGGA | miR.454.3p | UAGUGCAAUAUUGCUUAUAGG |
| | | | GU |
| miR.1291 | UGGCCCUGACUGAAGACCAGCAG | miR.4632.5p | GAGGGCAGCGUGGGUGUGGCGG |
| | U | | A |
| miR.1299 | UUCUGGAAUUCUGUGUGAGGGA | miR.4646.5p | ACUGGGAAGAGGAGCUGAGGGA |
| miR.1301.3p | UUGCAGCUGCCUGGGAGUGACUU | miR.4655.3p | ACCCUCGUCAGGUCCCCGGGG |
| | C | | |
| miR.1303 | UUUAGAGACGGGGUCUUGCUCU | miR.4655.5p | CACCGGGGAUGGCAGAGGGUCG |
| miR.1304.3p | UCUCACUGUAGCCUCGAACCCC | miR.4656 | UGGGCUGAGGGCAGGAGGCCUG |
| | | | U |
| miR.1306.5p | CCACCUCCCCUGCAAACGUCCA | miR.4667.5p | ACUGGGGAGCAGAAGGAGAACC |
| miR.130'7.3p | ACUCGGCGUGGCGUCGGUCGUG | miR.4690.5p | GAGCAGGCGAGGCUGGGCUGAA |
| miR.1307.5p | UCGACCGGACCUCGACCGGCU | miR.4695.5p | CAGGAGGCAGUGGGCGAGCAGG |
| miR.130a.3p | CAGUGCAAUGUUAAAAGGGCAU | miR.4706 | AGCGGGGAGGAAGUGGGCGCUG |
| | | | CUU |
| miR.130b.3p | CAGUGCAAUGAUGAAAGGGCAU | miR.4707.3p | AGCCCGCCCCAGCCGAGGUUCU |
| miR.130b.5p | ACUCUUUCCCUGUUGCACUAC | miR.4726.5p | AGGGCCAGAGGAGCCUGGAGUG |
| | | | G |
| miR.134.5p | UGUGACUGGUUGACCAGAGGGG | miR.4728.5p | UGGGAGGGGAGAGGCAGCAAGC |
| | | | A |
| miR.136.5p | ACUCCAUUUGUUUUGAUGAUGGA | miR.4734 | GCUGCGGGCUGCGGUCAGGGCG |
| miR.138.1.3p | GCUACUUCACAACACCAGGGCC | miR.4758.5p | GUGAGUGGGAGCCGGUGGGGCU |
| | | | G |
| miR.139.5p | UCUACAGUGCACGUGUCUCCAGU | miR.4763.3 | AGGCAGGGGCUGGUGCUGGGCG |
| | | | GG |
| miR.140.5p | CAGUGGUUUUACCCUAUGGUAG | miR.4784 | UGAGGAGAUGCUGGGACUGA |
| miR.141.3p | UAACACUGUCUGGUAAAGAUGG | miR.4793.5 | ACAUCCUGCUCCACAGGGCAGA |
| | | | GG |
| miR.142.5p | CAUAAAGUAGAAAGCACUACU | miR.4800.3p | CAUCCGUCCGUCUGUCCAC |
| miR.143.3p | UGAGAUGAAGCACUGUAGCUC | miR.4800.5p | AGUGGACCGAGGAAGGAAGGA |
| miR.144.3p | UACAGUAUAGAUGAUGUACU | miR.484 | UCAGGCUCAGUCCCCUCCCGAU |
| miR.144.5p | GGAUAUCAUCAUAUACUGUAAG | miR.485.3p | GUCAUACACGGCUCUCCUCUCU |
| miR.145.5p | GUCCAGUUUUCCCAGGAAUCCCU | miR.486.5p | UCCUGUACUGAGCUGCCCCGAG |
| miR.146a.5p | UGAGAACUGAAUUCCAUGGGUU | miR.487b.3p | AAUCGUACAGGGUCAUCCACUU |
| miR.146b.5p | UGAGAACUGAAUUCCAUAGGCU | miR.491.5p | AGUGGGGAACCCUUCCAUGAGG |
| miR.148a.3p | UCAGUGCACUACAGAACUUUGU | miR.494.3p | UGAAACAUACACGGGAAACCUC |
| miR.148b.3p | UCAGUGCAUCACAGAACUUUGU | miR.495.3p | AAACAAACAUGGUGCACUUCUU |
| miR.149.3p | AGGGAGGGACGGGGGCUGUGC | miR.5001.5p | AGGGCUGGACUCAGCGGCGGAG |
| | | | CU |
| miR.150.5p | UCUCCCAACCCUUGUACCAGUG | miR.5006.5p | UUGCCAGGGCAGGAGGUGGAA |
| miR.151a.3p | CUAGACUGAAGCUCCUUGAGG | miR.502.3p | AAUGCACCUGGGCAAGGAUUCA |
| miR.152.3p | UCAGUGCAUGACAGAACUUGG | miR.504.3p | GGGAGUGCAGGGCAGGGUUUC |
| miR.154.5p | UAGGUUAUCCGUGUUGCCUUCG | miR.505.3p | CGUCAACACUUGCUGGUUUCCU |
| miR.155.5p | UUAAUGCUAAUCGUGAUAGGGGU | miR.5196.5p | AGGGAAGGGGACGAGGGUUGGG |
| miR.15a.5p | UAGCAGCACAUAAUGGUUUGUG | miR.532.3p | CCUCCCACACCCAAGGCUUGCA |
| miR.15b.5p | UAGCAGCACAUCAUGGUUUACA | miR.532.5p | CAUGCCUUGAGUGUAGGACCGU |
| miR.16.5p | UAGCAGCACGUAAAUAUUGGCG | miR.541.3p | UGGUGGGCACAGAAUCUGGACU |
| miR.17.3p | ACUGCAGUGAAGGCACUUGUAG | miR.543 | AAACAUUCGCGGUGCACUUCUU |
| miR.17.5p | CAAAGUGCUUACAGUGCAGGUAG | miR.548ak | AAAAGUAACUGCGGUUUUUGA |
| miR.181a.5p | AACAUUCAACGCUGUCGGUGAGU | miR.548d.5p | AAAAGUAAUUGUGGUUUUUGC |
| | | | C |
| miR.181b.5p | AACAUUCAUUGCUGUCGGUGGGU | miR.551b.3p | GCGACCCAUACUUGGUUUCAG |
| miR.181c.5p | AACAUUCAACCUGUCGGUGAGU | miR.5585.3p | CUGAAUAGCUGGGACUACAGGU |
| miR.181d.5p | AACAUUCAUUGUUGUCGGUGGGU | miR.5587.3p | GCCCCGGGCAGUGUGAUCAUC |
| miR.185.3p | AGGGGCUGGCUUUCCUCUGGUC | miR.561.3p | CAAAGUUUAAGAUCCUUGAAG |
| | | | U |
| miR.185.5p | UGGAGAGAAAGGCAGUUCCUGA | miR.566 | GGGCGCCUGUGAUCCCAAC |
| miR.186.3p | GCCCAAAGGUGAAUUUUUUGGG | miR.5694 | CAGAUCAUGGGACUGUCUCAG |
| miR.186.5p | CAAAGAAUUCUCCUUUUGGGCU | miR.5703 | AGGAGAAGUCGGGAAGGU |
| miR.187.3p | UCGUGUCUUGUGUUGCAGCCGG | miR.5739 | GCGGAGAGAGAAUGGGGAGC |
| miR.187.5p | GGCUACAACACAGGACCCGGGC | miR.574.3p | CACGCUCAUGCACACACCCACA |
| miR.18a.5p | UAAGGUGCAUCUAGUGCAGAUAG | miR.574.5p | UGAGUGUGUGUGUGUGAGUGU |
| | | | GU |
| miR.18b.5p | UAAGGUGCAUCUAGUGCAGUUAG | miR.584.5p | UUAUGGUUUGCCUGGGACUGAG |
| miR.1908.5p | CGGCGGGGACGGCGAUUGGUC | miR.590.5p | GAGCUUAUUCAUAAAAGUGCAG |
| miR.191.5p | UCUGCCCCCUCCGCUGCUGCCA | miR.6069 | GGGCUAGGGCCUGCUGCCCCC |
| miR.1913 | GGAGGGGUCCCGCACUGGGAGG | miR.6085 | AAGGGGCUGGGGGAGCACA |
| miR.1914.3p | CCCUGUGCCCGGCCCACUUCUG | miR.6086 | GGAGGUUGGGAAGGGCAGAG |
| miR.1914.5p | CCCCAGGGCGACGCGGCGGG | miR.6088 | AGAGAUGAAGCGGGGGGGCG |
| miR.1915.3p | CAACGGAAUCCCAAAAGCAGCUG | miR.612 | GCUGGGCAGGGCUUCUGAGCUC |
| | | | CUU |
| miR.192.5p | CUGACCUAUGAAUUGACAGCC | miR.6124 | GGGAAAAGGAAGGGGGAGGA |
| miR.193a.3p | AACUGGCCUACAAAGUCCCAGU | miR.6126 | GUGAAGGCCCGGCGGAGA |
| miR.193a.5p | UGGGUCUUUGCGGGCGAGAUGA | miR.6127 | UGAGGGAGUGGGUGGGAGG |
| miR.193b.3p | AACUGGCCCUCAAAGUCCCGCU | miR.6131 | GGCUGGUCAGAUGGGAGUG |
| miR.194.5p | UGUAACAGCAACUCCAUGUGGA | miR.6165 | CAGCAGGAGGUGAGGGGAG |
| miR.195.5p | UAGCAGCACAGAAAUAUUGGC | miR.625.5p | AGGGGGAAAGUUCUAUAGUCC |
| miR.197.3p | UUCACCACCUUCUCCACCCAGC | miR.629.5p | UGGGUUUACGUUGGGAGAACU |
| miR.197.5p | CGGGUAGAGAGGGCAGUGGGAGG | miR.6511b.3p | CCUCACCACCCCUUCUGCCUGC |
| | | | A |
| miR.1976 | CCUCCUGCCCUCCUUGCUGU | miR.652.3p | AAUGGCGCCACUAGGGUUGUG |
| miR.199a.3p | ACAGUAGUCUGCACAUUGGUUA | miR.654.5p | UGGUGGGCCGCAGAACAUGUGC |
| miR.199a.5p | CCCAGUGUUCAGACUACCUGUUC | miR.658 | GGCGGAGGGAAGUAGGUCCGUU |
| | | | GGU |
| miR.19a.3p | UGUGCAAAUCUAUGCAAAACUGA | miR.660.5p | UACCCAUUGCAUAUCGGAGUUG |
| miR.19b.3p | UGUGCAAAUCCAUGCAAAACUGA | miR.663b | GGUGGCCCGGCCGUGCCUGAGG |
| miR.204.3p | GCUGGGAAGGCAAAGGGACGU | miR.664a.3p | UAUUCAUUUAUCCCCAGCCUAC |
| | | | A |
| miR.205.5p | UCCUUCAUUCCACCGGAGUCUG | miR.664b.5p | UGGGCUAAGGGAGAUGAUUGG |
| | | | GUA |
| miR.20a.5p | UAAAGUGCUUAUAGUGCAGGUAG | miR.671.5p | AGGAAGCCCUGGAGGGGCUGGA |
| | | | G |
| miR.20b.5p | CAAAGUGCUCAUAGUGCAGGUAG | miR.6716.5p | UGGGAAUGGGGGUAAGGGCC |
| miR.21.3p | CUGUGCGUGUGACAGCGGCUGA | miR.6723.5p | AUAGUCCGAGUAACGUCGGGGC |
| miR.21.5p | AGCCCCUGCCCACCGCACACUG | miR.6726.5p | CGGGAGCUGGGGUCUGCAGGU |
| miR.210.3p | UUGGGGAAACGGCCGCUGAGUG | miR.6727.5p | CUCGGGGCAGGCGGCUGGGAGC |
| | | | G |
| miR.210.5p | CAUCAGAAUUCAUGGAGGCUAG | miR.6729.3p | UCAUCCCCCUCGCCCUCUCAG |
| miR.2110 | AGCUUCCAUGACUCCUGAUGGA | miR.6738.5p | CGAGGGGUAGAAGAGCACAGGG |
| | | | G |
| miR.2115.3p | CAACACCAGUCGAUGGGCUGU | miR.6741.3p | UCGGCUCUCUCCCUCACCCUAG |
| miR.2115.5p | UAGCUUAUCAGACUGAUGUUGA | miR.6741.5p | GUGGGUGCUGGUGGGAGCCGUG |
| miR.22.3p | AGCUACAUUGUCUGCUGGGUUUC | miR.6742.5p | AGUGGGGUGGGACCCAGCUGUU |
| miR.22.5p | AGCUACAUCUGGCUACUGGGU | miR.6746.5p | CCGGGAGAAGGAGGUGGCCUGG |
| miR.221.3p | UGUCAGUUUGUCAAAUACCCCA | miR.6756.5p | AGGGUGGGGCUGGAGGUGGGGC |
| | | | U |
| miR.222.3p | CGUGUAUUUGACAAGCUGAGUU | miR.6765.5p | GUGAGGCGGGGCCAGGAGGGUG |
| | | | UGU |
| miR.223.3p | AAGCUGCCAGUUGAAGAACUGU | miR.6769a.5p | AGGUGGGUAUGGAGGAGCCCU |
| miR.223.5p | CAAGUCACUAGUGGUUCCGUU | miR.6769b.3p | CCCUCUCUGUCCCACCCAUAG |
| miR.224.5p | AGUUCUUCAGUGGCAAGCUUUA | miR.6771.3p | CAAACCCCUGUCUACCCGCAG |
| miR.2392 | UAGGAUGGGGGUGAGAGGUG | miR.6771.5p | CUCGGGAGGGCAUGGGCCAGGC |
| miR.23a.3p | AUCACAUUGCCAGGGAUUUCC | miR.6775.3p | AGGCCCUGUCCUCUGCCCCAG |
| miR.23a.5p | GGGGUUCCUGGGGAUGGGAUUU | miR.6775.5p | UCGGGGCAUGGGGGAGGGAGGC |
| | | | UGG |
| miR.23b.3p | AUCACAUUGCCAGGGAUUACC | miR.6778.5p | AGUGGGAGGACAGGAGGCAGGU |
| miR.24.2.5p | UGCCUACUGAGCUGAAACACAG | miR.6780b.5p | UGGGGAAGGCUUGGCAGGGAAG |
| | | | A |
| miR.24.3p | UGGCUCAGUUCAGCAGGAACAG | miR.6781.5p | CGGGCCGGAGGUCAAGGGCGU |
| miR.25.3p | CAUUGCACUUGUCUCGGUCUGA | miR.6782.5p | UAGGGGUGGGGGAAUUCAGGGG |
| | | | UGU |
| miR.26a.5p | UUCAAGUAAUCCAGGAUAGGCU | miR.6785.3p | ACAUCGCCCCACCUUCCCCAG |
| miR.26b.3p | CCUGUUCUCCAUUACUUGGCUC | miR.6789.5p | GUAGGGGCGUCCCGGGCGCGCG |
| | | | GG |
| miR.26b.5p | UUCAAGUAAUUCAGGAUAGGU | miR.6791.5p | CCCCUGGGGCUGGGCAGGCGGA |
| miR.27a.3p | UUCACAGUGGCUAAGUUCCGC | miR.6794.5p | CAGGGGGACUGGGGGUGAGC |
| miR.27a.5p | AGGGCUUAGCUGCUUGUGAGCA | miR.6795.3p | ACCCCUCGUUUCUUCCCCCAG |
| miR.27b.3p | UUCACAGUGGCUAAGUUCUGC | miR.6796.3p | GAAGCUCUCCCCUCCCCGCAG |
| miR.28.5p | AAGGAGCUCACAGUCUAUUGAG | miR.6797.5p | AGGAGGGAAGGGGCUGAGAACA |
| | | | GGA |
| miR.2861 | GGGGCCUGGCGGUGGGCGG | miR.6798.5p | CCAGGGGGAUGGGCGAGCUUGG |
| | | | G |
| miR.29a.3p | UAGCACCAUCUGAAAUCGGUUA | miR.6799.5p | GGGGAGGUGUGCAGGGCUGG |
| miR.29b.3p | UAGCACCAUUUGAAAUCAGUGUU | miR.6802.5p | CUAGGUGGGGGGCUUGAAGC |
| miR.29c.3p | UAGCACCAUUUGAAAUCGGUUA | miR.6803.3p | UCCCUCGCCUUCUCACCCUCAG |
| miR.29c.5p | UGACCGAUUUCUCCUGGUGUUC | miR.6803.5p | CUGGGGGUGGGGGGCUGGGCGU |
| miR.301a.3p | CAGUGCAAUAGUAUUGUCAAAGC | miR.6809.5p | UGGCAAGGAAAGAAGAGGAUCA |
| miR.30a.5p | UGUAAACAUCCUCGACUGGAAG | miR.6810.3p | UCCCCUGCUCCCUUGUUCCCCA |
| | | | G |
| miR.30b.5p | UGUAAACAUCCUACACUCAGCU | miR.6812.5p | AUGGGGUGAGAUGGGGAGGAGC |
| | | | AGC |
| miR.30c.5p | UGUAAACAUCCUACACUCUCAGC | miR.6813.3p | AACCUUGGCCCCUCUCCCCAG |
| miR.30d.5p | UGUAAACAUCCCCGACUGGAAG | miR.6819.3p | AAGCCUCUGUCCCCACCCCAG |
| miR.30e.3p | CUUUCAGUCGGAUGUUUACAGC | miR.6821.5p | GUGCGUGGUGGCUCGAGGCGGG |
| | | | G |
| miR.30e.5p | UGUAAACAUCCUUGACUGGAAG | miR.6824.5p | GUAGGGGAGGUUGGGCCAGGGA |
| miR.3135a | UGCCUAGGCUGAGACUGCAGUG | miR.6829.5p | UGGGCUGCUGAGAAGGGGCA |
| miR.3140.3p | AGCUUUUGGGAAUUCAGGUAGU | miR.6845.5p | CGGGGCCAGAGCAGAGAGC |
| miR.3140.5p | ACCUGAAUUACCAAAAGCUUU | miR.6852.3p | UGUCCUCUGUUCCUCAG |
| miR.3141 | GAGGGCGGGUGGAGGAGGA | miR.6852.5p | CCCUGGGGUUCUGAGGACAUG |
| miR.3157.5p | UUCAGCCAGGCUAGUGCAGUCU | miR.6869.5p | GUGAGUAGUGGCGCGCGGCGGC |
| miR.3162.5p | UUAGGGAGUAGAAGGGUGGGGAG | miR.6870.3p | GCUCAUCCCCAUCUCCUUUCAG |
| miR.3180.3p | UGGGGCGGAGCUUCCGGAGGCC | miR.6870.5p | UGGGGGAGAUGGGGGUUGA |
| miR.3197 | GGAGGCGCAGGCUCGGAAAGGCG | miR.6873.3p | UUCUCUCUGUCUUUCUCUCUCA |
| | | | G |
| miR.320a | AAAAGCUGGGUUGAGAGGGCGA | miR.6875.5p | UGAGGGACCCAGGACAGGAGA |
| miR.320b | AAAAGCUGGGUUGAGAGGGCAA | miR.6877.5p | AGGGCCGAAGGGUGGAAGCUGC |
| miR.320c | AAAAGCUGGGUUGAGAGGGU | miR.6880.5p | UGGUGGAGGAAGAGGGCAGCUC |
| miR.320d | AAAAGCUGGGUUGAGAGGA | miR.6892.3p | UCCCUCUCCCACCCCUUGCAG |
| miR.320e | AAAGCUGGGUUGAGAAGG | miR.6894.5p | AGGAGGAUGGAGAGCUGGGCCA |
| | | | GA |
| miR.324.3p | ACUGCCCCAGGUGCUGCUGG | miR.7106.5p | UGGGAGGAGGGGAUCUUGGG |
| miR.324.5p | CGCAUCCCCUAGGGCAUUGGUGU | miR.7107.5p | UCGGCCUGGGGAGGAGGAAGGG |
| miR.326 | CCUCUGGGCCCUUCCUCCAG | miR.7108.5p | GUGUGGCCGGCAGGCGGGUGG |
| miR.328.3p | CUGGCCCUCUCUGCCCUUCCGU | miR.7111.5p | UGGGGGAGGAAGGACAGGCCAU |
| miR.329.3p | AACACACCUGGUUAACCUCUUU | miR.7114.3p | UGACCCACCCCUCUCCACCAG |
| miR.331.3p | GCCCCUGGGCCUAUCCUAGAA | miR.7150 | CUGGCAGGGGGAGAGGUA |
| miR.335.5p | UCAAGAGCAAUAACGAAAAAUGU | miR.744.5p | UGCGGGGCUAGGGCUAACAGCA |
| miR.337.5p | GAACGGCUUCAUACAGGAGUU | miR.764 | GCAGGUGCUCACUUGUCCUCCU |
| miR.338.3p | UCCAGCAUCAGUGAUUUUGUUG | miR.765 | UGGAGGAGAAGGAAGGUGAUG |
| miR.339.3p | UGAGCGCCUCGACGACAGAGCCG | miR.766.3p | ACUCCAGCCCCACAGCCUCAGC |
| miR.339.5p | UCCCUGUCCUCCAGGAGCUCACG | miR.766.5p | AGGAGGAAUUGGUGCUGGUCU |
| | | | U |
| miR.33a.5p | GUGCAUUGUAGUUGCAUUGCA | miR.769.5p | UGAGACCUCUGGGUUCUGAGCU |
| miR.33b.5p | GUGCAUUGCUGUUGCAUUGC | miR.7845.5p | AAGGGACAGGGAGGGUCGUGG |
| miR.342.3p | UCUCACACAGAAAUCGCACCCGU | miR.7851.3p | UACCUGGGAGACUGAGGUUGGA |
| miR.345.5p | GCUGACUCCUAGUCCAGGGCUC | miR.8069 | GGAUGGUUGGGGGCGGUCGGCG |
| | | | U |
| miR.34a.5p | UGGCAGUGUCUUAGCUGGUUGU | miR.8071 | CGGUGGACUGGAGUGGGUGG |
| miR.34b.3p | CAAUCACUAACUCCACUGCCAU | miR.8078 | GGUCUAGGCCCGGUGAGAGACU |
| | | | C |
| miR.361.3p | UCCCCCAGGUGUGAUUCUGAUUU | miR.8085 | UGGGAGAGAGGACUGUGAGGC |
| miR.361.5p | UUAUCAGAAUCUCCAGGGGUAC | miR.8089 | CCUGGGGACAGGGGAUUGGGGC |
| | | | AG |
| miR.362.5p | AAUCCUUGGAACCUAGGUGUGAG | miR.874.3p | CUGCCCUGGCCCGAGGGACCGA |
| | U | | |
| miR.363.3p | AAUUGCACGGUAUCCAUCUGUA | miR.877.3p | UCCUCUUCUCCCUCCUCCCAG |
| miR.3648 | AGCCGCGGGGAUCGCCGAGGG | miR.877.5p | GUAGAGGAGAUGGCGCAGGG |
| miR.3652 | CGGCUGGAGGUGUGAGGA | miR.920 | GGGGAGCUGUGGAAGCAGUA |
| miR.3663.5p | GCUGGUCUGCGUGGUGCUCGG | miR.92a.3p | UAUUGCACUUGUCCCGGCCUGU |
| miR.3674 | AUUGUAGAACCUAAGAUUGGCC | miR.92b.3p | UAUUGCACUCGUCCCGGCCUCC |
| miR.3687 | CCCGGACAGGCGUUCGUGCGACG | miR.93.3p | ACUGCUGAGCUAGCACUUCCCG |
| | U | | |
| miR.370.3p | GCCUGCUGGGGUGGAACCUGGU | miR.93.5p | CAAAGUGCUGUUCGUGCAGGUA |
| | | | G |
| miR.374b.5p | AUAUAAUACAACCUGCUAAGUG | miR.99a.5p | AACCCGUAGAUCCGAUCUUGUG |
| miR.375 | UUUGUUCGUUCGGCUCGCGUGA | miR.99b.5p | CACCCGUAGAACCGACCUUGCG |

[0196] Out of the 406 detectable miRNAs analyzed, 28 miRNAs showed a statistically significant difference (Welch T-test p value <0.05), and among these candidates, 7 candidates showed a p value <0.01. The 28 miRNAs are shown in Table 2.

TABLE 2
List of 28 miRNAs useful based on their
p value < 0.05. SD: standard deviation

| | | Mean | SD | Mean | SD | | |
|---|---|---|---|---|---|---|---|
| miRNA | | Log2 | log2 | Log2 | Log2 | Fold | |
| candidate | p value | AD | AD | HC | HC | change | AUC |
| miR.99a.5p | 0.00025 | 8.92 | 0.53 | 8.52 | 0.42 | 1.348 | 0.268 |
| miR.378d | 0.00114 | 6.49 | 0.44 | 6.13 | 0.55 | 1.252 | 0.303 |
| miR.100.5p | 0.00147 | 7.51 | 0.54 | 7.18 | 0.38 | 1.304 | 0.301 |
| miR.193b.3p | 0.00242 | 6.75 | 1.01 | 6.14 | 0.80 | 1.716 | 0.307 |
| miR.34a.5p | 0.00602 | 6.84 | 0.89 | 6.32 | 0.81 | 1.479 | 0.342 |
| miR.1306.5p | 0.00865 | 7.13 | 0.44 | 6.90 | 0.39 | 1.190 | 0.328 |
| miR.1229.3p | 0.00909 | 6.08 | 0.59 | 5.60 | 1.05 | 1.306 | 0.301 |
| miR.195.5p | 0.01062 | 6.40 | 0.78 | 5.98 | 0.74 | 1.360 | 0.333 |
| miR.6880.5p | 0.01316 | 7.83 | 0.81 | 8.27 | 0.82 | 0.717 | 0.655 |
| miR.192.5p | 0.01449 | 7.96 | 1.04 | 7.48 | 0.70 | 1.666 | 0.378 |
| miR.532.5p | 0.01485 | 7.27 | 0.53 | 7.01 | 0.43 | 1.225 | 0.354 |
| miR.125b.5p | 0.01546 | 8.52 | 0.52 | 8.26 | 0.46 | 1.212 | 0.341 |
| miR.375 | 0.01644 | 7.19 | 1.03 | 6.66 | 0.99 | 1.468 | 0.363 |
| miR.378a.3p | 0.01800 | 7.93 | 0.46 | 7.70 | 0.43 | 1.184 | 0.381 |
| miR.532.3p | 0.01880 | 7.02 | 0.71 | 6.67 | 0.63 | 1.300 | 0.334 |
| miR.378i | 0.01888 | 7.64 | 0.43 | 7.43 | 0.40 | 1.165 | 0.351 |
| miR.194.5p | 0.01913 | 7.32 | 1.24 | 6.77 | 0.89 | 1.823 | 0.369 |
| miR.122.5p | 0.02053 | 10.72 | 1.49 | 10.04 | 1.17 | 2.225 | 0.380 |
| miR.141.3p | 0.02126 | 6.30 | 0.51 | 6.05 | 0.51 | 1.195 | 0.370 |
| miR.660.5p | 0.02134 | 7.54 | 0.92 | 7.10 | 0.84 | 1.415 | 0.363 |
| miR.5196.5p | 0.03121 | 9.19 | 0.84 | 9.59 | 0.86 | 0.741 | 0.649 |
| miR.6769a.5p | 0.03130 | 6.66 | 0.82 | 7.04 | 0.79 | 0.764 | 0.647 |
| miR.378f | 0.03183 | 7.02 | 0.46 | 6.80 | 0.50 | 1.160 | 0.375 |
| miR.144.3p | 0.03740 | 6.78 | 2.07 | 5.74 | 2.49 | 1.606 | 0.372 |
| miR.7111.5p | 0.03968 | 9.63 | 0.78 | 10.02 | 0.92 | 0.733 | 0.622 |
| miR.4270 | 0.04181 | 6.93 | 0.77 | 7.25 | 0.64 | 0.831 | 0.636 |
| miR.664a.3p | 0.04186 | 6.24 | 1.10 | 5.59 | 1.76 | 1.280 | 0.396 |
| miR.502.3p | 0.04801 | 6.14 | 0.75 | 5.83 | 0.70 | 1.262 | 0.378 |

[0197] Among the 406 detected miRNA, a total of 74 miRNA candidates also showed an AUC value ∝0.6 or ≤0.4; of which a total of 11 candidates showed a good AUC value of ≥0.65 or ≤0.35; and 1 candidates showed a very good AUC value of ≥0.7 or ≤0.30. The 74 candidate miRNAs are shown in Table 3.

TABLE 3
List of 74 candidates also showed an AUC value of ≥0.6 or ≤0.40

| miRNA | AUC |
|---|---|
| miR.99a.5p | 0.268 |
| miR.1229.3p | 0.301 |
| miR.100.5p | 0.301 |
| miR.378d | 0.303 |
| miR.193b.3p | 0.307 |
| miR.1306.5p | 0.328 |
| miR.195.5p | 0.333 |
| miR.532.3p | 0.334 |
| miR.125b.5p | 0.341 |
| miR.34a.5p | 0.342 |
| miR.378i | 0.351 |
| miR.532.5p | 0.354 |
| miR.375 | 0.363 |
| miR.660.5p | 0.363 |
| miR.194.5p | 0.369 |
| miR.141.3p | 0.370 |
| miR.144.3p | 0.372 |
| miR.1234.3p | 0.373 |
| miR.378f | 0.375 |
| miR.181b.5p | 0.376 |
| miR.502.3p | 0.378 |
| miR.192.5p | 0.378 |
| miR.766.3p | 0.378 |
| miR.122.5p | 0.380 |
| miR.378a.3p | 0.381 |
| miR.145.5p | 0.383 |
| miR.139.5p | 0.384 |
| miR.150.5p | 0.386 |
| miR.193a.3p | 0.390 |
| miR.342.3p | 0.391 |
| miR.210.3p | 0.392 |
| miR.144.5p | 0.392 |
| miR.27b.3p | 0.394 |
| miR.664a.3p | 0.396 |
| miR.16.5p | 0.396 |
| miR.877.3p | 0.397 |
| miR.29a.3p | 0.400 |
| miR.130a.3p | 0.400 |
| miR.6794.5p | 0.601 |
| miR.1908.5p | 0.601 |
| miR.6799.5p | 0.602 |
| miR.3141 | 0.604 |
| miR.6738.5p | 0.604 |
| miR.6894.5p | 0.604 |
| miR.7851.3p | 0.605 |
| miR.4695.5p | 0.608 |
| miR.23a.5p | 0.609 |
| miR.4463 | 0.610 |
| miR.382.5p | 0.611 |
| miR.4655.5p | 0.611 |
| miR.4800.5p | 0.612 |
| miR.6746.5p | 0.613 |
| miR.4667.5p | 0.614 |
| miR.4656 | 0.614 |
| miR.1914.3p | 0.616 |
| miR.1275 | 0.618 |
| miR.8089 | 0.619 |
| miR.5703 | 0.619 |
| miR.6124 | 0.621 |
| miR.2392 | 0.621 |
| miR.7111.5p | 0.622 |
| miR.8085 | 0.622 |
| miR.6716.5p | 0.624 |
| miR.6778.5p | 0.625 |
| miR.6797.5p | 0.625 |
| miR.4534 | 0.633 |
| miR.6775.5p | 0.635 |
| miR.4270 | 0.636 |
| miR.6812.5p | 0.638 |
| miR.6086 | 0.645 |
| miR.765 | 0.645 |
| miR.6769a.5p | 0.647 |
| miR.5196.5p | 0.649 |
| miR.6880.5p | 0.655 |

[0198] Among the 406 detected miRNAs, a total of 15 candidates showed both an AUC value of ≥0.6 or ≤0.4 and a fold change value of ≥1.49 or ≤0.75. The list of the 15 miRNAs are shown in Table 4.

TABLE 4
List of 15 candidates showing both an AUC value of ≥0.6 or ≤0.4
and a fold change value of ≥1.49 or ≤0.75

| miRNA | p value | Fold change | AUC |
|---|---|---|---|
| miR.23a.5p | 0.06528 | 0.630 | 0.609 |
| miR.6880.5p | 0.01316 | 0.717 | 0.655 |
| miR.7111.5p | 0.03968 | 0.733 | 0.622 |
| miR.6812.5p | 0.05632 | 0.735 | 0.638 |
| miR.6738.5p | 0.07930 | 0.741 | 0.604 |
| miR.5196.5p | 0.03121 | 0.741 | 0.649 |
| miR.6894.5p | 0.10422 | 0.746 | 0.604 |
| miR.8085 | 0.27457 | 0.747 | 0.622 |
| miR.4463 | 0.08930 | 0.748 | 0.610 |
| miR.2392 | 0.10513 | 0.748 | 0.621 |
| miR.144.3p | 0.03740 | 1.606 | 0.372 |
| miR.192.5p | 0.01449 | 1.666 | 0.378 |
| miR.193b.3p | 0.00242 | 1.716 | 0.307 |
| miR.194.5p | 0.01913 | 1.823 | 0.369 |
| miR.122.5p | 0.02053 | 2.225 | 0.380 |

[0199] Out of the 127802 lncRNAs sequenced, 19867 lncRNAs were selected based on their threshold expression level for statistical analysis. The comparison of the AD patient with healthy control populations showed that 1008 lncRNAs are differentially expressed with a statistical significance (p value <0.05, Wilcoxon test) (Table 5). The sequences of these 1008 lncRNAs are shown in the sequence listing included in this application.

TABLE 5
The Sequence number, p value, mean +/− SD, fold change
and AUC of the 1008 lncRNAs with differential expression in
AD group versus healthy control group (p value < 0.05, Wilcoxon test)

| lncRNA | SEQ | p value | Fold change | AUC |
|---|---|---|---|---|
| ADAMTS9-AS2:12 | SEQ0397 | 0.02049 | 0.852 | 0.778 |
| ADNP-AS1:12 | SEQ0340 | 0.01727 | 0.809 | 0.785 |
| ADPGK-AS1:7 | SEQ0858 | 0.0449 | 1.225 | 0.257 |
| APTR:17 | SEQ0260 | 0.01209 | 1.147 | 0.201 |
| ARF4-AS1:8 | SEQ0859 | 0.0449 | 1.143 | 0.257 |
| ARRDC3-AS1:7 | SEQ0050 | 0.00232 | 0.441 | 0.854 |
| BISPR:24 | SEQ0566 | 0.02842 | 0.579 | 0.764 |
| BLACAT1:3 | SEQ0300 | 0.01449 | 1.717 | 0.208 |
| BLACAT1:5 | SEQ0341 | 0.01727 | 0.424 | 0.785 |
| CALML3-AS1:9 | SEQ0136 | 0.00681 | 1.567 | 0.181 |
| CASC15:51 | SEQ0567 | 0.02842 | 1.273 | 0.236 |
| CASC20:2 | SEQ0860 | 0.0449 | 0.765 | 0.743 |
| CERS3-AS1:5 | SEQ0301 | 0.01449 | 1.251 | 0.208 |
| CFAP58-AS1:4 | SEQ0109 | 0.00556 | 1.464 | 0.174 |
| CLRN1-AS1:1 | SEQ0475 | 0.02418 | 0.793 | 0.771 |
| CPB2-AS1:18 | SEQ0476 | 0.02418 | 0.682 | 0.771 |
| CYTOR:18 | SEQ0062 | 0.00291 | 1.278 | 0.153 |
| DARS-AS1:47 | SEQ0178 | 0.00829 | 2.015 | 0.188 |
| DDX11-AS1:5 | SEQ0861 | 0.0449 | 1.256 | 0.257 |
| DLEU2:26 | SEQ0862 | 0.0449 | 1.076 | 0.257 |
| DLEU2:45 | SEQ0863 | 0.0449 | 0.882 | 0.743 |
| DLGAP2-AS1:18 | SEQ0656 | 0.03324 | 0.789 | 0.757 |
| DPH6-AS1:3 | SEQ0342 | 0.01727 | 2.004 | 0.215 |
| EGFR-AS1:4 | SEQ0093 | 0.00451 | 0.81 | 0.833 |
| EGOT:11 | SEQ0110 | 0.00556 | 1.195 | 0.174 |
| EIF3J-AS1:21 | SEQ0261 | 0.01209 | 0.87 | 0.799 |
| ERICH3-AS1:4 | SEQ0864 | 0.0449 | 0.888 | 0.743 |
| EXTL3-AS1:16 | SEQ0568 | 0.02842 | 0.739 | 0.764 |
| FAM66B:14 | SEQ0063 | 0.00291 | 0.604 | 0.847 |
| FLG-AS1:14 | SEQ0752 | 0.03872 | 1.18 | 0.25 |
| FLVCR1-AS1:13 | SEQ0137 | 0.00681 | 0.413 | 0.819 |
| FRG1-DT:6 | SEQ0865 | 0.0449 | 0.873 | 0.743 |
| GAS1RR:11 | SEQ0302 | 0.01449 | 0.848 | 0.792 |
| GAS6-AS2:9 | SEQ0303 | 0.01449 | 0.787 | 0.792 |
| GPC5-AS1:7 | SEQ0753 | 0.03872 | 0.623 | 0.75 |
| GPR158-AS1:1 | SEQ0398 | 0.02049 | 0.775 | 0.778 |
| GRM5-AS1:1 | SEQ0138 | 0.00681 | 0.83 | 0.819 |
| HAND2-AS1:58 | SEQ0094 | 0.00451 | 0.587 | 0.833 |
| HAND2-AS1:59 | SEQ0111 | 0.00556 | 0.592 | 0.826 |
| HAND2-AS1:70 | SEQ0039 | 0.00183 | 0.543 | 0.861 |
| HAND2-AS1:71 | SEQ0076 | 0.00364 | 0.565 | 0.84 |
| HCG23:5 | SEQ0754 | 0.03872 | 0.813 | 0.75 |
| KAZN-AS1:4 | SEQ0399 | 0.02049 | 0.732 | 0.778 |
| KCNQ1-AS1:3 | SEQ0569 | 0.02842 | 0.848 | 0.764 |
| KCNQ1OT1:8 | SEQ0139 | 0.00681 | 0.908 | 0.819 |
| LACTB2-AS1:1 | SEQ0755 | 0.03872 | 1.206 | 0.25 |
| LINC00158:5 | SEQ0570 | 0.02842 | 0.748 | 0.764 |
| LINC00200:6 | SEQ0064 | 0.00291 | 1.29 | 0.153 |
| LINC00276:2 | SEQ0866 | 0.0449 | 0.846 | 0.743 |
| LINC00354:4 | SEQ0867 | 0.0449 | 1.284 | 0.257 |
| LINC00458:19 | SEQ0571 | 0.02842 | 0.789 | 0.764 |
| LINC00460:13 | SEQ0868 | 0.0449 | 0.752 | 0.743 |
| LINC00472:21 | SEQ0140 | 0.00681 | 1.389 | 0.181 |
| LINC00554:2 | SEQ0756 | 0.03872 | 0.766 | 0.75 |
| LINC00554:4 | SEQ0757 | 0.03872 | 0.766 | 0.75 |
| LINC00574:13 | SEQ0112 | 0.00556 | 0.771 | 0.826 |
| LINC00589:3 | SEQ0869 | 0.0449 | 0.781 | 0.743 |
| LINC00649:23 | SEQ0077 | 0.00364 | 0.619 | 0.84 |
| LINC00698:2 | SEQ0657 | 0.03324 | 0.85 | 0.757 |
| LINC00707:9 | SEQ0572 | 0.02842 | 1.304 | 0.236 |
| LINC00839:18 | SEQ0113 | 0.00556 | 0.874 | 0.826 |
| LINC00882:70 | SEQ0028 | 0.00111 | 0.867 | 0.875 |
| LINC00882:71 | SEQ0029 | 0.00111 | 0.867 | 0.875 |
| LINC00887:15 | SEQ0870 | 0.0449 | 0.925 | 0.743 |
| LINC00895:3 | SEQ0179 | 0.00829 | 1.491 | 0.188 |
| LINC00927:21 | SEQ0658 | 0.03324 | 0.619 | 0.757 |
| LINC00927:22 | SEQ0659 | 0.03324 | 0.619 | 0.757 |
| LINC00927:24 | SEQ0343 | 0.01727 | 0.772 | 0.785 |
| LINC00938:6 | SEQ0262 | 0.01209 | 0.811 | 0.799 |
| LINC00963:67 | SEQ0573 | 0.02842 | 1.379 | 0.236 |
| LINC01050:6 | SEQ0114 | 0.00556 | 0.82 | 0.826 |
| LINC01058:3 | SEQ0871 | 0.0449 | 1.225 | 0.257 |
| LINC01087:1 | SEQ0141 | 0.00681 | 0.764 | 0.819 |
| LINC01088:18 | SEQ0660 | 0.03324 | 0.757 | 0.757 |
| LINC01107:1 | SEQ0304 | 0.01449 | 0.768 | 0.792 |
| LINC01122:27 | SEQ0574 | 0.02842 | 1.263 | 0.236 |
| LINC01146:14 | SEQ0758 | 0.03872 | 0.774 | 0.75 |
| LINC01153:1 | SEQ0661 | 0.03324 | 1.169 | 0.243 |
| LINC01185:7 | SEQ0575 | 0.02842 | 0.793 | 0.764 |
| LINC02252:3 | SEQ0765 | 0.03872 | 0.881 | 0.75 |
| LINC02323:8 | SEQ0307 | 0.01449 | 0.622 | 0.792 |
| LINC02334:6 | SEQ0581 | 0.02842 | 0.737 | 0.764 |
| LINC02345:11 | SEQ0013 | 0.00066 | 1.181 | 0.111 |
| LINC02432:9 | SEQ0180 | 0.00829 | 0.776 | 0.813 |
| LINC02473:3 | SEQ0065 | 0.00291 | 0.786 | 0.847 |
| LINC02519:7 | SEQ0875 | 0.0449 | 0.682 | 0.743 |
| LINC02554:5 | SEQ0404 | 0.02049 | 0.744 | 0.778 |
| LINC02580:5 | SEQ0484 | 0.02418 | 0.767 | 0.771 |
| lnc-AASDHPPT-3:1 | SEQ0409 | 0.02049 | 0.715 | 0.778 |
| lnc-ABCA1-8:9 | SEQ0589 | 0.02842 | 0.592 | 0.764 |
| lnc-ABCA5-14:2 | SEQ0881 | 0.0449 | 1.164 | 0.257 |
| lnc-ABCA5-7:1 | SEQ0014 | 0.00066 | 1.309 | 0.111 |
| lnc-ABCG2-3:5 | SEQ0667 | 0.03324 | 0.758 | 0.757 |
| lnc-ACO1-1:1 | SEQ0590 | 0.02842 | 0.759 | 0.764 |
| lnc-ACOT12-9:1 | SEQ0053 | 0.00232 | 0.727 | 0.854 |
| lnc-ACTL7B-8:1 | SEQ0493 | 0.02418 | 0.697 | 0.771 |
| lnc-ADAD1-3:1 | SEQ0774 | 0.03872 | 0.828 | 0.75 |
| lnc-ADAMTS20-3:1 | SEQ0494 | 0.02418 | 1.219 | 0.229 |
| lnc-ADAMTS5-1:1 | SEQ0882 | 0.0449 | 0.851 | 0.743 |
| lnc-ADAT1-1:1 | SEQ0495 | 0.02418 | 0.877 | 0.771 |
| lnc-ADRA2A-4:1 | SEQ0883 | 0.0449 | 0.729 | 0.743 |
| lnc-ADRB1-4:1 | SEQ0118 | 0.00556 | 0.858 | 0.826 |
| lnc-AFG1L-5:1 | SEQ0263 | 0.01209 | 1.407 | 0.201 |
| lnc-AGO2-2:2 | SEQ0119 | 0.00556 | 0.511 | 0.826 |
| lnc-AGO2-2:3 | SEQ0668 | 0.03324 | 1.442 | 0.243 |
| lnc-AGR3-6:1 | SEQ0884 | 0.0449 | 1.156 | 0.257 |
| lnc-AHR-5:1 | SEQ0264 | 0.01209 | 0.792 | 0.799 |
| lnc-AIG1-5:1 | SEQ0496 | 0.02418 | 0.862 | 0.771 |
| lnc-AKAP9-1:2 | SEQ0775 | 0.03872 | 0.704 | 0.75 |
| lnc-AKIRIN1-1:11 | SEQ0591 | 0.02842 | 0.553 | 0.764 |
| lnc-AKR1C2-3:17 | SEQ0097 | 0.00451 | 0.768 | 0.833 |
| lnc-AKR1D1-5:2 | SEQ0098 | 0.00451 | 0.891 | 0.833 |
| lnc-AKR1D1-8:3 | SEQ0885 | 0.0449 | 0.797 | 0.743 |
| lnc-AKR1E2-15:1 | SEQ0410 | 0.02049 | 1.303 | 0.222 |
| lnc-AKR7A2-2:1 | SEQ0145 | 0.00681 | 1.339 | 0.181 |
| lnc-AKT1-1:15 | SEQ0411 | 0.02049 | 0.825 | 0.778 |
| lnc-ALB-1:12 | SEQ0146 | 0.00681 | 1.448 | 0.181 |
| lnc-ALB-1:6 | SEQ0886 | 0.0449 | 0.881 | 0.743 |
| lnc-ALDH3B2-3:4 | SEQ0412 | 0.02049 | 0.89 | 0.778 |
| lnc-ALG14-5:2 | SEQ0350 | 0.01727 | 0.697 | 0.785 |
| lnc-ALS2CR12-1:2 | SEQ0351 | 0.01727 | 0.729 | 0.785 |
| lnc-ANAPC11-2:6 | SEQ0887 | 0.0449 | 1.836 | 0.257 |
| lnc-ANKRD1-1:6 | SEQ0888 | 0.0449 | 0.77 | 0.743 |
| lnc-ANKRD26-1:3 | SEQ0497 | 0.02418 | 0.852 | 0.771 |
| lnc-ANKRD30BL-2:2 | SEQ0413 | 0.02049 | 0.747 | 0.778 |
| lnc-ANKRD46-1:3 | SEQ0669 | 0.03324 | 0.687 | 0.757 |
| lnc-ANXA3-8:1 | SEQ0670 | 0.03324 | 0.838 | 0.757 |
| lnc-APBA1-5:1 | SEQ0592 | 0.02842 | 0.781 | 0.764 |
| lnc-APIP-1:13 | SEQ0776 | 0.03872 | 0.807 | 0.75 |
| lnc-APLP2-4:1 | SEQ0054 | 0.00232 | 0.786 | 0.854 |
| lnc-APOB-1:2 | SEQ0777 | 0.03872 | 0.583 | 0.75 |
| lnc-APPL2-1:2 | SEQ0498 | 0.02418 | 1.133 | 0.229 |
| lnc-AQP8-2:7 | SEQ0352 | 0.01727 | 1.254 | 0.215 |
| lnc-ARAP2-9:1 | SEQ0147 | 0.00681 | 0.795 | 0.819 |
| lnc-ARHGAP15-17:1 | SEQ0353 | 0.01727 | 0.857 | 0.785 |
| lnc-ARHGAP15-22:1 | SEQ0593 | 0.02842 | 0.846 | 0.764 |
| lnc-ARHGAP21-1:2 | SEQ0309 | 0.01449 | 0.723 | 0.792 |
| lnc-ARHGAP26-4:11 | SEQ0189 | 0.00829 | 0.923 | 0.813 |
| lnc-ARHGAP26-4:33 | SEQ0778 | 0.03872 | 0.71 | 0.75 |
| lnc-ARHGAP26-4:39 | SEQ0889 | 0.0449 | 1.383 | 0.257 |
| lnc-ARHGEF26-2:1 | SEQ0067 | 0.00291 | 1.399 | 0.153 |
| lnc-ARHGEF5-5:1 | SEQ0354 | 0.01727 | 0.712 | 0.785 |
| lnc-ARID2-7:1 | SEQ0671 | 0.03324 | 0.924 | 0.757 |
| lnc-ARNTL-2:1 | SEQ0265 | 0.01209 | 0.61 | 0.799 |
| lnc-ARRDC4-7:1 | SEQ0779 | 0.03872 | 0.876 | 0.75 |
| lnc-ART5-2:1 | SEQ0414 | 0.02049 | 0.787 | 0.778 |
| lnc-ATAD1-5:2 | SEQ0148 | 0.00681 | 0.738 | 0.819 |
| lnc-ATIC-2:8 | SEQ0780 | 0.03872 | 0.554 | 0.75 |
| lnc-ATP12A-3:1 | SEQ0499 | 0.02418 | 0.763 | 0.771 |
| lnc-ATP13A4-2:4 | SEQ0672 | 0.03324 | 1.64 | 0.243 |
| lnc-ATP5O-3:1 | SEQ0224 | 0.01004 | 1.358 | 0.194 |
| lnc-ATP6V0E2-7:1 | SEQ0500 | 0.02418 | 1.361 | 0.229 |
| lnc-ATP6V1B2-2:6 | SEQ0594 | 0.02842 | 1.132 | 0.236 |
| lnc-ATP6V1B2-2:7 | SEQ0595 | 0.02842 | 1.132 | 0.236 |
| lnc-ATP8A2-1:1 | SEQ0355 | 0.01727 | 1.477 | 0.215 |
| lnc-ATXN2-1:1 | SEQ0099 | 0.00451 | 0.792 | 0.833 |
| lnc-ATXN7-11:1 | SEQ0501 | 0.02418 | 1.319 | 0.229 |
| lnc-ATXN7L1-1:1 | SEQ0890 | 0.0449 | 1.32 | 0.257 |
| lnc-AUH-2:7 | SEQ0190 | 0.00829 | 0.584 | 0.813 |
| lnc-AUH-2:9 | SEQ0673 | 0.03324 | 1.35 | 0.243 |
| lnc-AUH-4:1 | SEQ0596 | 0.02842 | 0.79 | 0.764 |
| lnc-BAG3-4:4 | SEQ0891 | 0.0449 | 1.314 | 0.257 |
| lnc-BARHL2-4:4 | SEQ0100 | 0.00451 | 0.736 | 0.833 |
| lnc-BCHE-1:1 | SEQ0674 | 0.03324 | 0.741 | 0.757 |
| lnc-BCL6-9:1 | SEQ0310 | 0.01449 | 0.885 | 0.792 |
| lnc-BIRC2-5:5 | SEQ0225 | 0.01004 | 0.831 | 0.806 |
| lnc-BIRC6-1:4 | SEQ0892 | 0.0449 | 0.829 | 0.743 |
| lnc-BMS1-2:1 | SEQ0675 | 0.03324 | 1.124 | 0.243 |
| lnc-BNC2-5:1 | SEQ0191 | 0.00829 | 1.299 | 0.188 |
| lnc-BORA-31:1 | SEQ0192 | 0.00829 | 0.67 | 0.813 |
| lnc-BRD1-17:1 | SEQ0311 | 0.01449 | 0.669 | 0.792 |
| lnc-BRINP1-3:1 | SEQ0893 | 0.0449 | 0.894 | 0.743 |
| lnc-BRINP2-3:1 | SEQ0597 | 0.02842 | 0.878 | 0.764 |
| lnc-C10orf90-2:2 | SEQ0415 | 0.02049 | 1.687 | 0.222 |
| lnc-C12orf40-3:3 | SEQ0894 | 0.0449 | 1.434 | 0.257 |
| lnc-C12orf42-3:6 | SEQ0598 | 0.02842 | 1.303 | 0.236 |
| lnc-C15orf41-18:5 | SEQ0676 | 0.03324 | 1.649 | 0.243 |
| lnc-C15orf41-18:6 | SEQ0895 | 0.0449 | 1.561 | 0.257 |
| lnc-C19orf57-1:1 | SEQ0896 | 0.0449 | 1.361 | 0.257 |
| lnc-C1QTNF9-4:1 | SEQ0781 | 0.03872 | 1.282 | 0.25 |
| lnc-C21orf58-1:2 | SEQ0033 | 0.00143 | 2.231 | 0.132 |
| lnc-C2CD4B-6:4 | SEQ0193 | 0.00829 | 1.39 | 0.188 |
| lnc-C2orf42-10:1 | SEQ0502 | 0.02418 | 1.28 | 0.229 |
| lnc-C3orf58-7:1 | SEQ0599 | 0.02842 | 0.725 | 0.764 |
| lnc-C5orf30-10:1 | SEQ0266 | 0.01209 | 0.708 | 0.799 |
| lnc-C5orf30-10:2 | SEQ0600 | 0.02842 | 0.891 | 0.764 |
| lnc-C5orf67-3:1 | SEQ0149 | 0.00681 | 0.876 | 0.819 |
| lnc-C7orf57-4:1 | SEQ0356 | 0.01727 | 1.461 | 0.215 |
| lnc-C9orf3-5:1 | SEQ0120 | 0.00556 | 0.782 | 0.826 |
| lnc-CA7-2:2 | SEQ0677 | 0.03324 | 0.817 | 0.757 |
| lnc-CAB39L-1:4 | SEQ0267 | 0.01209 | 0.769 | 0.799 |
| lnc-CAB39L-4:2 | SEQ0601 | 0.02842 | 1.181 | 0.236 |
| lnc-CACNA1I-1:1 | SEQ0503 | 0.02418 | 0.813 | 0.771 |
| lnc-CACNA2D1-1:1 | SEQ0897 | 0.0449 | 0.82 | 0.743 |
| lnc-CACNG1-1:1 | SEQ0602 | 0.02842 | 0.652 | 0.764 |
| lnc-CALML6-1:10 | SEQ0898 | 0.0449 | 0.577 | 0.743 |
| lnc-CAPS2-1:1 | SEQ0357 | 0.01727 | 0.708 | 0.785 |
| lnc-CASC10-3:1 | SEQ0899 | 0.0449 | 0.744 | 0.743 |
| lnc-CASP9-1:1 | SEQ0782 | 0.03872 | 1.246 | 0.25 |
| lnc-CAVIN2-2:1 | SEQ0416 | 0.02049 | 1.425 | 0.222 |
| lnc-CBLB-9:1 | SEQ0900 | 0.0449 | 0.788 | 0.743 |
| lnc-CCDC102B-7:1 | SEQ0901 | 0.0449 | 0.816 | 0.743 |
| lnc-CCDC167-5:1 | SEQ0417 | 0.02049 | 1.25 | 0.222 |
| lnc-CCDC177-6:1 | SEQ0783 | 0.03872 | 1.157 | 0.25 |
| lnc-CCDC192-3:1 | SEQ0902 | 0.0449 | 0.8 | 0.743 |
| lnc-CCDC197-2:1 | SEQ0068 | 0.00291 | 0.672 | 0.847 |
| lnc-CCDC61-4:1 | SEQ0194 | 0.00829 | 0.561 | 0.813 |
| lnc-CCDC7-17:1 | SEQ0226 | 0.01004 | 1.341 | 0.194 |
| lnc-CCDC93-10:2 | SEQ0603 | 0.02842 | 0.87 | 0.764 |
| lnc-CCL1-10:1 | SEQ0227 | 0.01004 | 1.307 | 0.194 |
| lnc-CCNB1IP1-1:2 | SEQ0903 | 0.0449 | 0.512 | 0.743 |
| lnc-CCR8-2:1 | SEQ0904 | 0.0449 | 1.409 | 0.257 |
| lnc-CCSER1-2:1 | SEQ0678 | 0.03324 | 0.791 | 0.757 |
| lnc-CCT8L2-28:1 | SEQ0418 | 0.02049 | 0.812 | 0.778 |
| lnc-CD47-11:2 | SEQ0905 | 0.0449 | 1.317 | 0.257 |
| lnc-CD47-11:4 | SEQ0906 | 0.0449 | 1.139 | 0.257 |
| lnc-CDADC1-1:1 | SEQ0907 | 0.0449 | 1.18 | 0.257 |
| lnc-CDH23-2:1 | SEQ0908 | 0.0449 | 0.757 | 0.743 |
| lnc-CDK20-14:1 | SEQ0358 | 0.01727 | 1.274 | 0.215 |
| lnc-CDK2AP1-1:8 | SEQ0909 | 0.0449 | 0.84 | 0.743 |
| lnc-CEACAM16-2:1 | SEQ0195 | 0.00829 | 0.708 | 0.813 |
| lnc-CEBPD-11:2 | SEQ0784 | 0.03872 | 0.763 | 0.75 |
| lnc-CELF4-15:1 | SEQ0785 | 0.03872 | 0.89 | 0.75 |
| lnc-CELSR1-2:3 | SEQ0268 | 0.01209 | 0.762 | 0.799 |
| lnc-CEP170-9:2 | SEQ0042 | 0.00183 | 0.828 | 0.861 |
| lnc-CFAP36-3:2 | SEQ0786 | 0.03872 | 0.69 | 0.75 |
| lnc-CHD1L-5:13 | SEQ0312 | 0.01449 | 0.37 | 0.792 |
| lnc-CHMP2B-1:11 | SEQ0679 | 0.03324 | 0.858 | 0.757 |
| lnc-CHN1-5:11 | SEQ0419 | 0.02049 | 0.739 | 0.778 |
| lnc-CHRAC1-1:1 | SEQ0680 | 0.03324 | 0.747 | 0.757 |
| lnc-CHRAC1-6:1 | SEQ0420 | 0.02049 | 1.247 | 0.222 |
| lnc-CHRM2-1:1 | SEQ0121 | 0.00556 | 0.833 | 0.826 |
| lnc-CHRM3-1:5 | SEQ0681 | 0.03324 | 0.714 | 0.757 |
| lnc-CHST2-6:2 | SEQ0196 | 0.00829 | 0.763 | 0.813 |
| lnc-CLDN10-5:1 | SEQ0313 | 0.01449 | 0.717 | 0.792 |
| lnc-CLEC19A-3:1 | SEQ0787 | 0.03872 | 1.284 | 0.25 |
| lnc-CLK1-1:7 | SEQ0197 | 0.00829 | 0.602 | 0.813 |
| lnc-CLVS2-2:5 | SEQ0359 | 0.01727 | 0.818 | 0.785 |
| lnc-CMPK2-34:4 | SEQ0101 | 0.00451 | 0.651 | 0.833 |
| lnc-CMTM7-2:2 | SEQ0269 | 0.01209 | 0.838 | 0.799 |
| lnc-CMTR1-10:1 | SEQ0788 | 0.03872 | 0.868 | 0.75 |
| lnc-CNBD1-4:13 | SEQ0682 | 0.03324 | 0.568 | 0.757 |
| lnc-CNDP1-7:1 | SEQ0024 | 0.00086 | 0.534 | 0.882 |
| lnc-CNOT6-10:1 | SEQ0270 | 0.01209 | 1.19 | 0.201 |
| lnc-COL6A6-2:1 | SEQ0910 | 0.0449 | 0.717 | 0.743 |
| lnc-COMMD6-10:1 | SEQ0079 | 0.00364 | 1.58 | 0.16 |
| lnc-COX10-9:2 | SEQ0911 | 0.0449 | 0.849 | 0.743 |
| lnc-CPEB3-2:1 | SEQ0789 | 0.03872 | 0.78 | 0.75 |
| lnc-CPM-2:11 | SEQ0912 | 0.0449 | 0.424 | 0.743 |
| lnc-CPM-3:1 | SEQ0228 | 0.01004 | 0.831 | 0.806 |
| lnc-CRIPT-1:3 | SEQ0790 | 0.03872 | 0.802 | 0.75 |
| lnc-CRISP1-1:2 | SEQ0271 | 0.01209 | 0.685 | 0.799 |
| lnc-CRYBA1-4:1 | SEQ0421 | 0.02049 | 0.693 | 0.778 |
| lnc-CRYBB1-1:1 | SEQ0055 | 0.00232 | 0.487 | 0.854 |
| lnc-CSGALNACT2-2:3 | SEQ0791 | 0.03872 | 0.781 | 0.75 |
| lnc-CSNK1A1-6:1 | SEQ0030 | 0.00111 | 0.696 | 0.875 |
| lnc-CTIF-9:2 | SEQ0504 | 0.02418 | 1.28 | 0.229 |
| lnc-CTNNA2-3:11 | SEQ0198 | 0.00829 | 0.812 | 0.813 |
| lnc-CTNNA3-1:2 | SEQ0683 | 0.03324 | 0.82 | 0.757 |
| lnc-CTNND2-3:1 | SEQ0913 | 0.0449 | 0.797 | 0.743 |
| lnc-CTR9-7:1 | SEQ0914 | 0.0449 | 0.763 | 0.743 |
| lnc-CYB5R2-3:13 | SEQ0199 | 0.00829 | 0.749 | 0.813 |
| lnc-CYBA-4:3 | SEQ0150 | 0.00681 | 0.784 | 0.819 |
| lnc-CYP2E1-1:1 | SEQ0684 | 0.03324 | 1.733 | 0.243 |
| lnc-CYTIP-2:1 | SEQ0200 | 0.00829 | 0.727 | 0.813 |
| lnc-DAO-3:1 | SEQ0685 | 0.03324 | 1.109 | 0.243 |
| lnc-DAPP1-2:11 | SEQ0505 | 0.02418 | 0.822 | 0.771 |
| lnc-DAZAP2-3:1 | SEQ0056 | 0.00232 | 0.797 | 0.854 |
| lnc-DDX1-3:1 | SEQ0915 | 0.0449 | 1.251 | 0.257 |
| lnc-DDX18-1:1 | SEQ0506 | 0.02418 | 0.721 | 0.771 |
| lnc-DDX18-1:7 | SEQ0314 | 0.01449 | 0.755 | 0.792 |
| lnc-DEFB112-3:4 | SEQ0422 | 0.02049 | 0.565 | 0.778 |
| lnc-DEK-4:1 | SEQ0507 | 0.02418 | 0.715 | 0.771 |
| lnc-DEPTOR-5:3 | SEQ0360 | 0.01727 | 0.846 | 0.785 |
| lnc-DGCR2-5:1 | SEQ0423 | 0.02049 | 0.872 | 0.778 |
| lnc-DGCR6-7:26 | SEQ0792 | 0.03872 | 0.736 | 0.75 |
| lnc-DHX37-18:1 | SEQ0229 | 0.01004 | 0.751 | 0.806 |
| lnc-DHX38-25:1 | SEQ0230 | 0.01004 | 0.894 | 0.806 |
| lnc-DKK1-5:3 | SEQ0005 | 0.00027 | 0.739 | 0.91 |
| lnc-DKK1-5:4 | SEQ0793 | 0.03872 | 0.893 | 0.75 |
| lnc-DLG5-1:1 | SEQ0034 | 0.00143 | 0.773 | 0.868 |
| lnc-DLX2-12:1 | SEQ0151 | 0.00681 | 0.747 | 0.819 |
| lnc-DMRTA1-17:1 | SEQ0201 | 0.00829 | 0.79 | 0.813 |
| lnc-DNAH9-1:1 | SEQ0508 | 0.02418 | 0.812 | 0.771 |
| lnc-DNALI1-5:4 | SEQ0102 | 0.00451 | 0.776 | 0.833 |
| lnc-DOCK7-7:1 | SEQ0015 | 0.00066 | 0.843 | 0.889 |
| lnc-DTWD2-14:1 | SEQ0361 | 0.01727 | 0.811 | 0.785 |
| lnc-DUSP10-6:1 | SEQ0057 | 0.00232 | 0.675 | 0.854 |
| lnc-DUSP26-3:2 | SEQ0031 | 0.00111 | 0.796 | 0.875 |
| lnc-DYNAP-1:1 | SEQ0604 | 0.02842 | 0.761 | 0.764 |
| lnc-EAF1-2:1 | SEQ0509 | 0.02418 | 0.737 | 0.771 |
| lnc-EBF3-1:6 | SEQ0686 | 0.03324 | 1.241 | 0.243 |
| lnc-EBLN1-1:4 | SEQ0016 | 0.00066 | 0.725 | 0.889 |
| lnc-EDDM13-5:11 | SEQ0231 | 0.01004 | 0.372 | 0.806 |
| lnc-EDDM13-5:3 | SEQ0035 | 0.00143 | 1.505 | 0.132 |
| lnc-EDEM3-7:3 | SEQ0272 | 0.01209 | 0.86 | 0.799 |
| lnc-EDRF1-1:5 | SEQ0916 | 0.0449 | 0.728 | 0.743 |
| lnc-EEF1AKMT1-3:6 | SEQ0202 | 0.00829 | 0.423 | 0.813 |
| lnc-EEF2-3:1 | SEQ0687 | 0.03324 | 1.301 | 0.243 |
| lnc-EFR3B-7:2 | SEQ0362 | 0.01727 | 0.821 | 0.785 |
| lnc-EGFR-7:1 | SEQ0917 | 0.0449 | 1.181 | 0.257 |
| lnc-EIF2AK3-31:7 | SEQ0918 | 0.0449 | 0.848 | 0.743 |
| lnc-EIF2AK3-4:81 | SEQ0688 | 0.03324 | 1.466 | 0.243 |
| lnc-ELF1-5:1 | SEQ0510 | 0.02418 | 0.799 | 0.771 |
| lnc-ELFN2-1:3 | SEQ0080 | 0.00364 | 0.764 | 0.84 |
| lnc-EPB42-1:3 | SEQ0689 | 0.03324 | 0.917 | 0.757 |
| lnc-EPHA7-3:1 | SEQ0081 | 0.00364 | 0.763 | 0.84 |
| lnc-ERCC6L2-10:2 | SEQ0605 | 0.02842 | 0.927 | 0.764 |
| lnc-ERCC6L2-6:1 | SEQ0363 | 0.01727 | 1.784 | 0.215 |
| lnc-ERFE-1:1 | SEQ0919 | 0.0449 | 0.489 | 0.743 |
| lnc-ERGIC2-2:2 | SEQ0364 | 0.01727 | 0.799 | 0.785 |
| lnc-ERH-1:1 | SEQ0424 | 0.02049 | 0.708 | 0.778 |
| lnc-ERICH1-9:1 | SEQ0920 | 0.0449 | 0.85 | 0.743 |
| lnc-ERV3-1-9:1 | SEQ0203 | 0.00829 | 1.32 | 0.188 |
| lnc-ESRP1-2:4 | SEQ0315 | 0.01449 | 0.542 | 0.792 |
| lnc-ETS1-2:2 | SEQ0082 | 0.00364 | 1.436 | 0.16 |
| lnc-EXOC2-21:6 | SEQ0204 | 0.00829 | 1.528 | 0.188 |
| lnc-EZH2-3:1 | SEQ0273 | 0.01209 | 0.79 | 0.799 |
| lnc-F11-8:1 | SEQ0690 | 0.03324 | 0.876 | 0.757 |
| lnc-F13A1-2:7 | SEQ0691 | 0.03324 | 1.485 | 0.243 |
| lnc-FAM133B-2:1 | SEQ0036 | 0.00143 | 0.767 | 0.868 |
| lnc-FAM171B-1:6 | SEQ0205 | 0.00829 | 0.851 | 0.813 |
| lnc-FAM19A3-6:3 | SEQ0274 | 0.01209 | 0.75 | 0.799 |
| lnc-FAM217A-1:2 | SEQ0032 | 0.00111 | 0.854 | 0.875 |
| lnc-FAM231B-2:1 | SEQ0511 | 0.02418 | 1.252 | 0.229 |
| lnc-FAM231B-2:2 | SEQ0512 | 0.02418 | 1.252 | 0.229 |
| lnc-FAM236D-2:1 | SEQ0692 | 0.03324 | 0.601 | 0.757 |
| lnc-FAM46C-3:1 | SEQ0794 | 0.03872 | 0.755 | 0.75 |
| lnc-FAM49B-8:1 | SEQ0010 | 0.0005 | 1.758 | 0.104 |
| lnc-FAM71F2-5:1 | SEQ0425 | 0.02049 | 0.642 | 0.778 |
| lnc-FAM72B-6:3 | SEQ0606 | 0.02842 | 1.327 | 0.236 |
| lnc-FAM84A-5:1 | SEQ0607 | 0.02842 | 0.697 | 0.764 |
| lnc-FAM84B-17:4 | SEQ0608 | 0.02842 | 0.741 | 0.764 |
| lnc-FAM84B-4:3 | SEQ0083 | 0.00364 | 0.803 | 0.84 |
| lnc-FAP-3:1 | SEQ0206 | 0.00829 | 0.749 | 0.813 |
| lnc-FARSB-6:1 | SEQ0232 | 0.01004 | 1.292 | 0.194 |
| lnc-FAT1-7:2 | SEQ0017 | 0.00066 | 1.383 | 0.111 |
| lnc-FAT4-6:1 | SEQ0609 | 0.02842 | 0.751 | 0.764 |
| lnc-FBRSL1-3:3 | SEQ0610 | 0.02842 | 1.645 | 0.236 |
| lnc-FCGR3B-4:11 | SEQ0513 | 0.02418 | 0.848 | 0.771 |
| lnc-FCGR3B-4:12 | SEQ0514 | 0.02418 | 0.848 | 0.771 |
| lnc-FER1L6-2:1 | SEQ0515 | 0.02418 | 0.779 | 0.771 |
| lnc-FGD4-8:1 | SEQ0233 | 0.01004 | 0.688 | 0.806 |
| lnc-FGD4-9:1 | SEQ0084 | 0.00364 | 0.711 | 0.84 |
| lnc-FILIP1L-3:1 | SEQ0058 | 0.00232 | 0.867 | 0.854 |
| lnc-FNBP1L-1:11 | SEQ0006 | 0.00027 | 0.743 | 0.91 |
| lnc-FOXC1-6:2 | SEQ0516 | 0.02418 | 0.736 | 0.771 |
| lnc-FOXD4L5-35:1 | SEQ0152 | 0.00681 | 1.878 | 0.181 |
| lnc-FOXO1-2:8 | SEQ0611 | 0.02842 | 1.402 | 0.236 |
| lnc-FRG2-13:3 | SEQ0275 | 0.01209 | 0.908 | 0.799 |
| lnc-FSIP1-6:4 | SEQ0795 | 0.03872 | 1.401 | 0.25 |
| lnc-FSIP2-2:1 | SEQ0921 | 0.0449 | 0.76 | 0.743 |
| lnc-FTCD-5:1 | SEQ0796 | 0.03872 | 0.722 | 0.75 |
| lnc-FTMT-2:14 | SEQ0517 | 0.02418 | 0.792 | 0.771 |
| lnc-GALC-9:8 | SEQ0234 | 0.01004 | 0.557 | 0.806 |
| lnc-GALNT2-1:1 | SEQ0426 | 0.02049 | 0.729 | 0.778 |
| lnc-GALNTL5-3:1 | SEQ0693 | 0.03324 | 0.759 | 0.757 |
| lnc-GCLC-1:13 | SEQ0922 | 0.0449 | 0.597 | 0.743 |
| lnc-GDPD5-6:1 | SEQ0153 | 0.00681 | 0.799 | 0.819 |
| lnc-GFI1B-2:3 | SEQ0797 | 0.03872 | 0.681 | 0.75 |
| lnc-GGH-3:1 | SEQ0798 | 0.03872 | 0.782 | 0.75 |
| lnc-GHR-1:1 | SEQ0003 | 0.0002 | 0.787 | 0.917 |
| lnc-GJC1-2:2 | SEQ0799 | 0.03872 | 0.832 | 0.75 |
| lnc-GJC1-2:3 | SEQ0800 | 0.03872 | 0.832 | 0.75 |
| lnc-GLIPR1-3:2 | SEQ0923 | 0.0449 | 0.923 | 0.743 |
| lnc-GLIPR1L1-2:3 | SEQ0427 | 0.02049 | 1.26 | 0.222 |
| lnc-GMDS-6:8 | SEQ0694 | 0.03324 | 0.721 | 0.757 |
| lnc-GNG5-8:1 | SEQ0695 | 0.03324 | 0.771 | 0.757 |
| lnc-GOLGA4-4:7 | SEQ0365 | 0.01727 | 0.855 | 0.785 |
| lnc-GOLGA6L6-9:1 | SEQ0069 | 0.00291 | 0.711 | 0.847 |
| lnc-GOLGA8F-2:1 | SEQ0235 | 0.01004 | 0.756 | 0.806 |
| lnc-GOLGA8O-5:6 | SEQ0428 | 0.02049 | 0.715 | 0.778 |
| lnc-GPAT4-1:3 | SEQ0316 | 0.01449 | 1.56 | 0.208 |
| lnc-GPATCH11-1:1 | SEQ0612 | 0.02842 | 0.703 | 0.764 |
| lnc-GPATCH2L-2:1 | SEQ0317 | 0.01449 | 0.85 | 0.792 |
| lnc-GPC2-2:5 | SEQ0518 | 0.02418 | 1.355 | 0.229 |
| lnc-GPR157-6:1 | SEQ0924 | 0.0449 | 0.827 | 0.743 |
| lnc-GPR161-4:1 | SEQ0070 | 0.00291 | 0.726 | 0.847 |
| lnc-GPR27-18:1 | SEQ0925 | 0.0449 | 0.774 | 0.743 |
| lnc-GPR33-14:1 | SEQ0236 | 0.01004 | 0.828 | 0.806 |
| lnc-GPR37-1:1 | SEQ0926 | 0.0449 | 0.793 | 0.743 |
| lnc-GPR39-10:2 | SEQ0154 | 0.00681 | 1.393 | 0.181 |
| lnc-GPRC5A-4:1 | SEQ0613 | 0.02842 | 0.717 | 0.764 |
| lnc-GPRC6A-2:1 | SEQ0927 | 0.0449 | 0.865 | 0.743 |
| lnc-GPSM1-3:3 | SEQ0928 | 0.0449 | 0.64 | 0.743 |
| lnc-GRAMD2B-4:1 | SEQ0801 | 0.03872 | 0.879 | 0.75 |
| lnc-GRIP1-1:2 | SEQ0429 | 0.02049 | 1.564 | 0.222 |
| lnc-GRIP1-5:2 | SEQ0519 | 0.02418 | 0.914 | 0.771 |
| lnc-GRIP1-8:1 | SEQ0802 | 0.03872 | 1.339 | 0.25 |
| lnc-GRM1-1:19 | SEQ0929 | 0.0449 | 1.338 | 0.257 |
| lnc-GRM1-1:31 | SEQ0155 | 0.00681 | 0.864 | 0.819 |
| lnc-GRM1-1:32 | SEQ0156 | 0.00681 | 0.864 | 0.819 |
| lnc-GRM8-2:2 | SEQ0430 | 0.02049 | 0.902 | 0.778 |
| lnc-GSN-2:4 | SEQ0930 | 0.0449 | 0.94 | 0.743 |
| lnc-GSN-2:5 | SEQ0803 | 0.03872 | 0.955 | 0.75 |
| lnc-GTDC1-28:5 | SEQ0157 | 0.00681 | 0.725 | 0.819 |
| lnc-GUCY1A3-1:1 | SEQ0520 | 0.02418 | 0.724 | 0.771 |
| lnc-GUSB-1:1 | SEQ0931 | 0.0449 | 0.829 | 0.743 |
| lnc-HECA-3:13 | SEQ0237 | 0.01004 | 0.8 | 0.806 |
| lnc-HECA-6:1 | SEQ0007 | 0.00037 | 0.723 | 0.903 |
| lnc-HELT-6:1 | SEQ0932 | 0.0449 | 0.784 | 0.743 |
| lnc-HHATL-2:1 | SEQ0933 | 0.0449 | 1.127 | 0.257 |
| lnc-HHLA2-2:1 | SEQ0696 | 0.03324 | 1.238 | 0.243 |
| lnc-HJURP-7:1 | SEQ0431 | 0.02049 | 0.776 | 0.778 |
| lnc-HLCS-5:1 | SEQ0238 | 0.01004 | 0.866 | 0.806 |
| lnc-HMG20A-1:2 | SEQ0432 | 0.02049 | 0.513 | 0.778 |
| lnc-HMGA1-2:3 | SEQ0804 | 0.03872 | 1.288 | 0.25 |
| lnc-HMGN1-2:1 | SEQ0433 | 0.02049 | 1.424 | 0.222 |
| lnc-HOMEZ-4:1 | SEQ0434 | 0.02049 | 0.848 | 0.778 |
| lnc-HOXC4-1:3 | SEQ0805 | 0.03872 | 0.845 | 0.75 |
| lnc-HS3ST3A1-1:1 | SEQ0239 | 0.01004 | 0.75 | 0.806 |
| lnc-HS6ST1-8:1 | SEQ0697 | 0.03324 | 1.344 | 0.243 |
| lnc-HSCB-7:1 | SEQ0614 | 0.02842 | 0.742 | 0.764 |
| lnc-HSD17B11-2:1 | SEQ0276 | 0.01209 | 0.792 | 0.799 |
| lnc-IFRD2-6:1 | SEQ0806 | 0.03872 | 1.31 | 0.25 |
| lnc-IFT80-8:1 | SEQ0934 | 0.0449 | 0.916 | 0.743 |
| lnc-IL6-8:4 | SEQ0318 | 0.01449 | 0.77 | 0.792 |
| lnc-IPO5-7:1 | SEQ0521 | 0.02418 | 0.869 | 0.771 |
| lnc-IQCF6-2:3 | SEQ0807 | 0.03872 | 2.026 | 0.25 |
| lnc-IRF2BP2-11:3 | SEQ0103 | 0.00451 | 1.403 | 0.167 |
| lnc-IRF6-1:1 | SEQ0808 | 0.03872 | 0.894 | 0.75 |
| lnc-IRS1-2:5 | SEQ0615 | 0.02842 | 1.878 | 0.236 |
| lnc-IRS1-6:1 | SEQ0037 | 0.00143 | 0.804 | 0.868 |
| lnc-IRS1-7:3 | SEQ0522 | 0.02418 | 1.153 | 0.229 |
| lnc-IRX2-10:1 | SEQ0698 | 0.03324 | 0.744 | 0.757 |
| lnc-ITGB8-2:8 | SEQ0616 | 0.02842 | 0.805 | 0.764 |
| lnc-JMJD4-2:1 | SEQ0435 | 0.02049 | 0.736 | 0.778 |
| lnc-JRK-2:1 | SEQ0935 | 0.0449 | 1.162 | 0.257 |
| lnc-JRK-2:2 | SEQ0699 | 0.03324 | 0.764 | 0.757 |
| lnc-KAT5-2:1 | SEQ0936 | 0.0449 | 0.769 | 0.743 |
| lnc-KBTBD7-1:1 | SEQ0523 | 0.02418 | 0.742 | 0.771 |
| lnc-KBTBD8-4:3 | SEQ0366 | 0.01727 | 1.457 | 0.215 |
| lnc-KCNA1-1:23 | SEQ0122 | 0.00556 | 0.633 | 0.826 |
| lnc-KCND3-1:1 | SEQ0085 | 0.00364 | 0.808 | 0.84 |
| lnc-KCNE1B-15:1 | SEQ0319 | 0.01449 | 0.823 | 0.792 |
| lnc-KCNS3-9:1 | SEQ0320 | 0.01449 | 1.265 | 0.208 |
| lnc-KCTD13-3:1 | SEQ0700 | 0.03324 | 0.709 | 0.757 |
| lnc-KCTD19-1:1 | SEQ0701 | 0.03324 | 0.761 | 0.757 |
| lnc-KDM3A-1:4 | SEQ0104 | 0.00451 | 0.731 | 0.833 |
| lnc-KDM8-3:1 | SEQ0436 | 0.02049 | 0.758 | 0.778 |
| lnc-KIAA0141-3:1 | SEQ0702 | 0.03324 | 1.15 | 0.243 |
| lnc-KIF21B-2:1 | SEQ0937 | 0.0449 | 0.873 | 0.743 |
| lnc-KIN-5:1 | SEQ0703 | 0.03324 | 0.835 | 0.757 |
| lnc-KLF11-1:8 | SEQ0704 | 0.03324 | 0.286 | 0.757 |
| lnc-KLF12-4:1 | SEQ0938 | 0.0449 | 0.806 | 0.743 |
| lnc-KLF12-7:1 | SEQ0240 | 0.01004 | 0.88 | 0.806 |
| lnc-KLHL24-2:1 | SEQ0321 | 0.01449 | 1.206 | 0.208 |
| lnc-KLK2-4:3 | SEQ0524 | 0.02418 | 0.881 | 0.771 |
| lnc-KLRG1-8:1 | SEQ0809 | 0.03872 | 1.222 | 0.25 |
| lnc-KREMEN2-1:1 | SEQ0705 | 0.03324 | 1.279 | 0.243 |
| lnc-KRR1-4:7 | SEQ0706 | 0.03324 | 0.801 | 0.757 |
| lnc-KY-4:1 | SEQ0123 | 0.00556 | 0.708 | 0.826 |
| lnc-L3MBTL2-1:1 | SEQ0367 | 0.01727 | 1.259 | 0.215 |
| lnc-LARP1B-1:15 | SEQ0277 | 0.01209 | 0.786 | 0.799 |
| lnc-LARP1B-1:17 | SEQ0278 | 0.01209 | 0.786 | 0.799 |
| lnc-LARP1B-1:18 | SEQ0279 | 0.01209 | 1.214 | 0.201 |
| lnc-LARP4-6:1 | SEQ0368 | 0.01727 | 0.803 | 0.785 |
| lnc-LBH-4:1 | SEQ0707 | 0.03324 | 1.312 | 0.243 |
| lnc-LBX1-1:1 | SEQ0241 | 0.01004 | 0.788 | 0.806 |
| lnc-LEPROTL1-12:1 | SEQ0011 | 0.0005 | 0.749 | 0.896 |
| lnc-LIMS3-1:10 | SEQ0086 | 0.00364 | 2.27 | 0.16 |
| lnc-LINC00675-1:3 | SEQ0810 | 0.03872 | 0.669 | 0.75 |
| lnc-LINS1-2:1 | SEQ0811 | 0.03872 | 0.81 | 0.75 |
| lnc-LMBRD1-5:17 | SEQ0812 | 0.03872 | 0.574 | 0.75 |
| lnc-LMX1A-2:1 | SEQ0708 | 0.03324 | 0.786 | 0.757 |
| lnc-LONP2-6:10 | SEQ0280 | 0.01209 | 0.912 | 0.799 |
| lnc-LRCH1-1:1 | SEQ0437 | 0.02049 | 0.793 | 0.778 |
| lnc-LRP12-4:3 | SEQ0939 | 0.0449 | 1.165 | 0.257 |
| lnc-LRP5L-2:14 | SEQ0940 | 0.0449 | 1.203 | 0.257 |
| lnc-LRR1-1:2 | SEQ0813 | 0.03872 | 0.729 | 0.75 |
| lnc-LRR1-1:3 | SEQ0814 | 0.03872 | 0.725 | 0.75 |
| lnc-LRRC1-5:2 | SEQ0087 | 0.00364 | 0.649 | 0.84 |
| lnc-LRRC3B-1:3 | SEQ0941 | 0.0449 | 0.463 | 0.743 |
| lnc-LRRC41-3:2 | SEQ0942 | 0.0449 | 1.272 | 0.257 |
| lnc-LRRC4C-7:1 | SEQ0815 | 0.03872 | 0.818 | 0.75 |
| lnc-LRRFIP2-3:4 | SEQ0617 | 0.02842 | 0.74 | 0.764 |
| lnc-LRRK1-3:4 | SEQ0242 | 0.01004 | 0.79 | 0.806 |
| lnc-LRRK2-1:10 | SEQ0369 | 0.01727 | 0.86 | 0.785 |
| lnc-LRRK2-1:9 | SEQ0370 | 0.01727 | 0.86 | 0.785 |
| lnc-LRRTM4-3:2 | SEQ0618 | 0.02842 | 0.865 | 0.764 |
| lnc-LY9-3:1 | SEQ0207 | 0.00829 | 1.317 | 0.188 |
| lnc-LYN-8:1 | SEQ0619 | 0.02842 | 1.516 | 0.236 |
| lnc-MAFB-1:4 | SEQ0525 | 0.02418 | 0.839 | 0.771 |
| lnc-MAMDC2-1:1 | SEQ0526 | 0.02418 | 0.828 | 0.771 |
| lnc-MAML3-2:1 | SEQ0438 | 0.02049 | 0.768 | 0.778 |
| lnc-MAN1A1-1:3 | SEQ0158 | 0.00681 | 0.722 | 0.819 |
| lnc-MAP9-6:1 | SEQ0281 | 0.01209 | 0.741 | 0.799 |
| lnc-MARCH4-2:7 | SEQ0088 | 0.00364 | 2 | 0.16 |
| lnc-MARCKS-1:9 | SEQ0527 | 0.02418 | 0.717 | 0.771 |
| lnc-MASTL-2:1 | SEQ0943 | 0.0449 | 0.756 | 0.743 |
| lnc-MB-3:1 | SEQ0944 | 0.0449 | 1.302 | 0.257 |
| lnc-MBP-16:2 | SEQ0208 | 0.00829 | 1.204 | 0.188 |
| lnc-MC5R-5:1 | SEQ0945 | 0.0449 | 0.742 | 0.743 |
| lnc-MC5R-6:2 | SEQ0243 | 0.01004 | 0.626 | 0.806 |
| lnc-MDM4-8:1 | SEQ0816 | 0.03872 | 0.791 | 0.75 |
| lnc-ME3-1:1 | SEQ0946 | 0.0449 | 1.353 | 0.257 |
| lnc-MED10-23:1 | SEQ0209 | 0.00829 | 1.295 | 0.188 |
| lnc-MED15-1:2 | SEQ0620 | 0.02842 | 1.191 | 0.236 |
| lnc-MESD-6:1 | SEQ0947 | 0.0449 | 0.762 | 0.743 |
| lnc-MEST-6:1 | SEQ0124 | 0.00556 | 0.817 | 0.826 |
| lnc-METTL22-11:1 | SEQ0709 | 0.03324 | 0.747 | 0.757 |
| lnc-MFSD8-6:3 | SEQ0528 | 0.02418 | 0.845 | 0.771 |
| lnc-MFSD8-6:8 | SEQ0371 | 0.01727 | 0.794 | 0.785 |
| lnc-MGST3-1:3 | SEQ0043 | 0.00183 | 1.664 | 0.139 |
| lnc-MIB1-1:1 | SEQ0159 | 0.00681 | 0.68 | 0.819 |
| lnc-MNX1-10:1 | SEQ0322 | 0.01449 | 1.204 | 0.208 |
| lnc-MOGAT1-3:2 | SEQ0948 | 0.0449 | 0.703 | 0.743 |
| lnc-MPLKIP-3:1 | SEQ0710 | 0.03324 | 0.867 | 0.757 |
| lnc-MPP4-3:1 | SEQ0817 | 0.03872 | 0.813 | 0.75 |
| lnc-MRC2-2:1 | SEQ0818 | 0.03872 | 0.835 | 0.75 |
| lnc-MRGPRD-2:1 | SEQ0244 | 0.01004 | 0.79 | 0.806 |
| lnc-MRGPRF-4:4 | SEQ0105 | 0.00451 | 0.604 | 0.833 |
| lnc-MROH7-2:1 | SEQ0529 | 0.02418 | 0.844 | 0.771 |
| lnc-MRPL57-5:8 | SEQ0621 | 0.02842 | 0.855 | 0.764 |
| lnc-MRPS30-13:1 | SEQ0819 | 0.03872 | 0.814 | 0.75 |
| lnc-MSH2-3:2 | SEQ0711 | 0.03324 | 1.401 | 0.243 |
| lnc-MTRNR2L1-3:1 | SEQ0530 | 0.02418 | 1.325 | 0.229 |
| lnc-MVB12B-6:1 | SEQ0531 | 0.02418 | 0.811 | 0.771 |
| lnc-MYC-12:1 | SEQ0622 | 0.02842 | 1.418 | 0.236 |
| lnc-MYO18B-2:3 | SEQ0323 | 0.01449 | 0.833 | 0.792 |
| lnc-MYO18B-3:3 | SEQ0160 | 0.00681 | 0.762 | 0.819 |
| lnc-MYOCOS-2:1 | SEQ0439 | 0.02049 | 0.891 | 0.778 |
| lnc-NAA38-3:1 | SEQ0532 | 0.02418 | 0.854 | 0.771 |
| lnc-NAALADL2-8:1 | SEQ0324 | 0.01449 | 0.864 | 0.792 |
| lnc-NANOS1-3:1 | SEQ0712 | 0.03324 | 1.277 | 0.243 |
| lnc-NAXD-6:5 | SEQ0125 | 0.00556 | 0.479 | 0.826 |
| lnc-NBPF14-1:2 | SEQ0089 | 0.00364 | 0.815 | 0.84 |
| lnc-NBPF14-3:1 | SEQ0623 | 0.02842 | 0.889 | 0.764 |
| lnc-NCR3LG1-3:1 | SEQ0018 | 0.00066 | 0.837 | 0.889 |
| lnc-NDFIP2-7:13 | SEQ0820 | 0.03872 | 0.775 | 0.75 |
| lnc-NDFIP2-7:14 | SEQ0440 | 0.02049 | 0.77 | 0.778 |
| lnc-NDRG2-5:1 | SEQ0949 | 0.0449 | 0.773 | 0.743 |
| lnc-NDUFA10-6:1 | SEQ0161 | 0.00681 | 0.712 | 0.819 |
| lnc-NDUFB9-2:2 | SEQ0713 | 0.03324 | 1.345 | 0.243 |
| lnc-NDUFS6-15:1 | SEQ0950 | 0.0449 | 0.805 | 0.743 |
| lnc-NEUROD2-4:1 | SEQ0071 | 0.00291 | 0.772 | 0.847 |
| lnc-NKAIN2-5:1 | SEQ0821 | 0.03872 | 0.794 | 0.75 |
| lnc-NKX6-1-2:1 | SEQ0282 | 0.01209 | 0.773 | 0.799 |
| lnc-NOC2L-1:21 | SEQ0245 | 0.01004 | 1.382 | 0.194 |
| lnc-NOC2L-12:1 | SEQ0372 | 0.01727 | 1.479 | 0.215 |
| lnc-NOS2-7:1 | SEQ0951 | 0.0449 | 1.203 | 0.257 |
| lnc-NPBWR1-2:2 | SEQ0952 | 0.0449 | 1.517 | 0.257 |
| lnc-NPIPB12-1:1 | SEQ0822 | 0.03872 | 1.13 | 0.25 |
| lnc-PAPPA-1:3 | SEQ0720 | 0.03324 | 2.192 | 0.243 |
| lnc-PAPPA-1:4 | SEQ0721 | 0.03324 | 0.814 | 0.757 |
| lnc-PAPPA2-1:10 | SEQ0246 | 0.01004 | 0.753 | 0.806 |
| lnc-PAPPA2-7:1 | SEQ0165 | 0.00681 | 0.839 | 0.819 |
| lnc-PATE2-1:1 | SEQ0247 | 0.01004 | 0.728 | 0.806 |
| lnc-PAX8-6:2 | SEQ0538 | 0.02418 | 1.413 | 0.229 |
| lnc-PAXIP1-8:1 | SEQ0957 | 0.0449 | 0.731 | 0.743 |
| lnc-PCDH10-11:1 | SEQ0958 | 0.0449 | 0.719 | 0.743 |
| lnc-PCDH8-12:1 | SEQ0166 | 0.00681 | 0.742 | 0.819 |
| lnc-PCOLCE2-1:1 | SEQ0959 | 0.0449 | 0.909 | 0.743 |
| lnc-PCSK9-4:6 | SEQ0327 | 0.01449 | 1.154 | 0.208 |
| lnc-PCSK9-4:9 | SEQ0328 | 0.01449 | 1.154 | 0.208 |
| lnc-PDLIM1-3:1 | SEQ0960 | 0.0449 | 0.837 | 0.743 |
| lnc-PFKP-16:15 | SEQ0628 | 0.02842 | 0.662 | 0.764 |
| lnc-PFKP-17:1 | SEQ0445 | 0.02049 | 0.834 | 0.778 |
| lnc-PHF14-14:19 | SEQ0825 | 0.03872 | 0.678 | 0.75 |
| lnc-PIGB-1:5 | SEQ0539 | 0.02418 | 0.691 | 0.771 |
| lnc-PIGM-4:1 | SEQ0248 | 0.01004 | 0.715 | 0.806 |
| lnc-PINX1-7:1 | SEQ0329 | 0.01449 | 1.307 | 0.208 |
| lnc-PLA2G2F-1:2 | SEQ0285 | 0.01209 | 1.224 | 0.201 |
| lnc-PLA2G4A-7:5 | SEQ0446 | 0.02049 | 0.865 | 0.778 |
| lnc-PLA2G4A-7:8 | SEQ0826 | 0.03872 | 0.74 | 0.75 |
| lnc-PLAT-1:3 | SEQ0961 | 0.0449 | 0.738 | 0.743 |
| lnc-PLCB1-7:2 | SEQ0827 | 0.03872 | 0.854 | 0.75 |
| lnc-PLEKHA8-3:5 | SEQ0962 | 0.0449 | 0.793 | 0.743 |
| lnc-PLK1-1:6 | SEQ0963 | 0.0449 | 0.663 | 0.743 |
| lnc-PLN-2:1 | SEQ0722 | 0.03324 | 0.781 | 0.757 |
| lnc-PLSCR2-2:1 | SEQ0964 | 0.0449 | 0.813 | 0.743 |
| lnc-POC5-3:1 | SEQ0629 | 0.02842 | 0.747 | 0.764 |
| lnc-POLE4-3:1 | SEQ0330 | 0.01449 | 0.798 | 0.792 |
| lnc-POU2AF1-1:2 | SEQ0447 | 0.02049 | 0.874 | 0.778 |
| lnc-PPIAL4F-3:2 | SEQ0828 | 0.03872 | 1.302 | 0.25 |
| lnc-PPM1D-1:8 | SEQ0540 | 0.02418 | 0.8 | 0.771 |
| lnc-PPP2R3C-4:1 | SEQ0025 | 0.00086 | 0.879 | 0.882 |
| lnc-PPP5C-4:1 | SEQ0723 | 0.03324 | 0.757 | 0.757 |
| lnc-PRDM9-19:2 | SEQ0829 | 0.03872 | 0.709 | 0.75 |
| lnc-PRDM9-20:1 | SEQ0376 | 0.01727 | 0.678 | 0.785 |
| lnc-PRELID2-1:2 | SEQ0541 | 0.02418 | 1.232 | 0.229 |
| lnc-PRKACG-1:2 | SEQ0724 | 0.03324 | 0.738 | 0.757 |
| lnc-PRKACG-2:1 | SEQ0630 | 0.02842 | 1.186 | 0.236 |
| lnc-PRKCH-1:1 | SEQ0286 | 0.01209 | 0.904 | 0.799 |
| lnc-PRKN-8:1 | SEQ0212 | 0.00829 | 1.368 | 0.188 |
| lnc-PRND-2:1 | SEQ0287 | 0.01209 | 0.798 | 0.799 |
| lnc-PRR11-1:4 | SEQ0288 | 0.01209 | 0.862 | 0.799 |
| lnc-PRR5-5:1 | SEQ0167 | 0.00681 | 0.703 | 0.819 |
| lnc-PRSS54-2:2 | SEQ0168 | 0.00681 | 0.769 | 0.819 |
| lnc-PSMB1-6:4 | SEQ0331 | 0.01449 | 2.134 | 0.208 |
| lnc-PTDSS1-1:2 | SEQ0448 | 0.02049 | 1.246 | 0.222 |
| lnc-PTP4A2-1:2 | SEQ0725 | 0.03324 | 1.223 | 0.243 |
| lnc-PTPN14-11:1 | SEQ0449 | 0.02049 | 1.341 | 0.222 |
| lnc-PTPN4-1:1 | SEQ0631 | 0.02842 | 0.755 | 0.764 |
| lnc-QRFP-5:1 | SEQ0019 | 0.00066 | 2.17 | 0.111 |
| lnc-RAB3B-1:1 | SEQ0965 | 0.0449 | 0.843 | 0.743 |
| lnc-RAB6C-3:1 | SEQ0966 | 0.0449 | 0.836 | 0.743 |
| lnc-RAI14-3:1 | SEQ0542 | 0.02418 | 0.835 | 0.771 |
| lnc-RALGAPA1-1:2 | SEQ0726 | 0.03324 | 0.86 | 0.757 |
| lnc-RALGAPA2-2:4 | SEQ0967 | 0.0449 | 0.805 | 0.743 |
| lnc-RARRES1-3:2 | SEQ0632 | 0.02842 | 0.84 | 0.764 |
| lnc-RASGRP1-3:3 | SEQ0968 | 0.0449 | 0.796 | 0.743 |
| lnc-RBFOX1-2:1 | SEQ0377 | 0.01727 | 1.269 | 0.215 |
| lnc-RBKS-6:1 | SEQ0128 | 0.00556 | 0.802 | 0.826 |
| lnc-RBM11-11:1 | SEQ0450 | 0.02049 | 0.714 | 0.778 |
| lnc-RBM25-1:1 | SEQ0969 | 0.0449 | 0.89 | 0.743 |
| lnc-RBM33-3:1 | SEQ0727 | 0.03324 | 0.762 | 0.757 |
| lnc-RBM45-7:1 | SEQ0830 | 0.03872 | 0.792 | 0.75 |
| lnc-RBMS1-7:1 | SEQ0249 | 0.01004 | 0.778 | 0.806 |
| lnc-RCSD1-4:1 | SEQ0831 | 0.03872 | 0.831 | 0.75 |
| lnc-RDH13-1:2 | SEQ0250 | 0.01004 | 0.635 | 0.806 |
| lnc-RGMA-28:2 | SEQ0378 | 0.01727 | 0.875 | 0.785 |
| lnc-RGS9-15:6 | SEQ0970 | 0.0449 | 0.705 | 0.743 |
| lnc-RHNO1-1:1 | SEQ0026 | 0.00086 | 1.248 | 0.118 |
| lnc-RHOB-1:3 | SEQ0451 | 0.02049 | 0.612 | 0.778 |
| lnc-RHOB-21:1 | SEQ0971 | 0.0449 | 0.817 | 0.743 |
| lnc-RHOBTB2-4:1 | SEQ0213 | 0.00829 | 0.839 | 0.813 |
| lnc-RIPPLY3-1:3 | SEQ0832 | 0.03872 | 0.889 | 0.75 |
| lnc-RIT2-5:1 | SEQ0289 | 0.01209 | 1.302 | 0.201 |
| lnc-RNF6-2:1 | SEQ0059 | 0.00232 | 0.692 | 0.854 |
| lnc-RNFT2-1:5 | SEQ0379 | 0.01727 | 0.8 | 0.785 |
| lnc-RNLS-1:1 | SEQ0972 | 0.0449 | 0.829 | 0.743 |
| lnc-ROBO2-16:1 | SEQ0251 | 0.01004 | 0.799 | 0.806 |
| lnc-RPE65-4:2 | SEQ0129 | 0.00556 | 0.857 | 0.826 |
| lnc-RPIA-25:1 | SEQ0130 | 0.00556 | 0.866 | 0.826 |
| lnc-RPL10L-5:1 | SEQ0452 | 0.02049 | 0.77 | 0.778 |
| lnc-RPL24-6:1 | SEQ0728 | 0.03324 | 1.245 | 0.243 |
| lnc-RPL35-2:1 | SEQ0543 | 0.02418 | 0.812 | 0.771 |
| lnc-RPL37-2:1 | SEQ0214 | 0.00829 | 1.309 | 0.188 |
| lnc-RPRM-7:1 | SEQ0380 | 0.01727 | 0.679 | 0.785 |
| lnc-RPS12-4:1 | SEQ0633 | 0.02842 | 0.806 | 0.764 |
| lnc-RPS21-4:2 | SEQ0027 | 0.00086 | 0.664 | 0.882 |
| lnc-RRM1-2:5 | SEQ0973 | 0.0449 | 0.934 | 0.743 |
| lnc-RSL1D1-2:1 | SEQ0215 | 0.00829 | 0.762 | 0.813 |
| lnc-RTL1-3:9 | SEQ0544 | 0.02418 | 0.848 | 0.771 |
| lnc-RUBCN-1:1 | SEQ0833 | 0.03872 | 0.788 | 0.75 |
| lnc-S1PR1-13:1 | SEQ0381 | 0.01727 | 0.686 | 0.785 |
| lnc-SAMD11-1:1 | SEQ0729 | 0.03324 | 1.247 | 0.243 |
| lnc-SAMD5-1:10 | SEQ0090 | 0.00364 | 0.708 | 0.84 |
| lnc-SC5D-4:1 | SEQ0730 | 0.03324 | 1.249 | 0.243 |
| lnc-SCD-7:1 | SEQ0974 | 0.0449 | 0.731 | 0.743 |
| lnc-SCGB1C2-8:1 | SEQ0975 | 0.0449 | 0.776 | 0.743 |
| lnc-SCNN1B-3:1 | SEQ0976 | 0.0449 | 1.155 | 0.257 |
| lnc-SCTR-2:4 | SEQ0634 | 0.02842 | 0.852 | 0.764 |
| lnc-SEPT14-6:1 | SEQ0545 | 0.02418 | 0.878 | 0.771 |
| lnc-SERHL2-1:8 | SEQ0546 | 0.02418 | 1.483 | 0.229 |
| lnc-SERINC1-8:3 | SEQ0731 | 0.03324 | 0.827 | 0.757 |
| lnc-SERP1-4:6 | SEQ0072 | 0.00291 | 0.719 | 0.847 |
| lnc-SERP1-4:8 | SEQ0977 | 0.0449 | 0.831 | 0.743 |
| lnc-SERPINI1-14:1 | SEQ0978 | 0.0449 | 0.85 | 0.743 |
| lnc-SERTM1-1:1 | SEQ0290 | 0.01209 | 0.817 | 0.799 |
| lnc-SFPQ-2:1 | SEQ0169 | 0.00681 | 0.72 | 0.819 |
| lnc-SGCG-7:2 | SEQ0453 | 0.02049 | 0.733 | 0.778 |
| lnc-SGK1-3:14 | SEQ0979 | 0.0449 | 1.836 | 0.257 |
| lnc-SGMS1-4:1 | SEQ0834 | 0.03872 | 0.793 | 0.75 |
| lnc-SH3BGRL2-4:1 | SEQ0980 | 0.0449 | 1.174 | 0.257 |
| lnc-SKIL-2:3 | SEQ0981 | 0.0449 | 1.222 | 0.257 |
| lnc-SLC1A3-1:1 | SEQ0547 | 0.02418 | 0.791 | 0.771 |
| lnc-SLC22A23-11:2 | SEQ0732 | 0.03324 | 1.239 | 0.243 |
| lnc-SLC25A21-1:1 | SEQ0733 | 0.03324 | 0.77 | 0.757 |
| lnc-SLC25A24-2:1 | SEQ0548 | 0.02418 | 0.883 | 0.771 |
| lnc-SLC25A30-2:4 | SEQ0291 | 0.01209 | 1.539 | 0.201 |
| lnc-SLC2A10-1:1 | SEQ0549 | 0.02418 | 0.788 | 0.771 |
| lnc-SLC38A2-1:11 | SEQ0252 | 0.01004 | 0.892 | 0.806 |
| lnc-SLC38A2-1:15 | SEQ0332 | 0.01449 | 1.425 | 0.208 |
| lnc-SLC39A11-10:11 | SEQ0292 | 0.01209 | 4.38 | 0.201 |
| lnc-SLC46A3-7:1 | SEQ0550 | 0.02418 | 0.858 | 0.771 |
| lnc-SLCO6A1-2:1 | SEQ0635 | 0.02842 | 0.775 | 0.764 |
| lnc-SLITRK5-17:1 | SEQ0293 | 0.01209 | 0.636 | 0.799 |
| lnc-SLTM-1:2 | SEQ0982 | 0.0449 | 0.9 | 0.743 |
| lnc-SMARCA5-4:18 | SEQ0253 | 0.01004 | 0.825 | 0.806 |
| lnc-SMIM14-4:1 | SEQ0454 | 0.02049 | 0.788 | 0.778 |
| lnc-SMIM17-5:4 | SEQ0734 | 0.03324 | 0.715 | 0.757 |
| lnc-SNAPC3-12:5 | SEQ0455 | 0.02049 | 1.387 | 0.222 |
| lnc-SNCA-3:1 | SEQ0551 | 0.02418 | 0.498 | 0.771 |
| lnc-SNRPB2-2:4 | SEQ0254 | 0.01004 | 1.727 | 0.194 |
| lnc-SNX10-6:1 | SEQ0636 | 0.02842 | 0.764 | 0.764 |
| lnc-SNX13-2:6 | SEQ0456 | 0.02049 | 1.576 | 0.222 |
| lnc-SNX16-6:1 | SEQ0983 | 0.0449 | 0.83 | 0.743 |
| lnc-SNX17-1:13 | SEQ0333 | 0.01449 | 1.985 | 0.208 |
| lnc-SNX17-1:8 | SEQ0984 | 0.0449 | 0.754 | 0.743 |
| lnc-SNX19-6:1 | SEQ0835 | 0.03872 | 1.249 | 0.25 |
| lnc-SNX19-9:1 | SEQ0836 | 0.03872 | 0.837 | 0.75 |
| lnc-SNX20-8:5 | SEQ0985 | 0.0449 | 0.933 | 0.743 |
| lnc-SOX11-5:1 | SEQ0382 | 0.01727 | 1.216 | 0.215 |
| lnc-SOX14-2:1 | SEQ0045 | 0.00183 | 0.837 | 0.861 |
| lnc-SPAG9-2:1 | SEQ0383 | 0.01727 | 0.851 | 0.785 |
| lnc-SPAG9-2:2 | SEQ0384 | 0.01727 | 0.851 | 0.785 |
| lnc-SPATA31A6-10:1 | SEQ0837 | 0.03872 | 0.804 | 0.75 |
| lnc-SPATA31D4-1:6 | SEQ0838 | 0.03872 | 0.718 | 0.75 |
| lnc-SPP1-1:1 | SEQ0046 | 0.00183 | 0.846 | 0.861 |
| lnc-SPRY1-9:1 | SEQ0839 | 0.03872 | 0.767 | 0.75 |
| lnc-SPTSSA-5:2 | SEQ0552 | 0.02418 | 1.31 | 0.229 |
| lnc-SRCIN1-1:18 | SEQ0553 | 0.02418 | 0.798 | 0.771 |
| lnc-SRSF2-2:5 | SEQ0735 | 0.03324 | 0.633 | 0.757 |
| lnc-ST8SIA4-3:5 | SEQ0457 | 0.02049 | 1.584 | 0.222 |
| lnc-STARD10-1:6 | SEQ0840 | 0.03872 | 1.156 | 0.25 |
| lnc-STAT1-2:3 | SEQ0986 | 0.0449 | 0.832 | 0.743 |
| lnc-STK32B-2:1 | SEQ0170 | 0.00681 | 0.807 | 0.819 |
| lnc-STOML3-6:1 | SEQ0038 | 0.00143 | 0.731 | 0.868 |
| lnc-STPG1-1:1 | SEQ0637 | 0.02842 | 0.82 | 0.764 |
| lnc-STRADB-6:2 | SEQ0987 | 0.0449 | 0.723 | 0.743 |
| lnc-SUCLA2-13:2 | SEQ0736 | 0.03324 | 1.22 | 0.243 |
| lnc-SUCLA2-13:3 | SEQ0737 | 0.03324 | 1.22 | 0.243 |
| lnc-SUGT1-3:1 | SEQ0131 | 0.00556 | 2.047 | 0.174 |
| lnc-SULT1A4-1:27 | SEQ0841 | 0.03872 | 1.274 | 0.25 |
| lnc-SULT1C2-3:1 | SEQ0842 | 0.03872 | 1.396 | 0.25 |
| lnc-SUSD1-1:5 | SEQ0638 | 0.02842 | 0.798 | 0.764 |
| lnc-SYCP1-4:1 | SEQ0843 | 0.03872 | 1.204 | 0.25 |
| lnc-TAAR9-3:2 | SEQ0738 | 0.03324 | 0.806 | 0.757 |
| lnc-TAB2-1:4 | SEQ0988 | 0.0449 | 0.846 | 0.743 |
| lnc-TACC2-8:6 | SEQ0171 | 0.00681 | 0.869 | 0.819 |
| lnc-TACSTD2-2:4 | SEQ0020 | 0.00066 | 0.757 | 0.889 |
| lnc-TADA2B-6:1 | SEQ0554 | 0.02418 | 1.467 | 0.229 |
| lnc-TAF9-10:1 | SEQ0639 | 0.02842 | 0.825 | 0.764 |
| lnc-TASP1-11:1 | SEQ0989 | 0.0449 | 1.217 | 0.257 |
| lnc-TBC1D22A-4:12 | SEQ0739 | 0.03324 | 0.969 | 0.757 |
| lnc-TBC1D3H-1:1 | SEQ0334 | 0.01449 | 0.729 | 0.792 |
| lnc-TBC1D3H-3:1 | SEQ0294 | 0.01209 | 0.72 | 0.799 |
| lnc-TBL1XR1-7:1 | SEQ0458 | 0.02049 | 0.754 | 0.778 |
| lnc-TCEANC2-3:1 | SEQ0106 | 0.00451 | 0.549 | 0.833 |
| lnc-TCEANC2-3:2 | SEQ0385 | 0.01727 | 1.882 | 0.215 |
| lnc-TCF19-1:80 | SEQ0740 | 0.03324 | 1.351 | 0.243 |
| lnc-TCF7-1:3 | SEQ0990 | 0.0449 | 0.866 | 0.743 |
| lnc-TCP10-2:1 | SEQ0991 | 0.0449 | 0.876 | 0.743 |
| lnc-TCP11-2:3 | SEQ0640 | 0.02842 | 0.67 | 0.764 |
| lnc-TCP11L2-1:4 | SEQ0741 | 0.03324 | 0.74 | 0.757 |
| lnc-TDO2-6:1 | SEQ0641 | 0.02842 | 0.758 | 0.764 |
| lnc-TDP2-1:1 | SEQ0335 | 0.01449 | 1.29 | 0.208 |
| lnc-TEAD4-1:1 | SEQ0992 | 0.0449 | 1.868 | 0.257 |
| lnc-TEFM-10:2 | SEQ0993 | 0.0449 | 0.736 | 0.743 |
| lnc-TEKT3-3:1 | SEQ0844 | 0.03872 | 0.744 | 0.75 |
| lnc-TEKT4-4:1 | SEQ0132 | 0.00556 | 1.332 | 0.174 |
| lnc-TENM3-3:3 | SEQ0001 | 0.00007 | 0.717 | 0.938 |
| lnc-TENM3-3:4 | SEQ0008 | 0.00037 | 1.947 | 0.097 |
| lnc-TENM3-3:5 | SEQ0009 | 0.00037 | 1.993 | 0.097 |
| lnc-TENM4-4:1 | SEQ0742 | 0.03324 | 2.209 | 0.243 |
| lnc-TEX10-1:1 | SEQ0459 | 0.02049 | 0.814 | 0.778 |
| lnc-TEX29-3:1 | SEQ0172 | 0.00681 | 0.767 | 0.819 |
| lnc-TEX49-4:1 | SEQ0994 | 0.0449 | 0.789 | 0.743 |
| lnc-TF-4:1 | SEQ0743 | 0.03324 | 0.898 | 0.757 |
| lnc-TFCP2L1-6:1 | SEQ0460 | 0.02049 | 0.743 | 0.778 |
| lnc-TGM6-2:1 | SEQ0216 | 0.00829 | 0.741 | 0.813 |
| lnc-THAP12-1:5 | SEQ0642 | 0.02842 | 1.427 | 0.236 |
| lnc-THOC5-3:1 | SEQ0133 | 0.00556 | 0.717 | 0.826 |
| lnc-THY1-3:1 | SEQ0995 | 0.0449 | 0.788 | 0.743 |
| lnc-THYN1-1:1 | SEQ0461 | 0.02049 | 1.173 | 0.222 |
| lnc-TLDC2-4:1 | SEQ0555 | 0.02418 | 1.214 | 0.229 |
| lnc-TLE4-7:1 | SEQ0255 | 0.01004 | 1.184 | 0.194 |
| lnc-TLK1-1:2 | SEQ0556 | 0.02418 | 0.76 | 0.771 |
| lnc-TLNRD1-3:1 | SEQ0462 | 0.02049 | 0.829 | 0.778 |
| lnc-TMEM126B-2:3 | SEQ0336 | 0.01449 | 0.508 | 0.792 |
| lnc-TMEM126B-2:4 | SEQ0643 | 0.02842 | 1.964 | 0.236 |
| lnc-TMEM132C-6:5 | SEQ0996 | 0.0449 | 1.222 | 0.257 |
| lnc-TMEM168-1:1 | SEQ0073 | 0.00291 | 0.761 | 0.847 |
| lnc-TMEM185B-12:1 | SEQ0173 | 0.00681 | 0.549 | 0.819 |
| lnc-TMEM185B-12:7 | SEQ0060 | 0.00232 | 1.694 | 0.146 |
| lnc-TMEM185B-2:3 | SEQ0386 | 0.01727 | 1.212 | 0.215 |
| lnc-TMEM211-2:8 | SEQ0644 | 0.02842 | 1.278 | 0.236 |
| lnc-TMEM242-6:1 | SEQ0463 | 0.02049 | 0.879 | 0.778 |
| lnc-TMEM248-4:11 | SEQ0845 | 0.03872 | 0.842 | 0.75 |
| lnc-TMEM70-7:1 | SEQ0217 | 0.00829 | 1.404 | 0.188 |
| lnc-TMX4-3:1 | SEQ0464 | 0.02049 | 0.776 | 0.778 |
| lnc-TNFRSF19-2:1 | SEQ0744 | 0.03324 | 1.177 | 0.243 |
| lnc-TNFSF4-3:3 | SEQ0337 | 0.01449 | 1.714 | 0.208 |
| lnc-TOGARAM2-1:5 | SEQ0645 | 0.02842 | 0.81 | 0.764 |
| lnc-TOGARAM2-1:6 | SEQ0646 | 0.02842 | 0.81 | 0.764 |
| lnc-TP53TG3-65:1 | SEQ0465 | 0.02049 | 1.227 | 0.222 |
| lnc-TP53TG3D-2:1 | SEQ0846 | 0.03872 | 0.9 | 0.75 |
| lnc-TP53TG3F-8:1 | SEQ0647 | 0.02842 | 1.33 | 0.236 |
| lnc-TPPP-1:2 | SEQ0002 | 0.00014 | 0.158 | 0.924 |
| lnc-TPPP-1:3 | SEQ0134 | 0.00556 | 1.834 | 0.174 |
| lnc-TRAM1-1:1 | SEQ0074 | 0.00291 | 0.59 | 0.847 |
| lnc-TRIB2-14:1 | SEQ0021 | 0.00066 | 0.788 | 0.889 |
| lnc-TRIM13-2:1 | SEQ0174 | 0.00681 | 0.739 | 0.819 |
| lnc-TRIM26-2:33 | SEQ0745 | 0.03324 | 0.782 | 0.757 |
| lnc-TRIM26-2:74 | SEQ0338 | 0.01449 | 1.231 | 0.208 |
| lnc-TRIM27-10:2 | SEQ0107 | 0.00451 | 1.227 | 0.167 |
| lnc-TRIM37-2:1 | SEQ0997 | 0.0449 | 1.221 | 0.257 |
| lnc-TRIM43B-1:2 | SEQ0387 | 0.01727 | 0.8 | 0.785 |
| lnc-TRIM49D1-4:1 | SEQ0175 | 0.00681 | 1.36 | 0.181 |
| lnc-TRIM77-7:1 | SEQ0847 | 0.03872 | 0.741 | 0.75 |
| lnc-TRIML2-11:1 | SEQ0557 | 0.02418 | 1.296 | 0.229 |
| lnc-TRMT11-4:1 | SEQ0218 | 0.00829 | 0.773 | 0.813 |
| lnc-TRPM1-3:1 | SEQ0388 | 0.01727 | 0.83 | 0.785 |
| lnc-TSC22D2-1:4 | SEQ0466 | 0.02049 | 0.633 | 0.778 |
| lnc-TSHB-2:3 | SEQ0295 | 0.01209 | 0.564 | 0.799 |
| lnc-TSHB-2:4 | SEQ0467 | 0.02049 | 1.766 | 0.222 |
| lnc-TSHB-2:5 | SEQ0468 | 0.02049 | 1.766 | 0.222 |
| lnc-TSHB-2:6 | SEQ0296 | 0.01209 | 0.564 | 0.799 |
| lnc-TSR3-1:2 | SEQ0339 | 0.01449 | 0.784 | 0.792 |
| lnc-TSTD2-4:3 | SEQ0848 | 0.03872 | 1.229 | 0.25 |
| lnc-TTC26-9:1 | SEQ0558 | 0.02418 | 0.686 | 0.771 |
| lnc-TTC38-7:1 | SEQ0849 | 0.03872 | 1.169 | 0.25 |
| lnc-TTF2-4:1 | SEQ0998 | 0.0449 | 0.848 | 0.743 |
| lnc-TUBA1C-1:12 | SEQ0999 | 0.0449 | 0.731 | 0.743 |
| lnc-TUBE1-6:1 | SEQ0850 | 0.03872 | 1.141 | 0.25 |
| lnc-TUBGCP3-11:1 | SEQ0469 | 0.02049 | 0.885 | 0.778 |
| lnc-TUSC5-3:1 | SEQ1000 | 0.0449 | 1.345 | 0.257 |
| lnc-TWSG1-2:1 | SEQ0047 | 0.00183 | 0.673 | 0.861 |
| lnc-UBE2QL1-4:1 | SEQ0648 | 0.02842 | 0.864 | 0.764 |
| lnc-UBE3C-10:1 | SEQ0075 | 0.00291 | 1.627 | 0.153 |
| lnc-UBLCP1-2:6 | SEQ0048 | 0.00183 | 0.755 | 0.861 |
| lnc-UCK1-2:1 | SEQ0851 | 0.03872 | 0.774 | 0.75 |
| lnc-UGCG-1:1 | SEQ0219 | 0.00829 | 0.802 | 0.813 |
| lnc-UGT1A8-3:1 | SEQ0649 | 0.02842 | 1.428 | 0.236 |
| lnc-UGT2B28-1:2 | SEQ1001 | 0.0449 | 0.818 | 0.743 |
| lnc-UGT2B28-2:1 | SEQ0559 | 0.02418 | 0.764 | 0.771 |
| lnc-UGT3A2-3:1 | SEQ0389 | 0.01727 | 0.855 | 0.785 |
| lnc-UNC93B1-1:5 | SEQ1002 | 0.0449 | 0.806 | 0.743 |
| lnc-UNCX-3:26 | SEQ0470 | 0.02049 | 0.493 | 0.778 |
| lnc-UPK3B-7:1 | SEQ0297 | 0.01209 | 0.607 | 0.799 |
| lnc-USP16-15:1 | SEQ0650 | 0.02842 | 0.811 | 0.764 |
| lnc-USP16-9:3 | SEQ0091 | 0.00364 | 0.834 | 0.84 |
| lnc-USP17L7-1:1 | SEQ0746 | 0.03324 | 1.48 | 0.243 |
| lnc-USP24-2:3 | SEQ0747 | 0.03324 | 0.694 | 0.757 |
| lnc-USP31-2:3 | SEQ0022 | 0.00066 | 0.685 | 0.889 |
| lnc-USP53-1:1 | SEQ0390 | 0.01727 | 0.824 | 0.785 |
| lnc-USP6NL-13:1 | SEQ0748 | 0.03324 | 1.209 | 0.243 |
| lnc-VGLL3-11:1 | SEQ0220 | 0.00829 | 0.81 | 0.813 |
| lnc-VPS8-2:4 | SEQ0852 | 0.03872 | 0.742 | 0.75 |
| lnc-VSTM2B-5:12 | SEQ0560 | 0.02418 | 0.771 | 0.771 |
| lnc-VWA5B1-2:1 | SEQ0391 | 0.01727 | 1.479 | 0.215 |
| lnc-WDR4-2:6 | SEQ1003 | 0.0449 | 0.929 | 0.743 |
| lnc-WDR63-6:2 | SEQ0471 | 0.02049 | 0.655 | 0.778 |
| lnc-WDR70-7:6 | SEQ1004 | 0.0449 | 0.929 | 0.743 |
| lnc-WDR7-11:1 | SEQ0749 | 0.03324 | 1.151 | 0.243 |
| lnc-WDYHV1-1:2 | SEQ0561 | 0.02418 | 0.912 | 0.771 |
| lnc-WISP1-17:2 | SEQ0135 | 0.00556 | 0.715 | 0.826 |
| lnc-WSB1-2:1 | SEQ0256 | 0.01004 | 1.293 | 0.194 |
| lnc-XCL2-4:1 | SEQ1005 | 0.0449 | 0.714 | 0.743 |
| lnc-XXYLT1-5:1 | SEQ0221 | 0.00829 | 0.681 | 0.813 |
| lnc-YPEL5-5:1 | SEQ0750 | 0.03324 | 1.357 | 0.243 |
| lnc-ZC3H12D-2:3 | SEQ0392 | 0.01727 | 0.831 | 0.785 |
| lnc-ZC3H15-2:1 | SEQ0012 | 0.0005 | 0.765 | 0.896 |
| lnc-ZFAT-1:3 | SEQ0562 | 0.02418 | 0.907 | 0.771 |
| lnc-ZFAT-1:8 | SEQ0393 | 0.01727 | 0.841 | 0.785 |
| lnc-ZFC3H1-16:2 | SEQ0651 | 0.02842 | 0.789 | 0.764 |
| lnc-ZFP57-15:1 | SEQ0177 | 0.00701 | 0.402 | 0.826 |
| lnc-ZFP90-3:6 | SEQ0563 | 0.02418 | 0.739 | 0.771 |
| lnc-ZMYM2-7:1 | SEQ0853 | 0.03872 | 1.335 | 0.25 |
| lnc-ZNF107-7:1 | SEQ0652 | 0.02842 | 0.735 | 0.764 |
| lnc-ZNF124-1:2 | SEQ0564 | 0.02418 | 0.827 | 0.771 |
| lnc-ZNF189-2:1 | SEQ0751 | 0.03324 | 0.903 | 0.757 |
| lnc-ZNF25-7:1 | SEQ0257 | 0.01004 | 1.37 | 0.194 |
| lnc-ZNF25-9:4 | SEQ0298 | 0.01209 | 0.663 | 0.799 |
| lnc-ZNF273-4:4 | SEQ0092 | 0.00364 | 0.742 | 0.84 |
| lnc-ZNF330-2:1 | SEQ0854 | 0.03872 | 0.833 | 0.75 |
| lnc-ZNF33A-14:1 | SEQ0049 | 0.00183 | 1.499 | 0.139 |
| lnc-ZNF33A-8:1 | SEQ1006 | 0.0449 | 1.115 | 0.257 |
| lnc-ZNF33B-3:11 | SEQ1007 | 0.0449 | 0.846 | 0.743 |
| lnc-ZNF33B-6:1 | SEQ0394 | 0.01727 | 2.524 | 0.215 |
| lnc-ZNF33B-6:3 | SEQ0299 | 0.01209 | 0.825 | 0.799 |
| lnc-ZNF385C-4:1 | SEQ0472 | 0.02049 | 1.311 | 0.222 |
| lnc-ZNF423-3:3 | SEQ1008 | 0.0449 | 1.258 | 0.257 |
| lnc-ZNF430-3:1 | SEQ0855 | 0.03872 | 0.797 | 0.75 |
| lnc-ZNF430-3:4 | SEQ0258 | 0.01004 | 0.788 | 0.806 |
| lnc-ZNF442-1:2 | SEQ0061 | 0.00232 | 0.683 | 0.854 |
| lnc-ZNF460-2:1 | SEQ0473 | 0.02049 | 0.842 | 0.778 |
| lnc-ZNF506-5:2 | SEQ0108 | 0.00451 | 0.684 | 0.833 |
| lnc-ZNF544-2:1 | SEQ0474 | 0.02049 | 0.805 | 0.778 |
| lnc-ZNF573-2:2 | SEQ0856 | 0.03872 | 0.823 | 0.75 |
| lnc-ZNF624-4:3 | SEQ0395 | 0.01727 | 1.241 | 0.215 |
| lnc-ZNF654-3:1 | SEQ0857 | 0.03872 | 0.869 | 0.75 |
| lnc-ZNF720-5:3 | SEQ0222 | 0.00829 | 1.313 | 0.188 |
| lnc-ZNF724-6:1 | SEQ0176 | 0.00681 | 0.729 | 0.819 |
| lnc-ZNF726-1:3 | SEQ0259 | 0.01004 | 2.115 | 0.194 |
| lnc-ZNF827-2:1 | SEQ0653 | 0.02842 | 0.924 | 0.764 |
| lnc-ZNF99-3:2 | SEQ0396 | 0.01727 | 0.751 | 0.785 |
| lnc-ZRANB2-2:1 | SEQ0654 | 0.02842 | 0.801 | 0.764 |
| lnc-ZSWIM2-15:1 | SEQ0655 | 0.02842 | 0.696 | 0.764 |
| lnc-ZWINT-2:4 | SEQ0565 | 0.02418 | 0.637 | 0.771 |
| LRP4-AS1:5 | SEQ0766 | 0.03872 | 1.288 | 0.25 |
| LYRM4-AS1:17 | SEQ0485 | 0.02418 | 0.893 | 0.771 |
| MAPT-AS1:1 | SEQ0767 | 0.03872 | 0.785 | 0.75 |
| MCPH1-AS1:2 | SEQ0308 | 0.01449 | 1.321 | 0.208 |
| MDC1-AS1:5 | SEQ0486 | 0.02418 | 1.248 | 0.229 |
| MEF2C-AS1:25 | SEQ0582 | 0.02842 | 0.907 | 0.764 |
| MIR155HG:7 | SEQ0876 | 0.0449 | 0.606 | 0.743 |
| MIR29B2CHG:33 | SEQ0583 | 0.02842 | 0.624 | 0.764 |
| MIR29B2CHG:46 | SEQ0181 | 0.00829 | 1.522 | 0.188 |
| MIR31HG:9 | SEQ0768 | 0.03872 | 0.835 | 0.75 |
| MIR4290HG:1 | SEQ0405 | 0.02049 | 0.773 | 0.778 |
| MIR9-3HG:29 | SEQ0769 | 0.03872 | 0.557 | 0.75 |
| MIR99AHG:104 | SEQ0096 | 0.00451 | 0.871 | 0.833 |
| MIR99AHG:37 | SEQ0584 | 0.02842 | 0.879 | 0.764 |
| MIR99AHG:46 | SEQ0877 | 0.0449 | 2.516 | 0.257 |
| NAV2-AS5:1 | SEQ0051 | 0.00232 | 1.302 | 0.146 |
| NAV2-AS5:2 | SEQ0052 | 0.00232 | 1.302 | 0.146 |
| NBAT1:11 | SEQ0347 | 0.01727 | 1.738 | 0.215 |
| NIFK-AS1:25 | SEQ0487 | 0.02418 | 0.846 | 0.771 |
| NUTM2A-AS1:49 | SEQ0182 | 0.00829 | 0.633 | 0.813 |
| NUTM2B-AS1:40 | SEQ0348 | 0.01727 | 0.74 | 0.785 |
| NUTM2B-AS1:53 | SEQ0004 | 0.00027 | 0.655 | 0.91 |
| PACRG-AS3:1 | SEQ0666 | 0.03324 | 1.162 | 0.243 |
| PCBP1-AS1:250 | SEQ0770 | 0.03872 | 1.266 | 0.25 |
| PITRM1-AS1:10 | SEQ0488 | 0.02418 | 1.274 | 0.229 |
| PTPRG-AS1:14 | SEQ0183 | 0.00829 | 0.625 | 0.813 |
| PURPL:13 | SEQ0585 | 0.02842 | 1.386 | 0.236 |
| RAPGEF4-AS1:1 | SEQ0878 | 0.0449 | 0.824 | 0.743 |
| RFX3-AS1:22 | SEQ0586 | 0.02842 | 0.819 | 0.764 |
| RORB-AS1:6 | SEQ0116 | 0.00556 | 0.845 | 0.826 |
| SCHLAP1:9 | SEQ0144 | 0.00681 | 0.8 | 0.819 |
| SEC24B-AS1:19 | SEQ0406 | 0.02049 | 1.852 | 0.222 |
| SLC16A12-AS1:1 | SEQ0771 | 0.03872 | 0.773 | 0.75 |
| SMILR:3 | SEQ0040 | 0.00183 | 1.306 | 0.139 |
| SNCA-AS1:3 | SEQ0041 | 0.00183 | 0.777 | 0.861 |
| SPATA41:13 | SEQ0879 | 0.0449 | 1.607 | 0.257 |
| SRGAP3-AS2:10 | SEQ0349 | 0.01727 | 0.674 | 0.785 |
| SUCLG2-AS1:14 | SEQ0489 | 0.02418 | 0.92 | 0.771 |
| SUCLG2-AS1:9 | SEQ0490 | 0.02418 | 0.92 | 0.771 |
| TCL6:24 | SEQ0066 | 0.00291 | 1.448 | 0.153 |
| TM4SF19-AS1:10 | SEQ0184 | 0.00829 | 1.84 | 0.188 |
| TM4SF19-AS1:15 | SEQ0491 | 0.02418 | 0.853 | 0.771 |
| TMEM9B-AS1:11 | SEQ0185 | 0.00829 | 3.049 | 0.188 |
| TPT1-AS1:26 | SEQ0186 | 0.00829 | 0.763 | 0.813 |
| TRIM52-AS1:24 | SEQ0492 | 0.02418 | 1.183 | 0.229 |
| TRIM52-AS1:8 | SEQ0587 | 0.02842 | 1.272 | 0.236 |
| TTN-AS1:79 | SEQ0187 | 0.00829 | 0.829 | 0.813 |
| TTN-AS1:80 | SEQ0188 | 0.00829 | 0.829 | 0.813 |
| UCA1:7 | SEQ0078 | 0.00364 | 0.697 | 0.84 |
| UGDH-AS1:10 | SEQ0407 | 0.02049 | 0.541 | 0.778 |
| WDR86-AS1:15 | SEQ0588 | 0.02842 | 1.212 | 0.236 |
| WEE2-AS1:23 | SEQ0408 | 0.02049 | 0.704 | 0.778 |
| WT1-AS:9 | SEQ0117 | 0.00556 | 0.542 | 0.826 |
| YEATS2-AS1:3 | SEQ0772 | 0.03872 | 0.806 | 0.75 |
| ZNF528-AS1:1 | SEQ0773 | 0.03872 | 0.636 | 0.75 |
| ZNF529-AS1:21 | SEQ0880 | 0.0449 | 0.819 | 0.743 |

[0200] Out of the 1008 lncRNAs differentially expressed with a statistical significance (p value <0.05), 33 lncRNAs showed a fold change of >2 or <0.5 and are shown in the Table 6.

TABLE 6
Mean +/− SD of the 33 lncRNAs that shows a differential expression with
both a statistically significance (p < 0.05, Wilcoxon test) and a fold change >2 or <0.5

| | | Fold | | | Fold |
|---|---|---|---|---|---|
| lncRNA | p value | change | lncRNA | p value | change |
| lnc-QRFP-5:1 | 0.00066 | 2.170 | MIR99AHG:46 | 0.04490 | 2.516 |
| lnc-C21orf58-1:2 | 0.00143 | 2.231 | lnc-CPM-2:11 | 0.04490 | 0.424 |
| ARRDC3-AS1:7 | 0.00232 | 0.441 | lnc-ERFE-1:1 | 0.04490 | 0.489 |
| lnc-CRYBB1-1:1 | 0.00232 | 0.487 | lnc-LRRC3B-1:3 | 0.04490 | 0.463 |
| lnc-LIMS3-1:10 | 0.00364 | 2.270 | LINC02177:8 | 0.03872 | 0.494 |
| lnc-MARCH4-2:7 | 0.00364 | 2.000 | lnc-KLF11-1:8 | 0.03324 | 0.286 |
| lnc-SUGT1-3:1 | 0.00556 | 2.047 | lnc-SNCA-3:1 | 0.02418 | 0.498 |
| DARS-AS1:47 | 0.00829 | 2.015 | lnc-UNCX-3:26 | 0.02049 | 0.493 |
| TMEM9B-AS1:11 | 0.00829 | 3.049 | BLACAT1:5 | 0.01727 | 0.424 |
| lnc-ZNF726-1:3 | 0.01004 | 2.115 | lnc-CHD1L-5:13 | 0.01449 | 0.370 |
| lnc-SLC39A11-10:11 | 0.01209 | 4.380 | lnc-EDDM13-5:11 | 0.01004 | 0.372 |
| lnc-PSMB1-6:4 | 0.01449 | 2.134 | lnc-EEF1AKMT1-3:6 | 0.00829 | 0.423 |
| DPH6-AS1:3 | 0.01727 | 2.004 | FLVCR1-AS1:13 | 0.00681 | 0.413 |
| lnc-ZNF33B-6:1 | 0.01727 | 2.524 | lnc-NAXD-6:5 | 0.00556 | 0.479 |
| lnc-PAPPA-1:3 | 0.03324 | 2.192 | lnc-ZFP57-15:1 | 0.00701 | 0.402 |
| lnc-TENM4-4:1 | 0.03324 | 2.209 | lnc-TPPP-1:2 | 0.00014 | 0.158 |
| lnc-IQCF6-2:3 | 0.03872 | 2.026 | | | |

[0201] Out of the 1008 lncRNAs differentially expressed with a statistical significance (p value <0.05), 60 lncRNAs showed an AUC of ≥0.85 and are shown in Table 7.

TABLE 7
60 lncRNAs with a p value < 0.05 and
an individual AUC value AUC ≥0.85

| lncRNA | AUC |
|---|---|
| ARRDC3-AS1:7 | 0.854 |
| HAND2-AS1:70 | 0.861 |
| LINC00882:70 | 0.875 |
| LINC00882:71 | 0.875 |
| LINC01410:11 | 0.882 |
| LINC02345:11 | 0.111 |
| NAV2-AS5:1 | 0.146 |
| NAV2-AS5:2 | 0.146 |
| NUTM2B-AS1:53 | 0.910 |
| SMILR:3 | 0.139 |
| SNCA-AS1:3 | 0.861 |
| lnc-ABCA5-7:1 | 0.111 |
| lnc-ACOT12-9:1 | 0.854 |
| lnc-APLP2-4:1 | 0.854 |
| lnc-C21orf58-1:2 | 0.132 |
| lnc-CEP170-9:2 | 0.861 |
| lnc-CNDP1-7:1 | 0.882 |
| lnc-CRYBB1-1:1 | 0.854 |
| lnc-CSNK1A1-6:1 | 0.875 |
| lnc-DAZAP2-3:1 | 0.854 |
| lnc-DKK1-5:3 | 0.910 |
| lnc-DLG5-1:1 | 0.868 |
| lnc-DOCK7-7:1 | 0.889 |
| lnc-DUSP10-6:1 | 0.854 |
| lnc-DUSP26-3:2 | 0.875 |
| lnc-EBLN1-1:4 | 0.889 |
| lnc-EDDM13-5:3 | 0.132 |
| lnc-FAM133B-2:1 | 0.868 |
| lnc-FAM217A-1:2 | 0.875 |
| lnc-FAM49B-8:1 | 0.104 |
| lnc-FAT1-7:2 | 0.111 |
| lnc-FILIP1L-3:1 | 0.854 |
| lnc-FNBP1L-1:11 | 0.910 |
| lnc-GHR-1:1 | 0.917 |
| lnc-HECA-6:1 | 0.903 |
| lnc-IRS1-6:1 | 0.868 |
| lnc-LEPROTL1-12:1 | 0.896 |
| lnc-MGST3-1:3 | 0.139 |
| lnc-NCR3LG1-3:1 | 0.889 |
| lnc-OR4F29-3:11 | 0.861 |
| lnc-PPP2R3C-4:1 | 0.882 |
| lnc-QRFP-5:1 | 0.111 |
| lnc-RHNO1-1:1 | 0.118 |
| lnc-RNF6-2:1 | 0.854 |
| lnc-RPS21-4:2 | 0.882 |
| lnc-SOX14-2:1 | 0.861 |
| lnc-SPP1-1:1 | 0.861 |
| lnc-STOML3-6:1 | 0.868 |
| lnc-TACSTD2-2:4 | 0.889 |
| lnc-TENM3-3:3 | 0.938 |
| lnc-TENM3-3:4 | 0.097 |
| lnc-TENM3-3:5 | 0.097 |
| lnc-TMEM185B-12:7 | 0.146 |
| lnc-TPPP-1:2 | 0.924 |
| lnc-TRIB2-14:1 | 0.889 |
| lnc-TWSG1-2:1 | 0.861 |
| lnc-UBLCP1-2:6 | 0.861 |
| lnc-USP31-2:3 | 0.889 |
| lnc-ZC3H15-2:1 | 0.896 |
| lnc-ZNF33A-14:1 | 0.139 |
| lnc-ZNF442-1:2 | 0.854 |

[0202] The results from the predictive modelling based on the random forest algorithm to discriminate between AD patient and healthy control populations when using the selected miRNAs with a p value <0.05 comprising signatures of 2 or more miRNAs showed a good accuracy. For example, the signature comprising three miRNAs, miR1220.3p, miR378d and miR99a.5p, enabled a good AUC of 0.839 and an accuracy of 81.8%.

[0203] The predictive modelling based on the random forest algorithm to discriminate between AD patient and healthy control populations when using the total of the 19867 lncRNAs analyzed, enabled to show that the AUC in function of the number of lncRNA reached a plateau with the following 13 lncRNAs. These 13 lncRNAs were used to construct the model. The results show that this lncRNA signature enabled a discrimination between the 2 populations (mild AD patient and healthy control populations) with an AUC value=0.993, an accuracy=95.8%, sensitivity=100% and specificity=91.7%.

| lncRNA | Rank |
|---|---|
| lnc-DLG5-1:1 | 1 |
| lnc-EBLN1-1:4 | 2 |
| lnc-FAT1-7:2 | 3 |
| lnc-PRR5-5:1 | 4 |
| lnc-RBKS-6:1 | 5 |
| lnc-FOXD4L5-35:1 | 6 |
| lnc-TENM3-3:3 | 7 |
| lnc-FAM133B-2:1 | 8 |
| lnc-ZNF726-1:3 | 9 |
| lnc-AP3M1-1:1 | 10 |
| lnc-DUSP10-6:1 | 11 |
| lnc-TPPP-1:2 | 12 |
| LINC01206:20 | 13 |

[0204] Out of the 1008 lncRNAs differentially expressed with a statistical significance (p value <0.05), the 90 lncRNAs with a fold change of >2 (or <0.5) or an AUC of ≥0.85 (or ≤0.15) were used for the predictive modelling based on the random forest algorithm. The results show that with the following 7 top ranked candidates enabled a full discrimination between AD and HV groups, with an AUC value of 100% as well as 100% accuracy, 100% sensitivity and 100% specificity.

| lncRNA | Rank |
|---|---|
| LINC02345:11 | 1 |
| lnc-EBLN1-1:4 | 2 |
| lnc-TPPP-1:2 | 3 |
| lnc-TENM3-3:3 | 4 |
| lnc-FAT1-7:2 | 5 |
| lnc-DKK1-5:3 | 6 |
| lnc-TACSTD2-2:4 | 7 |

[0205] When applying another filter considering a list of the lncRNAs which have a fold change of ≥1.6 and an AUC of ≥0.85, the use of random forest algorithm enabled to select the following 12-top ranked lncRNAs to construct the model and this enabled to discriminate between the AD and HV populations with still an excellent AUC=0.979, excellent accuracy of 95.8% sensitivity of 91.7% and specificity of 100%.

| lncRNA | Rank |
|---|---|
| lnc-TPPP-1:2 | 1 |
| ARRDC3-AS1:7 | 2 |
| lnc-TENM3-3:5 | 3 |
| lnc-TENM3-3:4 | 4 |
| lnc-QRFP-5:1 | 5 |
| lnc-CRYBB1-1:1 | 6 |
| lnc-MGST3-1:3 | 7 |
| lnc-FAM49B-8:1 | 8 |
| HAND2-AS1:70 | 9 |
| lnc-TMEM185B-12:7 | 10 |
| lnc-CNDP1-7:1 | 11 |
| lnc-C21orf58-1:2 | 12 |

[0206] Further to select the best lncRNA candidates, modeling using Random Forest algorithm was applied to a specific set of lncRNA candidates having both a statistically significant differential expression in AD patients versus healthy control populations and a good correlation (Pearson R coefficient) with scores of neurocognitive tests including MMSE and/or MOCA out of 7 neuropsychological tests performed (Table 8): The results show that the signature of the following 3 top ranked lncRNAs enabled an excellent discrimination between AD patients and healthy control populations with AUC=0.953, accuracy, sensitivity and specificity of 91.7%, 91.7% and 91.7%.

| lncRNA | Rank |
|---|---|
| lnc-TENM3-3:3 | 1 |
| lnc-MARCH4-2:7 | 2 |
| lnc-LRRC1-5:2 | 3 |

TABLE 8
lncRNAs of the present invention that correlate with neurocognitive
tests, MoCA, MMSE. R: correlation coefficient (Pearson). HV:
healthy control group, AD: mild to moderate AD group

| Cognitive test | lncRNA | R_HV + AD | R_HV | R_AD | p value | AUC |
|---|---|---|---|---|---|---|
| MoCA | LINC00839:18 | −0.80 | 0.29 | −0.78 | 0.00556 | 0.83 |
| MoCA | LINC01087:1 | −0.74 | −0.13 | −0.89 | 0.00681 | 0.82 |
| MMSE | LINC01087:1 | −0.68 | 0.05 | −0.75 | 0.00681 | 0.82 |
| MMSE | lnc-ANAPC11-2:6 | 0.65 | 0.26 | 0.77 | 0.04490 | 0.26 |
| MoCA | lnc-ANAPC11-2:6 | 0.59 | −0.46 | 0.77 | 0.04490 | 0.26 |
| MoCA | lnc-ARHGAP26-4:33 | −0.64 | −0.66 | −0.72 | 0.03872 | 0.75 |
| MoCA | lnc-CCDC197-2:1 | −0.14 | −0.42 | 0.74 | 0.00291 | 0.85 |
| MMSE | lnc-CFAP36-3:2 | −0.62 | 0.05 | −0.75 | 0.03872 | 0.75 |
| MoCA | lnc-DHX38-25:1 | −0.69 | −0.60 | −0.77 | 0.01004 | 0.81 |
| MMSE | lnc-DHX38-25:1 | −0.65 | −0.57 | −0.71 | 0.01004 | 0.81 |
| MoCA | lnc-EZH2-3:1 | −0.69 | 0.18 | −0.78 | 0.01209 | 0.80 |
| MMSE | lnc-GNG5-8:1 | −0.72 | 0.32 | −0.71 | 0.03324 | 0.76 |
| MoCA | lnc-GPRC5A-4:1 | −0.65 | −0.02 | −0.74 | 0.02842 | 0.76 |
| MMSE | lnc-GRAMD2B-4:1 | −0.59 | 0.42 | −0.72 | 0.03872 | 0.75 |
| MMSE | lnc-GRIP1-8:1 | −0.03 | 0.30 | −0.73 | 0.03872 | 0.25 |
| MoCA | lnc-LYN-8:1 | 0.13 | 0.54 | −0.71 | 0.02842 | 0.24 |
| MMSE | lnc-MAP9-6:1 | −0.73 | −0.08 | −0.74 | 0.01209 | 0.80 |
| MMSE | lnc-NRP1-4:1 | −0.11 | 0.27 | −0.72 | 0.04490 | 0.26 |
| MoCA | lnc-RBFOX1-2:1 | 0.02 | 0.13 | −0.75 | 0.01727 | 0.22 |
| MoCA | lnc-RPL37-2:1 | 0.62 | −0.16 | 0.75 | 0.00829 | 0.19 |
| MMSE | lnc-RUBCN-1:1 | 0.11 | 0.33 | 0.72 | 0.03872 | 0.75 |
| MMSE | lnc-SNCA-3:1 | 0.08 | 0.12 | 0.76 | 0.02418 | 0.77 |
| MMSE | lnc-SRSF2-2:5 | 0.10 | 0.04 | 0.75 | 0.03324 | 0.76 |
| MoCA | lnc-SRSF2-2:5 | −0.05 | −0.32 | 0.73 | 0.03324 | 0.76 |
| MMSE | lnc-TMEM185B-12:7 | 0.06 | −0.14 | −0.73 | 0.00232 | 0.15 |
| MoCA | lnc-TRIB2-14:1 | −0.76 | −0.45 | −0.71 | 0.00066 | 0.89 |
| MMSE | lnc-TRIM43B-1:2 | −0.74 | −0.11 | −0.76 | 0.01727 | 0.78 |
| MoCA | lnc-TRIM43B-1:2 | −0.72 | −0.12 | −0.74 | 0.01727 | 0.78 |
| MMSE | lnc-ZNF189-2:1 | −0.70 | −0.35 | −0.74 | 0.03324 | 0.76 |
| MoCA | lnc-ZNF189-2:1 | −0.67 | 0.03 | −0.76 | 0.03324 | 0.76 |
| MMSE | lnc-ZRANB2-2:1 | −0.65 | −0.36 | −0.82 | 0.02842 | 0.76 |
| MoCA | lnc-ZRANB2-2:1 | −0.59 | 0.16 | −0.80 | 0.02842 | 0.76 |

[0207] Modeling using Random Forest algorithm was also applied to a specific set of lncRNA candidates from Table 9 having both a statistically significant differential expression in AD patients versus healthy control populations and a good correlation (Pearson) with neuroimaging scores (volume of brain structures of relevance for cognition and memory such as the mediotemporal area, left and right hippocampus, left and right amygdala, entorhinal cortex out of more than 120 structures measured): The results show that the signature of the following 7 top ranked lncRNAs enabled an excellent discrimination between AD patients and healthy control population with AUC=0.993, accuracy=95.8%, sensitivity=91.7% and specificity=100%.

| lncRNA | Rank |
|---|---|
| lnc-TPPP-1:2 | 1 |
| lnc-TENM3-3:3 | 2 |
| lnc-TMEM185B-12:7 | 3 |
| lnc-NAXD-6:5 | 4 |
| lnc-HECA-6:1 | 5 |
| lnc-COMMD6-10:1 | 6 |
| MIR29B2CHG:46 | 7 |

TABLE 9
lncRNAs of the present invention that correlate with MRI (volumes
of the brain structures). R: correlation coefficient (Pearson).
HV: healthy control group, AD: mild to moderate AD group.

| MRI | lncRNA | R_HV + AD | R_HV | R_AD | p value | AUC |
|---|---|---|---|---|---|---|
| Left.Amygdala | CYTOR:18 | 0.71 | 0.30 | 0.69 | 0.00291 | 0.15 |
| Left.Hippocampus | DLGAP2-AS1:18 | −0.71 | −0.51 | −0.76 | 0.03324 | 0.76 |
| Left.Hippocampus | LINC00458:19 | −0.79 | −0.48 | −0.78 | 0.02842 | 0.76 |
| Mediotemporal | LINC00458:19 | −0.72 | −0.48 | −0.53 | 0.02842 | 0.76 |
| Left.Hippocampus | LINC00938:6 | −0.82 | −0.48 | −0.76 | 0.01209 | 0.80 |
| Mediotemporal | LINC00938:6 | −0.76 | −0.63 | −0.46 | 0.01209 | 0.80 |
| Right.Hippocampus | LINC00938:6 | −0.75 | −0.56 | −0.48 | 0.01209 | 0.80 |
| Left.Amygdala | LINC01629:11 | −0.78 | −0.53 | −0.83 | 0.02842 | 0.76 |
| Left.Hippocampus | lnc-AIG1-5:1 | −0.78 | −0.64 | −0.73 | 0.02418 | 0.77 |
| Left.Hippocampus | lnc-AKR1D1-5:2 | −0.74 | −0.47 | −0.69 | 0.00451 | 0.83 |
| Right.Hippocampus | lnc-AKR1D1-5:2 | −0.71 | −0.27 | −0.73 | 0.00451 | 0.83 |
| Mediotemporal | lnc-AKR1D1-5:2 | −0.71 | −0.26 | −0.72 | 0.00451 | 0.83 |
| Right.Amygdala | lnc-C3orf58-7:1 | −0.73 | −0.22 | −0.69 | 0.02842 | 0.76 |
| Left.Hippocampus | lnc-C5orf30-10:2 | −0.73 | −0.58 | −0.58 | 0.02842 | 0.76 |
| Right.Amygdala | lnc-CASP9-1:1 | 0.73 | 0.26 | 0.81 | 0.03872 | 0.25 |
| Right.Hippocampus | lnc-CHN1-5:11 | −0.72 | −0.44 | −0.67 | 0.02049 | 0.78 |
| Right.Amygdala | lnc-CLVS2-2:5 | −0.74 | −0.39 | −0.75 | 0.01727 | 0.78 |
| Left.Hippocampus | lnc-DAZAP2-3:1 | −0.72 | −0.53 | −0.58 | 0.00232 | 0.85 |
| Mediotemporal | lnc-DTWD2-14:1 | −0.75 | −0.49 | −0.79 | 0.01727 | 0.78 |
| Left.Amygdala | lnc-DTWD2-14:1 | −0.74 | −0.46 | −0.82 | 0.01727 | 0.78 |
| lh_entorhinal | lnc-DTWD2-14:1 | −0.74 | −0.59 | −0.61 | 0.01727 | 0.78 |
| Right.Hippocampus | lnc-ELFN2-1:3 | −0.77 | −0.26 | −0.76 | 0.00364 | 0.84 |
| Left.Amygdala | lnc-ELFN2-1:3 | −0.74 | −0.27 | −0.81 | 0.00364 | 0.84 |
| Mediotemporal | lnc-ELFN2-1:3 | −0.74 | −0.22 | −0.73 | 0.00364 | 0.84 |
| Right.Amygdala | lnc-ELFN2-1:3 | −0.74 | −0.37 | −0.61 | 0.00364 | 0.84 |
| Left.Hippocampus | lnc-FAM171B-1:6 | −0.72 | −0.28 | −0.62 | 0.00829 | 0.81 |
| Left.Hippocampus | lnc-FGD4-8:1 | −0.74 | −0.49 | −0.61 | 0.01004 | 0.81 |
| Left.Amygdala | lnc-FGD4-9:1 | −0.76 | −0.49 | −0.56 | 0.00364 | 0.84 |
| Right.Hippocampus | lnc-FGD4-9:1 | −0.74 | −0.19 | −0.64 | 0.00364 | 0.84 |
| Mediotemporal | lnc-FGD4-9:1 | −0.72 | −0.28 | −0.54 | 0.00364 | 0.84 |
| Left.Hippocampus | lnc-FGD4-9:1 | −0.71 | −0.33 | −0.52 | 0.00364 | 0.84 |
| lh_entorhinal | lnc-GPR39-10:2 | 0.77 | 0.68 | 0.49 | 0.00681 | 0.18 |
| Left.Amygdala | lnc-GPR39-10:2 | 0.72 | 0.54 | 0.37 | 0.00681 | 0.18 |
| Left.Hippocampus | lnc-GRM1-1:31 | −0.76 | −0.39 | −0.72 | 0.00681 | 0.82 |
| Right.Hippocampus | lnc-GRM1-1:31 | −0.71 | −0.38 | −0.56 | 0.00681 | 0.82 |
| Left.Hippocampus | lnc-GRM1-1:32 | −0.76 | −0.39 | −0.72 | 0.00681 | 0.82 |
| Right.Hippocampus | lnc-GRM1-1:32 | −0.71 | −0.38 | −0.56 | 0.00681 | 0.82 |
| Right.Hippocampus | lnc-HECA-3:13 | −0.72 | −0.31 | −0.67 | 0.01004 | 0.81 |
| Right.Amygdala | lnc-HJURP-7:1 | −0.77 | −0.46 | −0.77 | 0.02049 | 0.78 |
| Left.Hippocampus | lnc-HJURP-7:1 | −0.73 | −0.33 | −0.73 | 0.02049 | 0.78 |
| Right.Hippocampus | lnc-HJURP-7:1 | −0.73 | −0.02 | −0.93 | 0.02049 | 0.78 |
| Mediotemporal | lnc-HJURP-7:1 | −0.72 | −0.20 | −0.82 | 0.02049 | 0.78 |
| Left.Amygdala | lnc-IRS1-6:1 | −0.75 | −0.35 | −0.72 | 0.00143 | 0.87 |
| Right.Hippocampus | lnc-IRS1-6:1 | −0.73 | −0.36 | −0.56 | 0.00143 | 0.87 |
| Mediotemporal | lnc-IRS1-6:1 | −0.71 | −0.34 | −0.51 | 0.00143 | 0.87 |
| Right.Hippocampus | lnc-KDM3A-1:4 | −0.81 | −0.35 | −0.80 | 0.00451 | 0.83 |
| Mediotemporal | lnc-KDM3A-1:4 | −0.77 | −0.36 | −0.70 | 0.00451 | 0.83 |
| Left.Hippocampus | lnc-KDM3A-1:4 | −0.72 | −0.26 | −0.61 | 0.00451 | 0.83 |
| Left.Hippocampus | lnc-LARP1B-1:15 | −0.75 | −0.56 | −0.75 | 0.01209 | 0.80 |
| Right.Amygdala | lnc-LARP1B-1:15 | −0.75 | −0.63 | −0.71 | 0.01209 | 0.80 |
| Left.Hippocampus | lnc-LARP1B-1:17 | −0.75 | −0.56 | −0.75 | 0.01209 | 0.80 |
| Right.Amygdala | lnc-LARP1B-1:17 | −0.75 | −0.63 | −0.71 | 0.01209 | 0.80 |
| Right.Amygdala | lnc-MAMDC2-1:1 | −0.75 | −0.72 | −0.70 | 0.02418 | 0.77 |
| Left.Hippocampus | lnc-MAP9-6:1 | −0.79 | −0.43 | −0.87 | 0.01209 | 0.80 |
| Right.Hippocampus | lnc-NAALADL2-8:1 | −0.71 | −0.28 | −0.72 | 0.01449 | 0.79 |
| Right.Hippocampus | lnc-NBPF14-1:2 | −0.80 | −0.38 | −0.82 | 0.00364 | 0.84 |
| Mediotemporal | lnc-NBPF14-1:2 | −0.75 | −0.37 | −0.67 | 0.00364 | 0.84 |
| Right.Amygdala | lnc-NBPF14-1:2 | −0.73 | −0.40 | −0.60 | 0.00364 | 0.84 |
| Left.Hippocampus | lnc-NBPF14-1:2 | −0.72 | −0.48 | −0.52 | 0.00364 | 0.84 |
| Right.Hippocampus | lnc-PIGB-1:5 | −0.73 | −0.26 | −0.79 | 0.02418 | 0.77 |
| Right.Amygdala | lnc-PLN-2:1 | −0.77 | −0.66 | −0.72 | 0.03324 | 0.76 |
| Mediotemporal | lnc-PLN-2:1 | −0.76 | −0.66 | −0.67 | 0.03324 | 0.76 |
| Left.Hippocampus | lnc-PLN-2:1 | −0.75 | −0.67 | −0.64 | 0.03324 | 0.76 |
| Right.Hippocampus | lnc-PLN-2:1 | −0.73 | −0.54 | −0.68 | 0.03324 | 0.76 |
| Left.Hippocampus | lnc-PTPN4-1:1 | −0.74 | −0.59 | −0.69 | 0.02842 | 0.76 |
| Right.Amygdala | lnc-SLC38A2-1:11 | −0.76 | −0.73 | −0.57 | 0.01004 | 0.81 |
| Left.Amygdala | lnc-SLC38A2-1:11 | −0.73 | −0.57 | −0.38 | 0.01004 | 0.81 |
| Right.Amygdala | lnc-SMARCA5-4:18 | −0.72 | −0.35 | −0.78 | 0.01004 | 0.81 |
| Mediotemporal | lnc-SMARCA5-4:18 | −0.72 | −0.29 | −0.84 | 0.01004 | 0.81 |
| Left.Amygdala | lnc-SMARCA5-4:18 | −0.71 | −0.30 | −0.92 | 0.01004 | 0.81 |
| lh_entorhinal | lnc-TMEM242-6:1 | −0.77 | −0.64 | −0.78 | 0.02049 | 0.78 |
| Mediotemporal | lnc-TMEM242-6:1 | −0.72 | −0.62 | −0.63 | 0.02049 | 0.78 |
| Right.Hippocampus | lnc-TPPP-1:2 | −0.73 | −0.03 | −0.42 | 0.00014 | 0.92 |
| Left.Hippocampus | lnc-TRIM43B-1:2 | −0.75 | −0.47 | −0.72 | 0.01727 | 0.78 |
| lh_entorhinal | lnc-TRMT11-4:1 | −0.80 | −0.86 | −0.30 | 0.00829 | 0.81 |
| Mediotemporal | lnc-TRMT11-4:1 | −0.74 | −0.73 | −0.30 | 0.00829 | 0.81 |
| Left.Amygdala | lnc-TRMT11-4:1 | −0.73 | −0.58 | −0.35 | 0.00829 | 0.81 |
| Left.Hippocampus | lnc-USP53-1:1 | −0.75 | −0.24 | −0.84 | 0.01727 | 0.78 |
| Left.Hippocampus | lnc-ZNF33B-6:3 | −0.78 | −0.40 | −0.81 | 0.01209 | 0.80 |
| Right.Amygdala | lnc-ZNF33B-6:3 | −0.74 | −0.47 | −0.65 | 0.01209 | 0.80 |
| Right.Amygdala | MIR29B2CHG:46 | 0.74 | 0.35 | 0.82 | 0.00829 | 0.19 |
| rh_entorhinal | MIR29B2CHG:46 | 0.71 | 0.45 | 0.80 | 0.00829 | 0.19 |
| Right.Amygdala | PCBP1-AS1:250 | 0.73 | 0.20 | 0.71 | 0.03872 | 0.25 |
| Mediotemporal | PCBP1-AS1:250 | 0.71 | 0.19 | 0.70 | 0.03872 | 0.25 |

[0208] Modeling using Random Forest algorithm was also applied to a specific set of lncRNA candidates from Table 10 having both a statistically significant differential expression in AD patients versus healthy control populations and a good correlation (Pearson) with level of the CSF biomarkers of high relevance to AD pathology: Aβ42, tau or phosphorylated-tau: The results show that the signature of the following 18 top ranked lncRNAs enabled an excellent discrimination between AD patients and healthy control population with AUC=0.972 accuracy=0,917 sensitivity =0.83 and specificity=1.

| lncRNA | Rank |
|---|---|
| lnc-TPPP-1:2 | 1 |
| LINC02345:11 | 2 |
| lnc-ZNF273-4:4 | 3 |
| lnc-TACC2-8:6 | 4 |
| LINC01206:20 | 5 |
| lnc-C5orf67-3:1 | 6 |
| HAND2-AS1:58 | 7 |
| lnc-PRDM9-20:1 | 8 |
| lnc-CLK1-1:7 | 9 |
| lnc-DNALI1-5:4 | 10 |
| RORB-AS1:6 | 11 |
| lnc-TPPP-1:3 | 12 |
| lnc-BMS1-2:1 | 13 |
| lnc-ADRB1-4:1 | 14 |
| lnc-XXYLT1-5:1 | 15 |
| MIR99AHG:104 | 16 |
| LINC01748:17 | 17 |
| lnc-AKR1E2-15:1 | 18 |

TABLE 10
lncRNAs of the present invention that
correlate with CSF biomarkers

| CSF BM | lncRNA | R_AD | PValue | AUC |
|---|---|---|---|---|
| Aβ42 | LINC01748:17 | −0.73 | 0.0242 | 0.77 |
| Aβ42 | lnc-C5orf67-3:1 | 0.72 | 0.0068 | 0.82 |
| Aβ42 | lnc-CYP2E1-1:1 | −0.74 | 0.0332 | 0.24 |
| Aβ42 | lnc-FAP-3:1 | −0.72 | 0.0083 | 0.81 |
| Aβ42 | lnc-FGD4-9:1 | −0.73 | 0.0036 | 0.84 |
| Aβ42 | lnc-GLIPR1L1-2:3 | 0.72 | 0.0205 | 0.22 |
| Aβ42 | lnc-KDM3A-1:4 | −0.77 | 0.0045 | 0.83 |
| Aβ42 | lnc-LRCH1-1:1 | −0.75 | 0.0205 | 0.78 |
| Aβ42 | lnc-NPBWR1-2:2 | 0.81 | 0.0449 | 0.26 |
| Aβ42 | lnc-PLA2G2F-1:2 | −0.74 | 0.0121 | 0.20 |
| Aβ42 | lnc-POU2AF1-1:2 | −0.84 | 0.0205 | 0.78 |
| Aβ42 | lnc-RCSD1-4:1 | −0.72 | 0.0387 | 0.75 |
| Aβ42 | lnc-SERPINI1-14:1 | −0.74 | 0.0449 | 0.74 |
| Aβ42 | lnc-TAF9-10:1 | −0.75 | 0.0284 | 0.76 |
| Aβ42 | lnc-TNFRSF19-2:1 | 0.71 | 0.0332 | 0.24 |
| Aβ42 | lnc-TPPP-1:2 | −0.86 | 0.0001 | 0.92 |
| Aβ42 | lnc-TPPP-1:3 | 0.8 | 0.0056 | 0.17 |
| Aβ42 | lnc-ZNF273-4:4 | −0.87 | 0.0036 | 0.84 |
| T-tau | HAND2-AS1:58 | 0.92 | 0.0045 | 0.83 |
| T-tau | HAND2-AS1:59 | 0.9 | 0.0056 | 0.83 |
| T-tau | HAND2-AS1:70 | 0.8 | 0.0018 | 0.86 |
| T-tau | HAND2-AS1:71 | 0.8 | 0.0036 | 0.84 |
| T-tau | LINC00200:6 | 0.71 | 0.0029 | 0.15 |
| T-tau | LINC00649:23 | −0.74 | 0.0036 | 0.84 |
| T-tau | LINC01206:11 | −0.74 | 0.0332 | 0.76 |
| T-tau | LINC01355:9 | 0.83 | 0.0332 | 0.76 |
| T-tau | lnc-ADRB1-4:1 | 0.8 | 0.0056 | 0.83 |
| T-tau | lnc-AKR1E2-15:1 | 0.75 | 0.0205 | 0.22 |
| T-tau | lnc-APBA1-5:1 | 0.8 | 0.0284 | 0.76 |
| T-tau | lnc-BMS1-2:1 | 0.76 | 0.0332 | 0.24 |
| T-tau | lnc-CA7-2:2 | −0.73 | 0.0332 | 0.76 |
| T-tau | lnc-CLK1-1:7 | −0.83 | 0.0083 | 0.81 |
| T-tau | lnc-DAPP1-2:11 | 0.8 | 0.0242 | 0.77 |
| T-tau | lnc-DNALI1-5:4 | −0.76 | 0.0045 | 0.83 |
| T-tau | lnc-ELF1-5:1 | 0.86 | 0.0242 | 0.77 |
| T-tau | lnc-LBH-4:1 | −0.79 | 0.0332 | 0.24 |
| T-tau | lnc-MVB12B-6:1 | 0.89 | 0.0242 | 0.77 |
| T-tau | lnc-MYO18B-2:3 | −0.72 | 0.0145 | 0.79 |
| T-tau | lnc-OR8G5-7:2 | −0.81 | 0.0284 | 0.76 |
| T-tau | lnc-PAX8-6:2 | 0.71 | 0.0242 | 0.23 |
| T-tau | lnc-POLE4-3:1 | 0.71 | 0.0145 | 0.79 |
| T-tau | lnc-SERTM1-1:1 | −0.72 | 0.0121 | 0.80 |
| T-tau | lnc-SOX14-2:1 | 0.71 | 0.0018 | 0.86 |
| T-tau | lnc-SYCP1-4:1 | −0.83 | 0.0387 | 0.25 |
| T-tau | lnc-TACC2-8:6 | −0.78 | 0.0068 | 0.82 |
| T-tau | lnc-TEAD4-1:1 | −0.71 | 0.0449 | 0.26 |
| T-tau | lnc-TF-4:1 | 0.82 | 0.0332 | 0.76 |
| T-tau | lnc-TTF2-4:1 | −0.8 | 0.0449 | 0.74 |
| T-tau | lnc-XXYLT1-5:1 | −0.71 | 0.0083 | 0.81 |
| T-tau | lnc-ZC3H12D-2:3 | −0.72 | 0.0173 | 0.78 |
| T-tau | lnc-ZNF430-3:4 | −0.79 | 0.01 | 0.81 |
| T-tau | MIR99AHG:104 | 0.9 | 0.0045 | 0.83 |
| T-tau | PITRM1-AS1:10 | 0.91 | 0.0242 | 0.23 |
| T-tau | RORB-AS1:6 | 0.73 | 0.0056 | 0.83 |
| T-tau | SEC24B-AS1:19 | −0.93 | 0.0205 | 0.22 |
| T-tau | ZNF528-AS1:1 | −0.74 | 0.0387 | 0.75 |
| p-tau | BLACAT1:3 | −0.71 | 0.0145 | 0.21 |
| p-tau | HAND2-AS1:58 | 0.71 | 0.0045 | 0.83 |
| p-tau | KAZN-AS1:4 | −0.73 | 0.0205 | 0.78 |
| p-tau | LINC00649:23 | −0.71 | 0.0036 | 0.84 |
| p-tau | LINC01206:11 | −0.77 | 0.0332 | 0.76 |
| p-tau | LINC01206:20 | 0.84 | 0.0205 | 0.22 |
| p-tau | LINC01684:16 | 0.71 | 0.0242 | 0.77 |
| p-tau | LINC02246:11 | 0.74 | 0.0173 | 0.78 |
| p-tau | LINC02345:11 | −0.75 | 0.0007 | 0.11 |
| p-tau | lnc-AQP8-2:7 | −0.82 | 0.0173 | 0.22 |
| p-tau | lnc-AUH-2:9 | −0.78 | 0.0332 | 0.24 |
| p-tau | lnc-CA7-2:2 | −0.79 | 0.0332 | 0.76 |
| p-tau | lnc-CLK1-1:7 | −0.73 | 0.0083 | 0.81 |
| p-tau | lnc-ELF1-5:1 | 0.74 | 0.0242 | 0.77 |
| p-tau | lnc-FER1L6-2:1 | 0.83 | 0.0242 | 0.77 |
| p-tau | lnc-HS3ST3A1-1:1 | 0.77 | 0.01 | 0.81 |
| p-tau | lnc-KCTD19-1:1 | 0.78 | 0.0332 | 0.76 |
| p-tau | lnc-LMBRD1-5:17 | −0.73 | 0.0387 | 0.75 |
| p-tau | lnc-MVB12B-6:1 | 0.72 | 0.0242 | 0.77 |
| p-tau | lnc-NKX6-1-2:1 | 0.79 | 0.0121 | 0.80 |
| p-tau | lnc-OR8G5-7:2 | −0.85 | 0.0284 | 0.76 |
| p-tau | lnc-PACRGL-5:1 | 0.71 | 0.0332 | 0.76 |
| p-tau | lnc-PRDM9-20:1 | 0.73 | 0.0173 | 0.78 |
| p-tau | lnc-RHOB-1:3 | −0.76 | 0.0205 | 0.78 |
| p-tau | lnc-RPE65-4:2 | −0.79 | 0.0056 | 0.83 |
| p-tau | lnc-SERTM1-1:1 | −0.82 | 0.0121 | 0.80 |
| p-tau | lnc-SOX14-2:1 | 0.76 | 0.0018 | 0.86 |
| p-tau | lnc-SPAG9-2:1 | 0.71 | 0.0173 | 0.78 |
| p-tau | lnc-SPAG9-2:2 | 0.71 | 0.0173 | 0.78 |
| p-tau | lnc-SYCP1-4:1 | −0.76 | 0.0387 | 0.25 |
| p-tau | lnc-TACC2-8:6 | −0.75 | 0.0068 | 0.82 |
| p-tau | lnc-TEKT3-3:1 | −0.84 | 0.0387 | 0.75 |
| p-tau | lnc-TF-4:1 | 0.73 | 0.0332 | 0.76 |
| p-tau | lnc-TP53TG3D-2:1 | 0.71 | 0.0387 | 0.75 |
| p-tau | MIR99AHG:104 | 0.92 | 0.0045 | 0.83 |
| p-tau | RORB-AS1:6 | 0.81 | 0.0056 | 0.83 |
| p-tau | SEC24B-AS1:19 | −0.75 | 0.0205 | 0.22 |
| p-tau | TM4SF19-AS1:10 | 0.76 | 0.0083 | 0.19 |

### MATERIALS AND METHODS

[0209] To identify miRNA in plasma or serum or whole blood samples of human subjects, miRNA profiling of 2083 miRNAs was performed using HTG EdgeSeq miRNA whole transcriptome V2 targeted sequencing assay (HTG WTA V2, HTG Molecular, Tuscon, United States). This technology is based on nuclease protection targeted RNA sequencing assay that uses an extraction free lysis process followed by a nuclease protection assay (NPA) to prepare a stoichiometric library of nuclease protection probes (NPP) for measurement.

[0210] To identify lncRNAs in serum, plasma or whole blood samples of human subjects, circulating total RNA was first extracted and sequencing libraries were prepared by removal of ribosomic RNA (RiboZero TruSeq library preparation kit, Illumina Inc. San Diego, USA) and sequenced on Illumina NextSeq500 with 2×75 bp read length.

[0211] ncRNA (miRNA and lncRNA) were also measured by qPCR using specific primers. For this, circulating total RNA was first extracted, reverse transcription and real time PCR using specific primers were performed. Using FiMAP, a proprietary platform based on hybridization of PCR products on coated microdiscs with complementary oligonucleotide coupled to detection probes. Total RNA was extracted followed by reverse transcription and PCR step allowing multiplexing of several targets using specific primers to the ncRNAs. Quantification was therefore performed on the FiMAP platform using coded microdiscs specific of each ncRNA.

### Patient Population and Samples

[0212] Serum or plasma samples were prepared from blood samples collected in lithium-heparin tubes and whole blood samples were collected in Paxgene RNA tubes. Samples were from healthy volunteers (HV), donors at the “Etablissement Français du Sang” (EFS) of Mulhouse, France, and from cognitively intact healthy control subjects and patients with mild cognitive impairment or with different stages of Alzheimer's disease (AD) recruited according to the protocols of the Amoneta Diagnostics sponsored prospective studies registered to the Agence Nationale de Sécurité du Médicament et des Produits de Santé (ANSM) including ADKIT study under the ID RCB: 2015-A00118-41 on Jan. 22, 2015, the chronobiological study under the ID RCB: 2016-A200227-44 on Feb 4., 2016.

Method for miRNAs

### HTG EdgeSeq Run

[0213] HTG whole transcriptome miRNA (WTA) kit was used (HTG WTA V2, HTG Molecular, Tuscon, United States). Samples were prepared accordingly to the following protocol: 15 μl of plasma lysis buffer and 15 μl of plasma sample and 3μl of Proteinase K are mixed and incubated at 50° C. for 60 min with orbital shaking. 25 μl of the mix is transferred to the HTG sample plate and loaded into the HTG processor to perform the nuclease protection assay and prepare the stoichiometric NPP.

### Molecular Barcoding and Adapter Addition

[0214] For plasma samples, barcoding is performed using Hemo KlenTaq (MO332S, NEB, Evry, France) enzyme. For each sample, we mix 2.4 μl of Hemo KlenTaq, 0.6 μl of dNTPs (10 nM) (NEB, N04475), 6 μl of OneTaq PCR GC Buffer 5X (B90235, NEB, Evry, France), 3 μl of Forward and Reverse Primers (HTG WTA, HTG Molecular, Tuscon, United States), 3μl of sample preparation and 12 μl of H2O. PCR step was performed on ABI 2720 Thermocycler using the following cycling profile: 95° C. for 4 min followed by 16 cycles of 95° C. for 15 sec, 55° C. for 45 sec and 68° C. for 45 sec. Protocol is ended with 68° C. for 10 min.

### PCR Clean Up

[0215] In order to remove excess of primer from the library, Agentcour AMPure XP beads (A63880, Beckmancoulter, Villepinte, France) were used. For each sample, 37.5 μl of AMPure XP beads are used in combination with 15 μl of the PCR product. After mixing 10 times with pipette, the solution is incubated for 5 min at room temperature and then placed on the magnetic stand. After 2 minutes to separate beads, the cleared solution is carefully removed without disturbing the beads. Beads are washed 2 times with 200 μl of Ethanol 80%. Elution of PCR product link to the beads is performed with 25 μl of H2O. The purified solution of PCR product is place in a new tube while the plate is on the magnetic stand to separate PCR products and beads.

### Determination of Library Concentration:

[0216] To determine concentration of library for each sample, Kapa Biosystems qPCR Kit (KK4824, Cliniscience, Nanterre, France) is used. For each reaction, the mix is composed of 12 μl of Mastermix, 0.4 μl of ROX dye, 3.6 μl of H2O and 4 μl of template (standards or library diluted at 1/10000). The samples were run on a ABI PRISM 7900HT (High ROX) will the following cycles: 95° C. for 5 min, 35 cycles of 95° C. for 30 sec and 65° C. for 45° C. with data collection followed by a dissociation curve. Standards are corresponding to an amplicon of 452 bp whereas the amplicon of NPP with barcode correspond to 115 bp. The ratio is applied to determine the concentration of each library.

### Sample Pooling and Sequencing

[0217] Each sample are pooled in order to generate a pooled library at 4 nM. From this pooled library, 5 μl where mixed with 0.2N NaOH freshly prepared and incubated for 2 min. The solution was vortexed briefly and centrifuged at 280g for 1 minute and mixed with 990 μl of pre-chiller HT1 buffer (Illumina NextSeq Reagent v2 kit, Illumina, Paris, France). 15% PhiX (PhiX control v3, Illumina, Paris, France) at 20 pM was prepared. 260 μl of prepared denatured library at 20 pM was mix with 39 μl of 20 pM PhiX and 1001 μl of HT1 Buffer was loaded into Illumina NextSeq500 Mid Output V2 150 cycles kit and sequenced.

### Sequence Analysis

[0218] Data reconstruction and analysis was performed using directly FASTQ files from the Illumina Sequencer and processed by the HTG Parser software.

### Statistics

[0219] The data are normalized using the method recommended by the supplier. This normalization is based on total count of sequences after filtering out all values below 70 (threshold recommended by the supplier). After normalization, all miRNAs with 75th percentile of this threshold are considered as noise and have been deleted.

[0220] In order to determine miRNAs that discriminate Alzheimer disease patients from healthy control subjects, the following statistical methods are applied to the normalized data: two-tailed Welch t test and computation fold change were performed on normalized data. Individual ROC Curve was performed for each miRNA detected in the samples. The random Forest algorithm with the best miRNA in term of AUROC was performed to establish a predictive model for the diagnosis of Alzheimer disease. The final list of miRNAs of interest was chosen with p value <0.05 or fold change ≥1.49 or ≤0.75 in Log2 and/or individual AUC determined by the selection of all the miRNAs that are at least in one of the three lists of selected biomarkers (tables 1, 2 and 3).

Method for lncRNA

### Samples Sequencing

[0221] Ribonucleic acid (RNA) extraction is performed starting from 1.5 ml of serum, using Norgen Serum/plasma extraction and RNA Clean-Up and Concentration Micro-Elute Kits according to the manufacturer's instructions.

[0222] Sequencing libraries are prepared from the total amount of extracted RNA, using the Illumina TruSeq stranded total RNA library preparation kit combined with the human/mouse/rat RiboZero rRNA removal kit (Illumina Inc. San Diego, USA, C). All steps are performed with the low-throughput protocol and according to the manufacturer's instructions, with no fragmentation step. Briefly, cytoplasmic ribosomal RNA (rRNA) are hybridized to biotinylated target-specific oligos and removed using streptavidin coated magnetic beads. rRNA depleted RNA samples are then reverse transcribed into complementary deoxyribonucleic acid (cDNA). To ensure strand specificity, single stranded cDNA is first synthetized using Super-Script II reverse transcriptase (Invitrogen) and random primers in the presence of Actinomycin D, and then converted to double stranded cDNA with the second strand marking mix that incorporates dUTP in place of dTTP. Resulting blunt ended cDNA are purified using AMPure XP magnetic beads. After a 3′end adenylation step, Illumina's adapters ligation is performed. So, obtained singled indexed libraries are washed twice using AMPure XP beads to remove excess adapters and enriched by PCR (15 cycles). PCR products are purified with a final AMPure XP beads wash and sequencing ready libraries are eluted in 30 μl of resuspension buffer. For quality control, 1 μl of each library is run on the Agilent Technologies 2100 Bioanalyzer using a DNA 1000 chip according to the manufacturer's recommendations. Absence of adapter dimers is checked and the average library size is determined by a region table. Libraries are quantified on Qubit 2.0 using Qubit dsDNA High Sensitivity assay kit (Invitrogen). Library size previously determined on the Bioanalyzer is used to calculate molar concentrations from mass concentrations. All libraries are sequenced with the Illumina NextSeq500 (2×75bp).

### Bioinformatic Analysis

[0223] RNA-seq data analysis is performed using Partek Flow (Partek Inc., St Louis, Mo., USA build 6). The pre-alignment QA/QC module of Partek Flow is used to visualize the read quality of the FASTQ files. All reads are examined. The raw FASTQ files are trimmed at the 3′ end in function of their quality score (Phred score). The parameters used are an end minimum quality level of 30 and a minimum trimmed read length of 50. Unaligned reads are mapped using the Homo sapiens hg19 genome. This mapping is done using the software STAR version 2.5.3 (Dobin, A., Davis, C. A., Schlesinger, F., Drenkow, J., Zaleski, C., Jha, S., Batut, P., Chaisson, M., and Gingeras, T. R. (2013). STAR: ultrafast universal RNA-seq aligner. Bioinforma. Oxf. Engl. 29, 15-21). The default parameters are used. The post-alignment QC module of Partek Flow was used to visualize the average base quality score per position as well as the mapping quality per alignment. The mapped reads were quantified using the GTF file with the patented lncRNA annotation for quantification using the Partek Expectation/Maximization (E/M) algorithm (Xing, Y., Yu, T., Wu, Y. N., Roy, M., Kim, J., and Lee, C. (2006). An expectation-maximization algorithm for probabilistic reconstructions of full-length isoforms from splice graphs. Nucleic Acids Res. 34, 3150-3160). The default parameters are used. The transcripts where their medians are under the median read density in intergenic regions are discarded for the next steps of the analysis. The transcript counts were normalized by CPM (counts per million). Only transcripts showing high expression (CPM≥10) in at least half the samples of one group are considered.

### Statistical Analysis and Predictive Modelling

[0224] To determine differentially expressed lncRNA, a statistical analysis is performed using Wilcoxon Mann-Whitney parametric test. A lncRNA with a p value ≤0.05 is considered as differentially expressed. In order to build classification models for the 2 classifications, the Classification for MicroArrays (CMA) package of R (Slawski M, Daumer M, Boulesteix A L. CMA: a comprehensive Bioconductor package for supervised classification with high dimensional data. BMC Bioinformatics 2008, 9:439) with a leave-one-out cross-validation has been used. The algorithms used for this predictive modelling are (a) random forest, (b) linear discriminant analysis and (c) naïve Bayes (Breiman L. Random forests. Machine Learning, 45(1): 5-32, 2001).

[0225] The rank of the RNA candidate in a model was calculated by the mean rank of 10 candidates selections (per CV-fold). Per model (and RNA selection method) the AUC was plotted as a function of the number of RNAs in the model. The optimal number of RNAs per model was determined graphically. ROC curves and confusion matrices were generated to assess the predictive performance of our models. The values of AUC, accuracy, sensitivity, specificity, positive and negative predictive values are reported.

[0226] Additional method for quantification of miRNA and lncRNA

### Total RNA Extraction

[0227] Total RNA was extracted using Paxgene Blood RNA kit (Qiagen, France) and Serum/Plasma mini kit (Norgen Biotek, Canada) respectively, according to manufacturer's instructions.

[0228] RNA quality was examined on an Agilent 2100 Bioanalyzer with the RNA 6000 Nano Kits (Agilent, France). RNA quantity was measured on Qubit 3.0 fluorometer using RNA High sensitivity kit (Fisher Scientific, France).

cDNA Synthesis

[0229] Total RNA was used for miRNA and lncRNA cDNA synthesis as follows. For miRNA, 100 ng of RNA was reverse transcribed in a final volume of 10 μl including 1 μl of 10× poly(A) polymerase buffer, 0.1 mM of ATP, 1 μM of universal miRNA RT-primer, 0.1 mM of each deoxynucleotide (dATP, dCTP, dGTP and dTTP), 100 units of MuLV reverse transcriptase (New England Biolabs, USA) and 1 unit of poly(A) polymerase (New England Biolabs, USA) was incubated at 42° C. for 1 hour followed by enzyme inactivation at 95° C. for 5 minutes. The sequence of the RT-primer was 5′-CAGGTCCAGTTTT TTTTTTTTTTTVN, where V is A, C and G and N is A, C, G and T. The primer was purchased from IDT (Integrated DNA Technologies, Belgium). For lncRNAs, Reverse transcription was performed using high capacity cDNA reverse transcription kit (Fisher scientific, France) according to the manufacturer instructions.

qPCR Quantification

[0230] For lncRNA, preamplification reactions were prepared using Applied Biosystems preamplification master mix with 0.1X (100 nM) of each of the primers pairs corresponding to the lncRNAs. 16 preamplification cycles were performed as preconized by the furnisher (50° C. 2 minutes, 96° C. 10 minutes, 40 cycles at 95° C. for 15 seconds and 60° C. for 1 minute). For miRNA amplification, primers were designed using miRprimer tool (PMID: 24472427). Quantitative PCR of biological samples was done in 10 μl total volume with 1μl of cDNA or preamplification product diluted 1/20 in TE buffer (for miRNA and lncRNA respectively), 5 μl of 2× Soadvanced SYBR green PCR master mix (Biorad, USA) and 250 nM of each primer. Cycling conditions were 95° C. for 5-10 min followed by 40 cycles of 95° C. for 10-30 sec and 60° C. 30-60 sec. A melting curve analysis (60° C. to 99° C.) was performed after the thermal profile to ensure specificity in the amplification. Relative expression level was determined against a standard curve realized on a 5 log scale using CFX maestro Software (Biorad,USA).

### FIMAP Quantification

[0231] lncRNA and miRNAs of interest were also quantified using the FIMAP/QMAP platform developed by Quantamatrix (South Korea). Briefly, lncRNAs and miRNAs were amplified by PCR using primers with the same sequences as for qPCR that were chemically modified. Forward primers were phosphorylated in 5′ and Reverse primers biotinylated in 5′. Multiplexed PCR reactions were performed on Biorad T100 thermocycler in 20 μl reactions containing 2 μl of miRNA or lncRNA cDNA, 250 nM of each primers and 10 μl of 2X One Taq Hot Start 2X master Mix (New England Biolabs, USA) with the following conditions: 30 seconds at 94° C., 25 cycles of 30s at 94° C., 1 min at 60° C. and 1 min at 68° C., followed by a final extension at 68° C. for 5 minutes. PCR products were then digested with 25 U of lambda exonuclease for 30 minutes at 37° C. to eliminate the phosphorylated strand and keep only the biotinylated ones. So digested products were quantified on QMAP using coded silica microdisks coated with oligos complementary to the RNAs of interest (one code per target oligo). Briefly, biotinylated PCR products were incubated with the coated microdisks in a 96 well plate, and hybridized products revealed by addition of a fluorescent streptavidin conjugate, SAPE (Prozyme, Denmark) after washing steps. Plates were imaged on QMAP that takes 2 images per spot: one dark image to quantify the fluorescence and 1 white light image to read the microdisks codes. Each target relative expression is then calculated by QMAP software by assigning fluorescence signal to each target according to the associated microdisk code.

### RESULTS

[0232] Profiling of 2083 miRNAs based on the miRbase v20 was performed on plasma samples from patients suffering of mild impairment or moderate Alzheimer disease and cognitively intact healthy subjects. After normalization of the results generated with HTG EdgeSeq technology, averages of 406 miRNAs par sample were positively identified. From these 406 miRNAs identified, statistical analysis was performed in order to identify miRNAs with predictive value of Alzheimer disease.

[0233] Random Forest algorithm was used for the classification model. From this, several sets of 2 to 20 miRNAs with high predictive value were identified and provide an AUC ranged from 0.839 to 0.793 with an accuracy over 0.77, specificity over 0.77 and sensitivity superior to 0.74. FIG. 2 shows a predictive model combining 3 miRNAs with an AUC of 0.839.

[0234] A list of miRNAs useful for diagnosis of Alzheimer disease was generated. This list was determined using multiple statistical analyses: individual AUC, fold change and t-test for p value (Tables 2, 3 and 4). 74 miRNAs were selected from plasma lithium heparin samples, from the data set with a p value under 0.05. They were further analyzed based on fold change ≥1.49 or ≤0.75 and individual AUC >0,6 or <0,4. See Tables 2, 3 and 4.

[0235] Profiling 127,802 transcripts based on LNCipedia v5.2 was performed on serum samples from patients suffering of Alzheimer disease and cognitively intact healthy subjects using total-RNAseq technology. Above 127,802 transcripts, 19867 lncRNAs were identified with expression level of over 10 CPM in at least half the samples of one group.

[0236] Out of 19867 lncRNAs, 1008 lncRNAs useful for diagnosis of Alzheimer disease was selected based on the statistical significance (p value <0.05, Wilcoxon test). Random Forest algorithm was used for the classification model. From this, several sets of 2-20 lncRNAs with high predictive value were identified. The sets of selected 2-20 lncRNAs provide an AUC ranged from 0.7 and up to 1 with an accuracy, sensitivity and specificity ranged from 0.7 to 1.

[0237] FIGS. 3 to 12 show examples of results on a) the level of expression of individual lncRNA (FIG. 3), b) the statistical significance (p value) to differentiate the 2 populations, schematized as a Volcano plot (FIG. 4), c) predictive modelling using the Random Forest algorithm enabling identification of several sets of lncRNA signatures for diagnosis of Alzheimer (FIGS. 5-10) and d) correlation of the lncRNA level with neuroimaging or CSF biomarkers (FIGS. 11, 12).

The application's sequence listing, which the Patent Office published only in electronic form, follows.

SEQUENCE LISTING (1008 sequences)

SEQ ID NO: 1 - DNA, 30872 bp, Homo Sapiens
agagagccaccggggcccgctcgcgcgcctctgagaggctgtccgcgcgcgcgcgtgtgtgcgtgagtgtggatttgccgggactggagctggaaagttcaaactaaacgtgttgctctcgccgagtgccgaggccgcggcggaggctgcccaacttccccgggccaagtgagtggcgttgcccagcgcctttggcgaggcggcggccgctcggccctgcgcccggccgcggcggcggcggctccgctcgccccgggagggagcccgcggccagggctggactctcgccccgccacctccaccgactctctcctcagcctccgcgcctggcaccgcagcaagacttgaatgaagtgatcatgtaaactagagaaaggagattaaaaataacctctggatattcctctcatgtgatctttattctggatgaagcattaggacagctaatagccgtgtgtcacttaaaaatccaacttgagaactgtcaccaaagatgtctaggaactttgaagaaacatgaagtaatatgcatgcaaagtaaagtaaaatttcctgagcaaaggacatcagaatcagtttcatgaagatgaacctgtggccagaaaatgaagacctttcctgaattcagagaaccaactttgcacccacaagagagaaaaaggcaaataaataatattatattttggaagagtcttacaaaatgattcataattaatttgcagtatactattctaaaattcttttgtaagagattaaagaaatatgtacacattagaaaactataattagtactcctaatggaaatcaattttcatttacaaaatagctttaaaaatttacaaatacaatgttaattcactcctgcttgcccaacaaggggagttcttgatggagtgaaaaagagcctaaatcttgagcacttactgggtacagggcactgtcatgtgtgtttcacgtgtattgccgaatgtgatacttacaaaaaccatatcaggtgggtgtggtaattatcatgatgcccattttgcaaatgaagaagctgagccactgaaatgttcaacaaatgtgcctccaggatacacaggttgattttccgtttcaggatttggactcatatactggccccaatgtctgctatgttctcttttggtaaacatgcaggaaatggaatgaaatatgttgtctttagtataacagaatctttaatttgtagctctatttgaactttcttagctgaagtgtcctcaacaaagtcatatatgtagtcactaatcactatgaaaatgacaatataagaagtaaaattatatgtataccattcaaagagatctgaaaattgaattaactgagcatttttgtagcatgaatctttgattagaaaatattggagcccatttgcaacattttaggttgctacatataatgttttatatgaaataatataatcaacttatttatagaagtgtagatgattttagttcttttcctatcattattcagacagagtttgatagcttagcagactcgtgttgtatgtgtatatgttagggaggacaggtttgcaattgaagctgattgtttgcccaaacaccatctggcctacccatttataatatgtcaaatgagactgcccaaggtatgagaaaaatcttaatttcacatttattcaggtcatattggccacagctcaaactgcactattatattgtttgcattttcatcaccacccggttttttttttaatttttttctgaattctcttgaatgctttactgattttcactaccttccttttaattatttcagaaacctactattaaagattttcactcactgttgatcataacgttaatcatcttgttacaatatagactattataagctttagtaaaataacttaaatattttaaaacccaaatatctttggatggactttgtgtatattaaattcttgtctattatagcaaagtttcaatatgcataaacatatacatataagtaaatattttataatgtatcactggctcttgtaaagatagttattcatgctcaatatcaacattttgaaaaatgtagctattaataaatatttatgcacaaacttagatttttaactgaaagttaatggctaggatttttaagtaactgtccaaataattaaatagaaggaataaaataaacatttcactttgcattagacacttctgctagaacatgttttataagaattaaatgttgaggaattttaaaaactacattagattttaaatcaccttaatagtcctacactgatttctactgttttagttggaagaatgatcagaaatagtatccaggggaaatgtattttgtaaaaatactgtagtttaataatatgataagaaggcaacttctgagtatatcctctgattaattcaatgccaaaatatatggggaagatagttttcaatgtaaatactgattcctgtttagaaaataaaaacagcatattattaatttagattaacataattaatataacacttatttcccaaaatgttatatttctttgggtagccccttaattattagtcaaacaagaaacctccaacagaagtatttcagaaaatatcatggcatttaaaaatatgaatgttcataatttccttaatagtttacatttttaacccctttaaaatgctaatttcatgatctttattgctgatttatgaaaatatcactattcattagtaaaatatgtatttttaaattaaaatttgaatctgaaagagcaaggaagacttaattggaagatgcatagaatttgtgaggtcttttcagaatatcttactgtatgtatgttacagaacataagcactgagtcaaagctcagcggaggaagttcacgttaatagtgtgctctaggccgggcgcagtggctcacacctgtaatcccagcactttgggaggctgaggcaggaggacaacctgaggtgaagagttcgagaccaggctggccaacatggtgaaaccctgtctctactaaaaatacaaaaaaattagccgggcacggtggtgggtgcctgtaatcccagctgctagggaggctgaggcacgagaattgcttgaacctgggaggcagaggttgcagtgagccgagatcacgccagtacactccagcctggacaacagagtgagactgtgtctcaaaaaaaaacaaaaacaaaagcaaaacaaaaaacaacaacagtgtgttctccaggctgagggccttcagtgctgcagcttattactttaatggtgagtagaaagtaaggtatggggtcaggcacggtggcttactcctgtaatcccagaactttgggaggctgaggcgggtggatcacctgagatcaggagttcgagaccagcctgaccaacgtggtgaaaccctgtctctactaaaaacacaaaaccaaacacctcatgttctcactcataagtgggagatgaacaatgacaacacatggacacagggaggggaacatcacacaccaaggcctgttgaggggtgggaggctaggggagggatagcattaggagaaatacctaatgtagatgatgggttgatgagtgcagcaaatcacaatggcaagtgtatatgtatgtaacaaacctgcacattctgcacatgtattctgaaacttaaagtataataataataaatgaataaaaaataaatatacgaagcaaaagaaaaaaatacaaaaattagctgggcatggtggtgcatacctgtagtcccaggtattgggagggtgaggcaggagaatctcttgaacccagaaggcagaggttgcagtgagccaagatcacgccactgcactccagcctgggcaacaagagcaaaactccatctcaaaaaaaaaaaaaaaagaaaaaagaaaaagaaaaagaaaaaaagacagccaggtatgggaggaaggcaaattatttacatttgtggtgcataaaatataccagaacaggaccataccctggattcatctcctgtatgaagtgttaaaactacataattcataaagtagtctaaactgtgtatttatatgacaagtattgcatatttcagacaacctaagcaacatcagtttaacacatagtatttctcagttaatcattttgagtatatggaaactgctgattatattactactatatatacaaaaactatgcatgctttgaagtcctaaaatgaagcaatcaatttttttctaaattaattcaagaagagtagtgaaatgaagtgcataatttatttcagtccttaaaagaaaatcatttaattgctcattttgtttttaagcacttttccccataactgcatagaaatgattcttcaaggcttgttagataagtagtcctatcctattttaagggaactctaataacgtggtaaaggtaagtgatagctgatttttctaaatcttcacatatatgtaaaatcctaaatattagatgttgaaactttttaaattgcatcatgaagatgtttatgaggattttacagagttatttatcgagtttccgaattacataatcagatatcctatttttgttacactagaattaatttcattgtcatgtctcaagtcatcaatttacatacagataactattagatacttatgaaagatctattgacttaaatatcaaaaaaagaaaagaaagaaaaaagaaaaccttatcttttacttcttccataaatttcagtcattagttttgaatgaggttttgatatacaaacctgtgctcttatgaaactgagcaaaatataatttttagtatggtgcactatgcataaatgaacttattacagcaaaaatgcagttaattatttaattacctatgtagtcattttcattttgctagatttaactttgaggcgtatttgtcatgttcaagtacttatttgatttttaaattatatatcttttgtagtaatcatgtattattctttacctgtgcaactaactgttcttttgaaaagcagcaaaaatataaactgcttataataataatgaacctgatgtggttaaaaatgaagctttcatgaatgctaatcaaaaataaaaagaatgaatccacaatgaaaacctaattctcttttgttgattttgaagatgtgttttgaacaaattgctttttcaatggaattcaagtttcctttttttcttcaacctatgtttatgacagttcggtctgctatcactgacatgattgtgaggtttgaaatagtgttaaaatttcactgcaggatcaatttttacagggattgcatgctatgaggtggacattttcttaaatatgcttaatgttggtgttctttgagcagtagaataaaaattactaaaatttatagaataattggacataattatatttgtagcttttgtttattgatttaaaagcctttttcttaaaatctgcttatagaatataccactctcacttgacttgcttatagagaatatttttaaatggaaatttttaaaatttaatctggaatttcagcttactttcttccttcacacaataaggctagagtttagtgacagtataatagtaaaaaaatcagaggaaaattaatgtgtagcaattgagaaaatattgcagtatggtatatgataactagtttctcatgtttggagtacctataatttatatgtaataagtttttacataattttatgtatttattggtagtgcaagttttgggaaaactgatagattgaaaattccttgctaaatcgccctcagctgctttcactaactgcttgagttgctctttagtggttcatatcacaacagcagaaactcttgagtaggacccttccatagagccaggcaaggtcatttgtaagtgtaagtgctggaggtatctatgggtaatggatgcttaaagtgtgtacgaatgaacttaatgtgattacactaataatggaaaaaagcatattggtaaactattatttcagaaaatcaatttgtacttccatagtttaaaatcttttcattattcttactacattcaccattttcaatactactaaacttgtatttttctctaggaattttatctcaatttactcttgctgacattttaaaactcattaattttgagatcaatcacattttactcttcaaacctatgtattttacatacttttaatttatatatgctattttatattaaaattttaatgcaatttatgtaatataaaaagtagatttatacaatttaaatgtatatcacatttccttatccttataaaattataaatgacatcttacacactaggttaaaaattttgtgaagaaccaaagaaagtataccggttagaaacatttgggaaaatattttgcatattttttaggctaaaacggaatcatttaattatagatatttaaaagtgcaataaaatattagcttccatatttatataaattccagaaaaaatagttcctggaataaagatttaattaaagtattttacaaattttgaactttgtcatttagaatctccttaagaaaataatttgtctaaaaataatgagatcatttcatatacttgcttatttcacatacaagtaacatatttcctaataaccatgtttaaaaaaatagttggccatgtgtaattccagcactttcagaggcaaggtgggcagatggcttgagctcagtagttaaagaccaccctgggcaacatagtgagaccctgtctcaaaaaagaaaaaaaaaattagccgtgcatagtggtacagtcctggaattccagctacttgggaggctgaggtgagaggattcaacctaggaggtggaggagaaggtgcaggttgcagtcagccagtcagccagtcagccagtcagccagtcagccgtaatcgcaccactgcactccagcctgggtcacagagcaagaccttgtctcgaaaaaaaaaaaataataataattgatgattaccaatgtatatctgctgtaaaatgaaaaggaaacatactactgccctctactaacaatggaggatccatgctttgcttacagtaacatgttaacaccaagagtgagggagagtattatactgaaaattgctgagtaaggaagtagaggtcatagaaacatttgacattaattgttacatgttatgacagagataaagaaaggtatatttataaaaagactaccatttttataaagatgcttgcattatacatttattcatcatatctaaattgagtactcacatagtatccagcttgtttttctccctgaaaatgtatttttagttatgatcatgttgccattgtttcaaatcttgcatgactcttctttcctagcaagttaaatgcacagtccttactctgccatacccaaccttccgcacggtatgactccagcctccgttctctgccagttcactctctcgctctcagtcacatctctcgtaactcttgcaaacctgattgcttactgttctccaaacatgtataagcagggttggcttcattgagtcaggcggtcttgtgtctttattagatatgcaacattgggaaaactactcaacttctctgaatcacatttattcattgataaaatgttggaagtattgaatatgtctagtgcattctctgaccatgagattatactccatctccatcccatgtcttagtccttttctttaacagacaaattactatgaagttatcattaactagattgaattatcatgttaaaattctactcataggaagaatactattttaaaaaataagttgtgtgaaaatatatagattcactgaaagaaagaaattcttcacctgcttctattttctaaaatggggcaagtgatatacatggagattaaaaaagattataaggaagcatctgtccctgtacatttttctacagttttttttgtatcttatgtaggtttgtgaatttcacttaaaattgcttaaattttaaaaatgcaaaaatattgtatgaattttgtgttattccttctaaaatatttttatcttttttatcagatgtttttccttttgaaagcttcttctaatgtaggttttcaaataatatctgaatataattataaattgtattatttgatattatttaaaattatgatatcgtatgattaagatatttaagtgatactaagattatatttggagtacctataatttatatgtaataatttgttaaataaacttatagaatatagaatataagtttatatatatgatgcttctaaagaatatagaatatattggatatagaatatagaggcatctaaagcaagttgtatggattaatatgtatgaatgaaaccccaatatgctctgtgcagtagttcagtctctcctgcgtctcctgccttcccgcccctgactcctcatctctgcctctcattgttcttgttgtccagcagcagtactgaaaactacaatgtaagataaaaaaagatgggagaagaagaaaaagagcaggattagactggagagaaggctgtttccaccataaagacatttacccagccagccctatgaaaacaggagcctatttcactacttggttattgactgaacagagtagccaagaggtgggcctttcagcccttagggcctgccagacagcattaaaactaagtcttctgtgaagaagctccctgtgcttgggagtatgcagctttaatgtttgaaagagtgagggagggaagaagggagataaccctcccagaaaacagaaacgcagaccgtgctttagaaaagatctttccatatgtaacaaacctgcacgttgtggacatgtaccctaaaacttaaagtataataataataataataaaagaaaagttctttctcacaatcctatcagatggaatgagtcacccacctcccttgtgagggaaggagtaaggcccccaggataatgcttgttggggcagccttggcttactcccctgagaaagcacacagctgagcagaagctgcctctttggaaccagtggtggaatagttactggttttacgaatacaatggacacagcagattttgtttgtttgtttgttttgagacagggtctagttccgtcacccaggctggagtgcagtggtaggatcttgggtcactccagcctcaatcccctgggctgaagcgatcctcccacctcagcctcccaagtagatgagattatgcctggataattttttaaatttttaaaaaattttaaaaaattttgcccaggctgctcttgatctcctgggttcaagcgatcccgtcgcctctgcctcccaaaatgcaaggcttcacagcagatgttttcagtagaaattgtcttatatttgttttgtgttgttattgaaatgaatataatgctagatatttcttggtatttcggaagtttatatcttataggatagattttatggtaactttttacatcttgaaaattatgttaaaattattttagtttaactttgttgattatctgcttgtatgaattggctttaatgacaagaaaatactttaaaaccccagggttacctccagctggcttgtcctttacccctgaaaattttggtttcctaatataggcaatgacaaaaagaatatttaaattccacactctccaaagttgcaaagtaaaaataaataaaatattcataaacgtatctgaaatgggtccaaaatcaaagattcaggtaaatattaaaatacatgtccttttttctctgttgtagatggacagagagagaaaaaaaatcactgagtagagagagaaattatattgtaaataaaacatatggcgaaagaaaacttttcaggcaaattaatttttaaaaagccacatcatacacgatattaattaaaaatgtgtatatatataatttaaataaaaatattttcctttttgttatcttcttcatcttccaaattttggcattaaaaatattaggaaggcatttctatggcttttaaaaaagctttccaagcagctctcaatttattgtttcacataatgctactcttttctctaagtctgccttgtcagctaacgtgttttgggaagaaaaaagaaaacaaaacaaaaccaagactctgttcttctcatctctttgattgagttatcctttgctaggtgaagtgttgtgagctttcatacccttccctgggcttccagcagctctccccacggagtgctgccacagcaccaccaggagccccagatccctgcaaggaggagatcaaacctccacagcagggattcctcaagacaggtcaagctccagtgcttggaaaactcagcctacatcacacaaaaatgttatcatttatttggaattctttttcaatggattgtctccacttctaaaacatttctaagtctagttcaaatccagctgcagattcctggcacttgcttccttcccattctttttcatatatcttcttttatgttgcatatacttacttcagattaagtatataagttaaactttcagtctattctgccattagaagagtttatttccatacacaataaaaaaggatcgtttgtattatcctcaagattagtgtatgttatgaatgcaatatctttgcattcaagtgaatttaaatattataggaaggggtagagaaggaaatgcaagttatcactgactgacttgccaaagttaagcaatttttaagcattttggcatgcatgattgattgtgtacttttaaatttaatattgtatggtaattattttctcacgtcattaaaaagtatttttttcaatggccagataatagtttatcatgccatgtactgtatttaacttcaaattgatagtcttgaacacatatattaatttcaattccacagatacaaaaaataattgacattaaacttctttgagaataaaaccttgtccaaatttgatatatccttaggatgtattcctagacatggtttatttcatatcttatgaactctttatttgaaggtatttggtatgagttgagaaattacattacagaaaaaaattttgagtgtgtatttcattcaatctttgcattgtttgtaagtgcctatattaagaacttttttgttaaagtttgactatgaaatctgatgagtgaaaatttaatctttttcttattttaattttaatttcttcagttaatagttaaactgaacgctttccatgtgtttattagccacttctcaatttttatatatttatttagataaaattgtgcttaccaactccagtctcaatactctctgttaaggtctacggtgtattcatctgttgaggtttttgtgcttagagtatcaatttttgtgaatgggatatttattataactaacaattctaggttttatttattaaaaattgaacaatctgctatctataaaatccgtaatatttcctttgcaattttcttccaaacaattgtaagttttacaccaaaattattccaagaacaaagcacgtgagactattttattgacaaaactttgttggctgaaagtttatcttccgtatacttcaattttttttcccataggaggtttaaagagcacacacacacacacaccacacacacacacacacacacacacacacacacacacacacacacacacacagtgtttctgaagcccaggccatttttggtaccaactatatcaagttagaatttttacatgtgtctcttctgtacgaatctataccaaaatacatggacagaaaatacagtgatacattcttttaaatgaatgctgattgcactttacagtttaagaaacaaggcttcgatgtagggatttcagagtgaacacttactatatatctttggaaactagactgctaacctgttactgaaatgtttgcatcaaattgtttatcaggttattttctctcggtatataaatataacaaacttggacaaagtggatgtattttcaaaggataataaaaactaagaatggagtgggtcaatatacaaggagaaataaggcaatagactggaatgtagagaagagagagagactggcacagagggacagtggggatgataggtattttaaaaaataatgggaaatgaaaagattttctctatcacagaaaaccaaggttctgtggagacagaccctaaactagactcctgcagagtctaatgctcgttcatcacaaggcatgctagacactgcaagacccattggcccatctttttgatcctcactctcaatcatctaaacaaggctgagagatgactctctgtacagcctctgcattgtgtaataataactctgaaatagtttctgatcttttctcttaggggttgcataaaattttgcttctagcaagagaaataaacaacccataactaaatctagaaacttagcaggcaaagctctgtagtcagaatggctactttaatttgagcaattctgaacacaatttgaacctctccacactatgaaaatagcataaaatgaaagaaataatagctaatacaccaacaagaagtacagtatatatgatgtacttacaaaaaaatatagaattatggataatatgacacattcattgagcaaagagaacatggcatacatttatcttatataaaataatgctttataatatatatttaattgaacatggattcttaatacagaaacaaaaaatattttagattgattatcattgtacaattccttagagacaaaaaatgtaagtaaaatgtctgtggattttccaatacaacctactcttcctatctaagtgataataatagcctttaagtaattttctaaggatttttattttaaaaagtttaatttaccaatgaaaaaacataaatctttgacattaaatgaaagctctaacagatgacgcagatatttctaataaaaacaactcaaaaaatggaggaactaagctcgtatatttcattagagatattggatatagcaaattagcctttattttaaaatgaggtctctcaatctaattttaaaaataaatataagcggacttttacttacagcaaggtggaggaaatatattttttttctctatatttccttctaacaaggaatgaaaaccctagacatcatataagaaaaaacaataagaagattttgaaagatagagagaaatcagaccagccagtggctttggaaccctaggaagaactcagtggtgagtttcctggatcttcctttaatctcacatatctgagccttattgctgaagaattcaacaacctggagataccaagagcacagagaaaaccacaccccgacaaaagtctgctctttctagccaaagggtgaggaacgggcctgcctagaaagacatcatacttctagacaacaacccatcaactccagcaaatgccacagaaaaaaactgtggccccgctctcactcccacaatacgtatcaattggggggcacaaagtttcttcctctcgaggccataacgatgtgctccccaaaccctgctggggtggttggtgtgagagagagccagataggaaacttgatgttcatcttctctcgctgtaagaaatccccatgccccttcccctcactcccggccatagtgtcagtttatgtgatgtgaggatcctagtgctgcatcctcaccacacaagaacaagcccccctccaccaccctgcccattatgatggagtcagcagagcccggtggagagtcccatagactggtcacatagactggccgcgtagactggccacaggggatctgggcttctcactccgccaggcagcaatgaagtggcaccctcccattctgtcagagtggagtcagatcatgccagctaaaatgcacggtttaaatacaggcttcatcacatgattggaaatgtccacttttaaattgaaaatcacttatcataccaagatccaggaagacctaaaaccaaatgcaccaggcatggtaggtaacacctgtaactctagcactttgggaggccaagacgggaggatcacttgagctcaggagttcaagaccagcctgggcaacatagcaagacctcatctgtacttaaaatttttaaaaagctagccaggtgtggcagcgcatgcctgtagttccagctgctctggaggctgaggcaggagaatcacttgagtctgggaggtcaaggctgcagtgagccatgattgtgccaccacactccagcctgggtgacagagtgagactctgtgtcaaaataaacaaacatataagctgaatgaaaaggacagtcagcaattataaatatgtgataacagatatagaattacctacaaacgttgtgaggcagccattgtaaaatgtttcaaggagcacttacaaatagaaagtgccagcaaagagatataaagaacaaaggggaaatttgaatatttaaaaattaataatcaatgcgaaagtttagtgtttggactcaacagcttaatggaggagatagagtaaaagatcaggaaactggaagatagaataagaaaagttacccggtctgagcaacagagaaaagatagctggaaaacaataacaaaaatgacagagcatcagagatctaagggactataacaaaagatattagaaaaaggccaggtgtgatggctcaagcctgtaattgcctgtaatactagcaatttgggaggcccaggagggcaaatcactaggtcaggagtttgagatcagcctggccaacatggtgagacccccgtctctactaaaaatacaaaaaaaaaaaaaaaattagctgggcatagtgttgggcacctgtaatcccagctacttgggagactgaggcaggagaattgcttgaacctgggaggcagaggttgcagtgagccaagatcacaccactgcactccaaccccgggcgacagagtgtaactcagtctcaaagaaaaaaaagatattagagaaaaaaaaatcatgcaaccagagtccctaaaggagaggaggaagggtgcaaaggtgaaaaagttacttgaaaaataatgacttaaaaaataatgatgtttggccagatacaggacactacagaatcaagaagctgagcaaaccttcaacaaaataatccaaagaaatccacatcaaacaattaacttctgaaatctaaaaacaaagaaaaatcttgaaagtagccaaagaaaaaatgacaccttagttacaggagaaattcataatcacagtaggtttctgatctggaacaatggaagccaaattaataggacacaatatttttcaagtgctggaggaaaggaaccgtcaacaccaaatcctatagccttgaaaatgtcattcagaaattaagggaagatcaagacattctcagatgatatataattaagaatatttattaccagcagacataccctaaaataatgactgaaggaagttctctaaacagaaaggaaaaaatagaaaaaggaatcttggaacatcaggaaggaagaaatcatatgattaaaacaaatatgggtaaatattataggctttccatctcctcttgactttaagagagtgggtttgatgtttgaagccagaattataacactgcctcaagtggttctatatgaatgcagatgaaatatttatgacaaatatattataaatggggaagaatagaggagcataaaagaagtaagttttccctacttcatttgaactgatgaaataaggacactactggagtgttatgagttatgtataaataatgtaattctgagaaccacaggaaaatcacccaacacattgaaactaagcaacaatcttttaagtaatctcactatcaaaggggaaggatcaaggaaaataaatagaaaataatgcatattaaaagttatgtgacacagataaagcagtgttaaaggaatttttgcactaaatgcgtaattagaaaagaaaaataatctcaaatcagctatcatagtttgcatcccaagaatctagaaaagtaattttaaaacatcagaaagaaaaaaatgataaagttatgagacagttaagagcagaaacaaatgaaattggaaacagcaaaacaatataaaaaatcaatgaacaaaaaagctagttctttgaaagatcaacaaaattgacatgaatgatgaaaaataagagaaagacatgaattaccagcatgtagaatggcactaaagatgcttcactatatcctgcaatcatcaaaaggatgatgagagattacaatgaacaactctagacacataaatttgataccttacatgaaatggaccactttctttaaaaaaaaaaagaaaagctaccacaattgactcaacataaattgctaattgggatagtcttttaagtagtaaagaaactgaattcataattagacattgtcaaaatgaaatctctgagcccagatggtttcaccggagaaattatttaaagaagaattaacatcaattctaaagaatccagattattgagggggagggaacactttttgatagactttagaaagctagtattactctggttttgattcatatcaaaaccagaataaaattgttaaaaataaaatataaggaaataaagagaaagcaacatatcaataaccctcataaatatgacagaaaatatttaagaaaatattagtaaattgaaataaaattcagcagtatatcaaaaggattatatattataaccatgtatcttctattctaaggaaacaaggcaattcagtattcaaaaatcaaatagtgtaggcccccatattaacagaattaacaaaactcttctaattttccaattagaggaaaaatcacatggtcatacaattgatgcagaaaaggcattttaaatattcagaaaccatttataataaaactctcagaaaactagaaatagagagggatatttctcaacctgataaagaacatctacaaaacctgtgggtattttcataatgatgacagagagaatgctttttctctaaggtcaggaacaaggaaaaaatgctctcaccacacttatctaacagtgattgaaattctaatcagtgcagtagggcaaataataataataacaacaaacacaaagcagaaaggaagaaacaaatgtccctgcctacagatgacttggttgttcgcatggaaaatctcaaggaatctacaaaaatattcctaaaaacagtaagtaagttcagcaagtttacagaatacaagatgtatattaaaaagttatattcctatatattcacagtgaatacatgggaaatgaaccaaagaatgtgatatcatttataatcactaaaaatgaaatgaaatatttaggtataaattgaaactacacaccactgctaaaagaaatcaaataagatccaactaacagagagtaaacttagtttcttgaattgaaagagtaaacttagtaagtagtcaattctttctaaatttatactggaggtttaatgcaattctgatcaaaatctcagcaaaatgtttcgtaggtatagaaaagattgttataaaatttatctggaaaggcataggtcctaggatagctacagtaatttttacagagaataataaagtaggtggaatctgaatacccagtatcaaaacttactttacatctgtgttcattaagaatgtttggtgttggtggagagatagaaatattggccaatggacagaacagagagcccagaaatagacacacacaaatacactcacctaatctcttaagaaggggcaaaagcatttcaacaaatggtactggagccatcgaactccacagaccaaaaaacagtatcttaatgtaaggcttacatcttattaaaaaattaactcaagaaaggccacacagagacataaatgtaaaacaactgtaaaacttttagaataaatataggagaaaatttccagtgtctagggctaaacgaagagttccttgtcgtggtatcaaaatcatggtctctcaaagaaaaaatagttaattggatttcatcaaaatgtttactttgcaaaaaaaaaaacacctctgtaaagagggtaacagatcagttactgggcagctaaaatatttgaaatctacatataggtaaaaggactaacatctaggtctattttttcaactctcaaaactcagtagtagctagttgcagtggctcatgcctgtaatcccagcactttgggaggctgaagcaggcagatcacgtgaggtcaggagttcaagaccagcctggccaacatggtgaaaccctgtctctactaaaaatacaaaaactagcaggacatggttaattaattaattgattatttaaattaatacttgggaggcagacgcagtagaatcgcttgaacccgggaggcgaaggttgcagtgagttgagatcgcgccattgtactccagcctggccgacagagagagattctgtctcaaaaaacagaactcaacggtaacaaaaacaaagagagaataggcaaaagatatgaagaaatttcacagaaaatgaaaaacatatggcaaaaaaacacatgaaaagatactcaaaattatttgccatttggataattaatattaaaaccgtaatgagatatcactgcatatctttcataaaaactaaaatcaaagacagtaaaaacactaaatcctggtgaggctgcaaaggaactggatcactcacacaatgctgatggaaagataaaacggtagatacattctggaaaatagttttgcagtttctttaaaaaaagtaaacttgcattaaaacccaaaaattgacctcctagccttttatttcagagaaatacagacttatgttgacacaaaaacgagtaaacaaatgtttataataggttgattcataatatccacaaactaaaaactatccagacagacatcctttaccagatggagggttaaacacactgcggtacctctatacgatggaatactattcagtgatcaaagggaaagaattattgatatgtgcaacaacctggataattctccagaaaatgatgcctgctgacagaaatcaataccaaaaagctacacgattccactgaagtcacattattgaaacgacaaaattaccaaatggaaaagatattagtgatttccaggaattaaggaggggatgaggtgaaggaagtgggtatggctataaaagggtaaaatgagtgggttcaactgtattccccgcccacactaataaagcatatgaatatatgctaatgcctgaagcctatgaatatgaccctatgtggaaaaaggggttttgcagatgtcattaaagatctcaagatgacattatcctggattatctgggtggaccctaaatccagtataagtgcccatgtaataagccgaagagatgagagaaggccatgtgaagacagaggcagagattgaagttttacaaccacaggtccaggaacacctgaagccagcaaaataggcaaggcaatagctggactaggccaggaaggattcacttctaaaccttggaagggaatgcagcactgctgctaccttgattttaggcttctggcctccagaacggtgagagaataaatatcagttgttttaagctgtccagcttgtggtcattggttaggggttaggacagctctagaaaacgaatatgggggatcctcatggtgatgaaaatgttctgtatctctggtttaacaatgtcaatgtcctgggtatcatattgtaccagagttttgaaagatgttgtcactagggaaaactaggtaaagcagggcgatgtttttgttttattttgcataactgcatgcaaatctatcattatcccaaaataaaatgttgataaaaataaataaataaaattgaattataatttgatctctgggttacacaatcagaatgagttgatggcacctgaagggcatctattttatagtacaccttcatccaaatatttacttttaatgattaacaaaccgacttagcatgtttgcattaatatcttaagtgagtctctggaattattcatcttttagcaaaatactatgaaagcctctcacacaggctaagcagagaatattaatgactaactatgatttatcgttttgtgtttgcttcaagaaactggtacataaatatgtaattcttataaaaaatttgtggcagcttataaaatatacatgtaatataaggtgaaaaacaaaataaaataggagagaaataaggataggaaaagtaaaggaaggcaaagttaaaattagaatacaaaacatcagagagtgatctacacttcacaagtttgggcttctaatttttccagagaagaaatatataattccataaagatatttaagcaagtataaattagtcaatattctcatgtcaaaaaactaaaacataaaaataagtatctcaattagagatgtcaaatttagtcagagtttagaatattctatttaaaatatatccagtacgatttcagaaataattatctcagttcaagaagggaaaacctgctaaatatttaaatgtcaaatatatcagtgatagtttctgttcatatttttagtcttttgtcctggtataactgaaaaatttgcatgacttaaaatgtcatattttatttcagccttaatattggttagttgaaaggcataattatgaccagaaaatgtactttaaaattacccaatgagaaaagctatgctagttttaactgaaaatgctttacttaaatgccaaaaattgaaatagtctactttattaagatatttaaaataaaattatgaaaacgatgtcatatcctttgcaaagttggcacccgaagttcgagttctgtctttcaaaatgtaaagtgatttttttctgtggaagtagaattgtcacctgtaatggttttcagtaaattactctgaagcatcttgtcaagaacattcataaacttaaaaataaaacaaagattttcatgtctatcaagactaaaataacaaaaagttattcccaccatttaatatcatataaagacaaaaataaatagatatataataaaaaataaaatatatatatttaaagatacatacttttttcaatagtaaggatcacatttgcatgtatatgaaatacaacataaaaatcagcataaaaatcatccactatctcatttttacataaaatgatatctaacacgaggactgcttggaaaatagcatcttaatctttgcttaacttcttaggttattttggaactctcttgatctcagattcttcttctataaaattgagacaatctttctccaggagaataggttcaggttttataaagtgatagatataaaagtaatataacagatatgattattaataatattattatttgaaatggacaagcagtaatgggaggatagaatgataaggatgtgtatcattgccaaatccttgagggaggtgctggtatttggaaaaaaaaaaaaaaacaacgaatacctaaacgtgaataaatttgaggaaactctattgaaagtcttccccacctgttcatgaaacagatgcccttttctcctctgttattgcataagtaaggtatatgtcttagtccctttcaattccagtctggccatgtgcctgagctctatctagccaatagaatgccagcagaaattatatgtatcacttccaggtcttcccttttagaaccctaacacccaccctctttcatgctcattcttcaccaactgattgcacacacccgtcaaggaacttggagctgtcagatggcagaaggttgctgccctgaatggcagaatggaaataaacgcacaccggaattacccgcaattaaccactgcaactaaatgagacatcaactttacttatgttaagccactgagattgtaagttttgaatgtagacccaatatactacgccggttaatttacaagcctagaatagtacgaagaactatcatatataataagtaatgccaatatcaaaattatggtaatgtttcttgatacaaaaacataaactggaaaaggaaacaattactactaacaaaattcactataagatgtgtctaatatgtcaagcattgaccctagactacggtcaaatgtcagttggaaggttaagttgtgtactctaagacaagcacgtgaaataattcctgtggattcctgtcagtgcagcagtttctcagctagtgttagtctaggagattctgaccagcagcacttcttgttcagctccttttccttaacgtgtaattttcagcagaataaaactgcattctctatattctagcacaaatgaacattttgtgactaacagtattcactgatagtataatgtatcggccttattgctgtcaataattattatttgtatttatattacaatattacatttcagttattttggttcaaggttttagagtcatcaacttctgtgaacatttctaagaattttccatcccttatcttcctacccccttcatcaggaacccttagtctaagtaaccccatatacttttgcctatgtaacccctctcatatcaaaaactagaacacagacatattgagatggactcagtcataaagggatataaatttgttttgtagattcatatgttaattttataataatagattacttttaattgacacaaaatattacccagctcagataatattttattttgcaatctttcaacaattagctgttaggaaagactgtttaagtgaaggatctaccataaagaatccaaaataatataccactttttgcccagtggcttttgcgtatcaggcactatgttacagattttatatgcctaactactatgtttttataaagtattattttctaaatttacagatgagatagcctcacctcactgagattacatgatttgctaaagaccacaaggatagaatcaagatttgaactcttttctttctccaaatctagagctctttttccttacttctgttctatggaattgattgttctgcttcttttctataattaacctttacaatcacttaataacaaatttgtgatatatacggtagacaccaatataagtgctgaagctacaaagataaatgggaacccctggccaggtgtggtggtgcgcgcctgtggtcccagctactcaggagattgaagcgggaagatcacttgaactcaggaatttgagatcagcctgctccaaaaagcaagtccccaactctataaaaatatatttttaaaaaattagccagacatggtggcaggcatctacggtagcagctatgtgggaggctgaggtgggaggattacttgtgcctggaagttcaaggttgcagtgagctatgattgcaccactgtgctctagcctgggtgaccacaaagccctgtcttaaaaacaaaacataaaagtaaaaatatggaaccatcagtctagttggagaaaaattcatgaaaataaatgattacattgtggtgggatatgcgagtagaggtgaaagagaagacacagaagccctgccgtgaaggcagtgaataacttgctatgggactttcaaggactgtttggaggtgaaggcagtaccagagcaggaattagaggtacattggaaacttagtaggccaacagaggagatgagggtgtgaggtgtggaagagaagatacctgagtggggtctactcatggcaaacctatatacaatgctaagaaatttgagctgttgtcctgtgcatgagaggaaacaatgacaaattttactgaaaataataattttaagagatttttgatgtaagaaattactatcagcaacagcaaatatgggtcagggatggagaaactaactgggttgtgatggcagattagagatcatgtttccatttatccaatctatcaatccatttatccttccactttattagaaaaagcctggtctagctactcaggaggatgaggcaggagaatcgcttgaaccaatggaggttgcagtgagccgagatcacaccactgcactccagcctgggcaacagagcaagactccttctcaaaaaaaagaaaaaagaaaagaaagaaaagaaaagaaaagaaaagaaaagaaagaaaagaaaagaaaagaaaaagactggtctaacaaataatagttgggacattgggaatatgataggtttttgacatatttaggaactgaaattcaggcattttagagatttatgggacatccaggtagagttctatgataggcaactgaatagttagatttcacaggaaagcagatcaatcaataaatgtgggacttatgtatttacatgtggttattaaaaccaaggacaaagatttcattaccttagagtatagtaaaaaagagaggattgaatagaatcacaaagagggacacagggacagagaagaaggaggaaggagactgggaaagaacatttaggaagaggacagagacctagagaggatcatgtaaggaaaccaagtaaggcatgttctcaagactataaattgctgataggaacagaagccacaggaagtttaagaacagtgtacattggtctcacaaaataggagaccatttgttaaaacactgtccaaggcactacttatggcagcagaagtgagattaaaggggattaagtagttggtgaaaattagacagtgaaaatataaaagtaaattactattttcataaatgtatataggcacacctcattttattgaaccttgctttacaaattttaaccttgtggttaaaacaaccacagatactacattttttacaaattaaaggttttggcaactgtgtggagcaagtttattggcagcatttttttccaacagcacgttctttctctcttttggcctctgttacattttggtaattcttgcaataactaaaacttgttcattattatcacacctgttacggtaacctgtgatcagagatcgttgatgttactgttgtaattgttttggggtgccatgaaccagaaccatgtaaaacggcaaactcacttgttaagtgttgtgtgtgttctgaatgccccactgacctgttgttctgccatctctgtccttctccttgggcatccctattctctgagacacaacaatattgaaattaggccagttaagcctacaatggcttctaagtattcaggtgaaaggaatagttacatgtctcttactttaaatccaaagctagaaatgacgaagctcagtgaggaaggcatgtcaaaagccaatatgggacaaaagctagacctcttgcaccaaaactagccaaattatgaatgcaaaggaaaagttctggaaggaaattaaaagtgctactttaatgaacgcacaaatgagaagaaagcaaaaccttattgttgacatggagaaagttttagtggcctgagtagaagatcaaaccagccacactattcccttaagccaacgtctaatctaggggaaggccctaactcacttcaattctatgaaggctgagagaggtgaggcagctgcggaagaaaagtaggagactaggagaggctggctcacgaagttaaggaaagatgccatctgcataacatagaaatgtaaggtgaagcagcaactgctgatggagaagctgcagcaagttatccagaagacctagctaaaataattggtgaaagggcctacactaaaacaacaaatttttagtgaaaaacgcagctttgtattgggagaagatctcctctggactttcatagctaagaaggagaagttgatgcctggcttcaaatctttaaagaataggttgactcttctattaggggctaatgcagctggtgaccttaagttgaagccaatatgaatttaccattctgaaaattttaaaacaagaattatgctaaatctacgtagcctgtggtaagtggaacaaaacctggattacagcacatctgtttatagcatgatttactgaatatttttagctttcttttgagacctagtgcacagaaaataatattcctttcaaagtagtactgctcattgacaatgcacctggccatccaaaagctctgatagagatgtacagggagattaatgttgttttcaggcctgccaatggaacatctattctgccacccatggatcaaggagtaattttgactttcaagcactatgattcaagaaatacatttcatggggatatagattccatagatagtgattcctctgattgatctgggtatagtcaattgaaaaccttctggaggctgggcatggtggctcatacctgtaatcccagcaatttgggaggctgagaagggcagatcttctgaggtcaggagtttaagactagcctggccaacatggtgaaaccctgtctctactaaaaatacaaaaactagcctggcaaggtggtgcacccctgtaatcccagctactcaggaggctgagtgaggcaaggcaggagaattgctggaacgtggaggcagaggttgcagtgagccgagatcccgccactcactccagcctggataaaagagcaagactccatcgcaaaaaaaaagagaaaaccttctggaaatgtttcattactctaaattgcattaagaacaaggaggtcaaaatatcaacattaatagtactttgaaagaagttgattccaactctcatggatgactttgaggggttcaagacttcagtggaggaagtaactgaagatggtctggaaatagcaagataactagaattagaagcagagcctgaaaacgtgactgaattgctgctacctcataataaatccttaagggatgagaggctgcttgttatggacgagcaaataaagtggtttcttgagacagcctctacttccggtgaagatgcgatgaactttgttgaaatgacaacaaagggtttagaatactctgtaaacttagttcgtaaagcagccacagggtatgagaagattgactccagttttgaaagaacttctaatttgggtacattgttatcaaacggcaacgcatgctacaaagaaatcttttctgaaaggaagagtcaattgatgaggcaaacttcattgtcttattttaagaaatcatcggccaggcatggttgctcacacctgtaatcccagcactttgggagaccgaggcgggcagattgcctgagctcaggaattcacaactagcctgggaaacccaggtgaaaccccatctctactaaaatgcaaaaaattagccgggcgtggctgcgtgctcctgtagtcccacctactcgggaagctgaggcaatagaattgcttgaacctgggaggcagagggtgcagtaagctgagattgtgccactgcactccagcctgggccacagagtgagattccatctacaaaaaagaaaaaaaaaaaaaagaaagaaaaagaaaagaaattgtcacagccaccccaggatttaaccaccatcgttgtcatcatcagcagccatcaatatggaggtaagaccttccaccagcagaaatgttataactggctgaaggctcagatgactgttagcagttttagcattaaaatatttttaattacggtattttcattggttttttagacatgatgttattatacattttatagactacagtgtagtgtaaatgtaactgggccgaaaaaattgtgactttattgggacagttgcttaattgcagtgatctcgaccctcacttgcagtatctctcaggtgtgcctgtataacgtgaatggaatttattaacagggagtgaaacgaaagagtggcaactagagagaagcatggagtaaggagagggattttctcttgatttcatttgttgacataggaatcatttatagatttgtttttcatttatttcaatgataagaaagaatgataagaggtggcagagaaagagaagttgaaaatagaataaagctaagttacttattattgaggaaaacctaaatgaaaaatagggaaataggatgaagtctattaaagagattatccatgaggagggagacctcatcttctgagacaagaataaaagatacaatggtggactcagaggtaaagtaattataagtcttggtgaatgtgtgtggtggatagggaggtatgactattctttctcaaagtaagtggtaatttaactattggggaaagggagatgcttgatattttgaggacattgataaagtctaagccaagccacctttttttttttgaataattactgaaccattccttttctttagcaagtaccattacttgaatataattgactctactaaaagtcttcatatatttataataatcattgttaaatcaaaattattttctaaaaatatctaggctaccataacataaataacatatcacaatattttcaaagacagttatcatttagcttattcatataataattatcccgttaacttttttattttctgaggtgataaatctacctattttcattaagattttatgcaagcataatttatactacatataacaagtttttttcaactcacaatgaccttttaaaattgttaataagagtatataaggggttttagaaaactccttggcttgtaggtgtgagagaaagtcacatttattattactagaagcagtgttctgttggcatattacaatgtggcagacaatccttcaacaattaattaccagtaaagtaattatagaatatcctttgatgtttataatgttttaattgaagtaaaaatgtgagaatatgcttcaggggaatataatattttaattatttatgggccaagatatctatatactttgactagagtgcatttctctattctgtggcatctctgttataatagaacatttgtagactaaaaaaatagggtgttttccccccacagcgtattacagtgaatgtagtctactttataatcctcagggttcttttaacttgacgtgaatcaaacaccttaaggaaacagaaactaagactgaaagttttgacaaattagttttgaaaccttcacaaactaaacctgtttttgatattggtttcaaaaagtatgcatagaaacttgacatgaagtagctaaatttatgcactcaattgatatttatatgtgtgcaggtctatcaacgttattgaaaagttaatccaaaggatttattgattactctcaatttctcagatactgtcagttcacttttgaaaattattctcttatgtaatattgcactcttttcagtaaaaaggagagtttgtggctgttaaatatgcatgaggcacaatagtttcacaacaaatcaaatttaattaaatgatgcatttcctccacttacaaaaggtttattaaaggtttatttgctcatgcaaattaaagtgttagagtaaaaatccacatgaaacttggcactaacaattaaaaaaatattgaaagatttctcgcctcgctgcaataccttgctatgtttaaactgctcagcttgtcatttagaatctttaatgaaaccagggaggaggctatttatttgcataataggacataatttgctgtggtgaggttttaattatttataggctgtctgaaatatttaaaatggcatcactaaggagcatgaagtgttggataatgccttcatttcaggtttcctgccgtttcttttatgggtcaagcgatttatttctaattagcataccaggctagtggctttaaaaacataaggaaaacaaattggtttcagtctgtttgcagcttgagtagttggagacggccaagggtcactgacggagactgagcagagttaagagatgaagccagaagccatcccagcacatggaaatcactgactcaacagagccatactttcatttgtgcacactgattactgtatgtagtagcttctctttggtaggtagtgggttagagttaatggatttcatgttaattgtcccttaaatattttctaccattaacacatttcttattggaaatgatgtgtaagcaacagaaaatattccatttccttggataaaagatacagtaattactgtgtgcatagggaaaaattcggcagtttcagggtgagatttaacatttaagtatatgcaatcttatttatatacaagaacaagagcctgtggttaaaacacaatagggttcttttttaataaaccatatggaaactcatatatcttgtgagaggttgtgaattagcagagtacactaaaatatgttcgaatttctaaagcattcttattgtgcattgtctgtgttctaggtaaaaggaaaaaaaaaactcaggaatcatctataaggtctcttatgttatgataaatggattttcatgttctttactatctattttaaatatgataattttcttgaaagtagtttaaaagtggtcatgttgtaaacatcattgtatagccaggagaaatgtgtttactgcaagagtttattatatttccgtgatgctctagatatccccatcatcatgcacatagattgaaagcaggggtagcacactgttgtcagacattctctcatttgtcaccttctggcctcaaaacatgaatagagaaattgctgccagatgtcaagaaacagccttagggcattacagaggatattatccatgcccttttaagtagtagacagatgctgtattcagagagaggatttttatgattatcgttcacacagcccaggtgattggtcaaggccataaaggagtctgcaatccttggagaacttttggagtcactttaaccataacgtaatgtattgcaacagttacaataaattatgttatggttcctgaatgtaaccgtcaattatcattatttttttaagtatccactggatacagatagtgg

SEQ ID NO: 2 - DNA, 2661 bp, Homo Sapiens
ttacaagtgagtggataaatggtgagaatttatcacccctttgaatatcaggaagaagacaacgatgcccactctgttaccacctctaatcagcactgcactaggggttccgaccagtgtagaaaagcaaaaaacaaaacaaaaataaaaacataaagtaaaaatccagaacaacaggaatgggaaagaaaacccattactcatagaaaacatgactgtgtgcctaaaaatgaggaaacagctacaggcaaatgattaaaattactagactgccggatacaaattaatacacaaaaatgaatttccatgaaatggcaacacataattaggaaaatgaaatccaagcacatttttaaaaacagcatcgcaaaataacaaggacctaggattaaatgtaacaaaagacatacaagaccactgtgaaaagtatcaggctgtatgaacacccgctgaaggagccctaacatttggagagacagataccatgttcagagcttgtaaaacccagtactgcaagtacgtcaatgattcccaagttgatctacaggttcaacacaatcccaaacaaaatcccaactcgaccggctagttctaaaatgtatgaaacacaaagggtcaaaaacagccaagacatcctaacataagatggaggtacgcgccccagagtgtgtggtattggcagagacagacaaggagatgcagaaacggacacagagatcatcctgacaaaggaatcttcagcagccgggactgggaaaactgggcttatgtctgcaacacaatgaaactggatccttaagcttcacaacaggcgcaaaaatcaattctgggtagaatctatatctaaaatccaaaatatacaaaactataaaatcctttggaaggtaacagagtatctttatgatcaaggcaaagtaaagattattaaaaattaggatccaaaatgctttaatcataaaagaaaatattgatacattgggccatattaaagtttaaaatttctcttaaaagacaccattgaagtaaaaagacaagaaaagctatttgcaaatgtaattcacaaagcactactacccagaatcataaataacacctgcaaataaatgagacagaccatccaatagaaaagtagggaaaatacttgaataggtactttacaaacaggaaatcccaatgagccgcagacacatgagaaggtgctgaacaaggagaagccaatgaaaccagaaagaggtctaccccacacgttccaccaccccgcgccctccgccaccccgcgccctccaccaccccactccctccactaccccacacccaccggagtgaaggtgctaacacttcaggcaatgggtgctgaaaacatggaccggcagacgtggtcatacacaactagcagtcgggcctgcgggtaccaccactttggaacagttgggaatttctagtaaacctgttaaaaacatggttaagcagttaatggaaacgtgaacataatgggatataaaactaatgaaaaaaatcaaatggagtttttttgttttttttttgagacggagtcttgctctgtcgtctaggctggagtgcagtgctgcaatcttggctcactgcaacctccgcctcccaggttcaaacgattctcctgcctcagccccccaagaagctgggactacaggtgcccaccaccatgcccagctaattttcatttttagcagagatggagtttcgccatgttggccaggctggtctcaaactcctggcctcaagtgatcctcctgcctcagcctcccaaagtgctgggattacggtgtgagccaccccgcctagcctcaaatggaattttagaacaaaaatatacctaatttctgatataaaaaattcactatacaagcttaacatcaaattaggcaagtggaagaaaagattagtaagcctcgcaacaggacaataaaaccacctaaaggaaaggatgagagaacaaggatgaaaaagcatcacgtttagtgacctgagagacagtatcacagtctaacagaaagctaactagagtcccagatggggacagggaggaagaagtgagagacggggtcagacaagaaatatgagtagtggctgcaactttgccaaatctggtgaaaaatatgaactcacaggtccaagaagctcaatgaaacccaaacgaggtaagcatctataagcttaaagtggattaatattaacatcttctaatactcttacatacataaattacgtgatgacaaattaaccccatcccaaccctacagaaaataaatttggtatgacacattttcctgttaggaccacaactggacagagaggtgacacaagagggcagcctgaagcctagcaagtcctcttcggggaagagacagcagagtcccacctctgatttccccagggatacaatccacacgcacacacacacacacacagaagcacacacacacacagctagcagacacacacagctagcacacaagcacacacacagcaagcatgcacacacagctagcacacacacagcaagcgcacacacagctagcacacacactaggcgcacacacagcacacacacacagctagcacacacacacagcaagcgcacactagcgcacacacagcacacacacacagcaagggcacaca

SEQ ID NO: 3 - DNA, 3258 bp, Homo Sapiens
gagattcagacacacagaaagattgttatgtggtggcagaggcagatattgtagtgatgcatttccatgccgggaaatgctaaggatggctgttaataaccagaagctgggagacaggcatggagcagattcccactctggatgcccaagaaggaatcaaccctgctatcctcctgactttagacttctagactcctgaactgtgaaagaacatctttgtattgccttaaatcacccagtttgtggtagtttgttatggtaacaataggaaataatatagtaactaatatagatgcttagtaaccattttcccatcccaaaattgactaaggaagctaataagaaggggtagaaaagtggatttcgaaatagcctttaatgttcaataggtgttccacttcagcacaaatggaaatttccttcctggttcttgtgactgctctagtatttatttacaaattgatatgagaacttttgcttttgatggatggaaggatccaatcaaggcaaagatatgcagggagaaaggagaggtggacaatagaagggaatgacatggaaattctcctcatctcctggtctgctggattgtcctttaaaagcagaactcaagttattgtttaataagcaatttcatgaaacactcgtgctttaaggaccagtaaagcaaaaatcaaggtggaggaaaatttcttctttcacaatttgctctgtagatcttgtcctatagttgttgtgaggacaatagtgaattaatgtaagccaggcatggtggttcatgcctgtaatcccagaactttgggaggctgaggcaggcagcacttgaggtcaagagttcaagaccttcctggccaacatggtgaaaccctgtctctactaaaaattcaaaaattagctgggcattttggcgggcacctgtaatcccagctacttaggagtctgagggaggagaatcacttgatcccaggaggtagaggttgaagtgggccgagatcacgccactgcattccagcctgggccatagaaggagactctgtctcaaaaaaaaaaaaaagtgaattaatatatgttaagtgcttagaacacgtctgacatatagtaagtatagtgttttctataattataaaaagggaagaacataaacagatctatttctaagcacaaaagacttccttggggacaccccaaaacaactgggagaattgctgctcatatatctgtaactacagacaagcctaaggaatttgtcttactaattcatattcattaatttaatgaatatgtgttgaataccttctaaatggataaactcaatgaagggagaaatcatttaggcactgctaccccggtgacagagcagacagtaagtggtgactgactgagtgttccttgtacagcactgagtgccaagaatactcgggggaacaagacatcattgtctcacaatcagcagagccaagaggtgcaggttagaatgatgaacttgatctacatggaatgttcttaacaaagttttaattttttcccaatgtcgccaaaataaatagttttgactaattacctggaaaactaactggtgtggaatagtttatttcttccaaactttcagataaattatatgagaatgaaattaggaggaagaacagaaaaatcagtcatttcaagcaactgcatggaaaagaatgtatttcctttgaaaactctgggaatgtaaattcttaaccatttatggggattttagtaaatgcaggcaaggcatttcattcttacagctttctttgaagacagaaatacataatagcctactccgtaacaacatttcagtagtctttgagatttattttttctataacttgtagaagaaataggatcatttccgaagcagtatgactaggaatattactttgaaaaagtccaataaccatttctgatctttttcaaacagaaaaagtagaaaacgtcacctagtgtactatcctttaggcttttggttgaactcaagctattctggaaaagtcttgcttatcccccaaccttgtaaatatttagtgtttccagtttcccataatgtaaatgcagcattacaaacagcatgacaactgtgtatacaacaaattttgacaggactgctgaagatagaagtacaattctttgaagacaaatgaagtcccttatagagttttaatgataaatagaagggtacttagtcttccaactcccatgtcaatcagtgataaattttcctccaagcttaccataaaacggccaggttctgaggtctgggaagggcgtactcagtgccaaaccttatcttaaagaagggaagtccaatgtcatagtgcagagtgtgattcaaactgatttctctgtctgtttcataatggagatataatcttaggcctggtgcagtggctcacccctgtaatctcagtacttcgggaggccaaagtgggcagatcgcttgagctcaggagttcaagaccagcctaggcaacatgacgaaaccctgtctctactaaaaatacaaaaataagctggtgatggtggcaggtgcctgtagtctcagctatttgggaggttgtggcaggagcattgcttgagactgggaggcagagggtgcagtgaaccaagactgcgttactgcatttcagcctgggcaacacagccacaccctgtctcaataataataataattataataataataatagatatataatcttgttaagaatatatgttactatactgaagcaatgcagtgcaatgtacctcaacattgctcagaattcagagggtcatcatatagttccaaatgaaaaaccttaattgcaacagagagaaaaaagatgttaagcgtctagcattgttgcctaactaaagtacttggtatatattgttccttttcttctttttctcttttgtctaacttacaaaacatgaatatttatttccaagcttttttaaaaaaaactttttaattctgttttgtatctgagaagtaaagagatggtgaagtgagcacaattgtaagtaatactggataattactttggaggagattgctaggtagtgagacaagtggataatatcataagtgctagggctgagtatgaagttccgtgggaacacaaaggaggaaatagctatgaatcttaagaatagattgttatttaaactaaattctttcatggaaaaaaatagccttttaacacattatctcttacagaaaaccaattaataaaaacaaaacaaaatgaa

SEQ ID NO: 4 - DNA, 3846 bp, Homo Sapiens
tgtagacatatatagatgtatacatatatagatagataggtctatatagaaaaccatctatctatatctagatagagatatgtattgatagatatctctccctgtctatctctagatagattatctaatctatctgtaaaactatcttaaaaccatactaatttaaaaatcaagattcatcttaatttaaaaatcttaatttaaaagttaagaaccatctttattttgtggttcatatacaccatggaatgttaggcagccataaaagagagtgagatcaagtcctttgcaggaacatggatggagctggatggaggtctttatccttaacaaactaatgcaggaacagaaaaccaaatactgcatgttctcatttacaaatgggagctaaattatgagaacacatgaacacatagagggaaacaacagacactggggcctctgggagggtggatggtgggaggaagcagaagatcaggaaaaacaattaatgggtactaggcttaatagctgggtggtgaaataatctgcacaacaaatccctgtgacactagtttacctacataacaaacctacgcatgtgccattgacctgaaaataaaagttaaaaaaattattaaaaatatgtcagtaaaagtctttaaccaacacaagatggttcatcccaagagtcatcttaatttaaaaatcttcacatcttaagaagctacacgggaggctgcggcaggagaatggcttgaacccagcaggcaggggttgcagtgaagcgagatggcaacattgtactccagcccgggcgacagtgtgagtctctgtctcaaaaaaaaaaaaaaaaaaaaaagcaactttgctgcttaaattgagtataatacccatttacatttaatgtggtgaatgaaaaatttggttttcatttaccaccctacaactgaatttttaattcctccacatattctatttgcctttctcaactattattttatagataaaaggacttacagaaagcaaatatatgattcaatattccaataaaagtgctttttaaatttatattgagcattttatccttctttcttaaaaatcttaagctacacacattacatagctaggcactgataagaatctagtactagataaccatttcaaaggcatggatagaatgctttccaggtatggattgtttccataactccccttccatacattttaaagccattgcataaaaaataaggaattttgtagagaggagtgagtttatatcctttaatattttctcactttagaagtgcagtcttggaatgatataaactctgtaaacagactatcatgctgcatttacagagaatgatatcatggtgtctatttttaagacaagaataaaaattatgtttttttctaataatagaaatggataagcagaattctggcttctaataatgagaacatactatcccctagtttgaaataagttagataatttaactttctcatgttatcttgaagttaatacatcatttgtattgaatgtatcagtgcactacatgaagtcttacattgggtaccatcccttttatcttccacataaagtgatttagtgttttaatacacttctttccatatcttgcagttttgcatagcaaaagaagcatgcactttgaggaaaatgcaccttttaattttctgtattttaaatattatgggtacaaaatatttgtatataattatggagtacatgtgatgtttcaatacctcctttttgatcccagatctttcctgaattttttgtccaatttgtattgcgttatttatgtttgaaaaggagtaatgatgtttagtatatactgttataaaataactgattcaaaggatgtaaagtatctgatactaactatgtccaaatatgatttttaagcaaatgttcctaacaatacataaataataacatggaataaaataaattcatgtagctttatgataataattttacctaaattaaaaagtgttatgtgcaaatagatggtatacgacacttggcatgtaataatgcaattaagtccaattgaatatattgtttgatttatttccacaatctttgatacatgtattgtagatccaaacatcaaaaaccataagtagcctgtataatgctttttttattctctgtaaagtttttaatataaatatataaaagagcatcttaaattatttaagtcaattattttatatgtggatttggtattagaacatatatcttctttagcacaataaacttttttaagtgtcagaaattatataattatatagtgacttttgttcacaaggtagttagttgtacgtacctacaagatacttgaaaaatatttttgtcaagattggatgcatttttctcttatagactcttaaaaatgttaacaagccaacacgtgaacgtactgaagtattttttaatcatcttttctagtgttgataatgagttggctgatataaagtcattagagtggcaattcaacaaatattttctatggcataacaaatgtcattaacttgctagtctgtcacgatgttgcaaagctaaagtcacattcattagtgttttttgttgttgttgctgtagtggtggtttgttttgttacatgaagtggcccacttcttgtattaaattatttattctttctgaaaatgttcaatcagaatgtaataacacctttaaaaatgatttaaaaatgtattcccataggtgggaattgagcaatgagaacacttggacacagggtggggaaaatcacaccccagggcctgtcgggggtgggggcagggggagggatagcattaggagaaatacctaatgtaaatgatgagttaatgggtgcagcaaaccaacatggcacgtgtataccaatgtaacaaaactgcatgttgtgcacatgtatcctagaacttaaagcataataaaaaatatatatatttatttctactgaacacaatgtctatatattagatgacctagaactggtagggggttctaatccaggggattgttgataaactcagacaacttctgtatttttacattgttactcttaaagtcttgtcattgattgtctcaatattggaaaataacatgtcaatattcagtgtaataaactggaagaaaaaatgggccaatatcccattcaattaaagacatgaaaaagagtgtgtatgtattacttctgctcacatcttaatgttcaacatgtcgtcaccaagccagatagaaccatatactggggaatgtaatgtttatctgagaaaccaaatgcctaaatacaaattttagtagtacgaagtaagaggaaataaatatgggggattttctagtcttctctattatatataaattgcaagatttggctactttaaaaaatattaacatttactaatttttcatcaattcaaataccatattgtagagtgcaatttaaccaaattagataacagtcccaaatataacatttaactgtacatcttccagaagccaaaaaatgagaaattatttgtggcttttggctagacaaagatttcttagatgtggcccaaaagaacaacctagagaacaaacaaaaaaaccagttacaacaacaatagatatgacttcataaaaacaaaaaattctgtatttctaccctatatgcctcaaactaggaatagacatttccaaattatatctgataaagaatgtgtatccaaaatatgtaaactcaattataaggaaaattacagaccaataataaacaataaggaaaagaatatacttgaacacatactttgccagaggaaattcagagacagcaaataatcacatca

SEQ ID NO: 5 - DNA, 3376 bp, Homo Sapiens
gctctggtcaagtttgctgtttcatgtgtcttgggttggcttcgctgataagcagacctaggagctgacatatgttagcagagacatatttggacccaacctatatactttttctctataaagcattcaaagaacaatgtgacgattacagttgtgtgggatttcacccttccttaactataaaaagaagacttcttgggccaggccggtggctcacgcctgtagtcccagcactttgggaagccgaggcggatggatcacgaggtcaggagatcgagaccagactggccaacatggtgaaaccccgtctctaacaaaaatagaaaaatcagctgggcatggtggtgcatgcctgtagtcccagctacttgggaagctgaggcaggagaattgcttgaacctgggaggtggaggttgcagtaaaccgagatcgtgccactgcactccagcctggtgacagagcaagagtccgtctgaaaaaaaaaaaagacttcttaataaaaaacaggcatacctcattttactgcacttcactttttttgtgcttcacagatattgcttttttttttttttttttttttttttacaaatggaaggtttgtgtggtaacccttcattcagcaagtccattggtgccatttatccaagagcatgtgctcaccttgcgtctctatgttacattttggtaattcttacaatatttaaaaattttcactatgattatatctgtgatggtggtctgtgatcagtgatctttgatgttcctattgtaattgttttagggcaccaccaactgcattcatataggacggtgcacttaattggtaaatactgtgtgtattctaactgctccaccaatcaggtgttgcctcatctttctcctgctccttggactctcaattccctcagacacaacagtgttgaaattagaccaattaatatccctacaatggcctctaagtgttgaagtgaaagaaagagtttcatgtttctcactttaaataaaaagctagatatgattaagcttagtgagtgtattagtctgttctcatgttgctaatagagacatacctgagactgggtaatttataaagaaaagaggtttaatggactcaccactccacatgattggggagacctcacagtgatggtgaaagacgaaggaagagcaaagagacatcttacatggtgtcaggcagagagagcttgtgtaggggaactcccttttataaaacgatcagatatcatgagatttattcactatcaagagaacagcagggggaagacccatccccatgattcaactgcctcccactggatcccttccatagcacgagggaattatgggagctacaattcaagatgaggtttgggtgcagacacagacagaccatatcattctgcccatggcccctcccaaatttcatgtcctcacatttcaaaatccgtcatgcctttccaacagtcccccaaagtcttaagtcatttcagcattaattcaaaagtccacagtccaaagtctcatcggagacaagctaagtcccttctgcctataagccagtaaaatcaaaagcaagttaatcacttcatacatagaatgggggtacaggcattgggtaaatacagccatttcaaatgggagaaattggctaaaatgagggggctaaagaccccatgcaagtctaaaatccagcagggcagtcaaatcttaaagctccaaaatgttctccttcaacttaatgtctctcatccaggtcacactgatgcaagaggtgggttcccatgatcttaggtcccctgtggctttgtagggtacagcctccctcctggctgctctcacagggtggcattgagtgtctgtggctgttccagacacatgatgcaagctgttggtggatccaccattctggggtctggtggatggtggccctcttctcacagctccactaggcagtgcccagtggactctgtgtggaggcttcaaccccacatttcccttccatactgccctagcagaggatctccatgagggtcctgcccctgcagcaaatttctgcttggacatccaagcaatttatatatcctctgaaatctaggcagaggttcctaaatctcaatttttgacttctgtgcacccacaggctcaacaccacatggaaactgccaaggcttggggcttgcaccctctgaagccatggcctgagctgcaccttggcccctttttgccatggctagagcgggtgggatgcagggaaccaagctcctaggcttcacacagaagggggaccctgggcctggcccatgaaaccattttttcctcctaggactctgggcctgtgaagggaggggcttccgtgaaagtctctgacatgctctggagacattttccccattgtcttgctgattaacatttgactcctcattacttatgcaaatttttgcagccagcttaaatatctcctcagaaaattggtttttcttttctattgcattatcaggctacacatttttcaaacttttatgctttgtttcccttttaaaactgaatgcttttaaaagcgcccaagtcaactcttgaactatttgctgcttagaaatttcttccacaagatacccttaataatctccctcaagttcaaagttccaaaaatctctaaggcagggtcaaaatgctgccagtctctttgctaaagcatacatagcaggagtcacctttgctccagttcccaacaaattttttgtctccatctgagaccaactcagcctggatttcattgtccatatcattattagcgttttggtcaaagccattcaacaagtctctaggaatttccaaactttcccacgttttcctgtcttcttctgagccttccaaactgttccaacctctgcttgttatccagttccaaagttgcttccacatttttaggtatctttacagcagcccgccactctactcctactaatttagtgtattaatctgttttcatgatgctgataaaaacatacttgagacttggtaatttataaagaaaaggaggtttaatggactcatagttccatgtagccagggaggcgttacaatcgtggtggaggatgaaaggcacgtcttacatggagacagggcaggggccttgtgtaggggaactcccctttataaaaccaccagatcttgtgagccttattcactatcacaagaacagcatgggaaagacccgcccccatgattcaattacttcccactggttccctctcacagtgtgtggtaattatggaaattataatttaagatgagatttgggtggggacacagataaactatatcagtgaggaaagcatgttgaaagctgagagaggtcaaaagctaggcttcttg

SEQ ID NO: 6 - DNA, 9806 bp, Homo Sapiens
cttccggttactgactctgtggctgctgcctcccacaacgctgtgcttgcagaccccaggagcgctggctgtcccttcacttcctgaacatgtggatgtgtgctttgggttcttgacctcagctcttcccaaggtcttcttagagaagggtctaaatgaagtcatttttagagtatttgtttttggttacacaggtgcttccgcccatgtggcctcggagtgggaccctgcgggtcatcaatctgtacattgcctgagagcagccgtgtatgctctggaagggacaagaccaggtacctgtcgggggatgcggccgtggtaccaggcatggctgcgcaggtcctcgctgctcaggagcagctcctcctccagctccttcttcagtttctcgggggtcctgtccatgatgtgcctctccttggagaactgcaacacagagtcaaccatgagctcaccctgcccaggccacaccaggccatgccagctggaggtgaccgcctgcttcactaatccaaccagttatgctacagcctgcattcagggagatgtggccacaggactcagttctgaccaaggagctgagatgtgatggctggagactcaacaccattctggacgccaaaaagagctggccttggctggaaggttctggctaggaggagagggctaaagcatgcgaaggcacaacaatgatggaactgagcgaagaagatactctatcccacttcagtgaaaacatcatgaggcttgaagcatggaagttgcctcacccccgtgtttcctgccaggtggaacaaagtgctgagagaatcaaaccagcaagcaaagagaagaggagcaagagatggaaagtgacctctagcatgcacatccctaagccccagctgattatatcagccggcaaactcctcttgtgacctaggctagtatgagtggaatccctgtcacttgtgaccaaagcagtcctgacccagaaacgcagggactggctgagggcagcccaacattggtggctgagggtttagaccatcacactccagaaagtcagagtcacggaaaatctttgcccaggaaggcaacaggtatataaaaagatacttttagagagatctggctgcagtgagagcaatgggctggatggggccagggctggaggcacaggtcagagtcttttgaaatgtgctgacaacgcccagatctccatctccagcccttagggtcggtgcctggtagggatatttactggaatccgcattaaagctcagatgtcaatatggataaattgaactcatcccctctgcaaagcctgatcttcgcccttttccccagtcactggcatctcttctgtcctcattacctgaactagaaccctcagaatcggcttccattggttaagacattcctgattcttttacctatccccattcgaatccccactgtttagattactgttcttttctcctagaacttctgcaatagcctcctaacagtttccctacctcccatttctagtcccacaacctgccacctacaataccaccaaccttgtcatattgcccctaggttcagagattttagtccaagggtgctccagctaaggccgacatgacagccacagtctctttcaactcctctcccaccacacacacatatacacagaatcaacgagcttctaatatttagttttcattcatgccagggttcgggcctggtccctgggggcgcagaccccagtcctgccctgttcctccagaatcctgagctttaagcaccatttcctgttgccccagggagctgacccatggcccctgacatatactgaacttgcagacacactgggatttggctctgaatttgctaggaggcccagatcatgagagggctgtggatgcaaacaggaagcgtccctgtgggcccccagaaataactgtcagaggcatgactggcaggggagatgggcaagggtcctgccattatgaagtgggttccaagagtcagcagagttgaggcattaaagttttcaggacattatttggggctgttggctgccaaggcctgaggaaatattggttatgcttccaagggctcacagtgacctccagataaagcccaaagcctccttcataagtcaagtaatgcctttttccacctggccacaagctaacttgctaacatgttctgacgcagggtccaattgcaggaaccttccatggctccctgaacaaaacatccctcatgtcctgcctccatgcctttgtcttgtggtccagcagacagtgacacatctgtagaggtacacggcctggcaggagtccaggatgggaactggggaacagccaggggaaagtcagacaaggtaggtggggaccttgaaggccaagcagagaccatgccttatttacctttggctcccagagcctggcccagtgcctggcacacagcgagtgcccagtagacagtgactggctggaaccatgctcacttgcttgccctctgtctagcaggttccttgtcacattgggtgtggaggagaggagagagcttggaggctggtcaagaacaagtgaccttgggccatctctacacttctgagcttgtttctctatgcataaggagtggggataataactcccaccttacaggactataggacctgatgcaggtaaagcatctggcactatacctggcacatggatgctcgcttgacacaatgtggaatttgaaccctctttcaaagacggcttttagcaacaaaatggaactacttcactaaagaagtaaagaaaaaaaattacaaaatccatcagaggttttagagatatctggccctcgataatttagttctaatggaataaaaaagctagaagttggaaaactgatctctacttaggcacaggtttgtttattcgtttatttcagtgcaaagtcaacagttcctgggattttgagtagcactcaatggttctatagatgcagggtgagtaagcaggcatactgtcgcttggtggcaagcactttgtatgcatatatctcactattaacaagtatatgtattagcgccaggtggctcacatatccacaaatacacaggtgacacagcccagcatgcgagtgcaagacagttttgtgtttgcacaagactaagaggtccttgtatgtagattctgtcttcttggacacttagttgttgagaaattttttgttgaattttaaaaactgagatgattttctagtcattcatttattccatgatcaagcctggcaattaacttggttgaataaagaaaaagaagaaggagggaatgtgtgcataaaaagaggaggtggggaggagaagggagaggaggctggagaaggagcaagctagcaagctgctgggctattctatcctagttgggagtgtcaggctccaacacccggaatgctatcagggttctcaaacaaaagcctcctttcttcagttttggaacagtttattagcttgagggagaagtccacaacagtccaggcctcttatcaaattgtatcaaacaactccacaggttgggattttctagaaatcctatccagaaattttgattacaaataaaattataagtctgactggagttctggatcttcgatgttaacattggtctaatttctttttcatttttttttttgagacagggtcttgctctgtctcccaggctggagtgcagtggcgcattcatagctcaagtgatcctcccgcctcagcctcccaggtagccaggactacaggtctgcaccaccacacccggccattggtctaatttctaagcaaggccagtgtcttccaatgagctcagggtgggaaaccccacgggggttgggctgtgaactgtaccaggtggcccaagctgggggtccaaaaagacagatccacatctcaaatccactgaactctgggaatccctgtgatgacctgagacctgcatcatcactgcccccaataatgttgtaaacatgtaaagaaactgaatccccaaaaagcacactttcaaaagcactacacaaagcagtctgaacccttcctctgaagaaggctgctacatctggcatcgtcttacaagtaaatccaacccgaaatgaagttctttggagaattcagaaactcagcccttttgaacccctgccttgcgttgaatttcaagccaagtttacaaccaaattctgaagtatataaaggacttttaaagacccaattggtatttttacaattgaaaacctgcataaattgatcatgaacccaaagaatgaataaaccccaattactttcatcactctaaaccctgcccgaagctgaaaataaaaatccagttctccacaagtttgaagaccagttacttctagtacgagcccttgggtgttttcatctaaagtagaacagaaagaacaggaatggcacttgtggcgatcctaaagccttgcaatgaaataattagtagattggttctgtttcaccttttactgacacttgctggttttgtggcttacttaaaaatagtttattttattataatccaaagataaatgaagaaaggtttgaattcaccaatcctacttttcccactgggatgctaggctagaaaaatagtttcttatgctaataactgtgattaaagccaaagcatttacttaaataattaactttacaaataaaaaagttcaaagagaaaaaaattcatattttatatccctgttgggtaaacaaaaccaaatgtgaacgtgggcaattgggcatctttgcctgacccagcccagtgggcacatggtggcctggccagcggtccaggacgttgccagaaccatagctaaggaggtgccacttgtacacagctgtcatggatctatatattgattacaacagctgcccaacatatgacaataaagtgtcctgaggaaagggtgtcttactcttattcactcaagaggcactctacaggccagcagggagggtccctgagtgtgtccctgagacttctctgccttttaggtgttggacccttggcagatgaggacctctggcctcactgggccccttgctatgagccagctccttcaaattctctcattaaagctcagtgaagcagcctttgcagagagcttcctaatccatgcacacttcacccttttggctaaagttctgcagaaatagtcaggggctccattttcaatcaagagtttgatagtcactggaacaccgtgccttaaatgaaacccaaggacttactgcatgcctgccgtgctactctgcctctctggctagatctgaggcagccgcagctgtgatggaaggaggactccatgccctgcagcagtcacagcctttttgaggagacaaagcatttgaagagaatgtgcagcaataaacatctatcttatctggggtcagtgagggtttctggtcccttctgacaaagaaattggcagcagagattccataaaaatttcaataagttttagcattctgaaacacttcaattagtttgatgttaacgtttaagcaccttgatgaaataaatttatctcttccaaatcctagaaagaatctccctttcggcaaagattctgcagatgggttttgatgccatttttccattttgtagttagatctctatcatttatcacactgtagaccaaatggtcgttttagtgccattaaaaactgatttgcaatttgctgttaaattaagatgtttcattttcctactgtatatgattttccttttcacagatgagtgaggatacaaggggcaatcagaccctagtgcagacaagaaaataccatcaaaacccctagagatcccaaatctaagagatttccttttattcattatcaaacctaatcaatctcttatcaaaagaggctcagaaatcatgtatagtaaatatgaagaggatatctgtagaaccccttgcttatcaaagttctgagaaattcccattaaatttctgttatccatgtgtgcaaactaaaaagactaatttaattttaatttgtgcagactgaagtcttagagcagagcactctgtaagcaggcagcagtaacttaatcctacatgacaaactaattacattagaatcattgtgataggtgcccatgccttctttgatgttaaacccctgttacctttgatccacagtcattctctgggcaaggtctcttgcacacattcccatcctgccagatcatgaagctgttgcttttgaagctcagttttattttgatagaacaccaagggactgaaaattatttctcactgattttgttctgaaaacttcgggtagaattctaagcttgacagaatgtagcacatacaacgccaacaaatgtggcttcttttcttcactaagatcacccactcactggtgaaactgctcaatgtactcattgcactgtaacgtctctctccatcccttcttgaccccagtgagtttgcccatcatgtttcttaccccttgataaacatcatttacctacagcctcactcaaagctcagctccaagggggtctcaccttttcgttaatagataaaccgaaacacgatgagatttccaacaggccatttgttaacatcttgccacgctgaaagccctggcgggtaccttccgtctagatcaaatttagatgatgacttcctggagcagcccacagaggaccagacatccaaatcaccccaagaggcaggcctgtattctcattcctcctagagagaagtcggatgtgccacacttcagaggaaggccgaaggtcaatgggtgcacttaatcattattggactagagaaatgaagggctttgataaaagctaaacaccagtccaacctactgtgaaaaccctgtctaaactactttgctccctttaaccatgtcctcgagcgactttgaataatatctctcttgctttcacagggctggcacttgggttaaaagaaacaatgcaagtgaaatattaatcgctgagttcagcagcaagattacactcagtaatagtagtgctttcttaacatctttaaagaatgaaaagaacaaagactgccctggctaaggcagaccctaataaaagagtttgaaaaccggctgatcagagttcaaaatgctagaagatccaagccagaaatcctcaccactggtaattcaatcttgttaattcaacatcttaatgcaaattatgaatgatctggaacacagctattcatcaaaccagatgtcctatttgctcttcaataagaatgtcagcaaatcaaaatcaacttaattcaaatactctcatttcctaattcaccttgaatgaatgagatgaattaggaaaaggagagtactgaatgaacaaaatgcaccgtagttgaaagacacccaaagatgtaattggaaggaaaaacaagatatgccaaacacatggaggaaaagccaaagattcagacagccttccagcgtggggtgtagaacaaatgactttcaaattctctctctccaaaatagtaccatgactaactaccatcttagaactctgctctgggacaaagcgcatcacatgtcagtgctaagtacgcagcaggcttgcagtaaaacaaaatgattcatcacaagatgggttttggccagacatcaactgcaccactttcaatatacaactcacaggtcactttaaagttcctcctctagctcaccagggacctgggggcgggcctgccagcggccactccctgtgctccccttccaggctgatgcctccctgcctgcccacaccggggtactccacgtctctacactttgtgcgtgctcctctctccacgaagaaggccaattctcctccttctctggataacttcgactaattcaccagactcagcaaaggctctgcctccctgcaggaggccatccctgatcctcgccactcctgccccatctatgccaggcatgtgcctccagggagccacagcaccctctaaagagagcaacaccaaatcagtgataaccgatcgtttccttcaaccagagttaaatgtctgcagaatgcccaccaggcatggtattacagcagagatccccactggaccaacaactcccactgggtccccagcaccgacacatccgaggtaccacaaccggtgactgctgagctgaactaaggatgcaatgggatgaaagccaatggggaaatgtgcctcaaatacttattaacccctggtacaggaggcctggctgctgggattattcctagatcctctgtgacttctctgaccatgtcacacactaaccttcccagtgaaccttctgctctgagcaggcctggccttctgcactcctgcaaatgccagtggcttttctatctctgagctactgggtctgctgctcccccaggctgaaatgccgtccctatgccattcttttctttgtccatccaaatccccagttattaaaaaaaggagaaaaatttaaaaggggttacctgttcttaaaaacaaacaaacaacaacatcaaaaacaaaaacagtcccacatcctccctgaagctttcctaaaaactaaggctcacactgttctctcccaactgaactgcaaaataaagtattaacatacacaatatcatcttattttaggcgtcaattgtcttaatatagtacagtagaaagaacgctagcagccaggcatggtggctcacacctgtaatcccagcactttgggaggccgaggtgggcagatcacctgaggtcatgagttcaagatcagcacggccaacatggtgaaaccctgtctctactaaaaataccaaaaattagccaggtgtggtggtgggtgcctgtaatcccagctactcaggaggctgagacaggagaaggcggaggttgtagtgagccgagatcacgccattgcactccagcctgggcaactacgtctcaaaaaaaaaaaagaaagagcactaggcttcagcccagaaaatctgctttctattcctagttccccacgaaatgattctgggcgggctgtttctctgagccttggtgtgtcctctgcggaaagggtaaattattgccctgctcacctcacagagcttattttcagactccagtgagacaaagttgttgaagtcttcatagcatagagagcttgttttgagactccaatgagacaagatgtgaaagaactcatacatttgaaagtcttttgcaaatgtaatgaagtgatattatgacctaataatatccttgtggtaagtctttgaaggcaggaaccatgcctcaaatctcatttattgccccacacctcccacaaatccctccccacctaacagagggcttatgcatggactttacattcaacacccattctacattcaacacgcatggactttagaacttgaatatgtctgttaatgttatgatctggaatatctccattacaagtttctttccactgggcttaaataaaacactttcgtcttttttcccccagaaaaaagatccagtagtcttttatgtaacggctgtctactgtgaaccccttcgggatattaaagtcatgaccctcaacatggctggaacatcttgtatttggccccaactctatgagggccagcacatccctgatccttctctccattttcggcctcccatttaattcctttccaaggtctttatacacaagtccgtatgaggcctctaaatacatcctaaattctgtaagaccgctgcaaataagatcttactctctaaaaacacctgtataatcattctcctatgtaaggagggaccctctatatttttagttttgttcccat

SEQ ID NO: 7 - DNA, 1586 bp, Homo Sapiens
atggcagtggctggggcagtgtccaaggagccactggtgtaatggtgcacccagcaggtagggaaaagtgttggcctggatgtcagcaaggagatcatgcacagtgcttccaaaaagatgaaactttacatgggcagaaatcaagggaccagctaaagctgggtaggaggaaagggagagatagagaggaagttcccgtatttgctgaacctgacacagctgcagaggtaaaacatcttttgatttgcccaaggcacgagagaacagcaactcctttaagaagaagacaaagtttgtcaatttacacacaagagagggacccacaggcctgcagtctgctccccagttgccacccttgtgtttgcctgggccagaagcacaagctcatcaatagctgtctgatctgtgggcctgttgtttgtgaacaagagggctccaatccttgcttattctgtgtgacaaccatatgtactatgaagaacaggatattttacagcataactcaaatgagagccagaaactgctaaagaagctcatgccattgatggagaattctggaaaggtggacaactctgccaaggactttctatgtcatcgagaatttcaaattatgtctggtctggagaaggatatcaagcacaaagacaggctgttagagttggatagagctagttttcaaaggacccaagttattgatgatcagattttttgccagtgattctaaccagtggttgtccaaacttgagtgggaaacgaaatgagaagtgagaagaagagctgagagaacttcgacatgcctctgtactctctaagaaggtcaccattgactttacagcaggaagatcctggaagaagaaaatccattagcagaatatcacagcagactagatgagacaatacaggccattgctaaggaaaccttgaactagacactgatcacatttgatatatctcctgaagaacctttggaagttctggtaaatctcagcacatacgagtcccctccccagtgggttgaccacacaggtgcagcctcacagaagaaggctttccattcagcaggattgggactagaattcaactcatttcggtacctcttgtgaatccaggatcaagactttcagggaggttggacagtggctcatgtctctctatacatcagccctgggtttctcagcttgttagagggattagaaaatgatggagtacagatcctggtacatctgccacagaggacaactttggatagtagtcatagccaaaacctccctctgccttcaaaaagtctcagaactccgggctacatatcatcttcttcatagaaaagatgtggaattccccagtgactatccatcaggttgttttttgggctgtctggacctaattgcttgtttcagaggcaatttaaggagcagtttccagacatcagctaagaatcacgttctccacttgttttcatctgcaaaagtcctgaggaaatggttgtgaagtttcctattaaaggaaataaaaaaatctggaaactggattccaagatccattaaggagcaaagaagaggtaaatgaagcagaataaagctttctga

SEQ ID NO: 8 - DNA, 22888 bp, Homo Sapiens
agagagccaccggggcccgctcgcgcgcctctgagaggctgtccgcgcgcgcgcgtgtgtgcgtgagtgtggatttgccgggactggagctggaaagttcaaactaaacgtgttgctctcgccgagtgccgaggccgcggcggaggctgcccaacttccccgggccaagtgagtggcgttgcccagcgcctttggcgaggcggcggccgctcggccctgcgcccggccgcggcggcggcggctccgctcgccccgggagggagcccgcggccagggctggactctcgccccgccacctccaccgactctctcctcagcctccgcgcctggcaccgcagcaagacttgaatgaagtgatcatgtaaactagagaaaggagattaaaaataacctctggatattcctctcatgtgatctttattctggatgaagcattaggacagctaatagccgtgtgtcacttaaaaatccaacttgagaactgtcaccaaagatgtctaggaactttgaagaaacatgaaggattagactggagagaaggctgtttccaccataaagacatttacccagccagccctatgaaaacaggagcctatttcactacttggttattgactgaacagagtagccaagaggtgggcctttcagcccttagggcctgccagacagcattaaaactaagtcttctgtgaagaagctccctgtgcttgggagtatgcagctttaatgtttgaaagagtgagggagggaagaagggagataaccctcccagaaaacagaaacgcagaccgtgctttagaaaagatctttccatatgtaacaaacctgcacgttgtggacatgtaccctaaaacttaaagtataataataataataataaaagaaaagttctttctcacaatcctatcagatggaatgagtcacccacctcccttgtgagggaaggagtaaggcccccaggataatgcttgttggggcagccttggcttactcccctgagaaagcacacagctgagcagaagctgcctctttggaaccagtggtggaatagttactggttttacgaatacaatggacacagcagattttgtttgtttgtttgttttgagacagggtctagttccgtcacccaggctggagtgcagtggtaggatcttgggtcactccagcctcaatcccctgggctgaagcgatcctcccacctcagcctcccaagtagatgagattatgcctggataattttttaaatttttaaaaaattttaaaaaattttgcccaggctgctcttgatctcctgggttcaagcgatcccgtcgcctctgcctcccaaaatgcaaggcttcacagcagatgttttcagtagaaattgtcttatatttgttttgtgttgttattgaaatgaatataatgctagatatttcttggtatttcggaagtttatatcttataggatagattttatggtaactttttacatcttgaaaattatgttaaaattattttagtttaactttgttgattatctgcttgtatgaattggctttaatgacaagaaaatactttaaaaccccagggttacctccagctggcttgtcctttacccctgaaaattttggtttcctaatataggcaatgacaaaaagaatatttaaattccacactctccaaagttgcaaagtaaaaataaataaaatattcataaacgtatctgaaatgggtccaaaatcaaagattcaggtaaatattaaaatacatgtccttttttctctgttgtagatggacagagagagaaaaaaaatcactgagtagagagagaaattatattgtaaataaaacatatggcgaaagaaaacttttcaggcaaattaatttttaaaaagccacatcatacacgatattaattaaaaatgtgtatatatataatttaaataaaaatattttcctttttgttatcttcttcatcttccaaattttggcattaaaaatattaggaaggcatttctatggcttttaaaaaagctttccaagcagctctcaatttattgtttcacataatgctactcttttctctaagtctgccttgtcagctaacgtgttttgggaagaaaaaagaaaacaaaacaaaaccaagactctgttcttctcatctctttgattgagttatcctttgctaggtgaagtgttgtgagctttcatacccttccctgggcttccagcagctctccccacggagtgctgccacagcaccaccaggagccccagatccctgcaaggaggagatcaaacctccacagcagggattcctcaagacaggtcaagctccagtgcttggaaaactcagcctacatcacacaaaaatgttatcatttatttggaattctttttcaatggattgtctccacttctaaaacatttctaagtctagttcaaatccagctgcagattcctggcacttgcttccttcccattctttttcatatatcttcttttatgttgcatatacttacttcagattaagtatataagttaaactttcagtctattctgccattagaagagtttatttccatacacaataaaaaaggatcgtttgtattatcctcaagattagtgtatgttatgaatgcaatatctttgcattcaagtgaatttaaatattataggaaggggtagagaaggaaatgcaagttatcactgactgacttgccaaagttaagcaatttttaagcattttggcatgcatgattgattgtgtacttttaaatttaatattgtatggtaattattttctcacgtcattaaaaagtatttttttcaatggccagataatagtttatcatgccatgtactgtatttaacttcaaattgatagtcttgaacacatatattaatttcaattccacagatacaaaaaataattgacattaaacttctttgagaataaaaccttgtccaaatttgatatatccttaggatgtattcctagacatggtttatttcatatcttatgaactctttatttgaaggtatttggtatgagttgagaaattacattacagaaaaaaattttgagtgtgtatttcattcaatctttgcattgtttgtaagtgcctatattaagaacttttttgttaaagtttgactatgaaatctgatgagtgaaaatttaatctttttcttattttaattttaatttcttcagttaatagttaaactgaacgctttccatgtgtttattagccacttctcaatttttatatatttatttagataaaattgtgcttaccaactccagtctcaatactctctgttaaggtctacggtgtattcatctgttgaggtttttgtgcttagagtatcaatttttgtgaatgggatatttattataactaacaattctaggttttatttattaaaaattgaacaatctgctatctataaaatccgtaatatttcctttgcaattttcttccaaacaattgtaagttttacaccaaaattattccaagaacaaagcacgtgagactattttattgacaaaactttgttggctgaaagtttatcttccgtatacttcaattttttttcccataggaggtttaaagagcacacacacacacacaccacacacacacacacacacacacacacacacacacacacacacacacacacagtgtttctgaagcccaggccatttttggtaccaactatatcaagttagaatttttacatgtgtctcttctgtacgaatctataccaaaatacatggacagaaaatacagtgatacattcttttaaatgaatgctgattgcactttacagtttaagaaacaaggcttcgatgtagggatttcagagtgaacacttactatatatctttggaaactagactgctaacctgttactgaaatgtttgcatcaaattgtttatcaggttattttctctcggtatataaatataacaaacttggacaaagtggatgtattttcaaaggataataaaaactaagaatggagtgggtcaatatacaaggagaaataaggcaatagactggaatgtagagaagagagagagactggcacagagggacagtggggatgataggtattttaaaaaataatgggaaatgaaaagattttctctatcacagaaaaccaaggttctgtggagacagaccctaaactagactcctgcagagtctaatgctcgttcatcacaaggcatgctagacactgcaagacccattggcccatctttttgatcctcactctcaatcatctaaacaaggctgagagatgactctctgtacagcctctgcattgtgtaataataactctgaaatagtttctgatcttttctcttaggggttgcataaaattttgcttctagcaagagaaataaacaacccataactaaatctagaaacttagcaggcaaagctctgtagtcagaatggctactttaatttgagcaattctgaacacaatttgaacctctccacactatgaaaatagcataaaatgaaagaaataatagctaatacaccaacaagaagtacagtatatatgatgtacttacaaaaaaatatagaattatggataatatgacacattcattgagcaaagagaacatggcatacatttatcttatataaaataatgctttataatatatatttaattgaacatggattcttaatacagaaacaaaaaatattttagattgattatcattgtacaattccttagagacaaaaaatgtaagtaaaatgtctgtggattttccaatacaacctactcttcctatctaagtgataataatagcctttaagtaattttctaaggatttttattttaaaaagtttaatttaccaatgaaaaaacataaatctttgacattaaatgaaagctctaacagatgacgcagatatttctaataaaaacaactcaaaaaatggaggaactaagctcgtatatttcattagagatattggatatagcaaattagcctttattttaaaatgaggtctctcaatctaattttaaaaataaatataagcggacttttacttacagcaaggtggaggaaatatattttttttctctatatttccttctaacaaggaatgaaaaccctagacatcatataagaaaaaacaataagaagattttgaaagatagagagaaatcagaccagccagtggctttggaaccctaggaagaactcagtggtgagtttcctggatcttcctttaatctcacatatctgagccttattgctgaagaattcaacaacctggagataccaagagcacagagaaaaccacaccccgacaaaagtctgctctttctagccaaagggtgaggaacgggcctgcctagaaagacatcatacttctagacaacaacccatcaactccagcaaatgccacagaaaaaaactgtggccccgctctcactcccacaatacgtatcaattggggggcacaaagtttcttcctctcgaggccataacgatgtgctccccaaaccctgctggggtggttggtgtgagagagagccagataggaaacttgatgttcatcttctctcgctgtaagaaatccccatgccccttcccctcactcccggccatagtgtcagtttatgtgatgtgaggatcctagtgctgcatcctcaccacacaagaacaagcccccctccaccaccctgcccattatgatggagtcagcagagcccggtggagagtcccatagactggtcacatagactggccgcgtagactggccacaggggatctgggcttctcactccgccaggcagcaatgaagtggcaccctcccattctgtcagagtggagtcagatcatgccagctaaaatgcacggtttaaatacaggcttcatcacatgattggaaatgtccacttttaaattgaaaatcacttatcataccaagatccaggaagacctaaaaccaaatgcaccaggcatggtaggtaacacctgtaactctagcactttgggaggccaagacgggaggatcacttgagctcaggagttcaagaccagcctgggcaacatagcaagacctcatctgtacttaaaatttttaaaaagctagccaggtgtggcagcgcatgcctgtagttccagctgctctggaggctgaggcaggagaatcacttgagtctgggaggtcaaggctgcagtgagccatgattgtgccaccacactccagcctgggtgacagagtgagactctgtgtcaaaataaacaaacatataagctgaatgaaaaggacagtcagcaattataaatatgtgataacagatatagaattacctacaaacgttgtgaggcagccattgtaaaatgtttcaaggagcacttacaaatagaaagtgccagcaaagagatataaagaacaaaggggaaatttgaatatttaaaaattaataatcaatgcgaaagtttagtgtttggactcaacagcttaatggaggagatagagtaaaagatcaggaaactggaagatagaataagaaaagttacccggtctgagcaacagagaaaagatagctggaaaacaataacaaaaatgacagagcatcagagatctaagggactataacaaaagatattagaaaaaggccaggtgtgatggctcaagcctgtaattgcctgtaatactagcaatttgggaggcccaggagggcaaatcactaggtcaggagtttgagatcagcctggccaacatggtgagacccccgtctctactaaaaatacaaaaaaaaaaaaaaaattagctgggcatagtgttgggcacctgtaatcccagctacttgggagactgaggcaggagaattgcttgaacctgggaggcagaggttgcagtgagccaagatcacaccactgcactccaaccccgggcgacagagtgtaactcagtctcaaagaaaaaaaagatattagagaaaaaaaaatcatgcaaccagagtccctaaaggagaggaggaagggtgcaaaggtgaaaaagttacttgaaaaataatgacttaaaaaataatgatgtttggccagatacaggacactacagaatcaagaagctgagcaaaccttcaacaaaataatccaaagaaatccacatcaaacaattaacttctgaaatctaaaaacaaagaaaaatcttgaaagtagccaaagaaaaaatgacaccttagttacaggagaaattcataatcacagtaggtttctgatctggaacaatggaagccaaattaataggacacaatatttttcaagtgctggaggaaaggaaccgtcaacaccaaatcctatagccttgaaaatgtcattcagaaattaagggaagatcaagacattctcagatgatatataattaagaatatttattaccagcagacataccctaaaataatgactgaaggaagttctctaaacagaaaggaaaaaatagaaaaaggaatcttggaacatcaggaaggaagaaatcatatgattaaaacaaatatgggtaaatattataggctttccatctcctcttgactttaagagagtgggtttgatgtttgaagccagaattataacactgcctcaagtggttctatatgaatgcagatgaaatatttatgacaaatatattataaatggggaagaatagaggagcataaaagaagtaagttttccctacttcatttgaactgatgaaataaggacactactggagtgttatgagttatgtataaataatgtaattctgagaaccacaggaaaatcacccaacacattgaaactaagcaacaatcttttaagtaatctcactatcaaaggggaaggatcaaggaaaataaatagaaaataatgcatattaaaagttatgtgacacagataaagcagtgttaaaggaatttttgcactaaatgcgtaattagaaaagaaaaataatctcaaatcagctatcatagtttgcatcccaagaatctagaaaagtaattttaaaacatcagaaagaaaaaaatgataaagttatgagacagttaagagcagaaacaaatgaaattggaaacagcaaaacaatataaaaaatcaatgaacaaaaaagctagttctttgaaagatcaacaaaattgacatgaatgatgaaaaataagagaaagacatgaattaccagcatgtagaatggcactaaagatgcttcactatatcctgcaatcatcaaaaggatgatgagagattacaatgaacaactctagacacataaatttgataccttacatgaaatggaccactttctttaaaaaaaaaaagaaaagctaccacaattgactcaacataaattgctaattgggatagtcttttaagtagtaaagaaactgaattcataattagacattgtcaaaatgaaatctctgagcccagatggtttcaccggagaaattatttaaagaagaattaacatcaattctaaagaatccagattattgagggggagggaacactttttgatagactttagaaagctagtattactctggttttgattcatatcaaaaccagaataaaattgttaaaaataaaatataaggaaataaagagaaagcaacatatcaataaccctcataaatatgacagaaaatatttaagaaaatattagtaaattgaaataaaattcagcagtatatcaaaaggattatatattataaccatgtatcttctattctaaggaaacaaggcaattcagtattcaaaaatcaaatagtgtaggcccccatattaacagaattaacaaaactcttctaattttccaattagaggaaaaatcacatggtcatacaattgatgcagaaaaggcattttaaatattcagaaaccatttataataaaactctcagaaaactagaaatagagagggatatttctcaacctgataaagaacatctacaaaacctgtgggtattttcataatgatgacagagagaatgctttttctctaaggtcaggaacaaggaaaaaatgctctcaccacacttatctaacagtgattgaaattctaatcagtgcagtagggcaaataataataataacaacaaacacaaagcagaaaggaagaaacaaatgtccctgcctacagatgacttggttgttcgcatggaaaatctcaaggaatctacaaaaatattcctaaaaacagtaagtaagttcagcaagtttacagaatacaagatgtatattaaaaagttatattcctatatattcacagtgaatacatgggaaatgaaccaaagaatgtgatatcatttataatcactaaaaatgaaatgaaatatttaggtataaattgaaactacacaccactgctaaaagaaatcaaataagatccaactaacagagagtaaacttagtttcttgaattgaaagagtaaacttagtaagtagtcaattctttctaaatttatactggaggtttaatgcaattctgatcaaaatctcagcaaaatgtttcgtaggtatagaaaagattgttataaaatttatctggaaaggcataggtcctaggatagctacagtaatttttacagagaataataaagtaggtggaatctgaatacccagtatcaaaacttactttacatctgtgttcattaagaatgtttggtgttggtggagagatagaaatattggccaatggacagaacagagagcccagaaatagacacacacaaatacactcacctaatctcttaagaaggggcaaaagcatttcaacaaatggtactggagccatcgaactccacagaccaaaaaacagtatcttaatgtaaggcttacatcttattaaaaaattaactcaagaaaggccacacagagacataaatgtaaaacaactgtaaaacttttagaataaatataggagaaaatttccagtgtctagggctaaacgaagagttccttgtcgtggtatcaaaatcatggtctctcaaagaaaaaatagttaattggatttcatcaaaatgtttactttgcaaaaaaaaaaacacctctgtaaagagggtaacagatcagttactgggcagctaaaatatttgaaatctacatataggtaaaaggactaacatctaggtctattttttcaactctcaaaactcagtagtagctagttgcagtggctcatgcctgtaatcccagcactttgggaggctgaagcaggcagatcacgtgaggtcaggagttcaagaccagcctggccaacatggtgaaaccctgtctctactaaaaatacaaaaactagcaggacatggttaattaattaattgattatttaaattaatacttgggaggcagacgcagtagaatcgcttgaacccgggaggcgaaggttgcagtgagttgagatcgcgccattgtactccagcctggccgacagagagagattctgtctcaaaaaacagaactcaacggtaacaaaaacaaagagagaataggcaaaagatatgaagaaatttcacagaaaatgaaaaacatatggcaaaaaaacacatgaaaagatactcaaaattatttgccatttggataattaatattaaaaccgtaatgagatatcactgcatatctttcataaaaactaaaatcaaagacagtaaaaacactaaatcctggtgaggctgcaaaggaactggatcactcacacaatgctgatggaaagataaaacggtagatacattctggaaaatagttttgcagtttctttaaaaaaagtaaacttgcattaaaacccaaaaattgacctcctagccttttatttcagagaaatacagacttatgttgacacaaaaacgagtaaacaaatgtttataataggttgattcataatatccacaaactaaaaactatccagacagacatcctttaccagatggagggttaaacacactgcggtacctctatacgatggaatactattcagtgatcaaagggaaagaattattgatatgtgcaacaacctggataattctccagaaaatgatgcctgctgacagaaatcaataccaaaaagctacacgattccactgaagtcacattattgaaacgacaaaattaccaaatggaaaagatattagtgatttccaggaattaaggaggggatgaggtgaaggaagtgggtatggctataaaagggtaaaatgagtgggttcaactgtattccccgcccacactaataaagcatatgaatatatgctaatgcctgaagcctatgaatatgaccctatgtggaaaaaggggttttgcagatgtcattaaagatctcaagatgacattatcctggattatctgggtggaccctaaatccagtataagtgcccatgtaataagccgaagagatgagagaaggccatgtgaagacagaggcagagattgaagttttacaaccacaggtccaggaacacctgaagccagcaaaataggcaaggcaatagctggactaggccaggaaggattcacttctaaaccttggaagggaatgcagcactgctgctaccttgattttaggcttctggcctccagaacggtgagagaataaatatcagttgttttaagctgtccagcttgtggtcattggttaggggttaggacagctctagaaaacgaatatgggggatcctcatggtgatgaaaatgttctgtatctctggtttaacaatgtcaatgtcctgggtatcatattgtaccagagttttgaaagatgttgtcactagggaaaactaggtaaagcagggcgatgtttttgttttattttgcataactgcatgcaaatctatcattatcccaaaataaaatgttgataaaaataaataaataaaattgaattataatttgatctctgggttacacaatcagaatgagttgatggcacctgaagggcatctattttatagtacaccttcatccaaatatttacttttaatgattaacaaaccgacttagcatgtttgcattaatatcttaagtgagtctctggaattattcatcttttagcaaaatactatgaaagcctctcacacaggctaagcagagaatattaatgactaactatgatttatcgttttgtgtttgcttcaagaaactggtacataaatatgtaattcttataaaaaatttgtggcagcttataaaatatacatgtaatataaggtgaaaaacaaaataaaataggagagaaataaggataggaaaagtaaaggaaggcaaagttaaaattagaatacaaaacatcagagagtgatctacacttcacaagtttgggcttctaatttttccagagaagaaatatataattccataaagatatttaagcaagtataaattagtcaatattctcatgtcaaaaaactaaaacataaaaataagtatctcaattagagatgtcaaatttagtcagagtttagaatattctatttaaaatatatccagtacgatttcagaaataattatctcagttcaagaagggaaaacctgctaaatatttaaatgtcaaatatatcagtgatagtttctgttcatatttttagtcttttgtcctggtataactgaaaaatttgcatgacttaaaatgtcatattttatttcagccttaatattggttagttgaaaggcataattatgaccagaaaatgtactttaaaattacccaatgagaaaagctatgctagttttaactgaaaatgctttacttaaatgccaaaaattgaaatagtctactttattaagatatttaaaataaaattatgaaaacgatgtcatatcctttgcaaagttggcacccgaagttcgagttctgtctttcaaaatgtaaagtgatttttttctgtggaagtagaattgtcacctgtaatggttttcagtaaattactctgaagcatcttgtcaagaacattcataaacttaaaaataaaacaaagattttcatgtctatcaagactaaaataacaaaaagttattcccaccatttaatatcatataaagacaaaaataaatagatatataataaaaaataaaatatatatatttaaagatacatacttttttcaatagtaaggatcacatttgcatgtatatgaaatacaacataaaaatcagcataaaaatcatccactatctcatttttacataaaatgatatctaacacgaggactgcttggaaaatagcatcttaatctttgcttaacttcttaggttattttggaactctcttgatctcagattcttcttctataaaattgagacaatctttctccaggagaataggttcaggttttataaagtgatagatataaaagtaatataacagatatgattattaataatattattatttgaaatggacaagcagtaatgggaggatagaatgataaggatgtgtatcattgccaaatccttgagggaggtgctggtatttggaaaaaaaaaaaaaaacaacgaatacctaaacgtgaataaatttgaggaaactctattgaaagtcttccccacctgttcatgaaacagatgcccttttctcctctgttattgcataagtaaggtatatgtcttagtccctttcaattccagtctggccatgtgcctgagctctatctagccaatagaatgccagcagaaattatatgtatcacttccaggtcttcccttttagaaccctaacacccaccctctttcatgctcattcttcaccaactgattgcacacacccgtcaaggaacttggagctgtcagatggcagaaggttgctgccctgaatggcagaatggaaataaacgcacaccggaattacccgcaattaaccactgcaactaaatgagacatcaactttacttatgttaagccactgagattgtaagttttgaatgtagacccaatatactacgccggttaatttacaagcctagaatagtacgaagaactatcatatataataagtaatgccaatatcaaaattatggtaatgtttcttgatacaaaaacataaactggaaaaggaaacaattactactaacaaaattcactataagatgtgtctaatatgtcaagcattgaccctagactacggtcaaatgtcagttggaaggttaagttgtgtactctaagacaagcacgtgaaataattcctgtggattcctgtcagtgcagcagtttctcagctagtgttagtctaggagattctgaccagcagcacttcttgttcagctccttttccttaacgtgtaattttcagcagaataaaactgcattctctatattctagcacaaatgaacattttgtgactaacagtattcactgatagtataatgtatcggccttattgctgtcaataattattatttgtatttatattacaatattacatttcagttattttggttcaaggttttagagtcatcaacttctgtgaacatttctaagaattttccatcccttatcttcctacccccttcatcaggaacccttagtctaagtaaccccatatacttttgcctatgtaacccctctcatatcaaaaactagaacacagacatattgagatggactcagtcataaagggatataaatttgttttgtagattcatatgttaattttataataatagattacttttaattgacacaaaatattacccagctcagataatattttattttgcaatctttcaacaattagctgttaggaaagactgtttaagtgaaggatctaccataaagaatccaaaataatataccactttttgcccagtggcttttgcgtatcaggcactatgttacagattttatatgcctaactactatgtttttataaagtattattttctaaatttacagatgagatagcctcacctcactgagattacatgatttgctaaagaccacaaggatagaatcaagatttgaactcttttctttctccaaatctagagctctttttccttacttctgttctatggaattgattgttctgcttcttttctataattaacctttacaatcacttaataacaaatttgtgatatatacggtagacaccaatataagtgctgaagctacaaagataaatgggaacccctggccaggtgtggtggtgcgcgcctgtggtcccagctactcaggagattgaagcgggaagatcacttgaactcaggaatttgagatcagcctgctccaaaaagcaagtccccaactctataaaaatatatttttaaaaaattagccagacatggtggcaggcatctacggtagcagctatgtgggaggctgaggtgggaggattacttgtgcctggaagttcaaggttgcagtgagctatgattgcaccactgtgctctagcctgggtgaccacaaagccctgtcttaaaaacaaaacataaaagtaaaaatatggaaccatcagtctagttggagaaaaattcatgaaaataaatgattacattgtggtgggatatgcgagtagaggtgaaagagaagacacagaagccctgccgtgaaggcagtgaataacttgctatgggactttcaaggactgtttggaggtgaaggcagtaccagagcaggaattagaggtacattggaaacttagtaggccaacagaggagatgagggtgtgaggtgtggaagagaagatacctgagtggggtctactcatggcaaacctatatacaatgctaagaaatttgagctgttgtcctgtgcatgagaggaaacaatgacaaattttactgaaaataataattttaagagatttttgatgtaagaaattactatcagcaacagcaaatatgggtcagggatggagaaactaactgggttgtgatggcagattagagatcatgtttccatttatccaatctatcaatccatttatccttccactttattagaaaaagcctggtctagctactcaggaggatgaggcaggagaatcgcttgaaccaatggaggttgcagtgagccgagatcacaccactgcactccagcctgggcaacagagcaagactccttctcaaaaaaaagaaaaaagaaaagaaagaaaagaaaagaaaagaaaagaaaagaaagaaaagaaaagaaaagaaaaagactggtctaacaaataatagttgggacattgggaatatgataggtttttgacatatttaggaactgaaattcaggcattttagagatttatgggacatccaggtagagttctatgataggcaactgaatagttagatttcacaggaaagcagatcaatcaataaatgtgggacttatgtatttacatgtggttattaaaaccaaggacaaagatttcattaccttagagtatagtaaaaaagagaggattgaatagaatcacaaagagggacacagggacagagaagaaggaggaaggagactgggaaagaacatttaggaagaggacagagacctagagaggatcatgtaaggaaaccaagtaaggcatgttctcaagactataaattgctgataggaacagaagccacaggaagtttaagaacagtgtacattggtctcacaaaataggagaccatttgttaaaacactgtccaaggcactacttatggcagcagaagtgagattaaaggggattaagtagttggtgaaaattagacagtgaaaatataaaagtaaattactattttcataaatgtatataggcacacctcattttattgaaccttgctttacaaattttaaccttgtggttaaaacaaccacagatactacattttttacaaattaaaggttttggcaactgtgtggagcaagtttattggcagcatttttttccaacagcacgttctttctctcttttggcctctgttacattttggtaattcttgcaataactaaaacttgttcattattatcacacctgttacggtaacctgtgatcagagatcgttgatgttactgttgtaattgttttggggtgccatgaaccagaaccatgtaaaacggcaaactcacttgttaagtgttgtgtgtgttctgaatgccccactgacctgttgttctgccatctctgtccttctccttgggcatccctattctctgagacacaacaatattgaaattaggccagttaagcctacaatggcttctaagtattcaggtgaaaggaatagttacatgtctcttactttaaatccaaagctagaaatgacgaagctcagtgaggaaggcatgtcaaaagccaatatgggacaaaagctagacctcttgcaccaaaactagccaaattatgaatgcaaaggaaaagttctggaaggaaattaaaagtgctactttaatgaacgcacaaatgagaagaaagcaaaaccttattgttgacatggagaaagttttagtggcctgagtagaagatcaaaccagccacactattcccttaagccaacgtctaatctaggggaaggccctaactcacttcaattctatgaaggctgagagaggtgaggcagctgcggaagaaaagtaggagactaggagaggctggctcacgaagttaaggaaagatgccatctgcataacatagaaatgtaaggtgaagcagcaactgctgatggagaagctgcagcaagttatccagaagacctagctaaaataattggtgaaagggcctacactaaaacaacaaatttttagtgaaaaacgcagctttgtattgggagaagatctcctctggactttcatagctaagaaggagaagttgatgcctggcttcaaatctttaaagaataggttgactcttctattaggggctaatgcagctggtgaccttaagttgaagccaatatgaatttaccattctgaaaattttaaaacaagaattatgctaaatctacgtagcctgtggtaagtggaacaaaacctggattacagcacatctgtttatagcatgatttactgaatatttttagctttcttttgagacctagtgcacagaaaataatattcctttcaaagtagtactgctcattgacaatgcacctggccatccaaaagctctgatagagatgtacagggagattaatgttgttttcaggcctgccaatggaacatctattctgccacccatggatcaaggagtaattttgactttcaagcactatgattcaagaaatacatttcatggggatatagattccatagatagtgattcctctgattgatctgggtatagtcaattgaaaaccttctggaggctgggcatggtggctcatacctgtaatcccagcaatttgggaggctgagaagggcagatcttctgaggtcaggagtttaagactagcctggccaacatggtgaaaccctgtctctactaaaaatacaaaaactagcctggcaaggtggtgcacccctgtaatcccagctactcaggaggctgagtgaggcaaggcaggagaattgctggaacgtggaggcagaggttgcagtgagccgagatcccgccactcactccagcctggataaaagagcaagactccatcgcaaaaaaaaagagaaaaccttctggaaatgtttcattactctaaattgcattaagaacaaggaggtcaaaatatcaacattaatagtactttgaaagaagttgattccaactctcatggatgactttgaggggttcaagacttcagtggaggaagtaactgaagatggtctggaaatagcaagataactagaattagaagcagagcctgaaaacgtgactgaattgctgctacctcataataaatccttaagggatgagaggctgcttgttatggacgagcaaataaagtggtttcttgagacagcctctacttccggtgaagatgcgatgaactttgttgaaatgacaacaaagggtttagaatactctgtaaacttagttcgtaaagcagccacagggtatgagaagattgactccagttttgaaagaacttctaatttgggtacattgttatcaaacggcaacgcatgctacaaagaaatcttttctgaaaggaagagtcaattgatgaggcaaacttcattgtcttattttaagaaatcatcggccaggcatggttgctcacacctgtaatcccagcactttgggagaccgaggcgggcagattgcctgagctcaggaattcacaactagcctgggaaacccaggtgaaaccccatctctactaaaatgcaaaaaattagccgggcgtggctgcgtgctcctgtagtcccacctactcgggaagctgaggcaatagaattgcttgaacctgggaggcagagggtgcagtaagctgagattgtgccactgcactccagcctgggccacagagtgagattccatctacaaaaaagaaaaaaaaaaaaaagaaagaaaaagaaaagaaattgtcacagccaccccaggatttaaccaccatcgttgtcatcatcagcagccatcaatatggaggtaagaccttccaccagcagaaatgttataactggctgaaggctcagatgactgttagcagttttagcattaaaatatttttaattacggtattttcattggttttttagacatgatgttattatacattttatagactacagtgtagtgtaaatgtaactgggccgaaaaaattgtgactttattgggacagttgcttaattgcagtgatctcgaccctcacttgcagtatctctcaggtgtgcctgtataacgtgaatggaatttattaacagggagtgaaacgaaagagtggcaactagagagaagcatggagtaaggagagggattttctcttgatttcatttgttgacataggaatcatttatagatttgtttttcatttatttcaatgataagaaagaatgataagaggtggcagagaaagagaagttgaaaatagaataaagctaagttacttattattgaggaaaacctaaatgaaaaatagggaaataggatgaagtctattaaagagattatccatgaggagggagacctcatcttctgagacaagaataaaagatacaatggtggactcagaggtaaagtaattataagtcttggtgaatgtgtgtggtggatagggaggtatgactattctttctcaaagtaagtggtaatttaactattggggaaagggagatgcttgatattttgaggacattgataaagtctaagccaagccacctttttttttttgaataattactgaaccattccttttctttagcaagtaccattacttgaatataattgactctactaaaagtcttcatatatttataataatcattgttaaatcaaaattattttctaaaaatatctaggctaccataacataaataacatatcacaatattttcaaagacagttatcatttagcttattcatataataattatcccgttaacttttttattttctgaggtgataaatctacctattttcattaagattttatgcaagcataatttatactacatataacaagtttttttcaactcacaatgaccttttaaaattgttaataagagtatataaggggttttagaaaactccttggcttgtaggtgtgagagaaagtcacatttattattactagaagcagtgttctgttggcatattacaatgtggcagacaatccttcaacaattaattaccagtaaagtaattatagaatatcctttgatgtttataatgttttaattgaagtaaaaatgtgagaatatgcttcaggggaatataatattttaattatttatgggccaagatatctatatactttgactagagtgcatttctctattctgtggcatctctgttataatagaacatttgtagactaaaaaaatagggtgttttccccccacagcgtattacagtgaatgtagtctactttataatcctcagggttcttttaacttgacgtgaatcaaacaccttaaggaaacagaaactaagactgaaagttttgacaaattagttttgaaaccttcacaaactaaacctgtttttgatattggtttcaaaaagtatgcatagaaacttgacatgaagtagctaaatttatgcactcaattgatatttatatgtgtgcaggtctatcaacgttattgaaaagttaatccaaaggatttattgattactctcaatttctcagatactgtcagttcacttttgaaaattattctcttatgtaatattgcactcttttcagtaaaaaggagagtttgtggctgttaaatatgcatgaggcacaatagtttcacaacaaatcaaatttaattaaatgatgcatttcctccacttacaaaaggtttattaaaggtttatttgctcatgcaaattaaagtgttagagtaaaaatccacatgaaacttggcactaacaattaaaaaaatattgaaagatttctcgcctcgctgcaataccttgctatgtttaaactgctcagcttgtcatttagaatctttaatgaaaccagggaggaggctatttatttgcataataggacataatttgctgtggtgaggttttaattatttataggctgtctgaaatatttaaaatggcatcactaaggagcatgaagtgttggataatgccttcatttcaggtttcctgccgtttcttttatgggtcaagcgatttatttctaattagcataccaggctagtggctttaaaaacataaggaaaacaaattggtttcagtctgtttgcagcttgagtagttggagacggccaagggtcactgacggagactgagcagagttaagagatgaagccagaagccatcccagcacatggaaatcactgactcaacagagccatactttcatttgtgcacactgattactgtatgtagtagcttctctttggtaggtagtgggttagagttaatggatttcatgttaattgtcccttaaatattttctaccattaacacatttcttattggaaatgatgtgtaagcaacagaaaatattccatttccttggataaaagatacagtaattactgtgtgcatagggaaaaattcggcagtttcagggtgagatttaacatttaagtatatgcaatcttatttatatacaagaacaagagcctgtggttaaaacacaatagggttcttttttaataaaccatatggaaactcatatatcttgtgagaggttgtgaattagcagagtacactaaaatatgttcgaatttctaaagcattcttattgtgcattgtctgtgttctaggtaaaaggaaaaaaaaaactcaggaatcatctataaggtctcttatgttatgataaatggattttcatgttctttactatctattttaaatatgataattttcttgaaagtagtttaaaagtggtcatgttgtaaacatcattgtatagccaggagaaatgtgtttactgcaagagtttattatatttccgtgatgctctagatatccccatcatcatgcacatagattgaaagcaggggtagcacactgttgtcagacattctctcatttgtcaccttctggcctcaaaacatgaatagagaaattgctgccagatgtcaagaaacagccttagggcattacagaggatattatccatgcccttttaagtagtagacagatgctgtattcagagagaggatttttatgattatcgttcacacagcccaggtgattggtcaaggccataaaggagtctgcaatccttggagaacttttggagtcactttaaccataacgtaatgtattgcaacagttacaataaattatgttatggttcctgaatgtaaccgtcaattatcattatttttttaagtatccactggatacagatagtgg

SEQ ID NO: 9 - DNA, 22946 bp, Homo Sapiens
agagagccaccggggcccgctcgcgcgcctctgagaggctgtccgcgcgcgcgcgtgtgtgcgtgagtgtggatttgccgggactggagctggaaagttcaaactaaacgtgttgctctcgccgagtgccgaggccgcggcggaggctgcccaacttccccgggccaagtgagtggcgttgcccagcgcctttggcgaggcggcggccgctcggccctgcgcccggccgcggcggcggcggctccgctcgccccgggagggagcccgcggccagggctggactctcgccccgccacctccaccgactctctcctcagcctccgcgcctggcaccgcagcaagacttgaatgaagtgatcatgtaaactagagaaaggagattaaaaataacctctggatattcctctcatgtgatctttattctggatgaagcattaggacagctaatagccgtgtgtcacttaaaaatccaacttgagaactgtcaccaaagatgtctaggaactttgaagaaacatgaagcagtactgaaaactacaatgtaagataaaaaaagatgggagaagaagaaaaagagcaggattagactggagagaaggctgtttccaccataaagacatttacccagccagccctatgaaaacaggagcctatttcactacttggttattgactgaacagagtagccaagaggtgggcctttcagcccttagggcctgccagacagcattaaaactaagtcttctgtgaagaagctccctgtgcttgggagtatgcagctttaatgtttgaaagagtgagggagggaagaagggagataaccctcccagaaaacagaaacgcagaccgtgctttagaaaagatctttccatatgtaacaaacctgcacgttgtggacatgtaccctaaaacttaaagtataataataataataataaaagaaaagttctttctcacaatcctatcagatggaatgagtcacccacctcccttgtgagggaaggagtaaggcccccaggataatgcttgttggggcagccttggcttactcccctgagaaagcacacagctgagcagaagctgcctctttggaaccagtggtggaatagttactggttttacgaatacaatggacacagcagattttgtttgtttgtttgttttgagacagggtctagttccgtcacccaggctggagtgcagtggtaggatcttgggtcactccagcctcaatcccctgggctgaagcgatcctcccacctcagcctcccaagtagatgagattatgcctggataattttttaaatttttaaaaaattttaaaaaattttgcccaggctgctcttgatctcctgggttcaagcgatcccgtcgcctctgcctcccaaaatgcaaggcttcacagcagatgttttcagtagaaattgtcttatatttgttttgtgttgttattgaaatgaatataatgctagatatttcttggtatttcggaagtttatatcttataggatagattttatggtaactttttacatcttgaaaattatgttaaaattattttagtttaactttgttgattatctgcttgtatgaattggctttaatgacaagaaaatactttaaaaccccagggttacctccagctggcttgtcctttacccctgaaaattttggtttcctaatataggcaatgacaaaaagaatatttaaattccacactctccaaagttgcaaagtaaaaataaataaaatattcataaacgtatctgaaatgggtccaaaatcaaagattcaggtaaatattaaaatacatgtccttttttctctgttgtagatggacagagagagaaaaaaaatcactgagtagagagagaaattatattgtaaataaaacatatggcgaaagaaaacttttcaggcaaattaatttttaaaaagccacatcatacacgatattaattaaaaatgtgtatatatataatttaaataaaaatattttcctttttgttatcttcttcatcttccaaattttggcattaaaaatattaggaaggcatttctatggcttttaaaaaagctttccaagcagctctcaatttattgtttcacataatgctactcttttctctaagtctgccttgtcagctaacgtgttttgggaagaaaaaagaaaacaaaacaaaaccaagactctgttcttctcatctctttgattgagttatcctttgctaggtgaagtgttgtgagctttcatacccttccctgggcttccagcagctctccccacggagtgctgccacagcaccaccaggagccccagatccctgcaaggaggagatcaaacctccacagcagggattcctcaagacaggtcaagctccagtgcttggaaaactcagcctacatcacacaaaaatgttatcatttatttggaattctttttcaatggattgtctccacttctaaaacatttctaagtctagttcaaatccagctgcagattcctggcacttgcttccttcccattctttttcatatatcttcttttatgttgcatatacttacttcagattaagtatataagttaaactttcagtctattctgccattagaagagtttatttccatacacaataaaaaaggatcgtttgtattatcctcaagattagtgtatgttatgaatgcaatatctttgcattcaagtgaatttaaatattataggaaggggtagagaaggaaatgcaagttatcactgactgacttgccaaagttaagcaatttttaagcattttggcatgcatgattgattgtgtacttttaaatttaatattgtatggtaattattttctcacgtcattaaaaagtatttttttcaatggccagataatagtttatcatgccatgtactgtatttaacttcaaattgatagtcttgaacacatatattaatttcaattccacagatacaaaaaataattgacattaaacttctttgagaataaaaccttgtccaaatttgatatatccttaggatgtattcctagacatggtttatttcatatcttatgaactctttatttgaaggtatttggtatgagttgagaaattacattacagaaaaaaattttgagtgtgtatttcattcaatctttgcattgtttgtaagtgcctatattaagaacttttttgttaaagtttgactatgaaatctgatgagtgaaaatttaatctttttcttattttaattttaatttcttcagttaatagttaaactgaacgctttccatgtgtttattagccacttctcaatttttatatatttatttagataaaattgtgcttaccaactccagtctcaatactctctgttaaggtctacggtgtattcatctgttgaggtttttgtgcttagagtatcaatttttgtgaatgggatatttattataactaacaattctaggttttatttattaaaaattgaacaatctgctatctataaaatccgtaatatttcctttgcaattttcttccaaacaattgtaagttttacaccaaaattattccaagaacaaagcacgtgagactattttattgacaaaactttgttggctgaaagtttatcttccgtatacttcaattttttttcccataggaggtttaaagagcacacacacacacacaccacacacacacacacacacacacacacacacacacacacacacacacacacagtgtttctgaagcccaggccatttttggtaccaactatatcaagttagaatttttacatgtgtctcttctgtacgaatctataccaaaatacatggacagaaaatacagtgatacattcttttaaatgaatgctgattgcactttacagtttaagaaacaaggcttcgatgtagggatttcagagtgaacacttactatatatctttggaaactagactgctaacctgttactgaaatgtttgcatcaaattgtttatcaggttattttctctcggtatataaatataacaaacttggacaaagtggatgtattttcaaaggataataaaaactaagaatggagtgggtcaatatacaaggagaaataaggcaatagactggaatgtagagaagagagagagactggcacagagggacagtggggatgataggtattttaaaaaataatgggaaatgaaaagattttctctatcacagaaaaccaaggttctgtggagacagaccctaaactagactcctgcagagtctaatgctcgttcatcacaaggcatgctagacactgcaagacccattggcccatctttttgatcctcactctcaatcatctaaacaaggctgagagatgactctctgtacagcctctgcattgtgtaataataactctgaaatagtttctgatcttttctcttaggggttgcataaaattttgcttctagcaagagaaataaacaacccataactaaatctagaaacttagcaggcaaagctctgtagtcagaatggctactttaatttgagcaattctgaacacaatttgaacctctccacactatgaaaatagcataaaatgaaagaaataatagctaatacaccaacaagaagtacagtatatatgatgtacttacaaaaaaatatagaattatggataatatgacacattcattgagcaaagagaacatggcatacatttatcttatataaaataatgctttataatatatatttaattgaacatggattcttaatacagaaacaaaaaatattttagattgattatcattgtacaattccttagagacaaaaaatgtaagtaaaatgtctgtggattttccaatacaacctactcttcctatctaagtgataataatagcctttaagtaattttctaaggatttttattttaaaaagtttaatttaccaatgaaaaaacataaatctttgacattaaatgaaagctctaacagatgacgcagatatttctaataaaaacaactcaaaaaatggaggaactaagctcgtatatttcattagagatattggatatagcaaattagcctttattttaaaatgaggtctctcaatctaattttaaaaataaatataagcggacttttacttacagcaaggtggaggaaatatattttttttctctatatttccttctaacaaggaatgaaaaccctagacatcatataagaaaaaacaataagaagattttgaaagatagagagaaatcagaccagccagtggctttggaaccctaggaagaactcagtggtgagtttcctggatcttcctttaatctcacatatctgagccttattgctgaagaattcaacaacctggagataccaagagcacagagaaaaccacaccccgacaaaagtctgctctttctagccaaagggtgaggaacgggcctgcctagaaagacatcatacttctagacaacaacccatcaactccagcaaatgccacagaaaaaaactgtggccccgctctcactcccacaatacgtatcaattggggggcacaaagtttcttcctctcgaggccataacgatgtgctccccaaaccctgctggggtggttggtgtgagagagagccagataggaaacttgatgttcatcttctctcgctgtaagaaatccccatgccccttcccctcactcccggccatagtgtcagtttatgtgatgtgaggatcctagtgctgcatcctcaccacacaagaacaagcccccctccaccaccctgcccattatgatggagtcagcagagcccggtggagagtcccatagactggtcacatagactggccgcgtagactggccacaggggatctgggcttctcactccgccaggcagcaatgaagtggcaccctcccattctgtcagagtggagtcagatcatgccagctaaaatgcacggtttaaatacaggcttcatcacatgattggaaatgtccacttttaaattgaaaatcacttatcataccaagatccaggaagacctaaaaccaaatgcaccaggcatggtaggtaacacctgtaactctagcactttgggaggccaagacgggaggatcacttgagctcaggagttcaagaccagcctgggcaacatagcaagacctcatctgtacttaaaatttttaaaaagctagccaggtgtggcagcgcatgcctgtagttccagctgctctggaggctgaggcaggagaatcacttgagtctgggaggtcaaggctgcagtgagccatgattgtgccaccacactccagcctgggtgacagagtgagactctgtgtcaaaataaacaaacatataagctgaatgaaaaggacagtcagcaattataaatatgtgataacagatatagaattacctacaaacgttgtgaggcagccattgtaaaatgtttcaaggagcacttacaaatagaaagtgccagcaaagagatataaagaacaaaggggaaatttgaatatttaaaaattaataatcaatgcgaaagtttagtgtttggactcaacagcttaatggaggagatagagtaaaagatcaggaaactggaagatagaataagaaaagttacccggtctgagcaacagagaaaagatagctggaaaacaataacaaaaatgacagagcatcagagatctaagggactataacaaaagatattagaaaaaggccaggtgtgatggctcaagcctgtaattgcctgtaatactagcaatttgggaggcccaggagggcaaatcactaggtcaggagtttgagatcagcctggccaacatggtgagacccccgtctctactaaaaatacaaaaaaaaaaaaaaaattagctgggcatagtgttgggcacctgtaatcccagctacttgggagactgaggcaggagaattgcttgaacctgggaggcagaggttgcagtgagccaagatcacaccactgcactccaaccccgggcgacagagtgtaactcagtctcaaagaaaaaaaagatattagagaaaaaaaaatcatgcaaccagagtccctaaaggagaggaggaagggtgcaaaggtgaaaaagttacttgaaaaataatgacttaaaaaataatgatgtttggccagatacaggacactacagaatcaagaagctgagcaaaccttcaacaaaataatccaaagaaatccacatcaaacaattaacttctgaaatctaaaaacaaagaaaaatcttgaaagtagccaaagaaaaaatgacaccttagttacaggagaaattcataatcacagtaggtttctgatctggaacaatggaagccaaattaataggacacaatatttttcaagtgctggaggaaaggaaccgtcaacaccaaatcctatagccttgaaaatgtcattcagaaattaagggaagatcaagacattctcagatgatatataattaagaatatttattaccagcagacataccctaaaataatgactgaaggaagttctctaaacagaaaggaaaaaatagaaaaaggaatcttggaacatcaggaaggaagaaatcatatgattaaaacaaatatgggtaaatattataggctttccatctcctcttgactttaagagagtgggtttgatgtttgaagccagaattataacactgcctcaagtggttctatatgaatgcagatgaaatatttatgacaaatatattataaatggggaagaatagaggagcataaaagaagtaagttttccctacttcatttgaactgatgaaataaggacactactggagtgttatgagttatgtataaataatgtaattctgagaaccacaggaaaatcacccaacacattgaaactaagcaacaatcttttaagtaatctcactatcaaaggggaaggatcaaggaaaataaatagaaaataatgcatattaaaagttatgtgacacagataaagcagtgttaaaggaatttttgcactaaatgcgtaattagaaaagaaaaataatctcaaatcagctatcatagtttgcatcccaagaatctagaaaagtaattttaaaacatcagaaagaaaaaaatgataaagttatgagacagttaagagcagaaacaaatgaaattggaaacagcaaaacaatataaaaaatcaatgaacaaaaaagctagttctttgaaagatcaacaaaattgacatgaatgatgaaaaataagagaaagacatgaattaccagcatgtagaatggcactaaagatgcttcactatatcctgcaatcatcaaaaggatgatgagagattacaatgaacaactctagacacataaatttgataccttacatgaaatggaccactttctttaaaaaaaaaaagaaaagctaccacaattgactcaacataaattgctaattgggatagtcttttaagtagtaaagaaactgaattcataattagacattgtcaaaatgaaatctctgagcccagatggtttcaccggagaaattatttaaagaagaattaacatcaattctaaagaatccagattattgagggggagggaacactttttgatagactttagaaagctagtattactctggttttgattcatatcaaaaccagaataaaattgttaaaaataaaatataaggaaataaagagaaagcaacatatcaataaccctcataaatatgacagaaaatatttaagaaaatattagtaaattgaaataaaattcagcagtatatcaaaaggattatatattataaccatgtatcttctattctaaggaaacaaggcaattcagtattcaaaaatcaaatagtgtaggcccccatattaacagaattaacaaaactcttctaattttccaattagaggaaaaatcacatggtcatacaattgatgcagaaaaggcattttaaatattcagaaaccatttataataaaactctcagaaaactagaaatagagagggatatttctcaacctgataaagaacatctacaaaacctgtgggtattttcataatgatgacagagagaatgctttttctctaaggtcaggaacaaggaaaaaatgctctcaccacacttatctaacagtgattgaaattctaatcagtgcagtagggcaaataataataataacaacaaacacaaagcagaaaggaagaaacaaatgtccctgcctacagatgacttggttgttcgcatggaaaatctcaaggaatctacaaaaatattcctaaaaacagtaagtaagttcagcaagtttacagaatacaagatgtatattaaaaagttatattcctatatattcacagtgaatacatgggaaatgaaccaaagaatgtgatatcatttataatcactaaaaatgaaatgaaatatttaggtataaattgaaactacacaccactgctaaaagaaatcaaataagatccaactaacagagagtaaacttagtttcttgaattgaaagagtaaacttagtaagtagtcaattctttctaaatttatactggaggtttaatgcaattctgatcaaaatctcagcaaaatgtttcgtaggtatagaaaagattgttataaaatttatctggaaaggcataggtcctaggatagctacagtaatttttacagagaataataaagtaggtggaatctgaatacccagtatcaaaacttactttacatctgtgttcattaagaatgtttggtgttggtggagagatagaaatattggccaatggacagaacagagagcccagaaatagacacacacaaatacactcacctaatctcttaagaaggggcaaaagcatttcaacaaatggtactggagccatcgaactccacagaccaaaaaacagtatcttaatgtaaggcttacatcttattaaaaaattaactcaagaaaggccacacagagacataaatgtaaaacaactgtaaaacttttagaataaatataggagaaaatttccagtgtctagggctaaacgaagagttccttgtcgtggtatcaaaatcatggtctctcaaagaaaaaatagttaattggatttcatcaaaatgtttactttgcaaaaaaaaaaacacctctgtaaagagggtaacagatcagttactgggcagctaaaatatttgaaatctacatataggtaaaaggactaacatctaggtctattttttcaactctcaaaactcagtagtagctagttgcagtggctcatgcctgtaatcccagcactttgggaggctgaagcaggcagatcacgtgaggtcaggagttcaagaccagcctggccaacatggtgaaaccctgtctctactaaaaatacaaaaactagcaggacatggttaattaattaattgattatttaaattaatacttgggaggcagacgcagtagaatcgcttgaacccgggaggcgaaggttgcagtgagttgagatcgcgccattgtactccagcctggccgacagagagagattctgtctcaaaaaacagaactcaacggtaacaaaaacaaagagagaataggcaaaagatatgaagaaatttcacagaaaatgaaaaacatatggcaaaaaaacacatgaaaagatactcaaaattatttgccatttggataattaatattaaaaccgtaatgagatatcactgcatatctttcataaaaactaaaatcaaagacagtaaaaacactaaatcctggtgaggctgcaaaggaactggatcactcacacaatgctgatggaaagataaaacggtagatacattctggaaaatagttttgcagtttctttaaaaaaagtaaacttgcattaaaacccaaaaattgacctcctagccttttatttcagagaaatacagacttatgttgacacaaaaacgagtaaacaaatgtttataataggttgattcataatatccacaaactaaaaactatccagacagacatcctttaccagatggagggttaaacacactgcggtacctctatacgatggaatactattcagtgatcaaagggaaagaattattgatatgtgcaacaacctggataattctccagaaaatgatgcctgctgacagaaatcaataccaaaaagctacacgattccactgaagtcacattattgaaacgacaaaattaccaaatggaaaagatattagtgatttccaggaattaaggaggggatgaggtgaaggaagtgggtatggctataaaagggtaaaatgagtgggttcaactgtattccccgcccacactaataaagcatatgaatatatgctaatgcctgaagcctatgaatatgaccctatgtggaaaaaggggttttgcagatgtcattaaagatctcaagatgacattatcctggattatctgggtggaccctaaatccagtataagtgcccatgtaataagccgaagagatgagagaaggccatgtgaagacagaggcagagattgaagttttacaaccacaggtccaggaacacctgaagccagcaaaataggcaaggcaatagctggactaggccaggaaggattcacttctaaaccttggaagggaatgcagcactgctgctaccttgattttaggcttctggcctccagaacggtgagagaataaatatcagttgttttaagctgtccagcttgtggtcattggttaggggttaggacagctctagaaaacgaatatgggggatcctcatggtgatgaaaatgttctgtatctctggtttaacaatgtcaatgtcctgggtatcatattgtaccagagttttgaaagatgttgtcactagggaaaactaggtaaagcagggcgatgtttttgttttattttgcataactgcatgcaaatctatcattatcccaaaataaaatgttgataaaaataaataaataaaattgaattataatttgatctctgggttacacaatcagaatgagttgatggcacctgaagggcatctattttatagtacaccttcatccaaatatttacttttaatgattaacaaaccgacttagcatgtttgcattaatatcttaagtgagtctctggaattattcatcttttagcaaaatactatgaaagcctctcacacaggctaagcagagaatattaatgactaactatgatttatcgttttgtgtttgcttcaagaaactggtacataaatatgtaattcttataaaaaatttgtggcagcttataaaatatacatgtaatataaggtgaaaaacaaaataaaataggagagaaataaggataggaaaagtaaaggaaggcaaagttaaaattagaatacaaaacatcagagagtgatctacacttcacaagtttgggcttctaatttttccagagaagaaatatataattccataaagatatttaagcaagtataaattagtcaatattctcatgtcaaaaaactaaaacataaaaataagtatctcaattagagatgtcaaatttagtcagagtttagaatattctatttaaaatatatccagtacgatttcagaaataattatctcagttcaagaagggaaaacctgctaaatatttaaatgtcaaatatatcagtgatagtttctgttcatatttttagtcttttgtcctggtataactgaaaaatttgcatgacttaaaatgtcatattttatttcagccttaatattggttagttgaaaggcataattatgaccagaaaatgtactttaaaattacccaatgagaaaagctatgctagttttaactgaaaatgctttacttaaatgccaaaaattgaaatagtctactttattaagatatttaaaataaaattatgaaaacgatgtcatatcctttgcaaagttggcacccgaagttcgagttctgtctttcaaaatgtaaagtgatttttttctgtggaagtagaattgtcacctgtaatggttttcagtaaattactctgaagcatcttgtcaagaacattcataaacttaaaaataaaacaaagattttcatgtctatcaagactaaaataacaaaaagttattcccaccatttaatatcatataaagacaaaaataaatagatatataataaaaaataaaatatatatatttaaagatacatacttttttcaatagtaaggatcacatttgcatgtatatgaaatacaacataaaaatcagcataaaaatcatccactatctcatttttacataaaatgatatctaacacgaggactgcttggaaaatagcatcttaatctttgcttaacttcttaggttattttggaactctcttgatctcagattcttcttctataaaattgagacaatctttctccaggagaataggttcaggttttataaagtgatagatataaaagtaatataacagatatgattattaataatattattatttgaaatggacaagcagtaatgggaggatagaatgataaggatgtgtatcattgccaaatccttgagggaggtgctggtatttggaaaaaaaaaaaaaaacaacgaatacctaaacgtgaataaatttgaggaaactctattgaaagtcttccccacctgttcatgaaacagatgcccttttctcctctgttattgcataagtaaggtatatgtcttagtccctttcaattccagtctggccatgtgcctgagctctatctagccaatagaatgccagcagaaattatatgtatcacttccaggtcttcccttttagaaccctaacacccaccctctttcatgctcattcttcaccaactgattgcacacacccgtcaaggaacttggagctgtcagatggcagaaggttgctgccctgaatggcagaatggaaataaacgcacaccggaattacccgcaattaaccactgcaactaaatgagacatcaactttacttatgttaagccactgagattgtaagttttgaatgtagacccaatatactacgccggttaatttacaagcctagaatagtacgaagaactatcatatataataagtaatgccaatatcaaaattatggtaatgtttcttgatacaaaaacataaactggaaaaggaaacaattactactaacaaaattcactataagatgtgtctaatatgtcaagcattgaccctagactacggtcaaatgtcagttggaaggttaagttgtgtactctaagacaagcacgtgaaataattcctgtggattcctgtcagtgcagcagtttctcagctagtgttagtctaggagattctgaccagcagcacttcttgttcagctccttttccttaacgtgtaattttcagcagaataaaactgcattctctatattctagcacaaatgaacattttgtgactaacagtattcactgatagtataatgtatcggccttattgctgtcaataattattatttgtatttatattacaatattacatttcagttattttggttcaaggttttagagtcatcaacttctgtgaacatttctaagaattttccatcccttatcttcctacccccttcatcaggaacccttagtctaagtaaccccatatacttttgcctatgtaacccctctcatatcaaaaactagaacacagacatattgagatggactcagtcataaagggatataaatttgttttgtagattcatatgttaattttataataatagattacttttaattgacacaaaatattacccagctcagataatattttattttgcaatctttcaacaattagctgttaggaaagactgtttaagtgaaggatctaccataaagaatccaaaataatataccactttttgcccagtggcttttgcgtatcaggcactatgttacagattttatatgcctaactactatgtttttataaagtattattttctaaatttacagatgagatagcctcacctcactgagattacatgatttgctaaagaccacaaggatagaatcaagatttgaactcttttctttctccaaatctagagctctttttccttacttctgttctatggaattgattgttctgcttcttttctataattaacctttacaatcacttaataacaaatttgtgatatatacggtagacaccaatataagtgctgaagctacaaagataaatgggaacccctggccaggtgtggtggtgcgcgcctgtggtcccagctactcaggagattgaagcgggaagatcacttgaactcaggaatttgagatcagcctgctccaaaaagcaagtccccaactctataaaaatatatttttaaaaaattagccagacatggtggcaggcatctacggtagcagctatgtgggaggctgaggtgggaggattacttgtgcctggaagttcaaggttgcagtgagctatgattgcaccactgtgctctagcctgggtgaccacaaagccctgtcttaaaaacaaaacataaaagtaaaaatatggaaccatcagtctagttggagaaaaattcatgaaaataaatgattacattgtggtgggatatgcgagtagaggtgaaagagaagacacagaagccctgccgtgaaggcagtgaataacttgctatgggactttcaaggactgtttggaggtgaaggcagtaccagagcaggaattagaggtacattggaaacttagtaggccaacagaggagatgagggtgtgaggtgtggaagagaagatacctgagtggggtctactcatggcaaacctatatacaatgctaagaaatttgagctgttgtcctgtgcatgagaggaaacaatgacaaattttactgaaaataataattttaagagatttttgatgtaagaaattactatcagcaacagcaaatatgggtcagggatggagaaactaactgggttgtgatggcagattagagatcatgtttccatttatccaatctatcaatccatttatccttccactttattagaaaaagcctggtctagctactcaggaggatgaggcaggagaatcgcttgaaccaatggaggttgcagtgagccgagatcacaccactgcactccagcctgggcaacagagcaagactccttctcaaaaaaaagaaaaaagaaaagaaagaaaagaaaagaaaagaaaagaaaagaaagaaaagaaaagaaaagaaaaagactggtctaacaaataatagttgggacattgggaatatgataggtttttgacatatttaggaactgaaattcaggcattttagagatttatgggacatccaggtagagttctatgataggcaactgaatagttagatttcacaggaaagcagatcaatcaataaatgtgggacttatgtatttacatgtggttattaaaaccaaggacaaagatttcattaccttagagtatagtaaaaaagagaggattgaatagaatcacaaagagggacacagggacagagaagaaggaggaaggagactgggaaagaacatttaggaagaggacagagacctagagaggatcatgtaaggaaaccaagtaaggcatgttctcaagactataaattgctgataggaacagaagccacaggaagtttaagaacagtgtacattggtctcacaaaataggagaccatttgttaaaacactgtccaaggcactacttatggcagcagaagtgagattaaaggggattaagtagttggtgaaaattagacagtgaaaatataaaagtaaattactattttcataaatgtatataggcacacctcattttattgaaccttgctttacaaattttaaccttgtggttaaaacaaccacagatactacattttttacaaattaaaggttttggcaactgtgtggagcaagtttattggcagcatttttttccaacagcacgttctttctctcttttggcctctgttacattttggtaattcttgcaataactaaaacttgttcattattatcacacctgttacggtaacctgtgatcagagatcgttgatgttactgttgtaattgttttggggtgccatgaaccagaaccatgtaaaacggcaaactcacttgttaagtgttgtgtgtgttctgaatgccccactgacctgttgttctgccatctctgtccttctccttgggcatccctattctctgagacacaacaatattgaaattaggccagttaagcctacaatggcttctaagtattcaggtgaaaggaatagttacatgtctcttactttaaatccaaagctagaaatgacgaagctcagtgaggaaggcatgtcaaaagccaatatgggacaaaagctagacctcttgcaccaaaactagccaaattatgaatgcaaaggaaaagttctggaaggaaattaaaagtgctactttaatgaacgcacaaatgagaagaaagcaaaaccttattgttgacatggagaaagttttagtggcctgagtagaagatcaaaccagccacactattcccttaagccaacgtctaatctaggggaaggccctaactcacttcaattctatgaaggctgagagaggtgaggcagctgcggaagaaaagtaggagactaggagaggctggctcacgaagttaaggaaagatgccatctgcataacatagaaatgtaaggtgaagcagcaactgctgatggagaagctgcagcaagttatccagaagacctagctaaaataattggtgaaagggcctacactaaaacaacaaatttttagtgaaaaacgcagctttgtattgggagaagatctcctctggactttcatagctaagaaggagaagttgatgcctggcttcaaatctttaaagaataggttgactcttctattaggggctaatgcagctggtgaccttaagttgaagccaatatgaatttaccattctgaaaattttaaaacaagaattatgctaaatctacgtagcctgtggtaagtggaacaaaacctggattacagcacatctgtttatagcatgatttactgaatatttttagctttcttttgagacctagtgcacagaaaataatattcctttcaaagtagtactgctcattgacaatgcacctggccatccaaaagctctgatagagatgtacagggagattaatgttgttttcaggcctgccaatggaacatctattctgccacccatggatcaaggagtaattttgactttcaagcactatgattcaagaaatacatttcatggggatatagattccatagatagtgattcctctgattgatctgggtatagtcaattgaaaaccttctggaggctgggcatggtggctcatacctgtaatcccagcaatttgggaggctgagaagggcagatcttctgaggtcaggagtttaagactagcctggccaacatggtgaaaccctgtctctactaaaaatacaaaaactagcctggcaaggtggtgcacccctgtaatcccagctactcaggaggctgagtgaggcaaggcaggagaattgctggaacgtggaggcagaggttgcagtgagccgagatcccgccactcactccagcctggataaaagagcaagactccatcgcaaaaaaaaagagaaaaccttctggaaatgtttcattactctaaattgcattaagaacaaggaggtcaaaatatcaacattaatagtactttgaaagaagttgattccaactctcatggatgactttgaggggttcaagacttcagtggaggaagtaactgaagatggtctggaaatagcaagataactagaattagaagcagagcctgaaaacgtgactgaattgctgctacctcataataaatccttaagggatgagaggctgcttgttatggacgagcaaataaagtggtttcttgagacagcctctacttccggtgaagatgcgatgaactttgttgaaatgacaacaaagggtttagaatactctgtaaacttagttcgtaaagcagccacagggtatgagaagattgactccagttttgaaagaacttctaatttgggtacattgttatcaaacggcaacgcatgctacaaagaaatcttttctgaaaggaagagtcaattgatgaggcaaacttcattgtcttattttaagaaatcatcggccaggcatggttgctcacacctgtaatcccagcactttgggagaccgaggcgggcagattgcctgagctcaggaattcacaactagcctgggaaacccaggtgaaaccccatctctactaaaatgcaaaaaattagccgggcgtggctgcgtgctcctgtagtcccacctactcgggaagctgaggcaatagaattgcttgaacctgggaggcagagggtgcagtaagctgagattgtgccactgcactccagcctgggccacagagtgagattccatctacaaaaaagaaaaaaaaaaaaaagaaagaaaaagaaaagaaattgtcacagccaccccaggatttaaccaccatcgttgtcatcatcagcagccatcaatatggaggtaagaccttccaccagcagaaatgttataactggctgaaggctcagatgactgttagcagttttagcattaaaatatttttaattacggtattttcattggttttttagacatgatgttattatacattttatagactacagtgtagtgtaaatgtaactgggccgaaaaaattgtgactttattgggacagttgcttaattgcagtgatctcgaccctcacttgcagtatctctcaggtgtgcctgtataacgtgaatggaatttattaacagggagtgaaacgaaagagtggcaactagagagaagcatggagtaaggagagggattttctcttgatttcatttgttgacataggaatcatttatagatttgtttttcatttatttcaatgataagaaagaatgataagaggtggcagagaaagagaagttgaaaatagaataaagctaagttacttattattgaggaaaacctaaatgaaaaatagggaaataggatgaagtctattaaagagattatccatgaggagggagacctcatcttctgagacaagaataaaagatacaatggtggactcagaggtaaagtaattataagtcttggtgaatgtgtgtggtggatagggaggtatgactattctttctcaaagtaagtggtaatttaactattggggaaagggagatgcttgatattttgaggacattgataaagtctaagccaagccacctttttttttttgaataattactgaaccattccttttctttagcaagtaccattacttgaatataattgactctactaaaagtcttcatatatttataataatcattgttaaatcaaaattattttctaaaaatatctaggctaccataacataaataacatatcacaatattttcaaagacagttatcatttagcttattcatataataattatcccgttaacttttttattttctgaggtgataaatctacctattttcattaagattttatgcaagcataatttatactacatataacaagtttttttcaactcacaatgaccttttaaaattgttaataagagtatataaggggttttagaaaactccttggcttgtaggtgtgagagaaagtcacatttattattactagaagcagtgttctgttggcatattacaatgtggcagacaatccttcaacaattaattaccagtaaagtaattatagaatatcctttgatgtttataatgttttaattgaagtaaaaatgtgagaatatgcttcaggggaatataatattttaattatttatgggccaagatatctatatactttgactagagtgcatttctctattctgtggcatctctgttataatagaacatttgtagactaaaaaaatagggtgttttccccccacagcgtattacagtgaatgtagtctactttataatcctcagggttcttttaacttgacgtgaatcaaacaccttaaggaaacagaaactaagactgaaagttttgacaaattagttttgaaaccttcacaaactaaacctgtttttgatattggtttcaaaaagtatgcatagaaacttgacatgaagtagctaaatttatgcactcaattgatatttatatgtgtgcaggtctatcaacgttattgaaaagttaatccaaaggatttattgattactctcaatttctcagatactgtcagttcacttttgaaaattattctcttatgtaatattgcactcttttcagtaaaaaggagagtttgtggctgttaaatatgcatgaggcacaatagtttcacaacaaatcaaatttaattaaatgatgcatttcctccacttacaaaaggtttattaaaggtttatttgctcatgcaaattaaagtgttagagtaaaaatccacatgaaacttggcactaacaattaaaaaaatattgaaagatttctcgcctcgctgcaataccttgctatgtttaaactgctcagcttgtcatttagaatctttaatgaaaccagggaggaggctatttatttgcataataggacataatttgctgtggtgaggttttaattatttataggctgtctgaaatatttaaaatggcatcactaaggagcatgaagtgttggataatgccttcatttcaggtttcctgccgtttcttttatgggtcaagcgatttatttctaattagcataccaggctagtggctttaaaaacataaggaaaacaaattggtttcagtctgtttgcagcttgagtagttggagacggccaagggtcactgacggagactgagcagagttaagagatgaagccagaagccatcccagcacatggaaatcactgactcaacagagccatactttcatttgtgcacactgattactgtatgtagtagcttctctttggtaggtagtgggttagagttaatggatttcatgttaattgtcccttaaatattttctaccattaacacatttcttattggaaatgatgtgtaagcaacagaaaatattccatttccttggataaaagatacagtaattactgtgtgcatagggaaaaattcggcagtttcagggtgagatttaacatttaagtatatgcaatcttatttatatacaagaacaagagcctgtggttaaaacacaatagggttcttttttaataaaccatatggaaactcatatatcttgtgagaggttgtgaattagcagagtacactaaaatatgttcgaatttctaaagcattcttattgtgcattgtctgtgttctaggtaaaaggaaaaaaaaaactcaggaatcatctataaggtctcttatgttatgataaatggattttcatgttctttactatctattttaaatatgataattttcttgaaagtagtttaaaagtggtcatgttgtaaacatcattgtatagccaggagaaatgtgtttactgcaagagtttattatatttccgtgatgctctagatatccccatcatcatgcacatagattgaaagcaggggtagcacactgttgtcagacattctctcatttgtcaccttctggcctcaaaacatgaatagagaaattgctgccagatgtcaagaaacagccttagggcattacagaggatattatccatgcccttttaagtagtagacagatgctgtattcagagagaggatttttatgattatcgttcacacagcccaggtgattggtcaaggccataaaggagtctgcaatccttggagaacttttggagtcactttaaccataacgtaatgtattgcaacagttacaataaattatgttatggttcctgaatgtaaccgtcaattatcattatttttttaagtatccactggatacagatagtgg

SEQ ID NO: 10 - DNA, 1179 bp, Homo Sapiens
tctagttggataaatataaatatttggaaaatggtaccctggaaaatgataccattgaaaagggccataaaagaggaacgttctcattcttgatatagcacagaagttgggcatcattaaaggtgatgaactcaacttaaattcatcaaagaaacctgggtgtattgtaagtttttctcatttttcaggttaatgtgactttatcagaaataagcaagattttaaatccctcgttcctatagatcgcaagtttttaggactcccataaaacaccatgatttttttcttcattggaggttgttttacttgtattagaaatgatgtagctcataaaagggagccagttcaattcaaaacacatttatgggggcccacaagggaccccaactaggcagtgctttcctagagaagaaaaagcctacagggtttggattcagactgactgaatagcatttttccacttattaactgttaaccttgagcaaattgtgcttatctctgagttctcttgcagaaaacacactacctcactaggttactaggaagatttcaggagatggtgcttgtaaaaggccaagcctggggctccaggaatcttctgtccttgctttagttgctgggggatgtaggtgatacagacatgggtaggatttagtccctgaatgctgtcagggattgatagtctgggactttgcggtataggatactcacttggaagatacaaggtgtttgtttgtttggcatttgttttttgtgttttattttatttatttattttttgagactggattgctctgttgtccaggctggagtgctgaggtgcagtggtgcaatcatagctcacggcagcctcaaactcctgagcccaagtgagagatgagtcagagccaagcccttctgctaacagagctatttgttgctgaggaagttctcagtttctcctctgaatggtgccaatatcctccagttgcttaaggcagagtgagagaagctgactgtggatacccacatgaagattaatcccacctggaggaatggggcaaggagctgctctctagaccagtcaagcttgcatttgaattgggcttgtaatgagttccccagaaggaaaacacacgcacatataccccaacagaaaaagcatcctggggctgtggactcatccattgtctttgataa

SEQ ID NO: 11 - DNA, 1882 bp, Homo Sapiens
gctcttatattttcaaggctattgtctagggaaaggcagggtggaatagaggaaaaatcctaagaccagggctcaggtctcttgggtcctcatcccagctctgtggtctaattttgccaaacttcttgacttccctgggctttaatttcctcatctgtacaaagagaagactggctgagaacagaggcaaaatggttgtcacgctttggcaatcaaacagccgtacatgtttcaggtgttaaggaagatagatgctctaacacaaaattctgtcttctcttactctcttgaaaaacaaacaagacaaaacattcgcagagctggagacaggaagaatgagcttggaagatcaggaccacgtgctggtttcactacctctggtcaccccagctcattcttctgctgaaaagaggcaggagaacagtgagaacagggtggtggtccccaagggaagaatgatcaatggagacagtttcatgatgccattcatgaaattcatcagaatttcatgatgccccttggggtgactatcagggttttaagttattcttgagagtttctcgaacgcttttctgtctttgttttctaaaagactttgatgatggcagtgggagctcagattcatgttggagttaccattctggtttgccaaggtagtggaggaatgtggaaagacgtcgctgcactttagtcctgtacttctgacctgtactcaaaggcctttcccttcctaccctggggcatctccccacacaggagcttcatgccagcttcccctctgctggggttgccaactcatgactccctgggggaggcctccgcactagcctgccagcaccttcttctttccttgaaggcttgtgactcatagctgctgtgtaacgtgtggcacccccagacaggaacacatcttgcaaattgcatcgggggctgcttctctggtcttccttctggataccagatttggaggtgccaaatggaattgaattctttataggttagagagcatttaactatacctggcagggctctttaactcagactttagagtttttttttcatatctatacacacacacagatatatttcataataggcaacatgactaatatttgcagtattgttttgattctatcagtgcaactggttcactcattcctgagtgtctaaacatcattaagattctaaaggtttgctctgaagaacatactcagaataagttctggtatttttctctggacatgttgttttccaactacttagagaaaacaacaaagtgggataagactggataggcaaataggtttgattttatttgccagtgccagttgatgtatcatggcttcctcgtggctgtgttgaaagggatcgtgagacactgacttggcaggaagaggtgccttggcaggaagaagtgcctagtggatgagcaatgcctgctctgggcaaggaggggaccaaatagcatgtgtgccacttttagaccctccctggacaatatctttccagccactgcctgcctcatcctcctccttgaaaccagagggcaaggcatgatgttccaccgataggattattgtctatgatggaggaaaatcctatgaaactatgattatttcagtgataaaccaaactagagagtaagttattacataattctggggacttgctgccacatcaacatatcggtggattctgttgaaaatgaagtcattgtagcttgaaaatgaagtcattgtagtggagactaaaatgatttagttgggacttcctgacaatgacaagaaggggagtagagaaggaagtggagatgccatacaatttgctacacggttataactgcacacgcagcaagttacagatgactcttacaggatcctaa

SEQ ID NO: 12 - DNA, 3338 bp, Homo Sapiens
cattcctgaatttttacacggtgctgaataggtactgaaagtaaaaattttagtaactaaatctgccaggtgcaatcacatgtgcttgtagttccaggtattctggattcaaaggcgggaggatcacttggtcccaggagtttgagcctgcagtgcactgtgattgcatctgtgaccagccactgcactccaacctgggcacatagttgagaccttatctctttaaaaaaaagcagggaaggggatgattaaatcttctttgataaattgattttgagaatatttcattgaaaaactagataatttgtggagatacattgtcagttgtatacagactaattaactacattggtgattcactccatggaccattttcttcagatatgtttggaattattatctattcctacacttattgcactaatgactcaccttagaaggaaaagaaaaattttaatttacttaaaaaaaattttttttgattgaatagataattgtgtatatttgtggttaattattattttacactccagacctatttctacacctgtagggaagaaacttaatcactgatatcgtcagcctgtcagataccactgatatcttcagtctagttttaagaaaaactaggactaagaagaagtatataatcaagttcaagctaatcatggccatttttaaattacttggtcttttttaatactttttcccagagcaaccttctaaatggaagggcaaagcctcaactatctaaaatgcagcttttaaggactcttagatgtatgatatgccttatgtacaggagattccatctataccttgacacccacaccactcccacccctgttctctcttccaagaaggtttttggcagcaaatagttctctttaattattatatttaaatatttgtatatatttaattcacattagggataacaactaagaattatttaattggcaggtttattaggtagttgttgattgatgacatgtataacaatccaaatggtatgataggtgaagccaatgcagtggcacatgcctgtaatcccagcactttgggattgcttgagcccaagagttcgaggttgcagtgagccatgattgcagttaaatgttccaaaaatgattttcagagcattactggacattttaattaaaaagaattagtatgaggaggtagagacaatggcaactatctactgctactccctgcccccagcaaaaaaagtgccattcagggagtaagaaacagcaaaagtagaatttaagttttcctgaatggatttaacctgttagcatttaaaaatagtattttgtggtcagtcatcttaagcttgtctctattttatctatatttacatagtttttattagaaataacacccattaaaatttaacagaaactttgtatgctgcctagaacgctaactagtttattggaagtcaaataaaaatataatttttttaaggtttcaataagattcttaaatgtataatgtaatgtattactgctcattcttaaacagaattgcctactgctaacagttttgaaaagattgtccatctttttcatctcttccctttgatagttgaagatcagaagaccaaacataaaattcactgccagaacttgtccagaggcaaacagtaaaagcataggaaaaatattaaagtgagccaataggatttcagaggcctagataacaaacttaagggcggctaacaggtttatacttgcacctacatttttatatctggcttaattgcataagtaaatgagcatcaacattgaaatatatttttctttttcaaaatgggagcttatatagtgacttattaacatctaaaagtgtaaaaccaaatttcaaagaggtaaattgagagatatgtttgattaattcctctggtgaaacaaaatagcttttcatagatctttactaaactttttaaacagctttaaggtatatttgacacaataaactatacatattcaaagtgtacaatttggtgtttgacaaatatatttattgtgaaatcgtaacaagatataatctacatattcatccctcccaaaagatgctcctttgtaatcctttcctccccaaacaccaaccacccaccaactccagacaagcactggtcaccatagattagtttatagttttttaatgattttatataaatggaatcatataatatgtacttttcattttacttctactcagcataattatttggagatgtatctatgttattgcagatatcagtacattcctgtaaattgcttagtagtagtattttgtatggatctgacactgtccattcacttgttgatggacttgtgcaagattttagctagagtcaactatcaactctccacagcttatcactgaaataacaagcttcgtgtgaccatattaaaaattatcagttttacatttgaaaggcccagtgccaacctggaaaaaattgcttgcattgatgagtaataaattctacattttgcatattctcacaactgcatgaattcatttcacaatgttggcaaataatctgaattcttggtggcacgggtcctccgtatgctgagcgccggtcccctgggcccacttttctttctctatactttgtgtctctttcttttctcagtctctcgtcccacccgactggaaacacccacaggtgtggaggggcaggccaccccttcatctggtgcccaacgtgggtgcttttctctaggttgaaggtatgctcgagcatgatcattgaggacaagtcgacgagattcccgagtacgtctacagtcagccttgtgacatttgaagttctacaatgaacccgtcggagatgcaaagaaaagcacctccacggagacagagacaccgcagtcgagcaccatcggctcacaagatgaacagttgattattctctatcccttggcaatctcattcactttcatgatttaaataattgcttccatatgaacaactgtatcttcagcctcacatgtccagtaagctacttactgcacagctcaacgtgaatatcctgccagttcttcacattccatactaaagttgttgttttctttcctaaatcttttcctcctttttctttctttttttccccctgttattaagattttattatccagccaagtggactaaaaaatatctattggttattttgccaaaccaagatttctcctacattcatcctcttttttagggttgagttaatatgtataaagtgcttaaaacaatgcctggctgaagtgtttgttttccgttaggagagagggagagacaggaagaaagtagcaaagaatctgaga

SEQ ID NO: 13 - DNA, 5808 bp, Homo Sapiens
acagattctctctgagccaaatgggttaagggagaagtgatggaggcgattcgaagctgtctttcctaccctcttcagtacctcttccagtgatgtgaagttaaaaccagagatggagtctccctgtgttgcccagtctggtcttgagagcttcagttttaaataataaattgttctcgtctttctaaatttcaatcaaaacacaggatgtattttaaaagggaaaaactgtgaggtaaaagaatagggtgaggggaggaaagaaataacttcatagagaaaaattcaatgaacccttggaagaaaatatatggaagtatggttactgacttgggaaagaagagaaaggtacaatgtaactgcacatagaagccagtcctgaaaagaagcaagccggctgaagttatctgcaactcagaagcacttggtaccacccaaggggagataagaggagatctcatcagaggtgcctgaaaagcacctcagccgaaggcctcacatagagagacctaagaatgaaggcacctggactaggaatgtgaatatgtgaaagaacatgaccggccaggggccctgagttattgaatgcaacccccttcagacactgcaacacacaggctgtgcaccaagcctagtatgggaaggacagcttttcttcatgaggcctgccaggtaaagccagctatgaaacaggaagttgaccttcaccagacactgaacctactggcaccttgatcttggacttcccagccttacaaactgtaagaaataaatgtctgttgttcataagccacatagtttgtgatagtttgttatggccacctgaacagacttaggcagggtgcctcattataacctggcaagggtgtaaatttaggtggttcccttcttggacttttctggtggaagtggaggtagggccacagcttttgggtgtgtgtgtgtgtgtgtgtgtgtgtgtgtgtgtgtgtggaagcagaaaatgtggtgtttggtggaagcagaaaatgtattgtctagatgttttctctcttattataatagattacccctttcatggtcttttggctagacagagtaacctttttgggggtctttttcatcagtgcccattggtgctttcaagtcaatggcttctttagctccaaaaaggtacacaaagacaactctgggacctcaccaccatatcattccttaaattcatagtctgccttcttctctccatctttcaagatatttttatgtttatatgttatctagagttctaaattttacttagcaggaggaatagggaaaaatacaactactctatcatcctggcaacagtttaatatttaaaatatgtattttttaaaatcagataaaatacatgtttttttgaaagatttagttcaatcacaagttacttcaggaagtttttcctaatctctcagtcttaggttagggccctgataaggtttgactctgtgtccccaccccaatctcactgtactcccataatttccacatgtccccatcccaatctcatctttaattatattcccataatttccacatgttgtgggagggacccagtgggaaacaatttgaatcatgggggtggttcccccatactgttctcagggtagtgagtaagtctcacaagatctgatgcttttatcaggggtttctgcttttgcatctttctcattttctcttgccgctgccatgtaagaagtgcctttcacctcccaccatgattctgaggcctccccagccttgtggaaatgtaagtccaattgaacctctttttcttcccagtcttgggtatgtctttatcagcagcatgaaaatggactaatacagtaaaatggtaccagtggagtggggtattgctgaaaagatacccaaaaatgtggaagagactttgaaactggatgacaggcagaggttggaacagttttgagggcttagaagaagaaaggaaaacgtggggaagtttggaacttcctagagatttgttgaatggctttgaccaaaaacctgaaagtgatatggacaataaggtccaggctgaggtggtctcaaatggaaatgaggaactttttggggactggatgcaaaggtgattcttgtcacgatttagcaaagagactggcagcactttgcccctgccctagagatctgtggaactttgaacttgagagagatgatttagggtatctggcagaagaaatttctaagcagcaaagcatttcagatgtgacttgggtgctgttaaaggcattcggttttataagggaagcagagcatgaaagtttggaaaaattgcagcctgacaatgtgatagaaaagaaaacttcatttctgaggagaaattcaagctggcttcataaatttgcataagcaatgaggagccaaatgttcatccccaagacaatggggaaaatgtctccagggcatgtcagaggtcttcataacagcccctgccatcacaggcctggaggcctgagagaaaatggtttcatgggccaggcccagggtctccatgctgtgtgcagcctagggacttgttgccctgcatcccagctgctccagccatggctgaaaggggccaacatagagctcggactgtggcttcagagggtggaagccccaagccttgacagcttccacgtggtgttgagcctacaggtgcacagaagtcaagaactggggtttgggaacctccgcctagattttagaagatgtatagaaacacctggatgcccaggcagaagtttgctgcaggggtggggagttcatggagaacctctactagggcagcatggaagggaaatgtggggtcagatcccccacacagagtccctcctggggcactgcctagtggagctgtgagaagagggccactgtcctccagaccccagaatggtagatccaccgacagcttgcaccatttgcctggaaaaacggcagacactcaattccagcccaggaaagcagccaggagggaggctataccctgcaaaaccacaggggtggagctgcccaagaccatgggagcccacctcttgcatcagcatgacctggatgtgagacctggagtcaaaggagatcattttggagttttaaaatttgactgccccactggatttgggacttgcatgggccctgtaacccctttgtttaggccaatttctcccatttggaatggctgtatttacccaatacctgtactgccattgtatctgggaagtaactagcttgcttttgactttacaagctcataggtggaagagacatgctttatctcagatgagactttggactgtgggcttttgggttaatgctggaatgagttaatactttgggggactgttggaagggcatgattgtgttttgaaatgtgaggacatgagatttgggtggggccaggggcagaatgatatggtttggctctgtctccccacccaaatctcaccttgaattttaataatccccatggtcaagggcagtagcaggtggaaataattgaatcatgggaacagtttcctccatactattggcatgatagtgagtgagttctcaccagatctgatggttttgcaaggggtttccctctttgcttggttttcatttttctcctgcctactgccatgtaagacgtgcctttgctcttcctcaccttccaccatgattgtaaggcctccccagacatgtggaactacagaattggttttgtctgtgtctttgttaaagatggctcaagtgaccagtttcataggaaacagactgtgcaagtgacctcaagagtgcagatgctgtggcttatcacgggtagaaaaaatattcataagtctgaggaaatgtttaatttcctgttctccagcctccatggtaaggagtcttttacatttataggctcccttctttccagcatctgtgacataactttcaggagactaaaagcaaaatccaccatattgattgtctcctagccctgtgggcgattcccagtaactggatcagacagactcatcccaaaccttgtacctcaattctgatcgttctatccctgtctaacaaattttgtgtcagttctggtcaccatccagaactcaagaagattaagccatgatcctaggcattaccctagacttcttcatcgcccaacagaatcatcaccagattctattcagtttaattcctaaacctcacttgaatccaattctcattaaccacagtttgagccattatcagttcacagctgtcttattatcacagcctctaaattcctctgccagcctccaggtttgctgctctcaaattattctctgcagccagagtaatcatcattctaaatgatccaccctcttcttaaagtcctttagtaacttcctcctgctccccaaataaacttcaaactccttagcaagaataaagggctcgacctgacgtgaccctgataaccacactgacttggtactgctcacccttccactcacacctacctgcaatctgcactccagaaatgttgaactacttgcagttcccccaaacaagcctttctctttctcacttcttggcctatgttcatgccgagaacataacctgttgcccactcatcctttgggtccctgtttacatggcacctcctcaaggaaccctttgattgcccaaaatgagttatatgcctttcgaaatgacctcatagaaacctgtactttaccctgtgatggaaatcttgctgaggtataattgcccacttacttacctttgtctgcccttggacagtaagcaccagaaggtcaaggtgtaagtagatctcatcacctctgcatcctcacatccaatacatatcctggcatatcaaagctccaccataaatattggctgaattagcatataaacacccaggctttagaaatgaagtcatgcctccatctttctgctttcccttgcacccttcagggagagtaatcctgcctaatctccagtcctgtggatggactctgtttaaaatccttccatgtcttctccctaatcatagaataaagtccaaatcccttaatatgacctaaaaactcaattccgctgggtccctgttccattaccacttgtggtaaccagcctccaagatggcccccaatgaccccagcctcctggtcttcacatctttgtccctcccgcattgtatcaatattagtctgtgtgaccaacagcacatagtagaagtgacaacatacaactcctgcactcaggtcataaaagccatcaagtcttctgcctctctctcttgaggattgcttactctacaggaagttagctgccatgtcatgagcaaccctatggagagacccatgtggtgaggaagcaaagtctctacagcagtgaagaactgaagcctccggccaacagtcatacaccggcacctttgtggaagcagatcctccaaccccagtcaatccttcaaattactacagccccaaccaatattttggttgcaaccccatgagagaccttgagccaaaaatcaccagctaagccactccagaatagctgactccagaaatgatgagataataaatgattactgtcttaagccactgagctctagagtaatttattatccagcaataaatagcattctagccctgccatagcccactgccccttgtgaggcttttctcaattccagaactatgccaggccccctctggcctggggcccttctcacatgctgtttctttgcctttcttcaccaggacaattgcttttttttttttttagatggaattttgctttcgtcgcccaggctggagtgcaatg

SEQ ID NO: 14 - DNA, 2881 bp, Homo Sapiens
aaattttttactttatgtttctgcttaggctagcaagtgccttcatcacctctatagcaaagaggctttcagaggagttttgcttgaattctcctgcctcagcctcctgagtagctgggattacaggcatgtgccaccatgcccagctaattttgtatttttagtagagacggggtttcatcatgttagtcaggctggtctcaaattcctgacctgaggtgatccacctgcctcagcctcccaaagtgctgggattacaggcgtgagtcaccatgctcagccaatgctggaaatttttaagggaaatatagtgatatatgcaggacactgtgcaaactgctattattaagctgttgggacctaattacttaaaacactgaactattaagtatatattttgacctggggcaccatgaaaaaagtaccaagacaactaatggcaccctgaacacagaaagtttaggaatctctggcacatacaattttttgttaggcttgaaggatatacaagaactgtaaaatacaaacaatttcaagccatgcccatacatactcgtttccatttcagatggcttaactgtgataaaagctgcttatttaacccatttgttctgattaaatcagtgtgaccaaacacagtctttagaaaaaatagattattcccccacatcaggaccttcaatcatagaagataggtgactttcacttgcaaaatccgtgatgacctgatattttatcaacaaacatatacctttatgggggttctatctccttcaaagtagtcattttgggagattacacttattctggtggaagaatgactctggttaaaaataatcatgcactttgggcaggggtggtgggggcggggtgtggaaatcttcatttgaaattatcttcagagcccatgacatggcgttttacaaagagtcaatgatgctaaaactccagctctgagggaagatttaacttctagaaattgtcaaacacaactttgtgcaaaatctgataaacaaggcaggtaaatcaaagagggaaacatctgctaaggatttttgtaaaaagcaaaacaaacaacaacaaaacctaagtaagaattctcaaatgatgacacacatctcagaggagggagtggattctaaagccttttctgaaagaggagtggcaaaaataatttaatagcattatgaatataaatatgtagtctctcaagatggctactctggtgggcaatattcactcatacgtacaaacatagggtaatagtcttaaaagttatgcatattactttttttggcacacctcttaaaccaataatatcaaaaaagatggctattttaataaacattttcaaaaattataacatggacaattatatgatacaaaatcaaatacatctggggaaataagcatgatctcttttgtagagctatactgattttgtaatacattgataggtgtagacagggctgatattcagatggtctatgctggtggggcattaactattttgagggtcatccgtgaacacagatgtctttatatataagtctatatgtacagaatactccccatttatatatagtttaggtatcttgattttttcaaaagttggttgattggcacttacaacacagttttccaaaaacaaaaccatgctctaaaatttagtcttgtgaggctatcaggtcattcttttgactttaccgtgtaagatatttaataacagtgcaaaatattgcttctctggggaaaaggtgttctacacttcctatcagtatcccaggtacatgccttctctcagagtgacaaagagatttccactgatgaggacagggaaagaaataggacctgtttttgttactttctgcaatggcatgttactccctgcaaatgttcaaaagaaagtaaatttaagtcagttctctttagaaggtactagataagtgttctgaacccagcttcacatcagaatcacatgaaggtgtgtaaaaaacaaaacaaaacaaaaaaacaccaattcctaggccccaccagttaaatccaaatctctggtggctggaacattggcagcgacagtgttcacagctcccagatggttccaatgtacacgagggttgagaaccatagactaactttttctctactctactattaatatgattgtttttgcaactttggcctaggttcacagatgggagaggcatacatatgagaagttacacattctgtttagaatgtctcaaagtggaaaaacaggtaagagtaatcggacctagaccagagagacaatttgctctacatcgttcaccaaaagctaaaatggagtaaccggattttttttcctattgcttcctgttttcataggtgggtgaataaagtaaggaatacaattgtaatttttctcttgatctccaagagaagaacttccagatttaggaagatagatgggaaagtgaacagccataatcactagggtgatactccttttctggctagaataaaatgaggacagaggtagcttcagagcagaggaagctcatgtttaatcaagcagatatatcttggaactgaatatgaagaagtgttcggaagtgtcacgctcattctgggcaggagcaactcctccttgtcaagaacaaggaggaaaaaatgcaaacagagaaaaacatatgattgcacttcaaaatctaaaaggggaaggaagagaggattcagggaagcaatcctctccatattgaacttgaggccaagaaagaaaaaataaggtttttttttcttctttttaaaatcaaaaccctctgtccttcctttcctgactcgacatttccaagctgtgcttcctcatatctaagccacctcaccacagcatttgacacta

SEQ ID NO: 15 - DNA, 3424 bp, Homo Sapiens
ggagcgccggtctctaggcctcctgtgaaatgggtggagccttactgatttactctccccttcggaatcctatccactgtaaaaagaggcccgcaactcctcctctaagtgttggggcagaggttggggtaggaacccggtcatagggcaaggacgtgaggcagggtggaaaaaagtacagggtagaatgatttccagtggtttggcgaatgcatcgtgtgtaaatagctttctggaaacctgttgggagggtcagaagtgccagccccagctcgatttcatgagtcgtaattctttctatttctccctaaatgtgagggcatttgagttccgtaaaggagtcgactccaaatgtttcctgctgcaccacacacttgactaccattggtgacggtgacttagctatgacttgctgagtgtagcgtttctaaaccttactaaactctgggttttatttttcccctttttatgcttacaaaactgaaattcaaagaataaaatgccttgtctcattgccacacagctaagtccatgcgggaggccaattcaggtggtctggctccaaaaccagggctcttcccatgatttgcccgctgtgacaccaggttggcaactaggaaatgtacaagcaggacttgacaaatgtaggagcaaatatatggtaaggataagtatgaacaccatcaaaattagccagttactcatgtaatagaaataaagtgaggagatcaacaaacaaggactgacatggctggaaaagtttcacgggggatagcaaggtcaaccaaggggatttgattattaagtaggaatcttcagtctttcttgcttttcggtttagtatctcccttaatttgatgagagtgattgtctcctctgttcaagaaacctgtcattttggtaaagtggcaaaaaacttggctttacaaggtgtgtgctcttgggaaagttagttaatgtccgtgggcatcaatttccttactgtaaaataaacatatcacctactttggaatatttttgcaagatttaatggggttttgtatgtcagaaattctcagtcatggatacacagtagaatcctactgtgacccatgctcacagtagaattacttgaggtggtttctaaatgacccagtccaaacaaattcaatcataatcagctgttagaagtaaatcatctagcctggtgcctgaaacatagaggccttcaaaaatattagctccccttccccaattccaaaaccagagcatatcattcacctgtgaattatattcttttggtagttaattggtatgtcttgatcaagcagggaggcgaacagacccataagagtgcagactctcacaaaccaagtgttgatatacatgctcatatagtacatgctatgtagatacagtgtgttgatgtagtcactatagatgagtttcggtggcaaatattatgtgaaaacggaaccctggactgctagtaatgagttctaatatttgcacaggagtttacagagcagtgtaatcttgtgaattaaataatataatcaagcccattttatagacgagagaattgaggattggatggtgaatgtaatcaaggttatctaactccacaaaatgaaaatatagcatagattcactgagccttcaaaatacctaccttagagttgtatggtttagatagagaatatacagctcctaccacagtgctaataagtaagtcatcaataaatgataacttgtaaagtcacgggcccaaattcagatctcatgccctttctatattcttcagtatctttggaaatatgatggagcttttcatttaagaggaattgatctatacttctctcaccccagaagttgtaacaattagctttaactgcataacacaccagtctaaatctgagtggcttaagacaacccccattcatgattatagttcatgattctatgagttaactggcagttctgctgttctggacagggttactgtggccccttatacagacctaacatgatccccatgttccttgcctcctgataatcatgcctttatgcaatccccttgtattacagattgagtatcccttatccgaaatgtttggtaccagaaatgtttcagattttagattgttccggattttggaatgtttgcattacaatggttgtgcatcccaaatccaaaaatcccaaattcagaatgttccaatgagcacttcctttgagtgtcatgttggcactcaaaaagttttggattttggagcattttgggtttgggatttttggatttgggatactcaacccgtacttttctactgctgtatgacaaattaccacaaactcaacagctgaaaacaacacccatttatgatgtcacaattctatagataagaagtcccaattctatagatcaaaaggtttggccaggttcaatcctggtaatcacggatatataacagcttataaacatcaaggagaaagtattttgaccttcattaaattctttttaaggcaagcatacctgtttaaactgatttgtctatagccagttggtttaatttcattgaattcttcccagagcctcaagataagaacccacccaagcttggtgcgttcttatctggagcctctgggaagaacaccttgatttgaagtcaagagccaagctggcttcttatctggaggctctgggaagaatttctttcaagtgttaaagataaataaaaatagaggctccagtttagatattttaagtccaaccacccatagccaggtagccaaaacttaagtcatccttatttccctgaaacacttgctctagacataaacaaaacacaaaatgtccttgacagtgtgagtcaatgaaattaaaccaatcagctatagacaaatcagcttaacagctctactcgccttaaaaagaatgtaacgaaggtcaaaatacttcttcctcaatgtttataagctgtactgtaactgctgtgagctgggcttcttgccacttttggttagatgtcttccagtttgtaaactgttctttgtatgcatgctaaacttttaaaaatttttaaagtttgatctgattttaacacagcgcattcagattgctggcaggatctatttccttgcagttgtaggattgaggtccccatttcttagattagacctacctggataatctccctttgtaacgtgttcataggagtaatgtatcatcgtattcacaggttctacccacgttcaaaaattgacttgcagagatttccaagttgtagtatttatgaaaagcaagagaaggagtcttattcccctgtgggtagcactgaaatcgggaaagaagccattggaaatataccaagatatgcaacaatgattaccactgagttgcaagatagggcaatgtttattttctttatattttatctggattttc

SEQ ID NO: 16 - DNA, 12776 bp, Homo Sapiens
gagcaaaaccagcgacgcgtcccggacgcccggggacccctgtgggtctcggtttccttcgctgtgaccctgacatgtttccctccaccggcccgaggaaaccgtcgcttccagcctccaggtaccgtcacctctgcggggctgcgagcggaggaccgggacagagaaggagccggcggtcctggccagccgcgcggctcaaaacccgacggcgcggggactccgggcctggggcctccatggctgtggcctccttatctcccgggccggctgctccctacgctgcggggctgagggcactggggacccaggggcttctctggcactagcgaggacctaaccttgagtgaagaacgatgtcaagtgaaagtgaagaataacgggggtgggcgcgaagagaatggtcttggggcgcgcttgcgcctctacccgaggaccgaggtggggattcgacagacgccagcggtggggatccggggcgagaagccccgactttctgagtcgtgagccgcctccagtcgccccaggacgtaaccccgaggagctttcagacactggccgcgcctaatatcgctgagaaccgcgaaaaccggagttccggccgcctcccggactggcgtcccgaggccaggggacccgcttggggctcccggccgagccccgacctcggacgtttttccgggagccgcgagaggcctgggggcctgggccaggcgccgcggcgggcatcgatcgccggctcccagagagtggccccgcgcaggtggaggtgaccccgtcacctccaggagcgcccccaagccccggtacccgcagcgtgcgccctctcctcctccccgaaggttaagttcgtctttttcggttctcggttacgcatccccttggcacgcatgcccagccacaccgtgggcgaaactagagggcccgcgtcccctgggggctgccgcggggccccgagtgaggtgtcccctccgggccgggcccgagtcggaggccccctttgcagcctagaggagcgcggggctggcgctgcgcaggaaccgccaggccggggagggggccgcgcccgggcctgggccaagagcgcgcgtcccccgcccgggccctgcggccctccccaggtgtctgagcagagctgctgaagctgcagaaatgtgctggcgcctgtccaccgccgcacacaaaacccagccaaaagcggcgagaggaaaagcgaatatggcgctgctgaaaatggagactccgcatctagaaagtctttctttcctttcctcttttcgctcttacttcgtcgatcttttcccccttgccctctcacgagggcctcctgcgctttccttcgggtgttctctacccctcggcccctttcctgttcttatgaataacctcctttactcggttttccttcttcctttccactcccggttcctctttctccattttgtgtcacaggcgccttgcttcttgttccctttcagggcgcgcactcccccgcccggctcactttattttgtgtgtgggtggcggagcagggagggggtggcaaggatcgtgaggctaagtatcgagtttgtttgtttgtttttctttctttcttcttcttctttttaaaggtgttatcttaggagccaagcatctcctttggtcctgcgctccttcgcctagcgcctggtgccccccacccggctgcatccgaggcttgcgcggcccggtcccatcagccgagcgtcgcccgcccaggaggaggctcgggttctccgcagaagcgaatactttctctttttgttttaagttagaaccttgcttttgcagtgattcgttgctgtggcgtgattttaaacaggtgagaaatcggagtctcattttcccaggggggcttccaatgaggattttaagagaagcgtgcaaagaagacagcaatgtccatcttttttttttcttgttttcttttgaacagagggaacccccacgcgctgagatagttatgtttttaaggctaaacttttttaaaattagtttttcttttacacttatggctgacttttgatccttttaaagaaaggatgaagtcaaaacagattaatgcttttgaatacacaacgtccccacgtccccaaattgtggtgctgggatagttcctctaagatgcattctgattttgaagttcaaggtctctaagcgctgttaagcggaaccatgaaaaatacgttgctacattaaagataaaacagacggtgatactgactgcagaatcgtagtagaaactttttttttttttttgaggctgtgcaggatttgccttggttttattagggaacctgctaatagaagcaatttcaagtgacgggcttccctcagtaaaaagctggaagcaatgacatcttttctatctgagtgactctccttagtcgtggtaaataaataaataaataaataaatagatagatagatagataaataaataaataaataaaaattagtttacatgcagtgtttgaaaagaaaatgattttgcttcccaagtttttatgtgttttcttttttaccaactatatttcactttatttacaattgtcagtttattctcacaccttctggttagttttatcttctcaccatggtctgttagaaccccatcctcgagcaaaaaaacaaaaacaaaaaccacccccccaaaacaaacaaacaaacaaacaaaacaggtgttcatccctgtgagatgctaatgcccctggaactgtttgaaaagagcaaaattttgtaaggagattcttttcaaaaagtgttagagaagtattcttcaaaaacatcttagaatgtttccttaaaaaatttcctttcttggttttcattaattgcctttgattaaaattaggttacaaacatatcttaatttcagactgtttctttataaaagaaaggagaaagtaaataggtgttggcaaggactaaaccaatgcaactaggccctgttgagagcctaaatctgtaaactggtacccttaaaaaacatcaatcaacttgaggttcgtacaggtagttctttgactcaaacagttgatttttaaaagtcttataaaataggttaaaatgtgtttttagtccaggttcctacttctttgttatgcatttctcctcgtagataaataaatgaatctaacttgatgagtaggtagatttttctccagaagaactttctaaaaatgggcaaagttagggaagtgattaatacccttcagtttaattggaattattcagtgcttataccaagttaatcctattaagatgctatttcctgctcagggggataaattaagcacaacttagattattttaggtggacaactggtatatagtctaagcaatgggggctggaaaaaagtatctcttctccaaaaaatatagattatgtaccagtaatgttcaaagtactttgaggaagtgtattgatgggatgaatataaatcatagtgactgttgttaaggggtttacggattataaagagcaattgagcttcctttattttctcttatttagaaaacaaacattcataagaaaaaaataaaattagatcccttcttttgcccacatacaaattcagtttcagatcaattaaaaagttaaataagaaaaatagaattaaaaaaatattggaaggctgggcgcagtggctcacgcctgtaatcccagcactttgggaggccaaggcgggcagatcacgaggtcaggagattgagaccatcttggccaacatggggaaaccctatctctagtaaaaatacaaaaattagctggttgtggtggcacatgcctgtaatcccagctactcgggaggctgaggcaggagaatcgcttgaacctgggaggcagcgattgcagtgagccgagatcgcgccactgcactctagcctggcagcagagttatctctgtaactctccatctcaaaaaaaaacaaaaaaaattgaaaggaaatatagaatttgtagtatgaaaggatttcttaaacaaaacattaaaatacacaatccattaaggaaatgatcaattggatgacagtcatgctccaaataatgatatgttagtcaatacatgataatagtcccataaggttataatattgtatatttactgtaccttttctatgtgtagatgtgtctaattatacaaataccattgtgttacaattgcctacagtattcaatacagtcacatgctgtacaggtttgcagcctaggagcaataggcttgtaccatatacaaaccatctaggtttgtgtaattacactctatgatgttagcatgacaaaactgcctatggacctatttctcagaatatgtccctgtagttgagtgccatgtgactgtatataaaaatttttaaaaatactttttacatgacaaaagatatcataaaatgttacaagataaactgagaagatattttcaaggcatgtacttggtgaaggattcatattcaaaatgtataaataacttatatagaaagaatttactaatttatgtataatgaatttcataaataaaagatgtgggccaggatatatacatatgaagtgaaagtatagtactatcaataggatgaatacatatcaacttcaaaaaatgtaatttcctttgggatagaaagaaagaaggaaggagggggaataggaagagggcaacaacttcctgcccagggggcaacaactctttttttttttttttttgagacagagtcttgcttttgtcccccaggcttgagtacaatgactcgatctcggctcactgcaacctccgcctctcgggttcaaatgattctcctgcctctgcctcccaagtagccagttaaggcacctgccaccatgcccgtctaatttttgtgttttttagtagagacggagtttcaccattttggccaggctggtctcgaactcctgacctcagttgatccgcccacctcagcctcccaaagtgctgggattacaggcatgagccactgcgcccagcccacagcaattctttataaaaagatcagaggcaactatgggaagacattaacactttttgttctttgtagattgttaaaagcttgttataatttatttaaaaatctctaacatcaattcctagtctaaagaatgaacaaatgacacatttcttttccttagtcaataataatcttgtaagatggtgttcacgtgcttttctttgagggcaaagaaaacaccattccccagtgtttttcctgggcagtgtttgaatattatatgatactcacagcagagattttcctagtttggcttctgttgtaagcttgttttctgagtagatttaaatgagaagaacagaaacatatttgaaactatgactatgtataagagcatttattctcctataatgaaatcgtggaaaatgtttttaaaaagtgagcaaacaaaaacctccacaccattatagaaacacggttaaaaaactattgaataatctcaagcctagtgtgtaataattattaagtgtgtctaatttgttgtgctaagtgtcaggaattggtattgtggaaggatatgtgagatctcattttctccttttatatggcaggagtttatacagtatttacatctgtcattgatactttttatgaacagaagttttgtttacttataacttccacagggattattcatatggagcactggaaagatgtaacatttcatttgctttgataccttgtgtttattttaggtcgaaaagcatcatgaagccaagtggttattgttttgcttattcagtgtgaactgagtgagccaggtttgtataccaagtgattctcgtggtggacaataccaatatgattatgccaaatgcattgcttctgaggcatcactctttgggcacatatagaccctgctgatttctgccaaagcactcttcttaaagttccaaaacattaccccaaaacctctatagccccctattgccaacaaaattaaagcctttctcttcattggcattagaagcccctgtaacccattgcttttccatttccagcctctttccaaaattaccaaacaaactctgtatcctgcagccaccaaactgtactagttgtaatatattcactaagaacagtggtctctcatttgtctctcttttctctcttcttatatcagttagaatgtaacagacaacccagctaacacagaggctcatttttcttatgtgacaagaagtctgtagataaagagttgctagtgttttcttgggggttcagtgatatcacctctgtgattcagttgaccttcatatcatagttgcaaaatggctgccgtaagtacaaaaaccacactgactgctgggtgggaaggcaacagaaaatttgttcttggtgagtcttactcacgtcaaggaagtataatattttccaaaatgccccaccaaaggatttcctcttacatcatattagccagaactgggacatattatcaccctttatctggggtagaggcccacatttccacatcaaagggaatttgctcaatgcctaaatcaaactggaattcagttaagcaaagaagaaacagaggaatggtttttgggtaggcagtaaacactgtcagctacatctccctgaaagccatcactcccttaaaatatctttgcgtaatgtcatcagttacttctgaactttttcatccaatggacagtgtttattttctaacttacttgaactttttgtggggcttagccacaccctttttgaaatttatgtattcatcaaatacccactcatcacttactgtgtattagtcactctgctgggcaaagagaatgaaaaaatgagtcatgcatggtcctgaaccttcacaagtttatagcctagtggggcagacaggtgaataaataagtgcaaaagaatgttatagatactgtgataaaattatgtttcgtgggccgggtgtggtggctcatgcctgtaatctcagcactttgggaggctgaggcgggtggatcacctgaggtcaggagtttgagactagcctggccaacatggtgaaaccccgtctctaataaaaaataacaaaaattagctgggcgtggtggcaggcacctgtaatcccagcgactgggaggctgaggcaggagaattgcttgaacccaagaggcagagattgcagtgagctgagatcacgccattgcactgcagcctgggcaacaagagaaaactttgtctcaaaataaataaataatatgttttgtgggtttttttttttttctttgacagggttcttactctgtcacccagcctggagtgcagtggcacgattatagctcactataacctcgggctccctggctcaagcaattctcctgcctcagcctcctgagtagttggaactatgcaggctaattattttatcttttgtagaaatggggtcttgctaagttagccaggcttgtcttgaactcctgagctcaagcggccttcccacattgacttcccaaagtgctgggattacaggcatgagccaccatgccgggcttagaatgatgaatgagataaaatggggtacaaagaaaggagcagccatttctggatctcaggtgtgatgtctcttttcagggaaggacaggggtgatacagccattaataaaagcaatctcactttcctggttggttgtctctttgcctcctcccctggaataatacagacctctgtagaaaatcacaggcagggtagggatgacggagctggcctcctcccttcccttggcctgacaaatatgcatggaattcccaggaatgttcaagctttttttttttttttttccaaacttcagattagaatccaactcatgtagaatccatgtagaatccgactcaaacagaatccatcaggcatgagaattctggaatgcccttcctggtttatctacttcatctgtgttccatgaagggcacctggtctcacacctagactccgggagctccaggtccctactctcttaggtttcagggcctaaccaatcaggatggcaagaaggatgtatttggggagatccaagcctgtctgcttggctgtagtgtaggactggggggaaaagaaaggcacagtaaggatcaaaacaaggctggagcagtaggtaaagatgagttcatgccaacgtaggaggcttgaagatgtttggtaagtcataggttcccaaactttccagctcactgcatctgtagcatcttcgtaatttgttcatggtgccctcagccagaagacatacttcacaattccattcgttaagtaggtaagtctaaacaacatattagtggtcatttgtgaggtgtttgataggtggggctgtatttctctcaaacatttaaaatatcccacagcaaccttgtgagtttgttccctgtggtgtcccagggtgacctgatgggaaatttgagaaccatggtataggtcgctaaagatttttcatctggtgaattaaatatttgattttgtatttgagaaagcgccatctttctgtagattggagtaaaggcgtggtgggaggtaaggagaccataagttagtggtagtcatttaggagagaagtgatggggatataaaatgagacatactaatgagcatgctgctggatctaaaatatgttatggaggtagaatggagaggaggatttccttatcaattggtttttggagagaaagaaagagagaggttgattcctagactgtgggcttgggttaaagggtatatgatagcagacatgttgaaaaaacatatctttgggagaaagaataacattttttggcatgctgaatttgagacgtgcaaggatgagatggatatagggcattggagctcaggagcagatctgaaaaatataagttaattatgaatatatagattagggctgacaacataagagtagacgaaatggctcaggatgagtgtagaatagaaagaagcatgcccatatgtgatggtcaattttcttttaattttaatttttgtagagatggggtctcactatgttgcccaggctgatcttgagctcctggcctcaagcaatcctcctgcctcagccttccagagcactgggattacaggcatgagccaccatgattggtctggattccttataaaaaatattataatgagtacatcatgtttagagagccaagaaagggcagggtcctgcctaggagacagagccaggacaggtatcatgaagcttgtgtaaagtgatatgttttgggtggagccaagactcttcccctactgttgttctgttcaatagagaccctgggtctttctttttcgtttgtggtggcgccccctggatagagcctcagagaggcagcatcacaaagagctatgcaaggaattggttctgcaggggagacagtggagggcaaggtgtgggggactgcggggaggaggagggggtaggggagaggtggtagcacacagtgcgaggattctgtgccatgccagttcagccttatgttcaaagcagctgttctttctgggcttccaagagaggagcaccatttttatgcccacattgtaacaaacaatgagatatgtactggttaacagtatcaaatgcaatgcagtgattaaataaggagtggagaaaatctatggaatcttacaatttggagggccctggtgacttatctaaataccttttttgcaatagagcaagtcagaaccctgaggatctcagggattaacaagggagacagccatgtcaaacaaacaaaaccaatgcactgtgataaggtgtaaggcttaatataaggtgggataactttctctcacctctctcattcactaatcacttcctatcagcacctgtcactggtaggtggtttctgatgctccgaaacgcccaggtgcgctggcttccagcctagctcctctcctccctctgcgtgttcttcctgagcaatttcatccaatttaactatcacctgtagaccagtgatttctcaacctgtatttctagtttcctgacttactgagcttgagttcagcattttgaacaatggccatagtactgggcacatggaggtactcagtaaatgtctactaattcacttaaaagttgatcctaagtaaactgatgatgtaggagtaaatttggatctcaagtaaactgaagtttacacagtgagtaagcagggaaatactttccaatagatttgacataaaacttcaatttcttttttttttctttttcttttttttttagagacagggtcttgctgtgtcacccaggctagagtgcactgatgtaatcatggctctctgctgcagcctctaacccctgggctcaagggatcctcctgcctcagcttcctgagcagctgggactacaagtgcagtccatcatagccaactaatttttttttttttttgagatagggtctccctctgttgcccagactggagtgcagtggcatggtcttcggtcactgcagccttgatctcccaggctcaagtgatcctctcacctcagccccctcgagtagctgaggctacatgcacttgccaccgtatgtggctaatttttgcactttttagtagagatgggatttcaccatgttgcccaggctagtctcgaactcctggattcaagcaatctgcccacctaggccttccaaagtgcttggagtataggcatgagccaccatgcccagcctgcccagctaatttttaatttttttgtagcgatggagtcctgctatgttgcccaggctggtcttgaacttctagcctcaagtgatccgtctgccttggcctcccaaagtgctgggattacagtcatgagctactatgctgggtctaaaacctcagtaattaaccggaaaccagatgagagtttcactatgggaattgggttaggtgcagctaatcacagtgaagaatagattaaaatacatggatttgcaaatcagaatgcaggttctgctgctaactttgggaaattcagctaattctctgtgtctttgtttctatgctagtaatgctttattttaaaatgtatttatggttattaagatgtaattcacataccataaaatttatcgatttaaagtgtacaagtcagtgtatttacagactcatgtaaccatcatcactaattccagcgtgttttcatcaccctaaaaaacaccctcatgccctcattccccattccccattaccccagtttctggctactgctttctatctctatatatttactatactgtacatttcatacgagtggcatcatataatatatgtccttttgtgtctggctgctttctcttaagcataatgtttaaccataaaaaaagttagcataatgttttcaagattcatccatcttacaccatgtatcaatactttgttcctttttatggctaaataatattccattaattggatgtatcagattttgtttattcatcaattgatggacatttgcattgtttccatttttttgctattatgaattatgctgctatggacagtactgtatgtcctgcatggacattacagaaacttttctgtgtggccatatgatgactcaatgtttgacatcttgaggagctaccagttgcttttctgagtggctgcatcactctgtattcccaccagcactgtataagagttccaatttatccatgtcctggccaacactggttattgtccatcttttttattgttgccatcctcattgatatgaagggacacctcattgtgatttgatttacatttccctaatgactaatgatattgagcatttttttcatgtgtttatttgccatttgtatatcttctttagaggaatgtctacaaatccttttcccacttaaaaattgattatttttctttttattgttgcattttaagaattctttatacattctggatgttagaaccatatcagatatatgataggcaaatattttcttcaattctgtggtttgtattttcactttcttgttagtatattttgaagcataaaagtgtttaattttggtgatgtccatgtccactttattttttcttttgttggttgtgtttttgttgtcatatctaagaatccattacccaatccaagatcacaaaaattaaggtctgtattttttctaagagttttatggctttaggttttacatttgggtttttgatccattttgagttaatttttgtatatggtgtgagttagggatccaatttcattctttgcatgtgtacatgtagttgtcccagcaccatttgttgaaaagactcctcttttcctcttaaattgtcttagtgcccttgttgaaatacattggccatagatgtagggactcccaattctactccattgaacaatatgctcatgcttattctagtaccacaactataatcccagaatgaaaaggtgaattacatagaagaaatttctattctcaaattacttcataactcaaaagacttgtgggcaattcagttctgggttttctttcatctctcgttggaaaaaaaaaatctctgcatcaaccccatctaaaataactaaattgtatgcataaacctaaatttaaatactcatctgcaggtctcgtttatagaatcctacttatgttgatgatgtgggctttggcaatctctttctcactgtattctatgaaatagcttaaaaagtcaattatgaattgaagcattcaattattagaatgcataatactagtttaatttaaaagttagtcttcagtttcatgcaaaaccc

SEQ ID NO: 17 - DNA, 2376 bp, Homo Sapiens
ctccgcttccagcgtcccccagaacgcggagaggcagcctgagtcttactctcccaccacatcaattcccagcaccgtgggccccggggccactttattttttgtatttttttgagatggggtgtctctgtcgcccaggctggagtccggtggtgcgatctcggctcactgcaacctccgcctcccgggttcacaccattctcctgcctcagcctccggagtagctggggttacaggcccccagtccactttcttggagtctgctgtgtctgaccaaaaagcccatcttcgccacatctaaagctggaagttcatttgccagcgttgtttagagcaaaaagagatgggatctcgttattttgcccaggcttgtctcagcctcagtgatccattcacctcggcctcccaaagtgccgggattacagatgtgagccaccacagtcatctctctggcagctttgaaagcctatatcgcctgtttacatcttgtcagctacagcatctgaagtgttttctttcaaggagtatccaccttttgagatggagcccaccaactaatatggaagctgaaaaatgaccagctcttgtctcctcaaactccctggcagctggggagtatagatacacaatcgggttctgccagcccaacagacccactcctgcaccttgaacctgctgggctgctgacctgagaagcagggccatgcggaatccacagagcaaggtgggggtgtccaagggcacgtgcagccaaggggcacgtcattgctgcagctacatctggtttcaaaggcagtcgtttttaaagtgcctgcgactgccggcaggaatgtaaattagtacaacttttatggaaaacaatatggagatttctcaaagaactaaaaatacagctactttatgatcagcaatcccattgctgggtatctaccaggtactgggtatctacctaaaggaaaagaaatcattatattcaaaatctctgcactcatgtttttcacagcactgctcacaatagctaagatagggaacccacctaagtgtccatccacagatgaatgtcttcatatacagaaaatgtggtgtatgtacaccaagaatactactcagccataagaaagaatgaaatcatgtctttggcagcaacatggatagaactggaggccattacactaagagaaataactcagaaacagggagtccaataccgcatgttctcatttataagtggaagttaaacagcgggtacacacagagacacagtgtggaataacagacatcggggactacacacggtgagctgatagaagggggtgagggctgaacatttactactgggtaccatgttcactgttcagatgtcagggatgccaaatcccaggctccaccgctatgcagtatctgcatgtgagaaacctgcccctgtactccctgcttctataaaaaaattaataaaaacatgtttaatatgtaattttgaaaaataaaaaattttttaaaatgtgtcttacgtggggatatcagcagtgcaagccaccatgtctgtgcccagcagcagcagctgtgaagtgttcactgttgggaaaaaaacttctccactaccaacttagttccgccgactgggggcctgcaagttaactgatgatagattaacaggagaaacatgcattgcacctgcaggagtaccctgtagagagagcagctcccagaacgtctgggagtaaagagcatacattagcttaagtaaggaatccggggtatgttagggcatgaaaggatggagggttctgatgaggcttgtttatgcaatgtttttagaatggactggagcccacggtgagtgccactctgagtggagaccaggggtaggggcagggagcagctgcggtggccgaccctctaaaagctctgcactagtcagataagagaatttcagatatgatttctttctgcatcttctgaagctcatatgttgtcactttgaagtaatttctgtaccagtttgggaggttgttggtctcttcatacttaccttgcagtgggatttggaacactcttagtggcacagttttcaattctacaggctctcctattctgtaagttcctaaaatatttttacgaatatggtttactatacaaataatttatttgctttcagtagcctttatctctgaaaacaattactgcatttaaagacaaattgaaggcatgtaatgacgaaaatttagaagcacttccattataatcagaaccagaacaaggatgattactatttctgttcatatttaacattatcctaggtaatgtccttgacaagaacattttaagaggtaaaataatcacaaatgaagagacacaggcatttattatttgcac

SEQ ID NO: 18 - DNA, 5677 bp, Homo Sapiens
caagattaaaaagggtggggaaagtgatttatctcagggtagcttcctagcttctgctccagatctgagtgtgccttcaggaaagaaggaagaggccttgggagaacactgagtcttcaggaaagagtaactatttgtctgtcttttttttttcttttgttttctttctttctttctttctttctttctttctttctttttctttctttctttttctttctctttctttattcctctctccctctctctctttcttcctttctttttttttgatccagcgagacagactggattttttcttctaatttttttttttaatgaaacgtatttcccctgagtctcagcagcagagggccctggtccttgagtcacttccttgttgcagttctgaattcattattttattatagcttttgaatgactgatacatggtaggctctgatcaaccaaaaggttcccaataaggtgaagagaaagaaaaggagtttgatagttttccagattccaaaaaaattagctttcacaagttgccaggtgtcaagaatctgaacaggtaaccctctctcagcatatctcatctgtcagcaatggcttgtgaagatgcatgtgtaaacagtaggaacacagacttctgggagacagtacaaactggtgctgctgtcatttggaaccaactagaacatagctggcaaccatttctcctgtttcctttcttccactggcttcactttttttttttttttttttgagacagagtctcatacttgttgcccaggctggagtgcaatggtgtgctctcggctcaccacaacctccgcctctcttggttcaagggattcttctgcctcagcctcctgagtagctgggattacagtcatgtgccaccacacccagctaatttttgtatttttagtagagacagagtttctccgtgttggtcaggctggtctcgaactcccgacctcaagtgatctgcctgcctaggcctcccaaagtgctgggattacaggcagaggccttacatttttcactgtttcaatcctaacttcccacagacaacttcccagtaccacaaatattccccagcttcttccagtaccacatgagaaatgggcaatcttttttttttaaccacagataaaatatagtggataacaatgattagcatttgctaaggccaagccctgttcttagtgttttatgagtattatctcattgacttcctccaacaaccttcctgaaagatataattattatatcctaattttatagctgagaaatttgaggaacagagaggagagtaacttgcccaatgtcacacagctactaaagagcagagctgggatccaaaactgggtctgactgcacaacccatgcttttttaacctcacagttccgccagcgggccaagattttaacatctacgaaatgctgttaagaagtataatagttaggtttttatttcctttctcaatgttatatccccacctgagtagaaggactctgctgggtactataccaaactacctacctatttatttatttatttatgtttttttgagacagactctcactctgttgcctaggctagagtgcagtggcgcaatctctgctcactacaacctccatctcctgggttcaaacctccagagtagctgggattacaggtgcacaccaccacacctggctaattttttgcacttttagtagagacagagtttcaccatattgaccaggctggtctggaactcttggcctcaagcgatcctcccatctcaacttcccaaagtgctgggattacaggcatgagccaccgggcccaattatttaatcctgattatgtaagcagtttgaaggaaaactacagtgttctttgatttagaatagaaggcaggaaggccttccctgaaaaagtgacactgagctgagatccaaaggataaatagaaattgaggatgggggaaagcatacccagcagagggaacagtgtgtgcaaaggctctgagaaaggagcatggctcagctgaggaactgagaggccagtgttgttgttatactgagaagaagaaggaagtatctttattcaaaaaaaaatttttttctagacacggggtgtcactatgtagcccaggctagtcccaaactcctggcctcaagcaatcctcccacctagcctcccaaagtgctaggattataggtgtaagccactgtgcctggccagaagcatgttaggtactatagtgagacaggaagataatgccaggcctgggaggctgtattaagaatttaggtctttatcttaagaatgaagagaaagattttaagccttcaagtgatcagagttgcatttttgaaagatttcataaagctaggaggagaaagaattagaagggtctaggggatttgggtagcccagtctggagtttattgcaactgtgtagggaagtgatgatggtggcttgaaccttggataagacacaataagtgtgtggctcacgcctgtaatcctaacactttgggaggccgaagcgggtggatcacctgaggtcaggagttcaagaccagcctggccaacatggtgaaaccccatctctactaaaaatacaaaattagccagtcatggtggtgcgtgcctgtaatcccagcaacttaggagactgaggcaggagaatcacttgaacccaggaggtggaagttgcagtgagccaagatcgtgccattgcactccagcctaggcaaaaagagcgaaactccatctaaaaaaaaaaaagacacaataaatgtgaagttgactgagctagggttcctggccttggagacagtccagtaggggagagcaacttagaaataaaaatagtatattgtgctatgagcactactagaggtaaacccaaataactctggaagctcggagaaaagatagagggaagatggaaaatgtattagttatctattgctgcatatcaaattaccccagcatttagcagcttaaagtaaaaatgataaacatttactagatcacagtttctgtgggacaggcatgttggcatggcataggtgagtgtttctgatttaagatctcccacaagattgcagtcaagctgtcagctgccaatcccatctgagggcttgaatggggggagatccacttccaagttcactcatgtggttgttagaaggccttgatctctccctacataggcagccctctccccagggcttcctcacaacatggccactgacgttccgcaacgtgagtgaccaagaaagagagcaagagaaccaagagtatgtgagagaaagcacccatggaaagaagccacagtctttttgtaacctaatctcagaaatggtcttatcacttctgccatactctatttattagaagtgagtcaataaattcagtccacattcaagaaaagggaaatacacaaaggtgatgaatacacaaaggtgtgaatagcaggaggtggggatcattggggttcattttagtggctgcctaccacagtaggttccacagaggaggcagtacatgagtagttgtattaaagtttttcaggagcatttcaggaggaagggctttccaggcaaagcaaaggacgtgtgcaaagatacagaggcatggaagaacttcatgtgttcaggatacgctgttggccattctgtgaccaggcgagaggggcttggggagtataattgattcagctgagcaaatttgaagaggaggtaaagtatcattggttgaaagatgatacatttacttctttgaattctaccagcatacctgcatctttgtgaaaaatatatacatacgaatatattcattaaagcatcatctttatattagtttgctagggctgccataacagaggaccacaaactgggtggcttaaacaacaaatttattgtctcagaatgctggaggctagaagtctgagatcaaaatgccagcaggattggttctttctttttttatttttcacacagggtctcactctgccacccaggctggagtgcagtggcacgatctcggctccctgcaacctccgtctcctgggttcaagcgattctcctacctcagcctcccgagtagctgggactacatgcgcgccaccatgcccagctaatttttatatttttagtagagttgaggtctaaccatgttggctaggctggtctcaaattcctgaccttaaatgatccgcccaccttggcctcccaaagtgctgggattacctgtgtgagccactgcgcctggcctaagattggttctttcggagcacccaacttctgagggttgccagggaaataatttgttccaggtctctctccttgacatgtagatggtcattgtctcctgtcttcatattgtcttccctccttaaatgtctctatccaaatttctgcttctttaaggagaccagtcatattggattagggcccccactaatgatgtcattttatcttaattactttgtaaagaccctgcctctaaatgaggtcacattctgagatattaagggttagaaattaatcatatgagtttggggggagggtacacaattccacccatatgttccatgaaagggctatatatgcaaagcaacctgcagacacaaaaggaaccaagaaaccaaagaataaggaagacaaatctggtttgttggtatagagtattttattagggagcttacggacaaaagtatggtcttcggtggccacaagacaggtagttcttcacaccacaaaccccctgatccagggcttatattttgaatcatacatgctctgggagaaatgtgtagatggttatggacctcacagcctgtgatttatgcaatgacatcaggggtggttttgaaggaaagacaaaacttacagtgaataggtgtttctacataaagagtaataactagacatcttggaggtattcctggactgggggttagtcaggagtcacatggcagattagcatctaaaatacagtcactcttgtccccacaccataaaaatcatgtgatgggaaaagagtgaaaacaactaaatgctcatcaatagggaatgggtaaataggttatggtatatcataaaatggaatactatgcagctgttaaaaagatgtactgataagaatattttccattgtggaataatctccaatatattttattaagggaaaagggcaagttgccaagtaatctatggcatgccagtatttatgttaaaaaatggaatgtgttgtaatagcataggatatctctggaaatatacacaaatatacacaagaaactggtaatagtggctacatacgtaaagaggaactgggagcctgagggtcagcaataggagggagcctttttactatatactcctgttgtacaggttgactttgttaccatgggcatgtattactttcaaattaaaaaagaaagaagtaggtgcagcaaaccaccatggcaaatgtatacctgtgtaacaaacctgcacgttctgcatatgtatcccagaacttaaagtaaaataaaaaaagaagcataagggagcttggtaattttggtatgaagtatatttagtctgaacaaaactgaagtttatgtctatgtttttaaagttgatgttggctgggcgccagtggctcacgcctgtaatcacagcactttggggggccgaggcg

SEQ ID NO: 19 - DNA, 2145 bp, Homo Sapiens
acgtgaccttcgaccgatcggaagtgggggcgggacggcagcgccggggtgggctcagatcgccaggcagccgtgggtctccagggtccggtcgcgacccttcccttcccgggcgggatttggtccaggaccgtcgatggcgtcttgacaggtccccgaggcttggatgtggtcccgaggtgtccgctgtcggccgtttggaatctcagagggactgacgtggctctcccaagacggcaccccgaacagtcgtggttcatcaaaagcctggtcctgggtagcccctccctgaaatggctgttggttgggaatttgggggctgagcgctttgaaagggcattgggacagcatcacagaatgtcagtgtcccacatttgcgaggagtcccgggccccagttcttacactgcagtttgcatgaggatgggccaccgccacttccgcctggggttgtctggtgatgcccccaggagagacgcgcccactgaaaagccagcgtggtgtcctcttacacggtccttaacaaactctgggactctgggggtgcaggaaataccacaggaccgtcattactcccataccggctgagtcacaactgtattgcaggaggcttcttggaacgcctatgtaactttaatggaagtgaccaggtacagatcttctacagcaaggaaggaatcttagtgctagaattcagttgagcctttgagttggctcttcttataagtgagcaaacaagtaacaaggtttagggggcgcccatttttgtgttagcacgattgccctcgtgtttaatatttcccaagccctattatgataaggagttggacttaatgaagaaccatgttgtcaaacatcttatgcccatcttgaagttgtgaaggaggatgagcaccaagaaaaggaaataaataaaatccaatacgggccgggtgcggtagctcacgcctgtaatcttagcagtttgggaggccaaggcaggcagaactcttgagcccagaaattcaagaccagcctaggcagcatagtgagaccccgtctctacaaaaaatataattagctgggcgtggtggcaaacacctgtagtcccagctacttgggaggctggagtgggaggatcacctgagccctggaggtcaaggctgcagtgagctatgatcacgccactgcagtacagcgtgggtgacagagcaagaccctttcttggggaaaaaagtcccatataactttccttgatgaccccaccctcacccctcactgtgtcattatgccaagagagctttgggcattctaaagaagtatgaggaatacttgaccaataaccaaagtatagttatttatttgttaatgacttctttcctagactgtgagttactttagagcagagacttatttttccctgtatccctagggtgtggcacatagtaggtgcttagtaaacttattttgcattcaataatgccaagtagaataattcatagattatggcaaaataaaagaatttggcaaaattgcaagattgaagattgctttcagaaaaaatgttccaacccctgttcaaaagtacatagcttgctgtgttgttgaagtgccagcacgaggaggaccatgccaacacatccatttattgcccattctgggtgtgttgagcgttttaagtttgctatgcttgtaaaaatcaaggaatggcaatggtatcaactttcatgaacacagtcgttcagctgaaccaagtatcagtgataacttctgttttgaattttagaaatatatctctgaggttagaatgttgattcatgcatattccagctggctttccctatgagtataaatagggaaaacaaggctattggcccaaatgtaagttgtattccaaggtttggtccaaagaccagagaatccctaagtaggaagacagttttgttttcccctcttttactggttaactttgagcaggtcacttatatttgggggcacagaagatgaagatgaccctgagcttgtcatgttcactgttaattgttctactaacaccctagacttcatcatcttgttatagcacttatcacagttgcttttaaatcatcatgcagttatatgtttattgtctgccttttccactagaataaagcctctgctgacataa

SEQ ID NO: 20 - DNA, 4249 bp, Homo Sapiens
gtgtgtgtgtgtgtgtgtgtgtgtgtgtgttttacagccctttaaaatgataaaaaccattgttaactcacaggcctcataaaacataggctgttggctattattctccaacccttgatctagagaattttaaacattagaattttgttttacatttgttaagctttacgtcatcttcaaatgacaccaaaactcagaattatgatctgcatttaagccaattttaaaataaaataagcagtcaatgctgcctcatttattgaaattcagtagattttagtttatttcttagtagtcagagaattgatttatagctattcaccaaacattcttactaacgtttccttatatctaaatcagattgattctatattttgctttgtttgtaatcaatagccaatgaagaataaggagtattggaagaagcagtgagtcagctttaggtgacctggttcttgtctcaactttgtgatttggggagatacagtttactttccctgagccttaattcttgtgtaactgaagtctaacttaacttcttaatgtccttccagaactaaaattttattgttcattctaatcgttggactactcttgtgaagtttatattttgagttaatacagtttccaaattaacatacatttaaaaaaaaaagggtagtatttttccatttctctgtgtgcacttaggataaacagtgaagtatagcttataaaacaattagtttgagggctgagagtgtaagaggaactataccaaaagtcaggaaacctgagctcttaccctaactctgttaccaactttgctgtgtgaccttaatcaaaacacataacctggaccccatgctcctcaccagtaaatcaagggcctgaattttatggcttagtattcccttccaagctccgaagttgcgtgattctgtgaaaggcagtgattgattcctttgtactcatcttccttttgacctgtttcctcatgatatattggggaacaaatactaaaaagtgttttatactagctttcttgattgacatttccctataatactgatgaatttgggtgatggaaagtaatggaaattgttaaaagttctgctctcaaatctgagtctccttgccctgtgtgccaatgtttaaccatatttgctaatctaagccatattgcgaggatctcaaggatgatacttgtcaagagtttggggccttgagagcacagttttcaaaataatacttagtattttctgactatagagtacatttgtcttgtaaagtatattttaaaatacagagaagtgtgaagtacaaatatctcagtgctactatttaaaaaaacacaattagtatataaatccttccccatttttttgacagtataattttagtatgttaaacttggttacttctttctctcttcctccatcattttccctgcttcctttttcttttgtcatattcttaaaacaattttgcaaccacaggtacccacattgctggcactaccagccttgggctactaccgaggataatggagccagggccttgtagaagcacagaggaagtctagaactgagggggcctatgatacaggaagttcaggaggcagagtctcaaaggaacacctgcctttaataatgtttacagaagtggagaaaggactaaaggacttaaagacatgcaggtgtcttcatcctgattctgtctttgttattgcacaatgactataaaataatgacctaatttttttttttttctggcttggctaatggaaatcgacactagcgcttccccagtattagacttaatctaattccaaagtaacattcaagaaaagaaaaaccagtggaacaggatcagtaagctcagactctccatctccattattttagccttgaccattcttctctaatccttttaaattatcttcagtttccagttcaagttacattgcttcagttacagtttgtttgaccctgtattcagagctgcattatgattcttgtgggccctagatagttttgccatcttagaccccttcttccatacaaaattaaaagtgatattttacaattgtatctgtatgaaatgaatgtattaatattttagattaaaacattttgtttagaagttcagttttttcttatgaggctaaaaaaaattaaaacatttttgtgggcttctaaaaaactgtgggccttaggtactgtgcctaatggataagttggcattgcctgtattctgaagggcatcattggaaaaatagcagtcattattctgtccccttctcccaccaccacagtccttggagaagcctttgccactccatccaggagcactgcagtttccacggttatagatctatagacttgaacttacttccttcccaacctaacgaaaactcacaaggattacttgggaccattcatcctcaaaaaagataggaggcagtggtttgttttagtcttcagatatttttgttttggtcagtccctaatctgtagttttgaaactcgtgccacacttgaaagggaaacatcctactacctttctttcctctccatttcccacaaaccctttccttcatcatcactccctgcattcttacttctcagcatataaatacaagacccttctttctattatttgttgaaagctaggcctgtaaaatagagatggacagaccatgcatgtttccatgaagctatttaatgctgctcccagtcttctgtccataccattccttccctgcccctaggagtggggttgaggtctgtgacatgcagactgtaagcacagtcagaacctctgcagctctcaacccaacagaggagactgtggcttcaacatgccaacctgagcaggtctcctctgcattaccttcctcccatttctcttcctgggtcctgatgaggtgagctggaggaaccaatagtcaggatgccctggaattgatgttgctctgttttgtgctcacaaaacagccatgtaacacatgagcacctgagttgaagccatccagtcgcaagtcagcagacagcagttgatggaattctcagtagaaattcagtaagggtgcccaaattttattttttttttcacctatactctaccaatatatggtatttaggaaaacttcttttatccaagcacaaagaaaagcacacacatttttataatcatctgcttcatcagggtaaataaataatttaacaaatttgatcagcatctctagtttaccagtactttaatattagttttcttacaaattaatgtattttgcaatatttccagaaaatcactgtgggagaataatgtaatatactttaggatatatttcctgaccttttcttaaatggcttcatgtgctattcccccaaattctgctttctctattttcttttttatttaacctataattatactttctagtatattctgagtctatcttctaagccaccttacatttttcctggaacaagggagggaataaatagttgcctccactaaatcaggaaaaaataaaaatatcccaggggagctgtgattatgccaagagctctaaacagaagtttgagaaggtaaaaattaagttgtagtatctgagttgtttttattttcttcctttggtgtttatgaaggtattcataagaactttaatttcaggggaaaaaaatgcctgatttgctatttttgacatttcctcgtctcttaagaagtcagttaaatatgttttcatagtttatattcctgtttcatagattactgtgaaacatgtatttaaacctatgaattataaaatagtatttagattctagcgtgagttaaatagattagtcatatatcttttagatttgtggatttgacatgtaaattatgtgttgtgtataagtaagttagttactaaacatatggcatggttattgataaacttgttgctatttttttccaaatgctatcagtgtttgtggacttttaaaaattagtttgaattttggaatgttctgtgataaaatgtaatttcaactattttgtacatttaaatatgccatgttgtatatgtctgtatttaaaaatgttgtaaatacctgcattttaagaattatgaaagattttcctcaaaaatgacagaactctccatacttaattgtgacacattataagatatctgattttaagcttttggattttgttctaaaaattaagtttaaacatgctgaaaattccataaaaataaaattttgaaaataaagtg

SEQ ID NO: 21 - DNA, 7614 bp, Homo Sapiens
gaacatttggacacaggaaggggaacatcacacactgaggcctgtcctggggtgggggaaggggggagggatatcattaggagatatgcctaatgtaaatgacaagttaatggatgcagcacaccaacatggcacatgtgtacatatgtaacaaacctgcaggttgtgcacatgttccccagaacttcaagtataataaaaaaagaaaaaaaaagaaactcagtaaaatgaataaagcagagaaaataatcagtgaaattgaaatgaaacagtagaaattacctaaactgaaatggaaagagaaaataaactaaacattaaaatgaacagagccttagagaaaagtggaagctataacaaaagatctaacgtttgtattattgaagttctgaaaaaaaaaataggtaggaggggctgaagaaagagttgaatgtcataatgactgaaaaaaattccaatttggtgaaatatataaacctatagtatgaagagctgaattaaccccaatcaggaaaatctgaaagaagtggacactaagacacataataatcaaatttctaaaaactaaaaacactgaaagaaaaccttgaaaacagcaagagagaatgagaacttaaatatagaagaaaataattcaaaacacagctgatttataagccaaaacaatggaggccaataggaagtgagatatttttcaagtctgaagctaaagataaccataattctataactagcagaattatctttcaggaataaagggagagtccagacatcctcagattaagaaaaactaagtgaatttgttgtcattagaacaatcttttttttttctctttctctttttttttttttttttttttttttttttttttttgtcacccaggctggagtgcagtggcgcgatcttgaccactgcaagctctgcctctcgggttcaggccattctcctgcctcagcctcctgagtagctgggactacaggtgcccaccaccatgcccagctaattttgtgtgtgtgtgtgtgtgtgtgtgtgtgtgtgtgtgtgtgtaattttggtagagacggggtttcaccatgttagccaggatgatctcgatctcctgacctcgtgatcctcccacctcggtctcccaaagtgctgggattacaggcatgagccaccatgcccggccagaacaatcttaaataaatagctacagacagatttctaaacaaaaaggaatgaataaaagaggaacattggaaaatcaggaagaaataaaaagtggaaaaaggaaaaatacaatcaaatacatacattttattatccttttgatttttctaaataatgttaggtacttaaaaaaagtgtgatactatatgatttgactcaaatatatttagaagcagtatttgaaacaattataaatggtggaggataaaagatggtaccaggatataaaatttccaaattttactcaaattggtagaatgctagctctagtagacatgacaaattatgtatatataatgttttaccaagaacaaccataaaaaatctatataaattcactcaaaagcactatggataaataaaacagaaatttaaaatattttcgagaatctctttttgttaccaacaacaggccattttggttactgtggctttatagtatagttaaagttgggtagtgtgatgcctccatctttgttctgtttgcttaggactgctttgctatttgggcttcattttggttccatatgaattttagaatagtttttttctaatcctgtgaagaatgacattgatattttgatgggaataacattgaatctataagttgctttcacaagtatggccatttacacaatattgatttttccaatctatgagcatagaatgtttttccatttatttgtgtcatctctgatttctttcaactgtgttttgtagttctctaactggctagccatatgcagaagatagaagctggacccttactttttaccatatacaaaaattaacccaggatacattaaagatttaaatgtaaaacctcaagctataaaaattctggatgacaacctaggaaatacacttttctacattggccttggcaaataatttttggctaagtccccaaaagcaattacaaccaaaacaaaaatagacatgtgggacctaagtaaactaaagagcttctgcacagcaaaagaactatcagcagagcaaacagacaaactacagaatgggagaagggagaagacatttgcaaaccatggatccaacaaaggtctaatatccaaaatctatagggaatgtaaggaaatcgataataataataataataacccccattaaaaatggacaaaagacatgaacaggctcttttcaaaagaagatagacggccgggcacggttgctcatgcctgtaatgccagcactttgggaggccgaggtgcgtggatcacgaggtcaggagatggagaccatcctggctaacacagtgaaatcccatctctactaaatacaaaaaaattagccaggcttggtggcgggcgcttgtaatcccagctactcgggaggcggaggcaggagaattgtgtgaacccaggaggtggagcttgcagtgagccgagatcccgccactgcactccagcctgggcgacaaagcgaagcgagactccgtctcaaaaaaaaaaaaaaaaaaaacaaaaacgaaaaaagaagatatataagcagccaacaaatgtatgaacaaatgcccagcaataatcaccacagaaatgcaaatcaaaaccacaatgagatatcatctctcaccagacagaatagctgttattaaaaagtcaaaaaacaatagatcttgatgaggttccagagaaaaaagaacacttatacactgtcggtgggaatgtatattagtccagccactatggaaagcagtctgaaggtttctcattgaacataaaacagagctaccattcgacccagcagtctcattactgggtatatacccaaaggaatataggtcattaaaccaaaagacacatgcactcatatgttcaccactgctcttttcacaatagcaaagacatggaatcaacctacatgctcaccaaggatagattggatgaagaaaaattgatgcatatataccatgaaatacgacacaagccataaaaatgaataaaatcatgtcccttgcagcaacgtggatggagctggaagccataattctatacaaattaaagcaggaacagaaaatcaaataccacatgttctcaattactaatgagagctaaacattgagcacacatggacatagatgtgagaacagtagatactgtggactgccagtgagtggagtgggaaggtgggttaaaaaaccaccaatcaaatgctatgctcattaccaaggtaatggaatccatactccaaacctcagcatcgtgcaacattcccatgtaacatatctgcacatgtactccatatatctaaaataaaagttgaaatttaaaaataaaatactaataattatacttcacagaaagtatataaattaattttaaaatctcaaataacatagaagaaagcagaaaaaaagagatacaaaatagacgagaaaaaaattaaaatgatacataagctctacagtataaataatttaaatttaaatggtctaaatgcacaattaaattaaagaaattgatggtgtagatttaaaaaacaggacccgagggtatgctttttataagaaacagccttcaaatataatgaggaaagttaaaagtaaaaaaatggggaaaaacatatcatataaatattaatgaaattaatcaagagtgattacaataatattaccaggatagagtgaaacattatttaatgataaaaagtacaattcaccaagaaaagtagcacttctaattatgtatgaatcaaacaatagagctgtaaaatacatgaagcaaaaactgacaaagctgaaaagaaaaataggaaattacactattacagtggaaaactttaacatttctctctcagcaaatgatatagaaattaggcataaatctgcaatgataaaaaactcaacacatgattaaccaaaaggatctaatcaacagtagacaatgaataatacacagtattttcaactgcctatataaattatactaaattagactacatcctggaccagaaaagaaacctcagcacatttcaaagaattaaaatcatacacagtatagtctccctctacaatggaatcaaactagaattcacaaacagaagagctagttatagtggcatgtgcctgtagtcctagctaccagatcagctgagagaataaatcaatgaaattgaagagagaaagaataatagataaattaaaatgaatgaaaatatggctctttaattatcaataaaattgacaaagatctaccaaaatgagaaaacaaagagagaagacacaaatcatcaacattaagaatgaaacagaggagatcactgtggactccacagatattcaaagatcaattagaaaatactgctgataaacttacacacatgaaatttgaaaacttaggtgaaatttaccaatttcttgaaaagcaaaatgtatcctgactcatctaatatggaataggtaatttgaatggtcctgaacaggtaattaacaaaattaaatatatgtattttttctaattaaaaaagataatatccaggctcagttttcactgagggtttcttacaaatattcagagaagaattaacataatctacacaaataattttcaaaaaatagaaggcttcccaactcttattataaagttaatattacctgataccatgaccaaaaatagcaatgaaaaagaaaactacggatcaatataaatgcaaaaattcttaacaaaatattataaaatagaattcagcaatatataaaaagaattgtatacaatcttcaagtgagttttactgtagggttgccaagatggttcaatactaaaagatcaatgtaatccaccatatgaaaaggtcaaaaaagataaatctcatgattatatcatttgatgcataaaaagttttccaagattcagcactcatttattataaaactctgaaaaataacaggattagcttcctcgcaaaaatcatttatgaaagatctacagcgagttattacattaaataataaaagattgaatgtttgagagcaacacaagggtatttaccatcactgttgctattaaacatagcaatggaggttctagaaagagtaataaggcatacgatggatatcaattgttaacacatttgaaagaaacaaagctgtctctatctgcagatgggaaaaggtatgtgtaaaaacctatgaaaaaccaacagaaagaaaataaaatctggaattaataaatgagtttattaaggttacaggatgcaagaaaaatgtgaaaagtcagtcttattggtatatactaacagtgagcatctggaaacccaagtgataaacacaacatttacaattacagaaaaactgaaatgctgatgtgttaaactttataaaacctaaacagcacctctagctataagtttcaaaatgcacatgaaaaaaataaagatccacaacctacgtaaataaagagacatactatgtttgtggattgaaagactcaacattgtaaagatatctattttcccaaaattgatcttcaggttcagtgcaattttaattaaattctaggagggtttattttattttattttttagaaatagacaagcgttttataaaatgtgtatggaaaaaaaaatatactcaaatatctcaatcatgaacaagaagaataaagggaattgttctacctgattacaatacttattatatacatacagtaatctagactctgtagcattggtggaaagatagaaccataggtcaactgaatagaagaataccatgcaatggtcccatgcaagggtgacttactgttttttgacaaacccacaaaaacaattcaatggaggagaaatagtcttttctataaatagtgctgggacaattggctatttctatagatttaatgtttatgtcttcaccacactgatatatttaaacctaatccacaatgtaatagtatttggaggtggggactttggaaggtaattaggtcatgaggtctgaaccttcattcacaggattagtgcacttataaaagggtttcagagggccccctcaccttttctgccatgtgaggatacagtgagaaggccatctatgaaaatggatggaggccttcagccactaattctacaagtcttaatttttgacttctctgcctgcacaactctgagaaacaaacttctgttgtttataagatactcattctacagtattctaacagtctgagaggactaatacatatatccttaggcaaaaagaattaacatcaacctaatcttcacacattaaacaaaaattaatgcaagatggattatagaattagatgtaaaatgtaaaactataaaatatctggaaagaaaccatgggagaaactcttggggaactcatgcttgatgagcaaatttagatctgacacaaatattatgatccatgcaatctttaaaagatgataaattatgctttgtcaaaattagaaacttctgctttgtgaaagaccatgttaagaggataaaaagacaagttacaaactcaaagtatttgaaaaaccacataactattaaaggactcatatctggaatatataaagaactctcaaaactcaacagtaaaaaaaaaaaaactgtaaagaaaaacaaaaactaaaaacgagccagttataaaatcggtaaaagcatgaacatatattttaccacaggtgatatccagaaggtacatgaaaacatattcatcgttattggaccatcaggccagcataaagaaagaccatggtgagatatcactacacacctactggaacagctaaaagaaaaacaaaacaaaaaacactcatgataccagatgttggtttgaatgcggagaaactagattccttgtatgttgctgctggctttctaaaacaatactagaaaaatagttttgctgttttacttttaatgtaaacttacgcttattacattatccagcaatcacacttatggacttttttttaaggaatggacacttgtgtctttacaaactctagtacaaaattgttcatagtagcattatttacactagaaaaaaatctgaataaaatttctcataatagactaatgaataaacaaactgtgatagaaccataacatgaaaaattactcaataataaaaattaaataaacaagaaactattgatctatctaatgacttgaatggatcacaaggaaattatgctgagtgaaaaagaagaatccaccatcaaaatgtcacatattttgcagttctatttatgtttgtatttatttatttatttatttatttatgagtatactttaagttttagggtacatgtgtacaatgtgcaggttagttacatatgtatacatgtgccatgctggtgcacgctgcacccactaactcatcatctagcattaggtatatctcccaatgctatccctcccccctccctccatc

SEQ ID NO: 22 - DNA, 2768 bp, Homo Sapiens
atttttgaaatagtatgcaagtcataagcacagtttcaataaaacacgtattctggaggtgcgtggaactttgtattatttgtagttgagaaaggcaaactttgctgacaaaccagtacctatcacaaacgaacacaaaaagtagctgttactgtgcaggctgtctttaactttcatttcataaagggtacattattgttaaactctactacatggtttggggagaaatccagtggttttatttaaatgaacactctcacactgccttttgatcaactttcaaagtattttgcagatgcattttgagcatgaccatttttttccccaagtaaaaacaattgtgcgtggcctccatataactcagaaagcatgctcttactacctatgcaagcaaacaataaaacatatagacatgaaatgttaagtcttaaaaaaaaaaggcaacaattatggagctctatttttaaatttgtgattttcaaaatatggcttactcatcattgtgtagaagagcatgaatgcgatttcttgttttgctctgcatatatttctctgctgtttttctgatcattggcgagattgtaaagtattttgcaagcagaagtggaattggatatgttgaacacacatcattggtgtacatactgtatttagcctgaagactttcctaaagtgttttgttctaaaaataacctgccattttctatagattttaattttttatatcttcaagggttctattttggtcacaaggaaagaatgtggcttctaatagtgctaagaattaaaagatgcttttatagagacttagagctattttgaaaagctttggggcttcccagccactgatcacaattagactaagcccatggaatttctgggagtgttgtgcagtggattcggttctagatccatcttacatttgtttagtgtttcccaatttttgggagaaggggtgcacagcaaatttgagagacttttttgaatctcacacatgtattttcctcaagattcttttaagcctcttctgaatgacttgtctgagatagtgaagacccacattaactagaatcagctggggaactttaaaaaatacagtgcctgggtcccagtccctagcttttgatctaattcatgtaggggtgggatccaggaattaccatgtattttaaaagcttctgggtgtttctaatttgcagacagattgagaaccactatgatacgtcatccctttactgagaattatggcgagaatcactgccatttgaattactcaggagtgactgattcctcagttgtgtaggagaagcagaaaaaataagaataaaaagaattgagagatactgatatcaaactcccatttgaaatacaagggcccttctgattcaaggcccagttggggagcttggaccatgttgtgaatggcctagcactcgccagtctggtggaaattggtggtcttagttgctggagcaggctgagtgtccccgcggggtttgcatctgtccccagaaccttttccccaggcccgtgggggaatagggaagtcactctgagctagaaattgtcgaagaagaaaagaaacaaccttcctagccttggaaagcctgtccctgcttttgatagaattattgcctttttgtaggaattacagtagcaaaccccaggctgccgctgaatttcctacttttgctcattctctaggatagttcttatccagaatgtggtttcaggaattcttttttttagtttgaaaatgaatgtgaaacattttctttggtgtcttttttttaaaaaaaaaaaacccttattgctattttttcgtgtttttgttttgttttgttttttgtttgttttaccattaagtaatacacatcccagaatttggcactctgtgttaactgtggaggcaaataaaatttagttttaatctgtggtgagctgaatgcactacaacaccttcgaagtaatctgatggtttcattctgtcgagcctcatgctgcctacaaaacaccacaatttacctggtgttttcaacattttaaggaatgaagatacaagtagacatgcaagttggaaatgtttctttagaaaggccatccagaataatgatatctgttgcagtcgtccaaatgcaatatgaaatttcctaggtgctattataaacggtgtggtgtcataccaaatgcaaaagcagttacagtatttccgaagttggagttctctttgtaggcctttcaaatacgtgtttgcattccatagaggtctgctcaccaactgtgcctctcaccactggttaaaattgaatttaagcctcattgacataagtcgtttcttgattgaactcttcagtttttacactggaatttctgtagttgtcttgaaagctgcatgtcacatcactgtacacaaagtgctttggtattactcatgcaccgtggatagtgatttctgtgtcgttttcattttcagttgtacagtaatatggaaggcaggatgtctttcctagaggctggaagaaaagtgtatcgtacattttaaatttattttagaacaagtgcatgagatgtgtcactgatttctgttatttatttgtatgttttattattcaaagtgtatgcacttttaagaagcagaatttatatttttacgtttgaaacgttttatttctgaaacagcgttgattatatagtatacagttggaattaagagaaaagtggaaaatgtaacaaaatacaataaatttattacaagatgtcctcttcaa

SEQ ID NO: 23 - DNA, 9392 bp, Homo Sapiens
gtggagcgacagcgacagagccttggagagggaggctctgctcaggatttgtccccagtgccttatttagttcacttggtgaggtcatgttttcctggatggtgttgatgctagtagatgttcttcagtgtctggacattaaaatcttgggcatgcagcaccatatgagaagtttaaaaaataaaatttaaagagagaaaagactcagagaagtaccaccttgacagccttcaacaagatccaggagaattttctggattactagccacagactctttccctacccttattttctctcaaagatacagagtctttctctctgttctaagccacctaaagctgggagaagaaagacacaagcacctctggccaccaccactatgactgccctggatcagacctgaagctagcacagcacaggtcttgctcaagtcctgctgcatgcaatttctgacgactccctatgttcactcaaggcctttggtctctacaattagcaggtggcaaagccagacaggcctgtgttctttcctttagggcagtgagatccctcagtccctggctgggtccagaagtgctattcagaagtcagggctttggccactttttaatagggttttttgtttttctcttgtaaatttaagttcctcatattgaatattagatctttgtcagatacatagtttgtaaatattttttcctcattctataggttgttcactctattgataatttcttttgctgagcagaagcttttaagtttaattagatcccacttgtcaatagttgtatttgttgtttttggtgtctttatcatgaaatctttgcctctttctatgtccaggatggtattgtctaggttgtcttccagagcttttatagttttgggttttacatttaagtatttaatccaccttgagttgatttttgtatatggtataaggaagaagtccaacttcaatcttctgcatatggctagccagttatcccagcaccatttattgaatagggaatcttttccccattgattgtttttgccagctttgtgaaagattacctagttgtaggtatgtggtcttacttctaacctctctattctgttccactggtgtatgtgtctgtttttgtactagtaccatgctgttttggttactatggtgctgtaggttagtttgaagtcgggtaatgtgatgcctcaagctttgttctttttgcttaggattgccttggctacttaggttctttcttggttctatatgaatttttaaatagcttttttctacttctgtgaagcatgtcattggtagtttaataggaatagctttggacagtacaaccatttaaatgatattaattctttctctccattaagatggaatgatttttcatttatttgtgtcttctctgacttctttgagcagtgttttgtaattttcattgtagagatttttcacctccctggttagctgtatttgtatgtactttattctttttgtggaaattgtgaataaaattgcctctctgatttggctcttagtttggctcttcttggtgtataggaatgctagcaaatttcgtacattgattttgtgtcctgaaactttgtggaagttgtttatcagcttaaggagttttgggtcacaactatagggtttagatacagaattatgttgtctgcaaacagaggtagttggacttctctttctatttaaatacgctttatttctttctcttgtctgattgctccagaaaggacttctaatactatgttgaataggagtggtgagagagggcatgcttgtcttgtgcgggtttcaaggaggatgcttcaagattttgcccatttagtataatgttggctgtgagtttgtcataggtggcctttattattttgaggtatgttcctttgatacctcatttattgagaatttttaacttgaagctttgttgaattttactgaaagtcttttctgcatctgttgagacaatcacgtggttattatctttagttttatttatgttatgaatcacattttattgatttgcccatgatggaccacccttctattccagggaagaagcttatttcactatggtgaattagccttttgatgtgttgctagattcagtttgcaagtattttgttgtggatcattgaatggatgttcatcaaggatactggcctgaagttttctttttttgttttgtcactgccaggctttggtatcaggatgattctggcctcatagaacaagatggggaagagtccctcctcctctatttcttgaaatagtttcagtaggactggtactggctcttctttgtacatctgttaaaatttgttaatctatcaggtcctgggctttttgggggttggtaggctatttattacggattcaatttttggagctcataattggtctgctcagagactgaatttcttcctggttcagtcttgagagagtatatgtgtccaggaatttattaatctcttctagggtttctagtttgtgtgtatagaggtgctcgtagtagttactggttgttatttttttttctctggggtcagtggtaacattcccttcatcatttctaattttctttatttgaatcttctctcatcttctttattaatctagctagtgccctatcttagtaattttttcaaaaaaccttgattaagtgatcttttgaacagtttttcatgtctcaatttctttcaattcagctctgattttagttatttcttgtcttctataagctttgtggttgagttctccttgcttctctaattctttcagttgtgatgttaggttgttaatttgagatatttctaattttttgatatgggcattacttcttatgccctactctaaattttgttcttctagaaaactcagaactatgctttctaaaccaattcaaactttctcagtgaatcaacctggactccctgaggccaagttagcaattttccattacacttggttctctttctctgtaagaatatctaatgcaacaattcaagtgtttctttccctcctggtaatgcggggaactccttttggctgagaccaagacttaaaaccttgttctttcaacattaatgaagatctatttagaaagcctccatttttgcagaaaagatatataaacaccaatgaaaatcaatatgaaattatatgacatacaattatattgtggaaagactgaataaataagtgaactaagctctaagaaaaaaagatgatgatataaaatgatatagaagtaaaaacctgggctggtatagcataattaatgtatcagtaaagtatgtacattgtagaagtggcaggaagacagcatagagagtgagacctgaccaaaagctttaaggaaagttctatacccttaaacgagattaaagtggactcaggaaaacatgggccacatgaggggaaggacacatgttccagatgagccaaagctcagagcatctctaccttctccaggaggaaaggggaggcaaagcagcaggcagaagacagcacggccaggtcagcacagggcacccaggccaagccaggtgggctccatcatacaggtagtgaggagtcactgccaggtgggctttattcattagtttgttttgtttcttttagtaacgaagacacatgatcaaagttgacctttgtaagtgttgctgcagctgaacaaaaagatggataagaccagtgttttaaaaattatgttgtatagagcactagcctcagtgagatattagtagaacacacaggcacacacacacacacacacactcacactaagcccagattattctggcaaatgctgggttaagcaaactaaaagaaacatctttagtgctggacttctcagaacctggaatgtcgctatatgactcataaaacagcaaggttaagacagaacatgtcattttttcccagaaatgctgaaacactttccttcccttggcttcagtgtcaccttctttctcctggttctccatcaacctctttggctgatccttcttgatttccttcttgacaatctgctgctgctcagccattctcttttcattccccatggatttctcaagtgcgtttctattcctgcattttaaactttccttgtttttcctgacacctctccttgtctgactcacccctgttctaaggcaggtgttccatctgtgtgcgcttttggcaccctgggatgctcccagcatgttccctgccacactccatcaggttttctccgcagactctgtgagggcagcagccttgtctccaccattccttcaatgctcagcacataacacagaagctgactccataacatttagttggccaactgagactaaatatatgttcctctagatcttaaaaagttacagaaacatagcacaatagacaaaatattctctttagtcaggagttctctatatatgtacaacagtttgaagtcattattaaagcaaagtgaaagagaaactgtcacagaattccccaagataaattattttgctttagtcttcatcatgtgagataatcaagaccatgtgttattgtaaatatttctagcttacaacacaacgacctgatttttattgtgtgaaataaccgcaatataaatcagttaattaaaaattgcataaataatcctttcaaataaaattctgcctaaattttacattactcatatgttcaaatgataatgagctcataggcttttccaatacctcagtcaaaacactgtactgattccagctgtgggaatagtatctgaaagttattttacagatggggaacaggtacttacctgacattggcctttacactactgtgcccttttaggtcaggaaaaagctgttcccttaaaatcctaaaatctcttctgtcaggtctgaagggtgggtgggaaacacagttttacaaattttagccacagatgttttattccttgcttaaagcagtgactagataaaggccactagaagagtctccaatgtttctttagaagcgtgtgcctgagaacatcttccagaaacactcccttgtctctgcccaaaatcaccttaggtaggaaaatcaaaactcagcaggctgagggatccaaggggatcactgagctctgagtcttatgagagaagagagagaggtctaagactttttgtgtataaatttatgggttccaagtgtaattttgctgtaagcatggatggcatagtggtgaagtcagggcttttaggtatccatcaccagaataatgcacattgtacccattaagtaatttctcactgttcaccccttccatcccctcaccctgctgagtctccattatcattccactctctacgtcaatatctacacatcttttagcacccgcttatgagtgatacaatatgatgtttactctgtgtctggcttgcttcacttacaacaatggcctccagttccatccatgtgtctgcaaaagttataattctattgttttttatgcctgaatggtatttcattgtgtatattttctacattttctttctccaatcatttgttgatgggtatttagtttcattttatgtctgtgctactgtgaatagtgttgcaacaaatacacaagtacagttatctttctgatacattgatttcttttcctttgcataaatactcagtggtgggattgctgaatcagacagagccaatagatgatcagtaatggtggccaatcatcagctagaaagaaagtgcttagcagggcttgaaaacaccaaaactctgagaccactgaccttcaaaaacttcaacagccctgagtgaaaagtccaaacacatttatctaccattcgaagacgctttattgtctgtcctctgcacatctcagtagtctctttttaccacactgtctatatactgcatgagccatttatatgaaactatctgacactccaaggcatcttgtactatatattcaactatgtatccctagtacctagcacagtcctggcatatagtttgctactaaacttttacagaatgaaggaattatcttgtatccaggttccaagttttaaggtgattcttcagtaaaaaaaagtattacagttcacaaataatctacttccctttttacaaatgggatcaattttaatcttatctcctaataacattactttcatttactctgatctaaatatactgtcctaagagagcaataagaaagagagttgaagctggagtttgaagaattgtacatggtcctgtgataccctaccttgttttaacctgagtgactctctcctagcggagagagagccggacagactccattttagtttcttcacgtgcagccccctttaccttccacccttaattgcataactagtgtaaactgactcaaagcaggtccaggaatgcacttagtgataagatattgaggcaagctgcaccagctgctcctgggtacgcactcggtgaatgtcacgcaaaacccctgcatttctctctttgtgatagtttaagcccctgcacctggaactgtttatttgttttgtaactgctattgtaaccaattaatattttaactatttgccagctctgcttctgtaaaacttgtttcagctaaactcccccctcccctatttagaccacggtataaaaacaaaaccagccccttcctcggggccaagagaattttgagcattacatgcctctcggttaccggctaataaaggactccttaatttgtctcaaagtgtggcattcctctataactcgcttggttacaacagtccacactgtggcctgaggtgcattgcccacctgagcttcatctgttatgtatgtcagggaatataagcagggtgagagtggcctcatcagaggaccccagatctctggcttacccatctggcaagtgcacctctgtgagcaaagacttcagagccaggtgacaagaatggcccaagcagtccaccaggaaaacctgggcccagtgtacgtcaatgcagagcatcaagcatggtgtaacaggtgcacagttgcctactcctgttcagagatgactgcatcccacataccgtaaaatgaggaaatgcatagaagcagatgtaactgaagaagacagcagaagcaacaaggagggacaaccaggacctaggagggcaccatgccagagacgcctggaccccatgctaggctcagtgcctgttatactcttgggagccagcactttccctctccatcacatggcatacttgccattatttgttgtgtaaaatattgtccttagttttcacctttcctaggagacacaggcagagcctgtgacactacagcttctggcacacagtaggtaggtgcatcacaaacatctgctgagttcacacactcttgccttctcaaaacttcttgtcaagtcttcagtgaaaaggaattgctgattgagcaagaattaaacttctagagactcctggatccactgaagtttgagacaaggtgagatttgtttactgtcatattcctagctcataacatattgtagtcacttaaaaaagtttgttgaataagtgagtaaattgattcatacgtcatacttagctatatattttctgagtagaattgataaagttaatagtttaagtctagtataattttgctttactcattcaatgaacctgacaattcaaataggtgccaggcacactgctgctgaagaaaaagaggtataagatataatttctgtctacaagaaagccacagtctaaaaagtagaaacatatgaacaaatcgtaacaataaataggctaaattcaaaatcagaggagtttgtttctattttaaacagctctagtcaggaagtgttagagagttctaaacaggaaatattccaacacatcatctaagcatgaagcaggagacacccataattgagtttgctgccaccaaccccaacagcaagaattccagtcctgctgctgcaaagtaagtgtcactctgattttattgctgctgtgtaacccagttttagactctctggttctcacttaatgttctaaaaaagtattaaagagaaaattttattctggtgatgagcccatccactgcagccatctcaacatcataccaattataagcctatcatttaaaaagaaagctgttagtttaacttatttatccaaatatcagtattacataaacatatttgtcatcagactttggacttatgggttaaatagcatataaatatgattagagccttaaagtttacacttctctggttcgctcaaatttttttcaaaatagcatatgcctttctaaacaatggttagtatatttttcaaaatgaacattaaaatgtatattttccaaaaacaaaatacagctcccattggtaaatgatgctattgagacacaacagacaacttctcttgggaaccatttaatcagtgctcacttttgcactctttccagaaatgtcaatggttttgaaatatagaagtatattatacaaataaacttatacttattcagtattgtgcaatatttagtatttcttctagccatctcttgctgaatagtaagccattccaaaacttacggaattatttattgtttaatattgtttattgttattatttgtttagtaattttaataacgttatttctcatggttttgtgggttgatgggcactacaaaagttctcttttggagtctttcttgcagttgcggttggttggctgctgctgaagtcacctgaaagctcaattaggctaaagagtctaaacgggtcacttacatggctggcagtgcatattggctgctgagtgtgatgcctatctgacctctccatgttacctggagtgctcacaacgtggtagtttgtcccaagacacacaggcaaatactacaaagcttcttagggcctagccttggaggtcctagaatacgacttctgctgcatcctattggaaaagcaagtcattgtgaccagcacagattcaagaaatgggagattcgactctacctgtcaatgtaaacagcagcatgtgcatgcagggaggaaagaaattgagggcatcatcttgaagactatcatatcacaccattattccaactagtgaacattatgttttagatgggtagtactagctactcatctgtcccccagaaacccaagctaagcatggacatattgaagagaatgtcaacaccattaaaaaaactctagaaaaatcacatgtgatgactgaggttaattcagtctgtcaactacatcaatataattgccttcttgtaaccctaagtatggtgaagcagaattgaattctacaaaagtctttcatctgttttcctatggaataattaacaaacccaataaatgtataaatagc

SEQ ID NO: 24 - DNA, 1750 bp, Homo Sapiens
cagatcccttgcccgtttttactttgtattgtctttttattgagttttctgaaatttttattctggatattgtctttttaatttattgattgtgtcctttgaagcacaaacttctttaattttcatgaatttcaatttactcttttgtcatttgtgctttggtgttatatctaaaaccattgcctaatttaagatcccaaagatgtattcctctaagattttatagctttttaccccttacattgggatttttgaatcactttgaattactttttggatatatcattaggaaggagttcattttattcttttctaatgtggctacacattttcttaatccagtctatcattgatggacatctgggttagtaccaagtctttgctattgtgaatagtgccgcagtagacatacatgtgcgtgtgtctttatagcaagctgatttataatcctttggggatatacccagtaatgggatggctgggtcaaatggtatttctagttctagatccctgaggaatcaccacactgacttccacaatggttgaagtagtttacagtcccaccaacagtgtaaaagtgttcctatttctccatatcctctccagcacctgttgttgcctgactttttaaatgattgccattctgactggtgtgagatggtatctcattgtggttttgatttgcatttctctgatggccagtgatgatgagcattttttcatgtgtctgttggctgcataaatgtctttttttgagacgtttctttttttaaatttcttcttttcattttcttttgagatagagtctcactctgtcactcaggctggagtgcggtggcacagtctctgctcactgcaacctccgtctgccagcttcaagcgattctcctgtctcagcatcccaagtagctggtaccacaggtgcgcaccatcatgcctggctaatttttgtatttttagtagagacagggttttgccatgttgatcaggctggcctcgatctcctgacctcaggtgatccacctgcgtcggcctcccaaagtgctgggactacaggtgtgagctaccgtgcctggtcctgacttcgttattattaaaaagattcctgagtctttcttattttaatagattcacttagtttattacaaattgttataggaaagtaattcaaccgtaattcttcttaattgataacttctgcatctcgccaatgttgcggtaattgatgatgatgatcttccggaagcactgcatgtttttcatatacctgctgaatattacagattatattctgttctatatacagattatattctgttttataaacttttattattaagtgcatcctattgtgttctaatttttgtataattgtatttcatggaaaatatttatcttaactctaatatatgtaaacctcaatacaagacacagaggatatattatctgcatatatatctcatgttattttcctgctaaatatgttcagaattagattgtataattctgaattctcttttttttttttttttttttttgagatggagtctcgctctgttgcccaggctggaatgcagtggtgcgatttcggctcactgcaagctccgtctcccgggttcatgccattctcctgcctcagcctcctgagtagctgggactagaggcgcctgccaccacgcctggctaatttttttttttttttttttgtatttttagtagagacggggtttcaccgtgtttgccaggatgg

SEQ ID NO: 25 - DNA, 12647 bp, Homo Sapiens
ttttcaaaagactccagaactggaagtaaaggagtaagacttaatggaagtgtgtggctgaactaaggagaactggggaaaactgctgaagaaggattagattcctagactcagatacccttgccccctcagttacatattgcttttgctggggtaggagatagaagtctgaagattcattatttgagtttagagagagagaaccagaaaacacagaggaaggaatcatcaacaaaataaccaacgaacatctccccaaataagaagatatcagtttctagaatgaaatagtctgcgtgttcaactcaatgaatgaaaatagaccatacaaagtcacagcaccgtaaaattttaaaacactggagacaaaaagaagactccaaaaacttccagagagaataaagcagatcatatacaaaagataaggagccagaatgtcttcagacttcaagagtaacactgagctggaggaaagccatggtgagtttagtcctcccacctcagcctccccagtagctgggactatatgtgtgtatcactctgcctggctaattttttgttttctgttttttgtggtgtttttttgtttgtttttttggtagagatgggttttgtcaccttgcccaggctggtctcaaaatcctgagctcaagcaatccaccacctcggcctcccaaaatgctgggatcacaggcatgagccaccacgcctggctagtttccacattcttaaggaggtaataccaataacagctgtaagaattaaatgaggtactccatatacaagtgtctagcattggcaacttttgcttggtctacagaaggtactaaaaaatattagcttcccaagagaagaagcagaggctgtttgtccaggccaagaagaacgtccccactaaaagaccacctgtccttcgagcaggagttaacaccatcaccaccttggaggagaacaagaaggctcagctggtggtgactgcacttaagcagtgaagatgtatcttaagttgcaggattaaagcattcagttataagatattaaaaatagggaacaggtgtggtggctcatgcctgtaatcccagcactttgggaggccaaggtgggaggattagaaactaacctgggcaacacagtgagaccccatctctacaaaaattttttttttttacctccttagctaaaagtagttttccttagcctgtggatgttttagctctttgcctaaacatttcttacagcccttgtaaatattctacatattaatgatttaggtatctgtgggattataaacccctaaacaaaggaagggactacattttattcatctttgcatctgtcatagtatctagcacagagcctggcacatgatgaggagttaaagatttaatgaatattgaatgtttgtatttgaaagcttacatggctaacaccaaatagttaatttgagaaacatcatggcacaaatattaacaacagagggtctttgttaaatatttcacagactaggaaagctagaatctataccaactatagtaaaatatacatacttaagctggtggttttatgagagtaataacaggtatcactaggtcaccagaagtctagtgaaaacttagagttacagctttggttaggctagaggcaagtgatttaggagctatgcttcttaagctcttttctcatttgtttatttattttattttattttttaaagatggggtttcgttatgttgcccaggctggtcttgaactcctaagctcaagcaatctgcctgtcttggcctcacaaagtgctgggcttacaggtgtgagccactgtgcccagccctaagctgttttctactcttcactataatttatagattagacaggttgtacagttgccagggagatgtcatggctaccaaaaaagaaagcataaacacattttaaaatacaccaagtgggccaggcgcggtggctcatgcctgtaatcccagcactttgggaggccaaggtgggtggatcacctgagctcaggagttcgagaccagcctggtcaccatggtgaaaccccatctctactaaaaatacaaaaattagctgagcatggtggtggacacctgtaatcccagctactcgggaggctgaggcaggagaatcgcttgaacctgggaggcagaggttgtagtgagccgagatcgcaccactgcactccagcctgggcgacaagagcaaaactccatcttaaaaaaaagaaaaaaaaatacaccaagtgttgggtagaaaagcaggtattaaacagaattcttagctttttgtttattgatttagtttcttggggcttccttcattacaggagaaaaatctcctacaccaaagtattcaagttctcagtaaatgtattcagaagtcctagtaaatacatgtatgtggtaagtcatactatattaactataataaagttcctcttgaaacaataaagattaatacatttaggaaagaataaaataaaacctatgcaaacatggaaaaaaatttctgatactagcaacacttacatggaagagaagattggatgtgaacatggataggtagaaataattagcaggtcagaactataattaaggtaaaagagattagattaaaggacatcattcgtctaaccctggacacaatcaataaactttccacaatcccagaacacatgtgaccaaaaaaaaaaggagttcattgtcaaatatacacaaacaagagctagacaccaactgtctaatttgaatcctaggaaataggtgggaggccaggcagacaataataatgtggaaggaacattgttttaactaagcagcttttggccaagttataactaagaaggttaaagtgttacacgtctgacaaagtccttaattagttgttttaaacaaaaacagtattttatgctcattaggtattttctagtatgagttgtatcattattctctattggaactttaggaagaaaatatattggagaggctgcataattagtgtttaaggcatagactctggtgccaggtttcttgaattcaaattccagctctcccccattactagctgtgagaccttagggatgttacttagcctctctaagcctcactttcctcatccattagtaaaatgggaactggtagtagttcccatctgataggagattccacttgctatgagtattcaataaattactgttcataaagcactttgaacatatatcccacagcaagttctaaatgaatatttgctaaataaaatctgtccttgataacttagatacttatctgatttaagacaaattttggctcctatgatagagaatatctctagatatatatagtattatgatgacactaggtggaaataaaaaaaagttttctatttttgaagaagcactgttctttttctgtcctttctttcccctatgattcatatctctggctttacaatgctagctactctactaaaaatacaaaaaattagctgggcgcagtggcgcgcacctgtaatcccagctacttgggaggctgaggcaggggaattgcttgaacctgggaggcagaggttgcagtgagccgagatcacaccactgcactccagcctgggcgagagagtgaactccatctcaaaaaaaaaaaaaaaaaaaaagttaaagtctaaaaagtacacttagaaggttaatacaaggaggcaagtgtcactacggctcacgacattagtaaagtatgttctattctagtgatactcttgtggttgatatagtgatgatttcctaatacagattacaaaacagatatagacacaatatacagtagtaacgggaaacgtcacctctcccagcattggggagaggtttcattctggtaaaaaaaaaaaaaagagcacctgataaggtgataccacattgacaatttcatttctcagaaagtggagaaaacaacaaagagaacttctatccaagactataatgactgacaagaaggaaactgtaagtgatgtggggtgacaagagttttataagaagacagtatgctagttagcttcggtgttgtaatagcaaaggaagcctggaaccttgaccctaagagagtaaatttcaagcattcagaggtaggataggtaattctaagccagaaactataacagggagtgtaaccccagacagacagaaggtaaggcttcaaaaacaaaattataatataactgactctgatggggaaaaatggagagaagcaacaaaacaaaaacaggtagagattcatttattacaggataaatgtgaagagtggcacaaactcagtaaactatcaggaaaggtaatgcccagcatgaggtaaataatttttggctacctattgtttttctctcttgcaattcagaacggccagttaagttctacctaggtgaagagaccaaagaatcagaacttgggcaaagaacttgggagtccaaaatggggaaggggtagtatatattatggttttggcagtagtctgaagataaacaaacatgactgtgattttcaaaaacgaagagaatatggttcttgaataccagaacaaccgctcagaaaaggggcatgaccatgggaggccaggtcatagtaggatactaacttctgctgccaccactgtgaaatgtctctaaccacatttatgctccagagtcaaagccccaggagacagcacaactggagagttaaagcgtgtaggcaataacatttcagcatgtatctcatgtactgatataaatatatgcatgtgcccagagggctccggcatcgccaggtaaatggcctgacagtatacatttgtttggcatattaggctgttagccttaaagaaaaaaaaataaaagatacacagccaccttgggaagaaaaatttaaaaagagaggcctccatgtgatattaataatcttaaaagcagaaaaatgtaggggttaaaatcacaaccctgaatgtaataagttcatttgttaagatttcaacactgctaaattacaaagaaatgatacatacagagaagaaaacttctaatcgtccttctaagtgagcattagaacatgatgaatatttcatataaattatgcatcttaatatggaaatggaatggaccttgacaaaaaatccagtttagccccatggtctcaggaacataaaatcttagcactcccaccttagaaaggagatgattaaggcccagagaggctcactatcttacctatagtcacccagtcaataaatagtggtggtgggatggtgtgcagttctcctgccttctgctatatgatgatgttgctagtctatagacttatggtagagaagaagatgatttcaggttagaagtgaacacaggaatgatctatcatctcgaattacaaagtttaaacctgggtctggttggtgggaatataaagctgtatgaaatagctatgggtttgaacagagtagacctggccagtaattaaaacagaagtcccagccagtaaacagtgaactactactgataatttctggggattaatgttatcgtgattatcttcctccaaactctaaagcctggccacattctcaccatgggaagaaggaagcagaataacagtgtcctccacctcactcagggaattcgctaacagcattccctcactcctctcccagctaatgacctcaaggattcagggatatgaaaaacaaaccttcttcaccagaaagactagaggatcaaaagggacaatgtccgtcataagcagcactctatcacaagtcacgtttggtgcaaaaacacagactaaaaggagtcaccaaacattctgcaagtctgaaaatgcacttcaagtcaaatattcattcaacatttttttttgtacctatgacatgccaaacaccatgctggatgttgcgatttctaaaacaaataacagaccctgttgtcaaggagctgagatcactgcaatggtgtgactggtggtatgacagagattatagtaagcttcttagagagaacataggaggggtcaagtgcacagactgaagaggacttggtggcaggggtagcatggagattagggaagacttcctggagaggaacccccaagttgagacctgaagggtgagaagaaattagccacgttttcatccctgagaggtgtgagaaaaaacaaacaaacaaaaaactgtgtgtatgaagccaccatggtgatagtgcaaactttctacttcaaaaacatataaatatctaattaaaacaaacaaaaaccactaataacttttctttcacttctgaaactgcttttctctgttaatagagcagatatcactgggtatggtgggtcatgcctttaatctcaacactatggaaggccaaggtgggaggattgcttgagcccaggagttcgagaccagcctgggtaacatagcgagaccttgtctctatatttaaaactgtaggccaggcatggtgcctcacgcctgtaatcccagcaatttgggaggccgaggtggacagattgcctgaggtcaggagttcgagaccagtctggccaacatggtgaaacctcatctctactaaaaaataaaatacaaaaaaattatctaagcatggtggcattagcctgtaatcccagctactcaggaggctgaggcaggggaactgcttgaaccagggaggtggaggttgcagagggccgagatcatgccactgtactccagcctgtgcaacagagcgagactccatctcaaaacaacaacaacaaaaactgcatatttttttaaaaaatagagcagatgttgaagaatgttgacaaagcccataaagagagaaaataatagtatcattaagctcaggttctggcatagaaaatccgggtttgcatcccaattctgacatttactagctctgaatttatcatgggtgatttatcattgacttctctaaccctcagtttttacatttgtaaaataaaaataataccttattagactgttgagaggattaaatgaaataatgtgtataaagtactcaaaacagttgctggtacacgtgaaattcttaataaatgttagtgaaaaacaaaaaaagcaaaagatgttggggccattatgaataagtcaactggaaataccataaaggcttaatatttctgaacaactggacagaaagactagtctgaactacaagaaaatctgagaaatctaagaaatgttacttgcagttcttgtacatagagttaccggtacaatgaacacgttgctgatattgtcttctgctacagatatttatctttttttttcttatttcccccaagagactataaaactcttaaggataaagactatgtttctttcacctttgtacttctgaaacacccagtacagggccttaaaacaaggaggccctcaaaaaatatttgatgaataaaatgattaggatgttcagatcaatgtagttgtggtcactgaagacaggctaaataaatttggtaactttgtagcatagcaatatcttaaaatgtatacattaaaatcataaagtaactagaatgtgattcattaaagaaactgaacagtattcttaagtggtaactttgtgactagggaggcaggagtcttgacacataaaattaaatgttaggttttgtggtctcattgacctattttctttctcaagcagaatttttttttctcatttctttcttaaatattttcccaacactactttccagtaacatgaccatgtgacatgagtatcacctctgacaacggtttaaagtggaagaaaaaaaattaaaggagaaaggtaaataagcagagtattacctaagaatacaaagtgttcctccacaggaagttttttgtggttgccagattaaaggaggtaacagataccatatgtgaaatacaaagctcaagataactatacaatatgtacatacttagtggttcagaatttaatgaaccaatccaataaataaccttaggatgttcttgctttatcttcaaaggagaatttttgttgtcattgcctcaatgcaataataaaatgattggttctatcaaaagaatatcttttttttcgagatggagtctcgctgtcgcccaggctggagtgcagtggcgtgatctcagctcactgcaggctccgccccctggggttcatgccattcacctgcctcagcttcccgagtagctgggactacaggcgcctgccaccttgcccggctcattttttgtatttttagtagagacggggtttcactgtgttagccaggatggtctcgatctcctgaccttgtgatccgcccgcctcggcctcccaaagtgctgggattacaggcatgagccactgcgcccagcctcaaaagaatatctttagactaaaatctggatttttaatttaattttaatttttttgagacagggtatcactctgtcgtgcaggctgcagtgtagtggtgtgatcttggctcactgcagcctccacttcctggggtcaagtgatcctcccaccccagcctcccaagtagctgggaatacagaagcccaccaccacaccggctaatttttccattttttgtagagatggggtttcgccatgttgcccaggctggcctcaaactcttcaaatgctaaagtgatcattgcaattaaataaaaacaattgagctgaagtgccaatttcattagtacagctgaactagtgaaaaacaggtacagccaaacaaaattaatgcaaaataatcaaaacttttgagtgcatcaagtatggaaaaaagttctcaagttctaaagtatttcaaaccacagaaagggtaagttcttttctttgcatttccagtaactttaaaaataaacctttattattttccagattattttaaaaaaaccttcttattaaaaaaatttaacactacacaaatacataatatcaaaaaccaacattttatttaaacttctcctttggaggtaactggtgctatcaattgagttttaacaaccacttttcaggccaagtgccctggctcacacctgtaatcccagcactttgggaggctaaggtgaggggattgcttgaggccaggagttcaagaccagcctgggcaacatggcaagtctccatctctacaaaaaaatttttttttaattagccaggtgtggcggcacatgcctgttgtcctagctactcaggaggctgaggcggaaggactgcttgagtccaggagttcaaggctgcagtgagctataatcctgccactatactccagcctgggtgatagaaggaggccctgtctctaaaaaataaaaaaaccaaactaaccaactaaacaaaaaaccaccttttgatcgcatgagacagtaataggagagctgctctaaataagtttatactaattgcttaaacttctccttttatctgtgcccttcctactccactgctaaggaaacacaaaaacaaaaatcaaaaatacatgctaatcctccaaaaagacaacccacaaataagattaacccctgaaaaaaaatcataaggtgactgggcaaaattgtgacaccaagtggcagaaacacatttcctttagttgccctcaataataaaaaacaggaacagcatttttctttcaaagatgattggaagaacctacctaattatcatgttttttagcttttaaaaaataattttgtgaggccaggcgtggtggctcatgcctgtaatctcagcacttgggaggctgaggcgagcggatcacgaggtcaggagatcgagaccatggtgaaaccccgtctctactaaaaatacaaaaagttagccgggcgtggtggcgggcgcctgtagtcccagctactcgggaggctgaggcaggagaatggcgtgaacctgggaggtggagcttgcagtgagccgagatcacaccactgcactccagcctgggtgacaggtcgagactctgtctcaaaaaaaaaaaaaaataataataattttgtggcggggcacggtgactcatgcctgtaatcccagcaccttgggaggcccaagtgggcagatcatctgaggtcaggagtttgagaccagcctaaccaacacagtgaaaccccatctctactaaaaatacaaaaattagccagatgtggtggtgcacacctgcaatcccagctattcaggaggctgaggcatgagaatcacttaaactgggaggcggaggttgcagtgagccaagatcgcaccactgcaagatcgcaccactgcactccagcctgggtgataagagtgagactcagtctctaaataaataaataaataaataaataaaattttgtatacaatgaggcattttgtagtgccagagagtaaggaagtactaaaaaaaaataataaagaaacaaaaaacacctacagcaacaaaaagcttgcaatggccaaaggtagaacactgtgagcagcaaaataagcagtattagattataacccaaagtactaaaaataaatatccatgagtccatactaccataaataaataagtaaataaggtagaacagacaatttcatggggagaattccaaataatttacgtaaatactctgccctcaaggaagtgaaacataactcctcccgccagctctttaactgagggctgcacatagtgacttccttctgaagagtacagtatggcaaggggaaaaaaaagagtaactttacagttgagaaagctgacaaaacttccttagccaggtgatcaaggttaacatcaacagtgataagtcatgttgatactatctacttttgatatggtatgacgagaatggcattttgcctctgtggtcttcctacccaaaacccacaactgcagtctaattatgaaaaacacaacataaaaatcccaattgagggacattctacaaaatatttgaccattattctcaaaattgtcaatttcttcatcaaaactgaagaaaagtctgagtgactgtcataggaacaagaagcctaaaaaaacaaaatgattaaatgtaatatggtatcctggatgggattccagaagagaacaaggacaataagcaaatctaaataaagtatggactttagttaatagcaatatatcaatattggttcactaattttgacaaatgtaccatactaatatcttagtgatagaaaaaactgggtgtggggtatatgagaactctactaatctttgaaacttttctataaatttataacttttctaaaataaaagtcttattgtaaaaaaactttaaaatctactatatatataacatatatataattttctcagatgggataagtaaatatcataaaagtcaattattcctgaagaattattttattaataaaaataatataacactaattttaaaatagtttaaatgagatataagaaatggagatgctaaaacaaaatactggagagtaattaagaattttgcatacttaggccgggcgcggtggctcacacctgtaatcccagcacttggggaggccaaggtgggcagatcacgaggtcaggagttcaagaccagcctggccaagatagtaaaaccctgcctctactaaaaatacaaaaattagctgggcgtggtggtgggtgcctgtaatgccagctactcgggaggctgaggcagagaattgcttgaacccgggaggtggaggttgcagtgagccaagatcgtgccacagcactctagcctgggcaacagagtgagactctgtctcaaaagaaaaaaacaaacaaacaaacaaaaaattttgcatacttaatattttcacaatcatggaattgtcgtggcttttgggattttcaccttcaagttcttttggtaaaatattaatactgttaaaatactgtatttttatcttgcaggattattttggttcatttgaagacgaatggctgtttccatttatcctccaagcttaaacccaataagattacctgttatctctttcctcaacagatgagaaaattttcagggggttttcctgatataacagaggctttcataacataacatggagaaagagagacctattataattggaaagtttccatttcaattaattctgtaactttacatgcataagcaatttctacttatttatagtctaggtaagactgactaaactaaatgatgtcaggttgactttgcaagcttcttttttcacattaaagaaatactacggtctcagtctgttcacacaaaacacctgaaactaggtaatttataaagaacagaaatttgtttcttcagagttctggaggctaggaattctaagatcaagatgccagcaggttctgtatctggtgaagaccttgggtctctgcttccaagatggcaccttgaacactgtgtcctcacacagtgaggcaaaaggaacagaaggacaaaaagagctgaactcactccctcaagcccttttataagggtgctaatcccatccacgagggcagagtcctcatgacctaatcacctcctaaaggcctcacttcttaatactgtgaaattgagaattaagtttcaacatgaatgtggagtggacacattcaaactatagcaagtactcactataattttttttttttttttttttttagatggagtctcactctctcgccaggctgg

SEQ ID NO: 26 - DNA, 3664 bp, Homo Sapiens
agcgagactccatctcaaaaaaaaaaagttccaactctgtccctgtactagctgggtgacctggggtgaagtgcttaatcttttggcatttgtttcttcatctgtaaaaatgaaataacacataatctgtagagttggtgcgaagtttgaatgagacagaatagcaaaaagtagtaaactaggccaggcatggtggctcacgcctgtaatcccaggactttgggaggccaaagagggaggacttcttgagcccaggagttcagcctgggcaagcatggcgaaaccccatctctactaaaaatacaaaaaaaaatagccaggcatggtggcacacgcttgtggtcccagctactcaggaggctgaagtgggaggattgcttgagcctgggaggtagaggttgcaatgagctgagatcacacagctacactccagcgtgggtgagagtgagaccctgtctcaaaaaaaataaaataaggctgggcatggtggctgatgcccgtaatcgcagcactttgggaggctgaggtgggcggatcacatgaggtcaggagttcgacaccagcctgtccaatgtgacgaaaccctgtctctactaaaaatacaaaaattagctgagcatagcggtgtgcgcttgtaatcccagctacttgggaagctgagacaggagaatcacctgaaccaaggaggcagaggttgcagtgagccaatatcacaccactgcactccagcctggacagcagagcaagaccctgtctcaaaataataattataataaattaaataatagtaaactgtatgcctcagcttagtatctccaaggtggaaatcatacaggacctaccttcagcactcctgtccctccctctttgtttatcttttttatttcccgcttccattcccctgtatttttccctcctccttgcctaagctgtgggcctgcacttggcacccttggacacgacctccccttcctagtgatactcagactaaagaagtcactgactattgtttgggaaccatgtcatgatacctagtgtcaacgttccataaacacccagtaaacataagtgtggtctaagggaagccacacatcgaaattcctgtcttggaatttggacaatggcaagatgcagccacattctttacaagcgtggaggcgttcgtgaggctctgccctgggactggcagggaatgaactggcttgggactaacataagtggagcagctatgtgaagagccacgggaaccgctacctgtgatggcaggtgggcagcagccactattgacactgtgtaatgaaaagagcaaatgtgtgcggctcggtggcagcacaactaaggacagggctcagtgatggaaaagaggcatgaagacaaggggctcccagcaagtgaggcagcgatgagttggaatgaaggctggagggtcgcagggaagctggaaagtgagttgggtggggactgtctgcagaggggatcttggctcgagtttgtcatctcaaggagcagctatggggctttttgaggcatggtaattagatgagacaaccctggcagggcatgactggcaacgtgggtggccctgtatggtcccccaggggttcccagtccccacagcttcccgactccctggccccagccattcctcaagctcccagcagctcaggaacttgcgtcagcagctcaggtcatgacaccaagatcaggcttggaaagggggaggtggagggaggggagtttttggcccggaaatggctgggaagacttcctttgctgggattaactgttgtccgtgaagctggtggcattcagcagggcacagggtgttctggggagtgaagtatgtgggggaaaggggtgtccataccttcacccctgcctccctctcagagctgcactccagctgtggtgaaagagtggatctttaggcagatacagatacagagattccccccaccccaccccaccaaaggctttcaggacctctaggttcattcgtgtgtggggatggagtaaggaggttgctcatgcttgccagccaagtgtatgtaggctgagctggggtgattttctttttcttttttttgttgagttagggtctcactgtattccccaggctggtctgaaactcctgggctcaagcgatcctcctgcctcagcctcccaagtagctgggactacaggtgcacaccactgcacctgcctggctgggggttgcctcgttagggtccccaggcccggaaggtcgcgtgcttgctattgctgccccgcagacccccatggcctgctggagctagggggcgccagaagccttacttctgtgtctctggccgatgaacaagagagcctggatactgctgcagagcagaggctgttccggagagcagggctggaaggtggtggggcggggtgaagtcctgactagaggctgggagcttctgggtgggcagggtctgccagggcaggagcctgtgtgagtgcagcttcctttctgcccgcccctagcttaaggccagagagtaggcagcttgttttcaagaatcccaatggctttcttcctcccactccctaaatcttcttgcccaccctctaaccatgcccagggcctctcgctgtgaggtggcaagtagcccgagaagcagatggtagcccaggccttgcagtccccgctccagcacacccctcccgtcctctcgccaggaggctgcctggctttgtggtccggagcaagtcacttctcgacgggcttcactttgcccatctgaagtctgaggttgttaggcgtgttttctaatggcctgcccagctctgacatttttggatcctatgtaaagggaaccctcctttccaccctcattcccagtccagagtgaggagattgggtaaattcccagagccctggcactcccgtggagcactcaggaaacgctccttcacccctcaattctgctctcacacaccccgtcacacatagactcacatacaccaagcagagaggagcaaagagaaggaccatgtaagacaatcacggacatggcgttagaaggaaactgagaaacgctctacaagagttcgatgtattacattatttttaatttagatgaaattcacataacacaaaatttaccattttaaagtgtacgtacacttcagtggcttttcatatattcacagtgttgtgcaaccactacccctatctagttcaaaaatattttcagttctcccctcctccagcatctgggaagcatccattcaccttccagctctgtggctttgcaggttctagacatttcatgtaaatgcagtcatataatatgtggctttttgtgtctggcttttttcatttagcataatgttttcaaggtttatccatgttgtaacatgtattcttttaaaaaaaattttaatgtgtaaaatatacatatcataacatttaccttttaatcattcataagtacacaaatcagtggcatgaggtggtcccttcccaatgttgtgctgtcatcaccactgtctgttttcagaactttgtcatcatcatccccaacagaaaccctgtacccattaaacagtaactcccggccagacgcggtggctcacgcctgtaatcccagtaattccagcactttgggaggccgaggtgggcggatcacaaggtcaggag

SEQ ID NO: 27 - DNA, 9137 bp, Homo Sapiens
ccccctctgcctgactccagtctgggcatttctggagcatcctgtgcgcctggctcagcccagcaagctgacatttgaaagctcacagctgtcctgtgaggtgggtgattcccgtgtcgtttcatggtgaagaagccaaggccaggacagaagtgacctgtccccgggccacagctgggcaggggcggagttggcatttgaacccagctgcgtgcctcttgagtgctgctctgtgggccccgcagcctcctgtcagctccttctggcgcctgctctgtgggtgttccttttgtctaaggcgcctgcagccctcagagggtctgtggggtggggacagagctcagcaccccgcatccaccagcaccatctccgacctctgtgcaggcttcgtgttagaggtggcagccaggtcctgccaacggaagatgctgggccttggaaacagcctgcactgtaggtgacccggccggccgggcccaaactggctgccaagaaaagggagcgggaaaggaaaacagctctcggccacatcgcctgtgtaaccgaatctgttttcaaagcccctcgcaacgcgggctccgcattcggcagggcaggcactcgccgccagatccccgaggactgctcagggggtcttctgggaggagctcaaagcgagtttgttttcggggaggaggtcattgcactcaaggtccccgtgactgcagcgttctcaaacgtcctgccatgtgctgggataaccccacccaccgcaggcgtgccctccgtggggcagggaggggaagcaggtttgggctgttagggctgcaagccaaggggcctgcagggcatcttagtgagctgctttggtgtccctgcagttggcgacacccattgtcacaccccctcggcaccctcggtctcccacatgacagacttacctggggatgcaaacagggctggtgatgaccttggccctgtgcggtggggtggccgtttatgatggggcctgcactcaactcactttcaggtctagatgcggggaccgggggaggtgtcagctgggctgggctgggcacgactagactgtggccccgtctgcgggagcccggccaccacctcagcaacgccacctccttaggatgtgggggcgggatttactctcgagactcttagagccagcgggtggctggaggctcatagcctggcccaggcagctgggggagggctttgctggtgcctgggaccccccaccccctgcattctcgcctttgctttctcttttgctctcgtctttaacaacatctctccactcctcccctccctccctcctctggcctgcccgctccttcattccttctctgctcctaacccccgcatagaggagcctggggagcccgcagcctcctgaccccatgttcctctttctctcctgtcttcctggagacgtctgccactgacagtcttggagccctgtcaaggggacctgtcctgcgctgggctgtccacagaggagcagcgtggaggagctgggagtgcccagcctgcctgtgggctgcattgccgcttcctgcccaggagccctgcagccgtctgtccgcctctgagtaggacagtggggtttcctggccaggagcagagtttgtcacattccagttatgtctgcccaatgttcagcttttggtgagtgtcaaagagtcagccccactctgcgggcgggaggggacctgagatgtgaatccaggggagttaaaaggcttcggaaagcatccaaaagtatagagaaaaaaaggatagttgaggggctgggacgatgcaagccttttattttcatcctttaactttttttgcatttctgtattttccaccatgaacaaagctcattgataatagagactgaaatatttcatggatgattcaaagagataatctgaaaagggaaataacgtttttctagggtctggctgaagctgccctgcggattatgcaaaaacctgtctgagggagtgagaacgcagaggcaccttagagccagccatggctccaagctctgaggatctgcaacagacacacattggctgggcctgagcaaagagggaaagccactctccttcagcaacgaaggagtggggatagcaagggctgagcttgtacatgcacacctgtgtgcagccacacacatacacctgtgcacacacatgcatatgctcatatatgtgcacacatgcaggcccgtgctcacatgcatgcatacctctgtgcccccacacttaatgcacatacatgtgcacatgcacacctacacacattcctatgcacccacccagtgctcatgacaaacctgtgtgtacttacgtgtgtacatccagatgcacccacacactcgcacacatgcctctacgtgtacgcccatgggcacgtgtgctcacagaggcctggaaggtgctgtttttccacgcgacgatggctgccgtgctcggtgggagcagccgcgttgctgcctgttcccgtgccccagtctggccgtcactcctcaccctcgtcaggctcagggtgggagggtgagtagcctggagtggcctggtcacgtaggtgggcagccagctggggcactgacctccagatgggccacgagagcccttcctgcatcttctgagtccctgactcagtgcccagtgagggtcccggagggcaaaagaatgtctaacgctccacctgtgggcgggtctggccttacggaaacttctccatggcaggtggaggcctggttgagtggagcaaagggcaggcattcccagtgatcaggagctggggccaggcctactgacaccttgatgctgaggggccagagcggtcctgagcgatgtcccgaaggcccagggtctgggcaggtggaggcagatggaccaagcagggcctttgtgttccagggcactttgcaggcagcaggacccccaggtcctctggagagggtggctggagacccggcctgaagctgctgcccccaacaccacaggatacctgcctgcaggtgccatccattgcttgggggctgcacagagcagttttgagcaggcagtggggtgtcaccttggagtggctgtgagatgtgcgggacccttgggggccacctggggtcaagcccagccctgcctcttgggctctgggaccctgggggagccactccgtgctctgtgcctaggtctgtgaccctggaggagggcggtgctgtccatctccggggacgatggttgcatctcaagggtaagggccccaggcctgccaggtgcttcgagtacagtccaggggcggcctctcggggctgctctggtgggcggccagaccctgctggaatgtgactctgttcctgggatcaggacctgccctgttgcttgtgggcagggttgcctttgtcaggtcctgccatttctgagcctcagtttcccaatctgtggtggggttgacgtgaggaaatgagaaatgcacccagggagcactggctggcgctgcagggcagcaagggggagccaccatggtcactcttggaaaagtccccagccctgcaccagcagggcagtaagaaagtccacggctgccgctgtcctggagagaggcagcagcccgggagaggcagcagccctggccacacccctgccaagagccagctcaggggcccagggccgctgagatcactgggcagttcccaggctggctgggctgtcccctcgtcaggagggcagggctggcaggtttgtggacgccttcccaggctgacccccacaatagccgccctgctccaccctgaatctacccgtcccaggctgcgcctgcctccaagtgcctgattggagatggccaagcccattcctcatgtacaaagaatttcccgagcagccacagctgctgcagctggaacttgtctccagatgggtcgttccgagggaaaccagcgtctcctgtctcctcctgcagacatgggctggcgtccgagccctggatcccctgccctggcttggcttcctctggaggggagataaggggctcctgacatcttgtaggctgaagaacccgcccagcacgctgacagggaggcgccagaggcagccgcagaccggcctcagcccctgcagcccctcccctcttgttgttgcagaaagaagccctcagggcccaaggtcgacccacccagccaggggactgctctgtagctgtggcccactccagccaacccgggagtgaggggctccgaagcgtgcccagcacatagggagggctcattccggggggcaccgtctcccagtcagagcaggctggagctgggcacagccgaggaagagcaaacgtgttctgtccttgactccttctccaagtttgtgatggcatctgccatgggccagacaggggcacacgagagtgagcgagtggacgtggctgccctctggagccttccagggcgcgatggcaggtgtggagaggcacacagggaaaccctggagtctcgccgaggtacaaggcgatgcagaaagggccagggagttcccagagactgtcaggggctccctgggcggaggcagagacccccacctggcccctggcacctccagcaccatgggcgccctggctagggatcccttcctgtctgaggtcagcgctgcaaacctgtggctgcggttaccccaccatgttttttaaaattggaacaattcatgtaaaagcccagattcattttttcttgaaaaaaattgacagccaactgtgaccacagtgggcttgtttctacgcattgggggctcttccctcggaacaggcagtgctctcagttgccgtagacgccccccactccctgtcatctcacccggtccctgctgggcctctttgtggcccatcccctggttcagatatttcattcaaagacccacccccccagggggaggccatccttctcaggaaggtcgcttggcctggactcggaactggacactcattactggtcaccctgtgactggagcaggactttgcctttctgcacctcggtttctccatcctaagaggggctaacgcctgtgtcgtgggactgtcccgaggcgctcagaagcagtaggcttgctcatgcttaagcacagagctcacagctgggggtggcccctgtgccacaggtccctgtgtgtgcccaactcccgctgcagagggcaacgctgtgtgtgcccatgtctgtgctgtggatgcaatgtgtaaactgcacagcctttgacggtggctgcctgggttggaacgcgggcctctatgtgtgctctccaacggcctgtggcggaagggcagcccctcccttggtgggggaagttctccatagctttggtgcttgggaggtttggagatggcttagagagccatcgggatgtgaggggatacatttatctctgtcttcttggggacagacctcggaggtccctctttcacccttaaaggcctggatgaatggaatccgtggggcaggattctcaaagcaagactggtggggcctcacaggcattcctggaaaagggctgtggagttaaaaacccaagcgggaaataaacagaactaggcttaggaagggtctctctgggaggcctgtctgccctccatctttcgtgggctcaggagcactgcctggggctgggagcgagagctcggatactttacgttctctgaggcgctgaccgtggctctgcgaggaggagtgttcctccggacagacatctttcagcggcgctggactaagccatgggacaggtctgactgtggctctgcgctccccgccgccccatctgttgccccctccccactgagagctgggggagggacgggatctttgtgagctgacttggggtctcagagccgcggggagggaggagtggggctctccctgcgcgggttccttttctgggtgaggcggagcctgttcaccaggcagatcgggggctccccggcctccacagatctcctggtgtctccccccaggctgttcacactttctttacttggggggctgataagtcacgcagctggcagcatttgcacctgattcaaggaggtgaacattttccctggagattagccttgaagtcagggctggtccccacccggggacgaggagaggacagaaggctacagagggctgcaccgggggagggtagatggggcgttcacccacccctgctgccgcattttcctttgttggttttgcccgaggtctgataagcaccctgctccagccagaggccttatctggccgcctaatcccctggccttggctggagaacaccagggctttgcccagtccgccctccctaccccctccctggcccctgcaggccgttggggctgggggtggagggagagggaggtggagtgaatacccccttcctcttgctctttctcttccaacagggcaaggggtgccggtggttgaagaggcccctctgggcaggaacctctcacctggggcacggctgaaaccaaagaattcaagctccataaggaagaacctagaggccccccacgtcagcctgccccagcctggagcttacccaccatggaaatgtgtctgttggccttacagaggagaaggcatttgggcagggctttgaggtatgagtaggagtttgctgaatgaaatgagaggaaagggttttcagggcagagggaacaggttggggtggtaagaagggtcctgaggcccatagagagtgactgctatgagtgagtggttggaactggcgtgactgaagatggggaaggacatctgggggtcgggggtgccagaggagttggggatttatctggaagatggtgggtgctaaggcaagaagaaccaattcctttttctttttgccaaagcaaagccctccataggatttccttttggactttctttttgaaagagtaatgcacactgacagtaaccatttagataatacagtttctaaaagaaaagcaatgatcctttgcctctcccacacccaccttttccccacaagcccccagaaggctgggggtctgctctccctcccttgacagctgcaggatgttttgtggtggggtgtgaggggctttggccagtccctggagatggacgtgctggtgtgtccagtttccccagcccacttaaatgggtgcagtgagtggcctttataagttccccgaagggggcgtgtgggggacagttacagacatgtcgtttaacaaatgctgcagatccccttccagaagtgaagaacatctcagccgtgccctggcaggcctggctcctccccctccacacctgaagtttctgtttaaaatgtttggccactggaggggtgaagacactcacctgtgcctgaggcactttattatcctgactgagcgcgccctgcacctctcactgtcctgaagtggctcggccctcgggcttcatctgggccttctgtacctgagcctgggcttggcccagcgtggccagtgggctccgggcccctcctgccagcctagcacttctgagacagaagcctggcgcagcaggcaggcacctctggactttgagcctgggcccttgacagccagggagagggcgacccccagcacacactaccctaacctttagcaacgtccccactgcagatgggggtgctagccttgaaagttgggtgccccaagggttggggcaggagggcaaggggccgccccagggaggtggtgcatgacacagcctataacaggcagtgactcactgctcatccagccataaagtcagggtgataggctcagtgtcccagccgtgctccctggagtccctgccccaacgtcattcccttctctgcagcctgcgctgggcagagctccctccccaggggggccgcctgggccactctgggaccatccacccattccagacccacccattccaactcacttgctactgctggggagactgagtgccagggagggggagcaagggtagatggagaactaacagtgtcagagtccacaggtcatctgtcccccactttacagtgtggactgcgggaggggatcccagtgtgggctgcagagctcagggccaggatgctcggcctgtccaggctgcgatctggaggaagcgggtactctctgcttagcccagggccttccacgctcctgggggctgcggggacagatccaagaacatgggccctggggccatggtgtccgattcaacccacgcttcctccctgttgacaccgggcaacttgctgagccgctccgtgcctcagtttcctcgtctgtaaagtgggattcatagtagctccttcccgactgggctgtctggggattggtgagtgatgccgtggggcaggatcatgatttacggggtgcctgtatgttctcccagagacgggaagggccctgaggggtgactcctcaccagatagcggggtctcccagggactaagcaggtgggagggatgggcgctgccctactgtgcagagccttggcgggatcccttgacgctgtccccaggctctgcggggccaggaatagggccactgggcctggggtccttgtagttcaagggtcaccctgaactgcggggctctaactatagagaccctggggcagtgacgcctgtgcaacctgcccgcctgtcactccctcccccaacccctcacacttgccctgcctccttgacctgccctgcccacccctcaccctcaccctcacgctgcccccttatcccgcccctggcacctgccctgcccttcccctcctgtgatggttaatactgagtgtcaacttgattggactgaaggatgcaaagtatcgatcctgggtgtgtctgtgagtgtgttgccaaagaagattaacatttgagtcagtggctgggaaaggcagacccatccttaatctgggtgggcaccatctaatcagctgccagctctgctagaatataaagcaggcagaaaaacgtgaaaaggctagactggcctagcctcccagcctacagctttctctgtgctggatgcttcctgccctcgaacattggactccaagttcttcagctttggggctcagactggctcttcttgctcctcagcctgcagacggcctattatgagaccttgtgatcacatgagttaatactccttaataaagccgc

SEQ ID NO: 28 - DNA, 12200 bp, Homo Sapiens
aatcagaggaagaacagcctgctctgaggttgaactttgcaaagctgggaatgttccttctttgaaggagatcttagtttaggcattcatttttattttattttttatagagttaatgaaccagtcttacagtcttcctttagccaatgagttaaagaaatctttgcataagtttattcaaatcagaggttccaccaagatatccctgtaaatgcaccttccagagccaatctgtgtgtaggcatggaagcaaacatcctctcttggcttctgcagcaaattccaagtggcaatggaactttaccttcgctgactcttttgtttcttttttcccgtggattctgtgcttttgtttttgtttctggttttggtttttatataactcagaagttatttcctaatgtgccagaaatgtttgtgaatttggttttatagcctatttgatcatcctttttaggtggagacctattctgttgggttagagatgacagaaaatcttatttgtcggttggtttgtttgttcaagaatacactgaccttctacaagaaaggagagctctttgacacctggaaattttacagaagcttgggacagctctgaatggcaacacggtcctgagatatgtgattacctgggactttcattggacctgcatttcagctctactctcctcactgccctatgctgctttgaccctaaaagtgaagccagcttggccaggtgcagtgactcacacctgtaatcccagcactttgggaggccgaggtgggcaaatcaagaagtcaggaaatcgagaccaccctggccaacattgtgaaacaccatctctactaaaacacaaaaaaattagccaggtgtggtggcacgcacctgtagtcccagctactcgggaggctgaggcaggggaatcacttgaacccgtgaggaggaaattgcagcgagccaagatcgcgccactgcaccccagcctgggcgacagagagagactccatctcaaaaacaaaacaaaacaaaacaaaaaaaacaaaaagtgaagccaactcaattgtctcatagaactgatctttacggtgtttttaaataaacatagaaattggccctcccagtcttaaaacttcaaaaacttacatttgtcttacctcagttcctttctcaggaatccaatcatcaaggctcccagatagtatcaatgaacggaaacttaccagatcacgatatctggacaatgagatgtcagatccccctcatccatcctgattacctaactgactacctgcttcctgttggccaactactcttccttacccctccctaattcttgttttcccacaaatggttacatttctgtcctgctatagaagcccttaattttaattggtcgaggagatggatttgagactgattttttgctctccttggctgttgcacctgaatagcctttttccctggcaatactttttgtctcagtgattggctttctgtgcagtgagcaatgggaccaaacttctggtgttttggtaacaaattttggtttcctgactgtgaatgcattgcttgtgactcagctgccatgagctgggagagtttcaaaagccctctaagcagctacctgaccattttggccagaggtggattttcgtctctccccatttgggcccacttctgccaaccccaaccatgttcctgattgcctaggaagaacagcctttgaaatttgacgtctatgtacagaaaggtgagtgtcttttatgggtactagacagtgggaatggttcctctccatttgggaaatcccaaaggcatatcagtttgcaggttaaacaagccaaactgatggagagaggataataccttgactgattcagtttgaacactcttggggcttgttcattgctacagaagttggattgtgttttggtgattgtttgcttgtgtatgtctatgtagttatgggatgtcagggtttgatcccagagtgcagcccacatgggtgcattctttgggttagtctgtatgtagttgtgggttgacagagcaggggaaattctacagccataccactctgagtgtggctgatcttgtctgatcgcgatgtctttgcattgtagtgctgtcttacaattgaattcattttgctgttgaatgggaaagcaggatggaggtccatagacggggttttaccatgctgctgcacactggtcttgaactcctgggctctagtgatccacctgctcagcttcccaaagtaatgggaatacagaaaagaccaaccacagtgattaaagggatgaaaaagatgacctgcttgaaaactctaaagaacccagtattatttgaaagaagaggaagctgaatggtaacttaataactatcttcagatttcaacaggactactacttctgttttatccatttctatagagtttgaaactactaaggaattattctgaaatctttctgtaactagcatatttgactcattttatactaattattataacttttttccatttaaaaagtctgaacttgtatttggcattcttccatttgaaagaataagtattaggaagagataatcaaatagtattactctctttttcttcttcttatatatgaaaagatggtattgtttttcttggcataaacaacctttgacttgttcttgccatttatcagactcaaaaatctgtggattgaagtcttctgttacttagctccagctatgctgtgagttattattgccaagccttaataatattgacaaaaaagggggaaataaacatgttagaagttaaattgcattccttgttactttataaactgaaataacaagacttggagtcattatcttgtagatttctggataaaattaatatgtagggcctttaacttgttttgaatctcttaatgaacattttctatgtgagaagtattgtttagtgctaggtttttgggtaaaagagaaaaaaagagaaagagtaagacaggatatcagagctcaagatgcttctaatctggtggtaaagataatttaatgaattagaggtcggtaagcaacacctaatcatatacatgtgtagtacctcaagggaaacacaaatcctgcttgggcaagaacactgagatagatgtctaaacaggatttcttgtttttaactctcaagtttcacaataacatagctcagttcgttttagtgcccccgtctactctcaaactccatccccgacatattttcatcagactattctttctttctctttgttgagttggtttttgctttgttgttcttatatctgagtttctccttacttataaattttttttacaacttttcacctgccaaagcctcaattttatctcgtttctgctaattgcattcttttatttcctgcttttatgagccactctcctataaaatttctcaatttaaattccagagaaggaacttctgattatccccacttagcttcataccgtattatgtcataggtcccaagccaatgcttgggtcagaagccaatatgcattcaatttagacttactcattatggcttctcctgcaacaggaactgtggtcctggcagtttcctctggaatgagataaggcatagcaagtatcgtaatgtgctgttaaattttgaagaaagtatggaatttgaaaaattgaaaagaaaaagataaggattgaaggaacatttggagacaacccagatatgctgatgaacacagtgaggatagggcttggagagatctactttatctagggagaaagcatgctcagtagtggaaacacttctggttaggcagggtgagaacaggaactagcagctctctaaagcaagccaagactttagactgattgttcttgagtccataacttaacaaacaatagttaagggaatttagttgtcctatgtgcctattaaataactggataggggttttaaaatcattttttaaaaaagcaattaaaaatacctttcattttgattagtaagggaattttttaaagagaaactcaggacatatttgactgtaggaagagattatactcctttcacttagaaaaatacataacactggaggagctagatgtgataaaccaggaaatagaaaaagtgccattgtaagtatagacagatatcgggggaaattcagccagatattgggcaaaattcacccccgatatttcatgtaggttcttttctattttccctaagcatcagccggtttgagaaataaagggacagagtataacagagagaaattttaaagccaggtgtctgggggagacatcacatgttagtaggttccgtgatgccccacaagctgtaaaaccagcaagttttcattagggattttcaaaagaggagagagtgtacgaatagggtgtgggtcacagagatcacgtacttcacaaggtaatagaatatcacaaggcaaatggaggcagggcgagatcacaggaccacaggaccggggcgaaattaaaattgctaaggaactttcaggcaccattgtcattgataacatctgtcaggagacagggtttgagagcaaccggtctgaccaaaacttattaggcgggaatttcctcgtcctaataagcctgggagcgctatgggagactggggcttatttcatccctacagctcgaccatagaagatggccacacccaagggggccattttagaggcccaccctcaggggcgcattctctttctcagggatgttccttgctgataaaaagaattcagtaatatttctcccatttgtttctgaaaggagaaatatggctttgttccacccggctcactggcggtcagaatttaaggttatctctcttattccctgaacattgctgttatcctgttcttttttcaaggtgcccagatttcatattgtccaaacacacatgctctacaatttgtgcagttaacgcaattatcacagggtcctgaggcgacatatatcctcctcagctgacaggattaagagattaaagtaaagacagccataggaaatcataagggtattgattggggaagtgataagtgtccatgaaatcttcacaatttatgtttagagattgcagtaaagacagacataagaaattataaaagtattaatttggggaactaataaatgtccatgaaatcttcacaatccatgttcttctgccatggcttcagctggtccctccattcggggtccctgacttcccgcaacagacagagatatttatatttcagcctgaccctaatcctaacccaaattctaattctaaaagagatcacatttaaaatatatctttattttggaagaattgcaaagctaaacttttctaaaatcctagtctttagcgagacaatgttattttgagttaagtcaaaaattttgcacacacacatgcacacatgcatgctgtggctgtcttgtggcttttccttgaaatgggtatgtgattatattattttccccctccctttagaaagacataacacatgtcattggtcattattttgccacatggtgaccctagtttaaagttttgttctatgttcatgttaaaggagaaaaaatgataaatgacaatgtaatcaagaaattgaatataaacttgccgattcgtctaattacagagtttagtgctgtgggttccaatttgtctcttcctagacagttgctttgtatccatgaatgaatgaattcgtagtattgaaaacctgctcccagtgctatgtaatttatcaaataatatgtgtgagtataagatataactgctgcccacaaaaactcataatttatttgaggacacaaaactcatatacataaaataattcatgaatgagacatattcacatgttatatgcaggcaggtcctgcttttactgtgcttgtggaaatccaattttaaaatatattattttaagataaattctcacctgggagtatgttgtattctaacactattatctttgtcttttggggcatatttggcttacatacaagtcaaagaatactagtttaaaaagttgttaaattcaaatttacccaacatatattatctattatatgttatgcattcttttttatatgttatcacaaactacaatttcagcactgtccatgttcttcgttttttagataagaaatggctcggaaaagttaggtaatatggccaaatttacacatctactaagtgtcaatgctgagatgtgaaagtcagtttttctcagtcaaactttaagagtctccttactgtctatgtgaatgtttgtgtcccctcaaaatttgtatgttgagacacaatccccaatgcaatgatgttaagaggtgaggttaggaggtgattagatcaggagggtggagctctcatgagtgggattattgctgttataaaagaggcctgagggagcttgttcaccccttcttccatctgaggacacatagaaggtgccatacatgaggaacaggccctcaccagagactgaatctgatggggccttgatcttggacttcccagcttccagaagtgcgggcaataaatttctgtttatagattatccagtcttaggaattttgttgtgtcagcccaaacaaactaagataaaaatcctttaaccttcatccaatgattgtgtggtaagttattgaggattgattaaagctctttactaggcattgccaatgcttaaagctctaaaatacaaaacagagagacatggatactacttatgcagagatcataaattctattgtttatatgattagactctacgactgttctacttaaatgctaattgaggaatgcaacaccaggtaaggaaaaggtctgagagggtttggttagtatgggttagcatcaggaggaagatttcatgggggaatttgactaatttcttaaaagtttaataatagcaaccatataaataaatatctttgcttttacttctttctttctcccctccctctccttttcttcctttctgtcttctatttgctgcataactactatatgtcatagaatatttgatgacattttcaagtgtaaatagctttcatctatattatctcatgttatccttgtaacaatcttttaggttaaatacagaagtattagcttctcttgctgatgagaaaatctgtaaacattgttttccaagtttttgccctacatacaaatataggacctcaaccccatataacataagttccgtcaagagttgctaaagtccctaagcagtatcttgtatgtgtttataaaccagtctggagctagctgattttccaggttctagcagggtttcttctgaccagtacttcgtttgccatgtcacatttactgggtactaccactcaagaatgcctttgctgtcacttccactggtctcataccactagcacactatgccttcagtttttagtcacatgccaatttcttttatttttaattttatttatttatttatttattgtttactttaagtttggggatacatgtgctaaatgtcaagtttgttacataggtatacatgtgccatggtggtttgctgcacctatcaacctgtcatctaagttgtcacatgccaatttcaagatttaagataggagttcaccaggagcttaggtaagaaaaaacactagtacttggctttgcctcctttattcttaagacttcgttattcagtcaaactcctgctagacttcctttccctaggaatggtttttcctgcttgccttttgcaagcaggttctttgctttttctgaatcctagtggtggtagatcaaggtggaacctatgagtaagaggtaggtcaagaactaaactttttgaattccagaaccaaaaatactgaatgaaaaaaaattaattaagagttctttttcattctaaaataggttttttacaaggctaaacagtgggaacaattttgagaaaggcacagagatgtacaaaagcttaatttataagaaacactagagttcccatatgctgtgaaaggttgctgctgagtaaggaaatgtgtagatgtttgaatgccagacaaagaaatttccaaatctcctttcaatttccttttaatagcccattaaacttttcatgccatgttttcatgccatggtttgtttgtttatttattgagagtctcactctgtcggccaggctggagggcagtggcactatcttggctcactgcaacctctgtctcccgggctcaagtaattctcctgcctcagcctcccaagtagctggattacaggcatgggccaccatgcctaatttttgcatttttagtagagacggggtttcaccatgttggccaggctggtctcgaactcttgacctcaggtaatccgcccgctttggcctcccaaagtattgggattacaggtgtaagccactgcgcctcgctgccatggtttatttgtagacccttatgatatacagcttataatttctacttatttcccatgatttcaatcacttcatgcttataaatacaaagagttttctgtattaaatttttaagatgaatttcattgattaatattatttaggacatagaaaaaaacacaacttaaattcagtgtttataataaaacaagttggtttatgcataatgtattcctatcttctagcaagcatctgctgcactaggaaccccaacactggctttttctgcaaagaaaaaaagtaacaaaaagaaaatatttacagctattttcagatccaaattcaaaattttagcttggactaggactcagtgggacttcattagaattgctgtagagaattggaaaactgaaaagagtttctgcattccctgtgcagcagcaggtctgcagaattcagaataatccccctgggaggcattaagcaacaagtcatgatttctcactttcctgtttcatttgtttgagagggtagttttccttttgtgagagagggtaaaaatgaagttattagttttggtttttgctctcctgcagtatcatgtcaagcttacttacgtctgaagttttcagctgttcctctatctggtggattaaaaaatgtgccctttataaatacgattagtatggagaattgatacattaacagttagctttataaattgacagatttctaaattaacctatggtccacaaatcaagttctatcactatttcctgccaccaaaatcagtgatgaagcctcttccacactaaatgaagagtggcgagggacagaattccacttgtcttccttttgctgcactaactacaccaggcaaagccttcttaaaaccctgatttttctagatacatgtttcttagataagttacatgtttcttagataatctgtaatatatttgactactaatgtagtagtttttaaaaatattggtagaacaacctgatattactttaaaaataaaacagaaaatagtagtggctaatgattcctttttttttctttccaacatttttatgattccaaaaattttctgttgtttttataggatcaaagatttttttaggtaaaagtagaagattttttgtggtgtgagatttgaggagcatgcaccaggttcatcttctcaagaacagtgtcttgcccatccctgagaactgacactccccacttagagatgcatttcctttgtgaattaaggagggcatgctgaagaactggaagtagcaactttattccctcaaagagggaagaggctctccagggtgtctcaatacctttatattattaggtttcacttaatacctttatattattaggtatccacaggttatcctggccttcattgtgcagcattgcatgagacactttagtttccatgcttagctgttagctgcttcaggcagggaacgaggatgctgttgatgaaagatgaaagatataaggaagggaaattaaatggcccctaaattacaagaagggtgataatattacaggctaaggttaagactgtgtaccaagacatttaacgcagtaggttaagaaggcagagtaataaagagacaaccttggcaagtgccaccacaaacccaggaagccaggactcctgcagtgggtctccatgtggtgaagagtcccactcttctgtcttctgactgtgctcctcttctaggtaggaggattttctgggtctaaggggatgtttccacccagaaccctccttctaaactatgccccagcaatcccagaaaccatcacttcatgtccagtgcctacatgaacctcttccccatatccatccttccagttatacccatgcatgttcctctagatccaagcaggatttccatttgtactcttgcccaggcctggaaaatgttaggacagcctgaccatgcttgttcgtaatacacattaatctggaactggtcctgtgtaagtctggaggttaccagagaatgaaggagaatgaagtctaattagttctttgcttatgttcttagggcttaggctgtttaggcctggatttgctcaagaaaattcacacacataaagatcaatgatgtgtatatggagatctgaaaagctgagttttacaactttggaatcaggttgtcttgttacatgggttttaggggagaaaagtggaaggagaaccatccctgcacatcagagcgccagtaatgaataaattattagttaaaagagatagcagggttgagaagagatttgacatggaagggctatattggacatgcttatagtcagagagaagtggtgagtgacaagggaagggaaaatttgctttagtatatactgacattattaaaacaagtactttgagtttattgaataatgaacgttcctctttatatagcaaataatttatcattactttttttggtagcgtgtagagttttcctataatgttttactatccatatactattatatattctatataataaagttcaatttacagactcctcagtgtaggactactaatactaatccatctagtgttgatgactcattgttttgatgaaggcacctgtacatctggagaatattatggatggaattttgtctaccaaaattcatatattcgagggctaacccctaatgtattggtatttgaaggtaactacctttgtgaggtagttaggtttagataagctcatgagggtgggagcctcatgatgacattattacccttagaagaaggaagcttggtctctccctcactctctctgccatgtgtgaacacagaaggaaggcgactatctgcaagttaggaagagggacctcacaagaaactgaccaggctggcaccctcatctttgacttccagcctccagaaccatgagaatataaacgtctgttgtttaagccaccaagtccatggtcttttgttatagcagactaagacaaatatacagacatagagttgataatttggggcataagaatgagtatatgctgaagccctgtagggcttgtcctgcaacttatttaaaatggccctggaagtcacattttttctttgactactaaaggaagcatatgtaactccacagtggaacacagtaacatatttgcttttctgtaaaattaatttgaaagtctgtggatctagcatttttctttctggtgatgcttggtcccaagaaaaccatattctctcctactatgatcagtgttctctgactggacaccattcagaacactagttctaatttatgtgctagtgacccagcaagccacagacttgcatattcacttgagcacatttatttatcttgtatgcaaggttaatggagagcaaggaagttagtccttgctatttcaagaacatgtacatgaacaacttggaagtagcttatttcaaatcgcacacattggtctcaatcaaaataactgtttacagtttatcagatgtggcatgagatccattgccagttggttgagcaaagtccaggcataaacaatggtaaaaattgtgtcttttttgataagattaaaaactatgataaatggttgaataaaaaatcaatgtgggataacttttattatgatggcttgcattcttatccatatgttaaatcagtgttgtcatattaagaagagaaaaaatgattttaaaataattctcagcatgtgtagttgattagaagtagatttccatgaccgggcgctgtggctcacgcctgtaatcccagcactttgggaggctgaggc

SEQ ID NO: 29 - DNA, 12262 bp, Homo Sapiens
aatcagaggaagaacagcctgctctgaggttgaactttgcaaagctgggaatgttccttctttgaaggagatcttagtttaggcattcatttttattttattttttatagagttaatgaaccagtcttacagtcttcctttagccaatgagttaaagaaatctttgcataagtttattcaaatcagaggttccaccaagatatccctgtaaatgcaccttccagagccaatctgtgtgtaggcatggaagcaaacatcctctcttggcttctgcagcaaattccaagtggcaatggaactttaccttcgctgactcttttgtttcttttttcccgtggattctgtgcttttgtttttgtttctggttttggtttttatataactcagaagttatttcctaatgtgccagaaatgtttgtgaatttggttttatagcctatttgatcatcctttttaggtggagacctattctgttgggttagagatgacagaaaatcttatttgtcggttggtttgtttgttcaagaatacactgaccttctacaagaaaggagagctctttgacacctggaaattttacagaagcttgggacagctctgaatggcaacacggtcctgagatatgtgattacctgggactttcattggacctgcatttcagctctactctcctcactgccctatgctgctttgaccctaaaagtgaagccagcttggccaggtgcagtgactcacacctgtaatcccagcactttgggaggccgaggtgggcaaatcaagaagtcaggaaatcgagaccaccctggccaacattgtgaaacaccatctctactaaaacacaaaaaaattagccaggtgtggtggcacgcacctgtagtcccagctactcgggaggctgaggcaggggaatcacttgaacccgtgaggaggaaattgcagcgagccaagatcgcgccactgcaccccagcctgggcgacagagagagactccatctcaaaaacaaaacaaaacaaaacaaaaaaaacaaaaagtgaagccaactcaattgtctcatagaactgatctttacggtgtttttaaataaacatagaaattggccctcccagtcttaaaacttcaaaaacttacatttgtcttacctcagttcctttctcaggaatccaatcatcaaggctcccagatagtatcaatgaacggaaacttaccagatcacgatatctggacaatgagatgtcagatccccctcatccatcctgattacctaactgactacctgcttcctgttggccaactactcttccttacccctccctaattcttgttttcccacaaatggttacatttctgtcctgctatagaagcccttaattttaattggtcgaggagatggatttgagactgattttttgctctccttggctgttgcacctgaatagcctttttccctggcaatactttttgtctcagtgattggctttctgtgcagtgagcaatgggaccaaacttctggtgttttggtaacaaattttggtttcctgactgtgaatgcattgcttgtgactcagctgccatgagctgggagagtttcaaaagccctctaagcagctacctgaccattttggccagaggtggattttcgtctctccccatttgggcccacttctgccaaccccaaccatgttcctgattgcctaggaagaacagcctttgaaatttgacgtctatgtacagaaaggtgagtgtcttttatgggtactagacagtgggaatggttcctctccatttgggaaatcccaaaggcatatcagtttgcaggttaaacaagccaaactgatggagagaggataataccttgactgattcagtttgaacactcttggggcttgttcattgctacagaagttggattgtgttttggtgattgtttgcttgtgtatgtctatgtagttatgggatgtcagggtttgatcccagagtgcagcccacatgggtgcattctttgggttagtctgtatgtagttgtgggttgacagagcaggggaaattctacagccataccactctgagtgtggctgatcttgtctgatcgcgatgtctttgcattgtagtgctgtcttacaattgaattcattttgctgttgaatgggaaagcaggatggaggtccatagacggggttttaccatgctgctgcacactggtcttgaactcctgggctctagtgatccacctgctcagcttcccaaagtaatgggaatacaggaaacaaagacaagtgaagcagcaaacttgccgaacaatctctgccacaccatatgcacttcaaaagaccaaccacagtgattaaagggatgaaaaagatgacctgcttgaaaactctaaagaacccagtattatttgaaagaagaggaagctgaatggtaacttaataactatcttcagatttcaacaggactactacttctgttttatccatttctatagagtttgaaactactaaggaattattctgaaatctttctgtaactagcatatttgactcattttatactaattattataacttttttccatttaaaaagtctgaacttgtatttggcattcttccatttgaaagaataagtattaggaagagataatcaaatagtattactctctttttcttcttcttatatatgaaaagatggtattgtttttcttggcataaacaacctttgacttgttcttgccatttatcagactcaaaaatctgtggattgaagtcttctgttacttagctccagctatgctgtgagttattattgccaagccttaataatattgacaaaaaagggggaaataaacatgttagaagttaaattgcattccttgttactttataaactgaaataacaagacttggagtcattatcttgtagatttctggataaaattaatatgtagggcctttaacttgttttgaatctcttaatgaacattttctatgtgagaagtattgtttagtgctaggtttttgggtaaaagagaaaaaaagagaaagagtaagacaggatatcagagctcaagatgcttctaatctggtggtaaagataatttaatgaattagaggtcggtaagcaacacctaatcatatacatgtgtagtacctcaagggaaacacaaatcctgcttgggcaagaacactgagatagatgtctaaacaggatttcttgtttttaactctcaagtttcacaataacatagctcagttcgttttagtgcccccgtctactctcaaactccatccccgacatattttcatcagactattctttctttctctttgttgagttggtttttgctttgttgttcttatatctgagtttctccttacttataaattttttttacaacttttcacctgccaaagcctcaattttatctcgtttctgctaattgcattcttttatttcctgcttttatgagccactctcctataaaatttctcaatttaaattccagagaaggaacttctgattatccccacttagcttcataccgtattatgtcataggtcccaagccaatgcttgggtcagaagccaatatgcattcaatttagacttactcattatggcttctcctgcaacaggaactgtggtcctggcagtttcctctggaatgagataaggcatagcaagtatcgtaatgtgctgttaaattttgaagaaagtatggaatttgaaaaattgaaaagaaaaagataaggattgaaggaacatttggagacaacccagatatgctgatgaacacagtgaggatagggcttggagagatctactttatctagggagaaagcatgctcagtagtggaaacacttctggttaggcagggtgagaacaggaactagcagctctctaaagcaagccaagactttagactgattgttcttgagtccataacttaacaaacaatagttaagggaatttagttgtcctatgtgcctattaaataactggataggggttttaaaatcattttttaaaaaagcaattaaaaatacctttcattttgattagtaagggaattttttaaagagaaactcaggacatatttgactgtaggaagagattatactcctttcacttagaaaaatacataacactggaggagctagatgtgataaaccaggaaatagaaaaagtgccattgtaagtatagacagatatcgggggaaattcagccagatattgggcaaaattcacccccgatatttcatgtaggttcttttctattttccctaagcatcagccggtttgagaaataaagggacagagtataacagagagaaattttaaagccaggtgtctgggggagacatcacatgttagtaggttccgtgatgccccacaagctgtaaaaccagcaagttttcattagggattttcaaaagaggagagagtgtacgaatagggtgtgggtcacagagatcacgtacttcacaaggtaatagaatatcacaaggcaaatggaggcagggcgagatcacaggaccacaggaccggggcgaaattaaaattgctaaggaactttcaggcaccattgtcattgataacatctgtcaggagacagggtttgagagcaaccggtctgaccaaaacttattaggcgggaatttcctcgtcctaataagcctgggagcgctatgggagactggggcttatttcatccctacagctcgaccatagaagatggccacacccaagggggccattttagaggcccaccctcaggggcgcattctctttctcagggatgttccttgctgataaaaagaattcagtaatatttctcccatttgtttctgaaaggagaaatatggctttgttccacccggctcactggcggtcagaatttaaggttatctctcttattccctgaacattgctgttatcctgttcttttttcaaggtgcccagatttcatattgtccaaacacacatgctctacaatttgtgcagttaacgcaattatcacagggtcctgaggcgacatatatcctcctcagctgacaggattaagagattaaagtaaagacagccataggaaatcataagggtattgattggggaagtgataagtgtccatgaaatcttcacaatttatgtttagagattgcagtaaagacagacataagaaattataaaagtattaatttggggaactaataaatgtccatgaaatcttcacaatccatgttcttctgccatggcttcagctggtccctccattcggggtccctgacttcccgcaacagacagagatatttatatttcagcctgaccctaatcctaacccaaattctaattctaaaagagatcacatttaaaatatatctttattttggaagaattgcaaagctaaacttttctaaaatcctagtctttagcgagacaatgttattttgagttaagtcaaaaattttgcacacacacatgcacacatgcatgctgtggctgtcttgtggcttttccttgaaatgggtatgtgattatattattttccccctccctttagaaagacataacacatgtcattggtcattattttgccacatggtgaccctagtttaaagttttgttctatgttcatgttaaaggagaaaaaatgataaatgacaatgtaatcaagaaattgaatataaacttgccgattcgtctaattacagagtttagtgctgtgggttccaatttgtctcttcctagacagttgctttgtatccatgaatgaatgaattcgtagtattgaaaacctgctcccagtgctatgtaatttatcaaataatatgtgtgagtataagatataactgctgcccacaaaaactcataatttatttgaggacacaaaactcatatacataaaataattcatgaatgagacatattcacatgttatatgcaggcaggtcctgcttttactgtgcttgtggaaatccaattttaaaatatattattttaagataaattctcacctgggagtatgttgtattctaacactattatctttgtcttttggggcatatttggcttacatacaagtcaaagaatactagtttaaaaagttgttaaattcaaatttacccaacatatattatctattatatgttatgcattcttttttatatgttatcacaaactacaatttcagcactgtccatgttcttcgttttttagataagaaatggctcggaaaagttaggtaatatggccaaatttacacatctactaagtgtcaatgctgagatgtgaaagtcagtttttctcagtcaaactttaagagtctccttactgtctatgtgaatgtttgtgtcccctcaaaatttgtatgttgagacacaatccccaatgcaatgatgttaagaggtgaggttaggaggtgattagatcaggagggtggagctctcatgagtgggattattgctgttataaaagaggcctgagggagcttgttcaccccttcttccatctgaggacacatagaaggtgccatacatgaggaacaggccctcaccagagactgaatctgatggggccttgatcttggacttcccagcttccagaagtgcgggcaataaatttctgtttatagattatccagtcttaggaattttgttgtgtcagcccaaacaaactaagataaaaatcctttaaccttcatccaatgattgtgtggtaagttattgaggattgattaaagctctttactaggcattgccaatgcttaaagctctaaaatacaaaacagagagacatggatactacttatgcagagatcataaattctattgtttatatgattagactctacgactgttctacttaaatgctaattgaggaatgcaacaccaggtaaggaaaaggtctgagagggtttggttagtatgggttagcatcaggaggaagatttcatgggggaatttgactaatttcttaaaagtttaataatagcaaccatataaataaatatctttgcttttacttctttctttctcccctccctctccttttcttcctttctgtcttctatttgctgcataactactatatgtcatagaatatttgatgacattttcaagtgtaaatagctttcatctatattatctcatgttatccttgtaacaatcttttaggttaaatacagaagtattagcttctcttgctgatgagaaaatctgtaaacattgttttccaagtttttgccctacatacaaatataggacctcaaccccatataacataagttccgtcaagagttgctaaagtccctaagcagtatcttgtatgtgtttataaaccagtctggagctagctgattttccaggttctagcagggtttcttctgaccagtacttcgtttgccatgtcacatttactgggtactaccactcaagaatgcctttgctgtcacttccactggtctcataccactagcacactatgccttcagtttttagtcacatgccaatttcttttatttttaattttatttatttatttatttattgtttactttaagtttggggatacatgtgctaaatgtcaagtttgttacataggtatacatgtgccatggtggtttgctgcacctatcaacctgtcatctaagttgtcacatgccaatttcaagatttaagataggagttcaccaggagcttaggtaagaaaaaacactagtacttggctttgcctcctttattcttaagacttcgttattcagtcaaactcctgctagacttcctttccctaggaatggtttttcctgcttgccttttgcaagcaggttctttgctttttctgaatcctagtggtggtagatcaaggtggaacctatgagtaagaggtaggtcaagaactaaactttttgaattccagaaccaaaaatactgaatgaaaaaaaattaattaagagttctttttcattctaaaataggttttttacaaggctaaacagtgggaacaattttgagaaaggcacagagatgtacaaaagcttaatttataagaaacactagagttcccatatgctgtgaaaggttgctgctgagtaaggaaatgtgtagatgtttgaatgccagacaaagaaatttccaaatctcctttcaatttccttttaatagcccattaaacttttcatgccatgttttcatgccatggtttgtttgtttatttattgagagtctcactctgtcggccaggctggagggcagtggcactatcttggctcactgcaacctctgtctcccgggctcaagtaattctcctgcctcagcctcccaagtagctggattacaggcatgggccaccatgcctaatttttgcatttttagtagagacggggtttcaccatgttggccaggctggtctcgaactcttgacctcaggtaatccgcccgctttggcctcccaaagtattgggattacaggtgtaagccactgcgcctcgctgccatggtttatttgtagacccttatgatatacagcttataatttctacttatttcccatgatttcaatcacttcatgcttataaatacaaagagttttctgtattaaatttttaagatgaatttcattgattaatattatttaggacatagaaaaaaacacaacttaaattcagtgtttataataaaacaagttggtttatgcataatgtattcctatcttctagcaagcatctgctgcactaggaaccccaacactggctttttctgcaaagaaaaaaagtaacaaaaagaaaatatttacagctattttcagatccaaattcaaaattttagcttggactaggactcagtgggacttcattagaattgctgtagagaattggaaaactgaaaagagtttctgcattccctgtgcagcagcaggtctgcagaattcagaataatccccctgggaggcattaagcaacaagtcatgatttctcactttcctgtttcatttgtttgagagggtagttttccttttgtgagagagggtaaaaatgaagttattagttttggtttttgctctcctgcagtatcatgtcaagcttacttacgtctgaagttttcagctgttcctctatctggtggattaaaaaatgtgccctttataaatacgattagtatggagaattgatacattaacagttagctttataaattgacagatttctaaattaacctatggtccacaaatcaagttctatcactatttcctgccaccaaaatcagtgatgaagcctcttccacactaaatgaagagtggcgagggacagaattccacttgtcttccttttgctgcactaactacaccaggcaaagccttcttaaaaccctgatttttctagatacatgtttcttagataagttacatgtttcttagataatctgtaatatatttgactactaatgtagtagtttttaaaaatattggtagaacaacctgatattactttaaaaataaaacagaaaatagtagtggctaatgattcctttttttttctttccaacatttttatgattccaaaaattttctgttgtttttataggatcaaagatttttttaggtaaaagtagaagattttttgtggtgtgagatttgaggagcatgcaccaggttcatcttctcaagaacagtgtcttgcccatccctgagaactgacactccccacttagagatgcatttcctttgtgaattaaggagggcatgctgaagaactggaagtagcaactttattccctcaaagagggaagaggctctccagggtgtctcaatacctttatattattaggtttcacttaatacctttatattattaggtatccacaggttatcctggccttcattgtgcagcattgcatgagacactttagtttccatgcttagctgttagctgcttcaggcagggaacgaggatgctgttgatgaaagatgaaagatataaggaagggaaattaaatggcccctaaattacaagaagggtgataatattacaggctaaggttaagactgtgtaccaagacatttaacgcagtaggttaagaaggcagagtaataaagagacaaccttggcaagtgccaccacaaacccaggaagccaggactcctgcagtgggtctccatgtggtgaagagtcccactcttctgtcttctgactgtgctcctcttctaggtaggaggattttctgggtctaaggggatgtttccacccagaaccctccttctaaactatgccccagcaatcccagaaaccatcacttcatgtccagtgcctacatgaacctcttccccatatccatccttccagttatacccatgcatgttcctctagatccaagcaggatttccatttgtactcttgcccaggcctggaaaatgttaggacagcctgaccatgcttgttcgtaatacacattaatctggaactggtcctgtgtaagtctggaggttaccagagaatgaaggagaatgaagtctaattagttctttgcttatgttcttagggcttaggctgtttaggcctggatttgctcaagaaaattcacacacataaagatcaatgatgtgtatatggagatctgaaaagctgagttttacaactttggaatcaggttgtcttgttacatgggttttaggggagaaaagtggaaggagaaccatccctgcacatcagagcgccagtaatgaataaattattagttaaaagagatagcagggttgagaagagatttgacatggaagggctatattggacatgcttatagtcagagagaagtggtgagtgacaagggaagggaaaatttgctttagtatatactgacattattaaaacaagtactttgagtttattgaataatgaacgttcctctttatatagcaaataatttatcattactttttttggtagcgtgtagagttttcctataatgttttactatccatatactattatatattctatataataaagttcaatttacagactcctcagtgtaggactactaatactaatccatctagtgttgatgactcattgttttgatgaaggcacctgtacatctggagaatattatggatggaattttgtctaccaaaattcatatattcgagggctaacccctaatgtattggtatttgaaggtaactacctttgtgaggtagttaggtttagataagctcatgagggtgggagcctcatgatgacattattacccttagaagaaggaagcttggtctctccctcactctctctgccatgtgtgaacacagaaggaaggcgactatctgcaagttaggaagagggacctcacaagaaactgaccaggctggcaccctcatctttgacttccagcctccagaaccatgagaatataaacgtctgttgtttaagccaccaagtccatggtcttttgttatagcagactaagacaaatatacagacatagagttgataatttggggcataagaatgagtatatgctgaagccctgtagggcttgtcctgcaacttatttaaaatggccctggaagtcacattttttctttgactactaaaggaagcatatgtaactccacagtggaacacagtaacatatttgcttttctgtaaaattaatttgaaagtctgtggatctagcatttttctttctggtgatgcttggtcccaagaaaaccatattctctcctactatgatcagtgttctctgactggacaccattcagaacactagttctaatttatgtgctagtgacccagcaagccacagacttgcatattcacttgagcacatttatttatcttgtatgcaaggttaatggagagcaaggaagttagtccttgctatttcaagaacatgtacatgaacaacttggaagtagcttatttcaaatcgcacacattggtctcaatcaaaataactgtttacagtttatcagatgtggcatgagatccattgccagttggttgagcaaagtccaggcataaacaatggtaaaaattgtgtcttttttgataagattaaaaactatgataaatggttgaataaaaaatcaatgtgggataacttttattatgatggcttgcattcttatccatatgttaaatcagtgttgtcatattaagaagagaaaaaatgattttaaaataattctcagcatgtgtagttgattagaagtagatttccatgaccgggcgctgtggctcacgcctgtaatcccagcactttgggaggctgaggc

SEQ ID NO: 30 - DNA, 2239 bp, Homo Sapiens
tgctttcaggataatgaccaaattccgtgatctgttccctgtttaccaagctatccaaatttatctcttggcttctattcccagccccaatttccatcccacacagtacgctccagatacactcgcaattcccaggattcattgtgccatcttgccttcatatgtttctctgtgctagaaatgccttccactttctccaatctgcctctttgttcaaaagccaattcaaacgtctctgggaagtttcccacaccacgagaaaagctggtctgtgcctcctctgcgccttcactgccgcgctttcctagccagattttgcaattgtatttctgcaattactcaaacgtgtttccttctgaccagacaaagctccccaaggccggacttcattcatctttactcctaatgcttgaggaagggcacatgagttgcagatgcttagtgactattttttttagtgatagactcatgggggaaggcagcttagctatagctaagacaaccttggggtgtgcaggtgggggcggtgaggtgacttccaaccagaaaagaacttgtaaatctataggcataggtcataaactgagcgtgtgtttcacccaaagatgtgttcatttctctccagggggacatagctgggggtgagagaagcgtggaggacacaagattttggcattgaaaaatagcaaagagtctaaaaatgttattcctggaagggacattcaagatcataaaacattaggacaagactgcatcttttaaatgtacattttaaaatatgcttcaacactctgctattgaggacactggctcagaaaggcggaactgactgcattaaggccataaaacaatttagtggtttcttcacccttttttttccctaagagacagggtctcactttgttgcccaggctggagtgcagtagcataatcacagctcactgcagccttgacatcctgggctcaagttaatcttcccacctcagcctcccaagtagctgggactacaggtgtgcacccccatgcctggctggtttttaaaatttttattattttttttttaatgtagagacagaggtctccctatgttgccctgcctgatctcaaacacctgggctcagccatcttcccctgcctcggcctcccaatatgctgggatttcaggtgtcggccgctgtgccatttcactttccccacagtattaagtcatagatgccattcatttccatgctatactgtcttttaatgattgccatatagtatttctttgtaacagaaataggcacttgaattccaattttaatttttaatttctcgtgaccataaactctgaagtgttacttcttctggctagaattaccattagagttattagacctaactgattgaaaccacataagtacaatacaaatttgataacagtttgcatatggagagttacattttatttattgagatggatttttaaaatgtatgttcatgtttacattgataaatattattgattcctagattggaacaggagtcactatcaacactatccttatttttttattttaatccatatatgagtttagaagcctttttcacaaaattatgtggaactggaaagagttttattattacagtgtcactcaattctttggattctttccaagatgcttggcaaaaatcacttggagctcttttattgaaaatcagtgaacagctccatcagttcctccttcagcgttgtatcatggcaacgccttttctctaagtctgttcccctgaaggagctttgctgtgatttgaatgtgtcccccaaagctcatatgttggaaacttaatatccagtgcaactgttttgagaggtgggacctagccaggcatcgtggctcacatctgtaatcccagaactttgggaagttgaggtgggagggtcacttgagcccaggagtttaagactagactgggtaacaacatagtgagaccctgtctctagaaacaaaaacaaaaaactaaattaactgagcatggtagcacatgcctgtagtctcagctattctttaggctgaggtgggagagttgcttcagccggtgtgggtgaggccatagtgagctgtgattgtgccactacacaccaacctgggtgacagagtgagaccctgtcttaaaaaaaaaaaagagagaggtgggatctttaaggggtaattaggtcatgaggactcttccctcacgaatggattaattccattat

SEQ ID NO: 31 - DNA, 4631 bp, Homo Sapiens
atcctttttctctctcacatacacatataggcatgcatacagacattctcattctctttctctctctccccccacccctcccttttctcacacagacacattctctttgtctctcacccttgccccctcctctgtgtctctcacacacattctctctccctccttccctctctctcacacacagatgcatacatacacacgttttcattctctttccctttctctctctcccctcctcatctctcttcctctctctctctcacacactttctctctccctccttctctcacacacacattctctctctccccctttttctcactcatctctctctcctctgtcatctctccccccaacacacacgcattttctctctctttccttggcttcctctctctttcacacacacacatatacacacacacgtgcataatctcattctcattctctctctcctcctctccttcttgctcacacacacacatacacacacttacacactctttcattctctctctccctctacccttcccatctctccttctctctttcttcctcacacattctctctcgcccctcctctttcacactcacattctctctctcactttctctccctccctctttcctcactccctctttcacacacacacataatctcactctcattctttctccccctccttctcagtcacacacatgcacacagatacatacacacattctcactctctctctctccgccttccccaactttcttcctctctctctcacaaacacacatctcctttccgtctccctccttctcttcccgtctctctctgcctctctgtcacacacacatacacactttctcattatttctctctctcacacacacagatacatacattctcattctctttctctcacacacacacattctctttcacacacaaacacacacacacattctctttctccctctccttctctcttccttcctctcatgctgggggaatcaagatggctatattgtgagctgccctatagagaggcccatgtggcatggcacacccaaggaactgagacactcagtccagcctttcacaagaagctgcagcctcaccaacaccaggtgagtgagcttagaaatgggtcatccagatccaggcgagtcctgatgactgcagccccagccaacagcttgactataatctgatgagaggccttgagtgaggaacacccagccaaacacctctcagactcctgatccacagaaacaatgaggtaataaacattcgttgcttaaagctgttaatttaggggtaatttgtcacatagtaaattataaccagaacaccttgccagcccttaattatttatcatttatttatatttttgctaatctaatgtgagtactaccaatgttgacatctgtatttgtgtcagtatgtgtgtgtaaattgcttcaaatcctttgcttatttttctattaacctgtctatcctttcttgttgttttgtaggattctaatgtatttaagattaatgctttatttttcatacatggtgcaaatatttttttccatctgtttaaccaaacataatttataattcatgtgcagttgagtttgctgattatgtctcttgtcatgtttagatttgtattattattagaaaagcattacagttccaagatacgtaatattttcatgtattttcttccaaaatttcagagacttgttcagtatttagcttcttaacctgcccatagtacattatttctagtgaggttatacagagagctaaataaaactttccagattgataatcagttgtcaaaatatcaatgtgatatagtccatccatttttataagttgaatcattataaaaacatgaatatttctgaactctatattatgtaccatcaattttcttactgtttcctgcaataaccacactgtttaaattgctataattctgtaatatgttttgataattggtgggattagtttctcactggtcttcctttcaaatgttgtcttagtgttttgcgaatattttttccataatgaatttaaagtaatcctatacattccttagaaattatatttagagtttaattttcagataaattttaacatatagaataattttggggagagtttacctctttcaaatactgaatacttcttaaccaagaacatagtataactttttctttttttcagggcctgtgttatgaccttcaatagacttctatattctaaataggttttacaagttttcttgtcaggcctaaccataagtatttaatgagttttgtggctgttctaaatggactcatttttctattacattttaaattcatcattgctggtgtataagaaagctattaattttttaatattgatttattttaatctggctactttcctggactcttactagttcttacagttttttattgattcttgctgatttttttcttttggtggacaataactttatctttgtcatgtgtgtatatatatgtgcttgtatatgtgtctatatatatatgtgtgtatgtgtatatacacacacatacacacattttgcttttattttattgcatggaatagcatcttcagcaaacatcaatattgacgtggtagctgggaaccttttcttatttctgatttactgcagattatcttcgtattagctttcctgctaccactataacatattaccacaaactttgtaacttaacccaccacaactgtatttccttacagttctggaggtctgaattcagaatgtgatgtacagggctataatcaaagtgtctgcagggctggttccttctgaggggaacatgctctcccttctgcaagggaggatctgttccttgtctctatcagctgctataagccacctgcattccttgggtcaacgcttcttcttcataacgctccaacctcttgcttgcttccatcatcacattgccttcacctctgtctaaattcctatcacccagataattcagaataatctctcagtctcaaggttcttaacttaatcacatctgcaaaccctcttttaacacgtaaagtaacacattcacaagttccgggaattaagacatttttgcggggaggggacattgttaaacctaccacgcttaaaatatttcactattatttatgaagttttcttaaggcttctggtagatttttttaagtcactttcaagagtatatttctataactcgcttactaagagcttctttcttctgagtcagtaacaaatattgtaatgaatcaaatcatttattcatccatattgagatgtttattcactgttctcttttgttaatgtactaattaaattaatgcacatgtttcataatttgaaatacttttgcactcccagtatacaccttttgggcataatgtattaatattagtctgctaacacattcctgaaattaatttgtgaatagttcatttataattttcatatctgtattcacaagttttcttttctgtgctttttttgttaaatcttgatatcagtgttatattactcccataaaattattttaaaaaaattctatttctttatgtcagtcgaaaaacattacataacaaagaagttatctctataaaggtacagttagcctcacccataaaacatcctgcacctgatttccctttatcgtgggcaataagctctcaatatttcccctgacattatcaatatttctgctattccttaggtgaacttttgtcatttgtgtcactagcaaataattcttactaagatgcttaatttataacataaaccgtacttatgtttgatatggtttggctctgtgtcatcacccaaatctcatgttgaatttaattcccagtgttgggggaaggacctggtgggaggtggtggttacatcacgggagcagatttcccccttgctgttctcgtgatagtgggttctcatgagatctgattgtttagaagtgtgtagctctttcccctttgctctctctctcctgtttcagcatggtaagatgtgcctgtgtctcctttgccgtccaccatgattgtaactttcctgaggcctccccagccatgcttcctgtacagcctgcagaactgatggaacaccaggctatagtttcaggaagccagacttgacccagacttgaccttgcaaaaaatagcaaccccttcagaactggtaaagcaatgagaaagaattgctcagaacttcatggagctgagccattcacccatcctggaacatccaccttcctctggaattatttttttaatgttttcttccttcttgtttaatccactaattctctctcttttcctctgtttctctctctctcatctctgttcctttccatagcaacatagactatatatgagtaaatatttgaatatatttaataataaaagtacatacacaaatatttacagaactgctcaatcagaaaaaatacacttaataaataattgttcaccaatggccttgatgtgctgtaatttgtatttccaccaaatgagtcccagttaccttttatgtgtattttccatgcttgttcacctatttgactttatactaaaattatattaaatttctctctaatgtttt

SEQ ID NO: 32 - DNA, 36328 bp, Homo Sapiens
agtcaatgctagaaatggacgtttagttattgaatcccgctaacgaggggagccaacaagagagggatgtcggcatcgggtgtgcggttccaagaactgattggctgtggagattagaagttaggaacctttgcaacggaaagcggcctcgggcaggcgccttttgagcagaggagtaaaaccgccagagcgtctcatctctgggcccggagccccaggctcgttctcctcagcccctgccggcggcggcgctcttgcagccattcctgtgaggtcgtttttcggagcagccgggccggccgaggagtaagtaggcgccagagttctagctcgggcatctgcctcggggccctgtcgccgccgcgccccggatcctgcgttggtcctgtccgataaagcggaggtcggccctgcttgctgacgagaccgtaaaaaccacggcgcttggcgccctgccgccgccacaccacaccaaagtgtacctgcccgaggctggcttcgggcgcgagcttgcatttgtgactttctcttaccgtctttgtttgcttcgttttaagtattacttccagataagggacacattctcgaaatactttgaaaacagttttgaattttgttcctcccgttgaaacggattaaatttggacctttcaagctacactgtgcaatcatcaatctcaataagctcttaataggctcattcttccgtaggctacaaacaaaataaagatcataacatcctgcggaggaagccattggtccatgtagagtcgccagatgtcaattaagagtagatcgcttttcagagaatacttaacgactctggtttagacctagacttggaactttgaggtgtttggaacactgggcagaattttcctttgttacaaaacaaagtttatgagaacgtaatttgtttttgttgtttttgttgttagtattgaagcaattttggtgcaaaccaaaggataacaaagcaaaacaatgaaaatcacccagagttccattacccacactgaaccaacttgaatatattggtttattttggcttttttccatatgaaatgttaaattttcttgtactcacgtgtagaatatgatagtttgctctttcatgtaacatgtctcccaatttttacatacataattctagtttcagtaagcatttttataactacactctttttcctttgttattgtatgtctaggttatttcaactttgcactgttgcttgtaactactatgtgatgaggcagtagctagattagtatttagaacgtgagcattcaagtcaggcagacctgggcttcacaacttactgtgcaatttcaaagagtttaacttttttgagcctcattttacacagtaacatggggataatggttctgattgcatagaattattatgagagtaagatgaaataatgagtggaagtgcctgcagcatgtattgttagtaaatgctgtattactgcaggcaaatttttcttttgttgtggttttttggtgacatgtatgatttatttccagattttgaatatacttaaatactattaaccacagtaggggtatggggtttgatccacagcttttcatatattttatacaatatattgtgtgtttgatacacagcttttcatatactttattataagtaacacatgaattagaaataatttttcacaataggaaaaactttttaaaaattaaaatttataatcctgctaaccgtaggtgaatagtcacattttgggcaatccttttttatgcatatatatgtagtggttttattttattttattttatttttattttttgaaacggagtcttgctctgttgctcaggctagggtgcaatggtgcgacctcggctcactgcaacctccgcctcacgggttcaagcaattctcctgcctcagcctcccgagtagctgggattacaggcgcccgccgctgcgcccggctaatttttatatttttagtagagacggggtttcaccatcttggccaggctggtctcgaactcctgacctcgtgatccactcgcctcagcctcccaaagtgctgggattacaggcatgagccaccgtgctgggcctgtagtgttttctaaaaatagaattatattataaattgggtttatcaacttgctgaaaatggcagaggccagtgcgatgagagtagggtgattaagggagtaggaagtaatgcaggaaagggagtttgtaggatttagatttcactgaaagtgtactggacaggttgggcatagtggctcaggcctgtaattgtgtcactttgggaggctgaagtggaaagatcccttaagcccaggagttcgagccagcctgggcaacatagggaaaccctatctctataaaataaaaataaaaataattattttgaaaaaaaagtttactggacagagtaagttcagggttgaggagtgacctgatttgttttagaaggctcatttggctgccatatggagatagactgcaagggaccaggggaggaagatgcaatccaattaggagagtatttaagtaatctctgtgagagatggtgttagtttcgatcagggtgtaagtagggaaaaatgattgggttctggatatattttgaagggagaagttataggattcactgattgatgggatgtggaattcaagagaaagtgacttaaagaattttggtttgggcagttaaacagatacagttgctacttaccaagatagagactgaaagttgggggaaactaaatagagttctgtttcagtcatgttacctgttgtggagtctaactagttggaacaggagtatgaaagacttaatcttctgttcttgaggtatcaatttgtcccttcatttctgtcagtttttgctacatatattctgttactaggtgcatctatccttgtaaattgttacatcttccttgtgggtttatccttttatcattaaaaatgtttctctttttctctagtaacattgttttaaagtctattttgtctgatattaatgtagctatttcagttctcacgtgattactatttacatgctttgtatcattgactctaaaatgtgtctcctgtagacatatagttggatcttggtttgttttttgtttgtttgtttgttttttgttttgagacagagtcttgccctgcctccttggctggagtacaatggcgtgatctgggctcactgcaacctccacctcccgggttcagacgattctcccacctcagcctccccagtaactgggattacaggggcccgccaccacgcccagctaatttttgtatttttagtagagacggggtttcaccatgttggccaggctggtctcaaactcctgaccttgtgatccacctgcctcggcctcccaaagtgctgggactacaggcatgagccactgtgcctggccggatcttgttttttttaatctgataatttctgccttttgatccaattgtttaatcattcacatttaatgttattgatatagttggatttatgtatgccatcttatttttgttttccttatgtcttgtctttttcttttcctgtctctcctttactgctttgttttggatcaagtgaatatcttctaatgtagcattttaatttcttgaatgattttttacactgttttaagttttttttagagactgtagtggtgctctagggcttaccgtacaattagcttaacttattagaatcagcttcagatttatactaactcaattgcagtgagatatagaaaccttactccaatatagttttattccatgtccctgtttttttgtggttttgttgttgtacatgttatagttgttacaaactcaacaatacattactacaattattacttttacatcatttaaagaaaatgaacaaaggaaagcaaatatatatttgtagcttttgttatagtaaccttatttatcatttcaggttgtttgtttatttttcttgtggattcattaccatctggagtaattttgttttctttttctttcttttttttttttttggagggataacagggtcttgctctgttgcccaggctgctggagtgcagtgtcatgaatatatctcactgtagcgtcaaactcctggactcaaagtgatccttccacctcaacctcctgagtagctgggactacaggcacatgccaccaggcatggctaatatttgtattttctgcacctcagccttctgagtaactatattactctataagcacacatcaccacacccagctaatttttaaattttttatagagacagagtctcactgtgttgctcaggctggtctctaactcctggcctcaagtgatcctccagctctggcctcccaaaagtgctgggattacaggcatgagttctttgtatgagttccttgtatattttggatattaaccccttgttagataaaaggtttttcagtattttctcccattccgtggactgccttttcattttgttgtttcctttgctgtgcagaagcttttttgtttggtttagttccatttgcttatttttgcttttgttgcctgtgcttttggtgtcatttacaaaacaaacaaacaaaattattgccaagactaatgtcatggagcttttccactgttttcttctagttttacagtttcatgtcttacacttaagtcttttcacttttttttttttttgagacagagtctccctctgttgcccaggctggagtgcagtggtgtatgatcttgactcactgcaacctccacctcctgggttcaagtgattctcctgcctcagcctcccgagtaggtgggattataggcatgtgccactgtgcccggtttatttttgtatttttaatagaaatggggtttcaccaggctggtcttgaactcctgacctcaagtgatccacccgcctcagcctctcaagggactaggattacaggcaagagccactgcgcctggcctcttttaaccattttgaattgacttttgtggatggggtaagataagggtccaatttcatttcttggcatgtggttatctagctttttcaacaccatttattaaagagactatcctttctttattgtgtacttttgacacctttgttgatgattagttggccacataaacgaggatttatttctgggattcctattctgttccattggtctatatgtctccttttatgccagtaccatacagttttgattactgtaggtctgtaatataatttgaaatgaagtgtgatgccaccagctttgttcttcttgctcaggatcattttagatattctgggtcttttgggttctgtatggatgttaggaattttttttttttttctgtgaaaaatgtcattggagttttgctagagattgcgttgaatctgtagactactttgtgtattgcagacattttgacaataatgattcttctgatcctgaacatgggatagctttccatttatttgtgtcatctccagttctttcatatatgtattatagcttttagcatacacatctttcccctccttggtaaaacttattcctaagtattttattccttttgatgctattgtaaatgggattgctttcttaatttctttcttggatacttcactgttagtgaagtgtaattgatttttgtatgttgattttgtatcctgaaactttactggattcgtttattcattctaacagtttttagtggcgtatttagggttttctgtatataggatgatgtcacctgcagagacaattttacttcttcctttctgatttggatgccttttatttcttttccttgcctaatttctgtggctaggatttctagtactatgttgaatgtaagtgataagtgtgggcatccttgtctgtccttgtcacattcagttgtatgtgcaatactggaaccatccagctcatagtcacgtaattcctctttgtgcagcctcatgtaaaatcacacccctattcacatttttttctgtctgtctcccacctctccaggtccctgccctgcaactttcagttacttcagactctcagaagactagcctctaaatacctcaatttatctgcactactgtggtctacttgaaattctcttccctcttctgcagtttgtaatggcattcaggccaaaaactgtagtagttttagggctctcttcatttgcttctctgctcctagggatcatagtgctgtgctatctgttgtccagcatctgacacagttggttttatattttgtctggttttctagttattaagcaggttaagtctggttcctgctgttctatatagcaggaagcaaaggttctctcatgaatttttagcataataacataagcgtggattccaaaaattcattacacagatcctggaaatctgtttactatgttttatacattctgtgaaagctggagaatatatatttgttttactatgtgtatcgcaaataaaatatcaatttcatgtgccagagaattgaatacattatcaaagggtcatttcataacgttataatcaccatccatcctgtaagtcctttgaaatttcttcttttctatggatctaacattgatcaataacgaattcctaagcatctatattagttagcccagtgtttctcaaagtccaccgcatgtaaaaatcatctagggaatctttctaaaatgtggattctgatttagtaggtctggggtgaggtcttcccttttgcaattccagcaagttcccatgggatgctggtactggttaatggaagtcacttagagtagcaaggagcctgtttgcctagtatttacaatgagcacgttttgggtatcatcaaaacaagagaatctaaaaatgtatggtgtgggtggaaggttgtgttacttgatatttcaaaaagatcattgaaatcagaaaatctcagagatatgttggatttcatcacatttattctatggcttaatgttgttttattttgaatatataataagagagataccacaaatctttagctattaatatttagggatgttaatgtccttaattcatattgtctcaaatgtgattcattccctctataggtatactaaaacaggcattcatgcctacaaaaccatcttcctaactttctttcctctttttagtctcttcctgaaccagtgacagtggttctcaaacattttggtctgaggacccctttatggccttaaaaatgatcgaagagcttttatttatgaaggtaatacctgctaatacttgttgtaatctattaacattgagaaatgtaaaaatttttattaattcacttaaaatatcaataaacccattatttgctaatataaattgcactttttaatgaaaaataactttagtttctactgtgtgcttctgcattttgaaaatatgtctaggatacggtatgtatttaggagatattttctaaataaatgcatattcattttttaaaatgggacaaatgtagcatagacatatttttgctaacaatatccatatagttgcaaatttcacttttagaatttgctttcaaaaacaggttgtttattcttctttgttatgccttagttagtaaatcatatattataaaacttcttcaatgcaattggtctttggtcagccattgacataggaagagttagaaagagtccagggctccttggtactggctgtgactggataagtaggttgtggcttagtttgtgtttaggtgtcataactaggctaggtttgggtcccagaaagtgctagccttactgtaggagaggaagtggtattgctgggtgtgtcctcaggtcaggaagtgggacgagtgcagtatggaagcccaggggggtccttgtgactggaggaaaggtgaggtttccagtaaaggattcagaattcgggcatggtgcagcatgcctatagccccagctactcaggaggctgaagtgggaggatcacttgagaccaggagttcaaggttgcagtgagctgtcattgcgccactgcaccccagcctgggtgacagagtgagacctgtctcaaaaataaatacataaaaataataattaaaaaaaaaggattcagaattctagaatacatattatctttctatcatgcagatctgttcttaggattgtattttccaaatcatgaataaaataatttccaaaatacttattgggaaattatatatatgtactgtattacttggaataaaaatcaaataaaagtcaaacttcttaatgtggctgtaaagccttgattatttaaaccttgcctatttttcagtttaatctttcagccacactggcccttgtgttaatcctaaaacatgccatgctttttcctacattaaagcttagggtttttgatatttctactgcctggatttctctgttctcactcttcctcttgatcaccatgacttatttttcaagtgttggcttaaatgtccgtctcacagatagcccttatctaaataacagctttccctctggttcctagataaattaggacctgtttttttctataactttcttaaagtatcctattattttccctgataaaaccttgttggactgtttgtcagtatatttatttgcctgtttgtttggtgtcagtttctctttttttcctgtgtgttttgtttgtttgtttttttgagacgcagtttcactctgtcaccaggctggagtgcaatggtgcaatctcggctcaccacaacctccacctcccaggttcaagcaattcttctgcctcagcctcccgagtagctgggattacaggcatgtgccaccatcctggctaattttgtatttttagtagagacagggtttttccatgttggtcaggctggtcgcaaactcccgacctcaggtgatccgcctgtcttggcctcccaaggtgctgagattacaggcgtgaaccaccgcacccggcctgtttgtttgttttcttattagactataaactatatgagatcagaccatgtctcttttgtttatcactctggcctacctgctaacacagtgcttacacataatagtaggtgctcaagaaatacagtgtttgatggatgaacgtaaaattgtaagagcctgaactagtgtaatatcgaaaatagggaggaagacatgaattaggaaagcctttgaaaaattagcatgttctgtgataaagctacatctaggcaatattttttgatacttttaaaaaaaaaactgtaatagctacccaatatttaggaatgatacacatcacacatctcagtgaggtatgtagccttttgtactggtgaagagagccaggtgaagtctaactctaaggatctaaacactccattctagtagagagcctggagaagtgctcttgcataagctcatccatgtaagaccatccataacttagtgaaataattttcattgctgtttagttgcaaaaatcactcactgttttgcctccataagattatcggttttagtgtttaatcgttcacagccttgtcaaaaccaaaatggctagggagagaactatttccctacattaaaacttcgagcaatgctcttcatagattttgttttgaattgtttaggcccatctcagagttcaagacacttagtctcttctaagagaaatcatggtcacaacaaacagagattaaataaagagcaagaaattagaagaaactcaaaccattcacttagattatttgttagattttggccttaaaaagagacaaagttgcttgaaacaagtgattaaactgacatttttagattattattttattcatacctttattgtgaataaattggccacatgataacattttataatgttaaataaatatgatatatataaatctgtataccacaacaattaaattggagggcgatttgccatttaaataatttatcataggatttttataagatcaagcgcttagtgcatatcaaagagacagaaagttttcattgcagttctgcacgttcactgagtaccttttatgtaccagttgcattgttctagaatcttatctatcatgtaaagctaggtacacctgaaatagtttagttatggtggcaaagttagactgcagttattggctgggaattttttgtatatctatgtacatcttccataagagggcagcaaaggaccagcatgattttttccttatcatgaagtcatagcagagattgcctcatattgcaaacttaatagaaatcttctcagagtaagggcaaacagagggcatggttacaagtttacttactgtctagcctgtcttttatatggtctgatatggctttttagtacatagattatctcacatcacagtgatagcctagtgattaaatgttgatcctggggtcagttgtcaggctttaaatcctggaaccataacttaactagcttcgtggtctagaaagactactcagtctttctgagcctcagtttcttcctcaattttttataaaaaggagggcaagggatagtaacaatgccacttcacatggttttaataaacaaaataaaatttgtgtcctgaagaggctaagaacagttaaaaggtggagctagaaaaaccaccctatactagccttaggtgtattgtatttatttaagttaaactcttattaaaaagagtctcataaaggaaaatataggtcattactttctgtaactacttagtatttttagttaactaacatatatatctatgtactgaccaattatttgctcgtacaatttatcaaaccaattaaatatacactgttaaatttatttccctgtcccccgagacagatcctggctacgttgcccaggctggagtgcagtggcgcgattttggctcactgcaacctctgcctcccaggttcaggcaattctcctgcctcagcctcctgagtagctgggattacagaggcctgccaccatgcctggctaatttttgtatttttagtagagatgggatttcaccatgttggccagggtggtctcaaactcctgacctcaggtgatccagccgcctcggcctcccagagtgttgggattacaagcatgagccagcacgcctggcctgaaaatacattttgatgaacaaaaaatttttaatttttttttttttttttttcctgagacagagctttgctctgtcacccaggctggagtgcaatggcgtgatcttgcctcactgcaacctatgcctcctgggttcaagcaattctcctgcctcagcctcccgagtagctaggattacaggcatgggccaccatgcccggctaattttttgtatttttagtagagacgggatttcaccatgtttgccaggctggtctcaaactcctgaccttgtgatccgcccccgtggcctcccaaagtgctgagattgcgggcgtgagccaccactcccagccaaaaattttttaattttaaaagtcaatgtatatcatttgtattttatagttagtgctttttttgtattgtttaaatttttaaaattcttccattaatctaaaatattttcatgtgtgctttctactaagagaatttaagttttgtttttgacattatagtttttaatacatttggatttggatcttatatcttgtatgatacagaactctaattttcgcctttaactacatgcataatcattttttccacctccacttattgaatagttcctaattttcccatcaatatcatgtgtttcttctggcatagccaaagtcccataaatgtgtgggtctgttgtagtttcctatttaattcagttaatttgtccaatttgttttattatgccttaattaccacagcttcacagtaagtctttatgtctgatagggcagcttcctctagtgtcttcagaaatttcctgactttaaaaaaaatccttattgttcatgcttttttaaagaattagctttacatgatgcaagaaaaagatctgttggaattttgattgtaattttgttaaatctataggtcaactaattacaatattgaatcttcttatgcacaaacatggtatatttctccatttattcaggtctttatttaatgtctcctaatgtctttttgtagtttttacttagagatcttacatatttgttattatatttactcctaggtacttggtattctctaagattattgaaaatgctgtcttctttttaattacattttcaggtatttgtcattggtataaagaaatgtatttgacaataatcttatattcaccttaaattctcttatttctaataaattgtactttttttggttttctacaaaaatgatcatatctaaaaataaagttagatttgtttattcttctgcatcattttgaattcagtttattatttcatgtgctattagaacctttaatttagtattatttattttttgatttgtaaatcggaatgcttttattatcttttcatttaggatgatgtttactgtaggttacttagatacgctctatggaaatctcttttattttttctaagaccttttattatgaatttaatgttgaattttatcaaatgctttctctgcatttattagaataattatgatttttctctatctgttattataatgggtcagatttatagatttttctcatactaagcctatccttgtattccttggataaatctaacttggtaatgtttacttttttcataacttttagctattaagtagataccaaattttctttcaaggtcaagtttgatagttataaaaaactagtgatactaagtcatagaaaatatactttaaaaaactagtgatactaagtcatagaaaatatactttattttataaaaagactttaactgtaaaaagtaaaaaaaaaaaaaaaaaaaaaaaaaaaaaaaaaaaaaacctggccgggtgcgctggctcacccctgtaatcccagcactttgggaggccgaggcaggcagatcacgaggtcaggggatcgagaccatcctggctaacacggcgaaaccccgtctttactaaaaatacaaaaaatcagccgggcgtggtggtgggcgcccgtattcccagctactcgggaggctgaggcaggggaatggcgtgaaccctgggggggcggagcttgcagtgagccaagattgcgccactgcactccagcctgggagacagagcaagactctgcctcaaaaaaaaaaaaaaaaaaaacccctagaattttaattactgcctttacttttaattcagtggtttttagtatattcacagagttgtgtaacaatcaccatgatcaattttagcatatttttattacttcaaaaagcaactctggactcatgagcagtcattcactccccatctgctcccaacccctttgttcccatccgcccacccagccctaggcagccactaatctactttctgtctctacagatttgcctgttctggacctttcatataaatgcaatcaggcaaaagaaaggagatttcagtgctcagtgttgccaggtatctctgcctccagttttgcaccttcctggaaagctcattttgttcagattgtctgcctgcctctatctatcctgccttcagtggatggcagagatttcatctcttttgtttgcacagccttgaaaggtgcttgatacagagatgcttggtaaatacttgcagaataaattataaaagtaacacatactcataaaaattttaaagtaaaaatatgtatagtaataaacacttggtgcttattacatatcatccagtgggataaatgcttgtaagtatagtcagccttctgtttccctgggttccagatttgtggattcaaccaactgtggctctaaaatatctggggggaaaatggcatctgtactgaacatgtacatacttcttttcttgtcattccttaaacaatacagtataactatttacatagcatttatactgtattaggtattataagtaatctagagattatttaaaatatactggaggatgtgcataggttatatgcacatactatgccattttatatcagagatttgagcatccaaggatttgggtatctgcaaattttggtattcttgggaggtcctggaaccaatctcttacagataccaaaggatggctgtattctccattccttttcaccagctgagatcgtactgttatctgcacttaacagattaagaaataggtgtgatgagtaatttgtttaaattctgtggttgattgtgttacttttcgactgtattctgtgctcttccctacaggaggattattcattcctgtttacttgaattcaggcaacatcatgtaacttgatttaaggaaccgatacatgagtggaaattctgtgtggcatttctgagcagaagttttatgaggcagcacatgctcactgtgttacctgttccttctgccatgagactggcagatggacattctctatcagccaggatatcagaatgaagaaatgtagaacatagaccaaaacaccaatgagaaataagcgtttgttgttttagggaaagtgtgttaccacagcataatttaacctatcccaagtgaatacatattcatggagttaatatctatacctgaaaattgaaactcaggttgtctacatctaactatgcctctgtcttttccaaaggtataaagtaggagaaacttccccatgatcctactcttccagtgttaactacagttaaaatttagtgtaaaattgtttaatactttttcctatgtgtatgtcaatgttcatttttttaaaactgggaccactttatatgacacatactattttagagcttccttttcctacttagtaatataaaatggaccactgtcacaggttaggttttccataaacagacactgagtttggaatataagattattttcagggatcatcacctttaaaaggagaagtgaagaagtaggattggggagagcaagaagtagagctgtgatgctggcccacagatgtctctctggggttcgtattgtttgtcagagttatcccatatcttgtagaagtggccatgcttttcaacccactccttactcagtggcctgatgtgggctgccctgagcaaggtagctttctgcagctgaagcagacactgaagttgctggcagctaactccatctttgcagctgggcagcaaatcctttcttgaagtgggatctggacatttatatttgtctagcacagttcattttttgcatcacttggaaacccttctctgttttcattccttttgttcttaatgtatattctcaagcctcttgtctacaatcactagataagtttgttgtaaactgtcttaactataaaatgaagaaggtataggtaactataatatgaagaatgcattggaagtgtaaattttaaaggagtttgctgattaataactcttttgttgtaacttttgttcaatgatgtttgacaaatactttttttttttttaatttgaggcagagtctcactctgttgcccaaactggaatgcagtggcatgatctcagctcactgcaacctccgcctgttgggctcagagatcttcccgccccagcctcccgaggagctggaactacagccttgtgccaccacacccagcaaatttttgtattttattgcagagatggcatttcaccatgttgcccaggctggtcttgaactactggacttaagcaatccgcccacctgggcctcccaaagtgctgagattacaggcatgagccaccgcgcctggctgacaaatactttttaaaaatatccaagtttctggattttattcacctctacaaaaatgatttaagtcctgtagaaacatgtgcccacaaatgacacagtaatctccagcaatgtgttcaacagcacgttgagcataattgagcataacagacatttttaaatttgttgtctcaaattccatttagatttggctattgatgcaaaattagggaggtcatttttcactagattactttcaatgctggaatccatacttaaaaaaaaaaaaagaagaaactagatttagtatatctttctttgccacttcaggcttccaaaggagaaaaattcatggataagtcattaactgttacaaatgcattatgtcttcagttgtgatggttatgataaaacatgtttattttatatttgtaatttagtaaaattagttgattcaaggagctctatcataaatgggaagtaataaaatgataataattaaagcaggttatttttctctggtcatttttgcattctttgtagctcatgaagtagatttgttgctttcatctgtgtctgccatgtatgctaggcaggaaagaaaggaagtaagaaagatatagccatgtggggaaaggagacagagggaaggaggaggaaagagaaggaaggaaataaaatcaactcttcgttttctgcactttccctgagcaagttcttttttatttgtgtgtacaatgaatctgcgtttctccctgccacgccccctcccaacccctttggctaatagaaagctctgaaaaaaattttgaaacttatatccaaatgcagtggatataaataaagttatttcccctggcttttcaaaaatatgagtgagtgttggatattagaaagctaccttacttctttagatcgagaccatcctggctaatacggtgaaaccccatctctactaaaaatacaaaaaattagccgggcgcggtgttgggcgcctgtagttccagctactcgggaggctgaggcaggagaatggcatgaatccgggaggcggagcttgcagtgagcagagatcgtgccactgcactccaacctgggcaaaagagcgagactccgtctcaaaaaaaaaaaaagacagctaccttacttattggaaagagatgatctgtgtggtcagtatcagtttcttcacaggaaaaaaaaagtagattagtaatagtgtttactaggcacagtgctttacatttctttacttagttctcaaaacaatcccattacataggtattatcccatttaacagttgagaaatctcagtcacagagagttaagtgactccccaaagttcacatggctagtaaattatggagctctggatttcatgccctgaaccaatgtgctattacaagccacatactaaggttaatacacaaaatacatgtcataagataggctccaaattgttttagagcttcccagcagtcaaacagaaaaaaggaagcatggttattttcaagacttaggatacatatgataaaagcaaagcagttactcagcggaagtgcaccttcctcagaagttgggcctggaaaaaaacttcagatatttataaaattgatgccatacaatgttgtgaacactatgtttcaaaactgccccctaaaatagtatgaagctttttttttcacatgacaaatatatgagaaaccattattattattattattactgttttgagacagtgtcttgctctgtcagccaggctggagtgcagtggctcactgtatcctgaaactgctgggctcaagggatcctcctgcctcagcctcccaactagccaagactacaggcacacacaaccatgcctggctaattttttttttattattttttgtagagacaaggtcttgctatgttgcccaggctggtctcaaactcctggccttaggcaatcaatcttcctacctcggtcccccaaagtgttgagattacagacatgagccatcacgccctgctgaaaccattatcttatgatttctgatatgtgactctttcattgtatggcatgatccaaggatagattatacatcgattcagtgaacgcatggactctattcttctgagcaatcctccatgagtatgtgttttgaggctaatcttttgataaggatagactagcaaagaatttgattgattccgtcaggactctagagtagaaatatcatgtattgtcagttaaaggcagatctttgaattttaacaaagccagcagaaggcaggattcatacacttccaggtatgtctgaacagaagcctgcctgaccacaacacagatgtgatcgtctaagagtctttcttggtgtaaaatcccatgattctacagggtttattcagatcctagtgtcttaatgagttgatgtaagagtacagtgctatattctatgagggtgttattatttgtaatgaaaatagggagaataattacacattcttgctttctttggatcagagcttctttactggtaaatactccccttttcatatttttgtaccagtcatcataatttcaaaaatagtataatactgtattctaagcataacattttaacttgtgtttatatgtgagaagtttagaaaatataataagaaaaaataaaaatctcccacaatcctactggaggctatgaatcttctcactcccatcttttcctgcacacatgccaacgaactaaaaaggatcagaatatgcacactgttatgtaatctacctcattcatgtaataatgtatcatggatgactcgatgccattacatattaatagacatagtgcctgcagagtattatgtggacacactcagggctgatgctctgctagtatcttcaaggctgctggaatagccatgctggttgctaaaatatggaaagacttccatactggttagtaaatggtgctgccctgagccctctgaatgccttcccactggacctcccccccatcacactccccagcaactaaagggttaacgcctgtcccatctggggcctctaggatcctgctatagtagtgtggccagcctgctttctgattgatcagtgcccataccaatggttaaaattttggatatcattcttaaatgtatcataccacattgttggtaatatttcgtgtgcttattagaaagtatttttctgttaaatatatatatgtgtgtatatttttaagtcttccgacagacttctttgacatgttatgtcttcaggaagccataggctctcatgggaaattggtgtctggaattatcactgcattaatgtaataatatatatttactagaacagtggtttgacatatgaaaatcttaatttatacaccaagcatacttgaatgtagacttttccttctctatagaccagaaaccatggcatttatttggaattgcttgatgtcactttaaattgagacattcaatccattcctcttttgaatatgaaaaactttttcctttaagacaatagtattttagacttcaccatcctcccatactgttcttttatatttcttcatgttctttcttcactaatccatttctaacacacccatataatttttcagatttttttcatatttccatttttaatattccacattatatgggtaattttttataatctggctttctgcatttgacctcatactagttaccagcttttattttttttaaataaacagctttgttgtaaggttcattaaaacaaaacaaaatttctttttttaattgagttagggtctctctctgtcccccaagctggagtgcagtggtgcgatcttggctaactgcaacttccgccttacgagttcaagcagttctttgcctcagcctcccaggtagctgaaattacaggcacacgctaccaagcctggctgatttttgtatttttagtagagatggggtttcgccatgttggccaggctggtcttgaactcctgagcacaagtgatccacccacttgggtcccccaaagtgctgggattacagtcgcgcaacaccacacctggctaatttttgtatttttagtagagatgggttttcgccatgttggccaggctagtcttgaactcctgagctcaagtgattcacctgccttggcctcccaaattgctgggatcacaggcgtgagccaccacacccagcgaaaagagcaagtaattcttgcaaattttttacccaaacctttagaatgtgttcttttttttttcttttttttttttttttggttttgggtttttttttttttttttttttgagcatttatgaaatggctgtgaacttcttctaacttctaactttccaagttgtctccttttggccctaggagtagaatttttctttaattctcagctggtgagatctgttgccaccacagttcaaaataacgattaagtactgaggccagcccatgcctgatccttcagtgatgttaggaaggtgaatgcttggctgtttgaaagcctccttattgtcatttccaatccattctctctgcttctattccttttctcccaaaacatttcagtgttgtcagttcatactctggagtctttggaaaaagagattgttgtctttttatgaatttgtccaaattttagttgtttctggttaagtttagaccaagagggatccatgtccctacaggattacccctatttcaaccagtagatgaggaatatccagctttaatttgtcagagcaaaaatccattaatgttttctcattactcataaaaaaaaatccagctccttactgtggcctataaacctctccatgattggccctccttaatttatctcttttagtcttgaagtttcaggcacacctccttttcttttattgaaattctcaaagccaggtacagtggctcacctgagtttattcaaggctaatccgtaattagggaaataaaggttacagctgcctgttagtgactcaggtcgtataatcacattcctttaaggctcaaaataacgttccaatagctttgattttgaattacttattttcacaagttctataaaattacagagttctcatctatttttgttggcagctgtttgcctagcagttgaaagtgcttagcacatgatagtatatgataaacatttgtttaatttatttcaatattgtcagtccatattccagcttctttggcaaaggagactgttgtttttatatgaatttatccaaattttagttgtttccagctaagtttagaccaagagcccccacagaattacttccatgtcaactagtagaggaagagctttaatttaggatttaaatgccacaccacaattatctaaagtgactgaattgagctactgaataatagtccttctaaagaagattttagacacacatttcatttctgttattgctgacaagtgttttattttacagaataaaaggcatcttgcctgggataaaatttcgaaaggctgtgtttttgtagcactttcttttttggaaggatctctttttagctactctgtgtcatggtgatgttgagttctctgttggaagctagagttcctgggttttttgatgtttctaggcttttgggttttgtttaagatttgtgttttgggaaggaacatttccatggttacgcccattccttctaccatccttgaaaaaacgagccagtagagtaatctgattcctggattactactacacagatgtcttttgtatctgcctacacatgaaactgctaggcaagttccatttccatgcatttacttccttcagtgctttttaaaaatgaagcacttttaagattaggaatgaaagacttggattggcaagttaaacagggattggcctacgttatgttaatagtctaaactcaatgtaggattaatttagaggtacagtatatgaagggagagactgttttgggaacaactaaatcgaagctttgagcagaatttgcacacatgtgagtaatactatatgcagaaagactgctgtacttaaaaatagttttcaggtttttaaatataaagtttcatgttggaatagtaaaataaaacatatgaacttttactgacatgaagcagtaaaattaacttttccttggaacagcttgcatgctcattgctgctccacacaaacctaggttaaagatgcccatgatctagcagttttcttctctgaacattgcagagcatttgcacagacatgcttgaatttacactcatgagtccatttcaagtaagaagagggagtaagagagggacctccttctcagggttaaggaaggcctaaattatgaaaaagtagtgcagcttttttcttaagttaaagtaacggtaaatttacaccacatttctctatgaatccagtatatgaaaagtttaatttgcgtgttaactattgctgtgcagacagcttgtcaagtgatgattttgacagcctggtgtctgtctccattctgctggaacatcagacgccatttctcttcttcctgagaaaaccacctctcatactttggtatccctctaaagtgtttcaattgtaaattactactaatatataattactattcatttatagaagcttctagcttaaacataaaaatatactaaaagtgaaacaaccgtaatcttaacctctagacatagattatttttctatgaacacattaacatatatgtcatagttactattgttttttacaataaaaggctcatactatacatacatacaacttgttctggtatatattttgaatcttcataatagcatttgtagatatgctttattttttgtagttttgtttttttctttagccatccttgcaaatactatgtattttgcttccttaaatcagtatttcagtaggaaaaattcttagaaattaaactgtgagggcaagcaattgtgaacatttacattttaataagtaccaacaaattaccttaaaacgtgtaccgatggatactcttagtaaaatgtaagagagtgattcactacattcttactagctcaggcattatcaatttttttttattttaaattactgcctaagaaatacagtcatatatcttgttcttttattttaaatttctatttgagaagttatgcacttttgtttgtttgttttttgagacagagtcttactctgtcatccaggctggagtgcagtggcacaatctcagctcactgcaacctctacctctcaggttcaggtgattctcgtgcctcagcctcccgagtagctgggattacaggcgcctgccaccacgcctggctgagttttgtattttcagtagagatggggtttcaccgtgttggaccagctggtttggaattcctgacctcaggtgatccccccactcagcctcccaaagtgctgggattgcaggcgtgagccaccatgcctagccagttacacactttttaatgtgattattaatcaccattatttctacttattcaagctgactgttcacatattttactctttttaaagcatgcattttaaataaattgataataaatgtttttgtcaaatattgcacgtcttctcccctacatttattgaatgcttactgcatgctaggctctgtgctaaatactttacatacattattccatttaatcctcacattaattttggggaatgtgttattttcatgttcacacaaggaaaatgggttcagagaggttaaggaatttgcccaaatttacagttagtttatttttatttttattttgagacagggtatgtctctatcacccaggctggagtgcagtggcacgatcccagctcagtgcaaactccgcctcctaggttcaagcaattctagtgcctcagcctcctgagtggatgggactgtaggtgcctgccaccatacccagctaattttttgtagaggcagggtttcaccatgttgcccaggcctggtcttgaattcctgagctcaagtgatctgcccgcctcagcctcccaaagtgctgggattacagccacgagccactgtgcccgctccacagttttagaagtggcattcaaacagagctcaatcacaataaaaggcacatcacaaactatgataatcccccacctcttggattgtcttttatctcttaactttgtggagggtttttgctttgattttgtttgttatgttataatgaagttttaaattgttaatcattccatatggtgtctaggttttccgccatgattataaagcccttccctagccccatgtgatacaattttctttcttataatacttttatatttcatttctttttaagtctttggtatatctgacagcaatttatgtatgattcagatgtatatttttttccccaaaggtcccaacacctttactgaataatctttttcccataatttgagatgacacctttatcatacacttatatgccctgtatatttgagtctatatctggactcccttctggtataaagaagtgcagttgacttttgtataacgaccttatacctgtccaccttgttaaaccctcttactatttctaatatcatgtctacagattctgattttctgttaaaatggttaataattctgtctctctctctttttttttttttttgacatggaattttgctcttattgcccaggctggagtgcagtggtacagtcttggctcactgcaacctctgcctcctgggctcaagtggttctcctgcctcagcctcccaagtagctgggattacaggcgcctgccactacacctggctaatttttgtatttttagtagagatgaggtttcaccatgttggccagtctggtcttgaactcctgacctcaggtgacccgcctgtctcagcctcccaaagtgctaggatcacaggcgtgagccaccgcgcctggcccttaacatggttaataattctctgataaagattgttctagtctttttcaatcctttctcatccttttgattcaacttatttttcttatgtgctattgaagtccttcaagtctatgttgtttttttttatttctaaaaataaaaccaagaataccagaaaaccctaaggctgaagtaactgaaaaccaaactcaaaaattgatctgtagggttattcagttactctgttggttagtcaccaggtcgtgtaagtgcaagtcctaatcaggaaaaaccaagactttgtgaattaggatggggacactccagaggattcggagacctccttgactccatggagtactctgaactcaatgccttgagcctcctctgcttgtcaaagcctttccttcctcttaatcctcccgagggtgttttcctcctgacaccaaatgtgtgatgtccgttctaacaccagccatttctccagttctctagacatcaaccggatgtccaataattcaattaaattctgatactgtctgcctgcgttagcatccacccctacaagttaaaggctcagtcccacaatacttccctacttcagatgtcagctgtaaatggggtgcccaggtgatccacatttctgcccaggtgactacaaatttgggggttcccatggccccttcccctcagtttctataatttgctagaatgcctcacagaactcagcaaagccctgaagcactgattattctcattttattataaaagataacagctcaggcctggcacggtggctcacacctatagtctcagtaacttgggaggttgaggtgggagtattagagcaggtagttagacgtgagcagggcagaagagggtccttccaccaccaggaatgttaggcaaccatcaggtgatggtcaggtggttgttaactgtctctttaaaataataattggttgcagccagtgctagggaaaggcagtctcccaacagatagaaaacacctgaaactggtgactagcagcttcccaatatgatctcaggagttgggtgagtgggctcaagcatgtgcactcaaaggcaaaatggcagagtttaacgggtatatgaccttcctctaggaacattcaacttgtaggaaagaacgcctcaatgtgcatttgttcaacttcagtaaacacactgtgcattggccccctcctaagtgctggcaggccaccgcacatgcagaataccagcatatgaaaccccaagtcagaggtcaaactgggcacttgaactcctcaagactcctgcttggctatcttccaagtgtaccttacattctttgattcctgctttaaaactttttaataaactttcacgcctgctctaaaacttacctccatctctctctctgccttatgcccttcagtcgaacgaattctttctcctaaggaggcaagaattgaggttgctgcagactcgtggatttgccactgctaacaggaggattacttgagcccaggagtttgcgtctccagtgagctatgatgttatcactgcactccagcctgggcaacagagtaggaccctgtctcaaaaaaaaaaaaaaaaaaaaaaaaaaaaagatactgctgaggaactgccaaatggaaaaaatgcagaagagaagatatagggagaggggcagagagcttttacgccctctgtgggtgcaccagccctcagtacctccaagttttcaacccggaagctctccaaaccctgttctttaggagtttttatggaggatttgttgtgtggacttggatcgattaagttattggccattggtgattaactcaactttccgtcccaagagattgggagtggggctagaagttccagcctctaaagatgcctaggtcttttatcaatccaccctcatcctgaggccatccaggcaaccccaggcaccagtcagctcattatcatacagaagataatcttatcacacgggagattccaagggttttagaagccatgtacctggaactggcacaaagaccaaatatgttttcttgtgctttacctctcttttaaaaacatgtaactccttgttatgggttgaattgtgtcccctgcttcacgaatttcatatgttggagtcttgacccccagcacctcagaattgttgatgaaaagagtcaaactctgtaaaatatttgaagagatttattctgagccaaatatgagtgaccaatgcccatgacacagccctcacgagatcctgagaacatgtgcccagggtggttggggaatagcctagttttatacattttagggagacatgagacatcaatcaaatacatgtaagatatacattgatttggtctggaaaggtgtcacaactcaaagatggagggtgaggggcagttccaggtcataggtagattttaaaattttctgataggcaattggttaaaagagttatcaatagaatgtctgggtttcgataggggttgtggagaccaacttttaaattatgcaaatgaagcctccagatagcatgcctcagagagaatagactaaatgtttcttattagacataagttctgtgttgatgttaaatgctggttggctctttctgaattccataagtggggatggtataacgagccatgtctgacccccccatttccatcatggcctgaaccagtttttccggttaactttggaatgctctggcagagaggaggagtccattcagatggctgacggatcttaagattttatttttggtttacagaatatagccttatttagggataaggtctgtaaagagggaatcaagttaaaatgagttcattatgtaactgagtactctcatttttcagtttattttttaattattttctcctctcccctttcccccggcttatgcccccaaagcatgcctgcctcagaaccttcaccctctaggaggggttgccttggaactcccacccaccaggagggcatgtcaaaagcacgcccacttggccacttttataacttctgcccaggaaggcaccaactcagctacccagtagttaaggcactgggccagcagggggacccctcgcccttgctcactccttccccggccttggataagtgcctactttctgctctgggagcaaaacgtcacatgtaaaggcaggactaacgttcacgactcttccccaagctagcttcggaagaaaccgctttctttatgccagacctcgctcttgttaattggactacgcaggcagcaagcaactaaccctctgtttggtgacggttatggatgggcgccctaatccggtatgactgctgtgcttatagaaaggagaaactgtccaggcgcggtggctcacgtctgcaatcccagcactttgggaggcacaggcaggcggatcatgaggtcaggagataagaccatcctggccaacatggtgaaaccctgtctctactaaaaatacaaaaattagctgggcgtggtggcgcgtgcctgtagtcccagctactcgggatgctgaggcaggagaatcgcttgaaccagggagtcagagcttgcagtgagccaaaatcgcgccactgcactccagcccggtgacagagcgagactccgtctgaaaaaaaaaaaaaaaaaggagaaacttgtacatggagatatgcgtaaatgtacagggacacaggaagaaaatggctttctacaagccaaggacagaggcctgaaacggatccttgcctcacagcccccagaaagagcccaccctgccccaacaccttgatctttgattcccagccttcagaactgtgaaacaatacatttctgttgtttaagccacttggttacggcagctataagaaattgatacactttttttttttttttttttttttgagatggagtctcactctgtcagccgggctctggagtgcagtggcacgatctcgtctcactgcaacctctgcctccctggttcaagcaattctcctgcctcagcctcccgagtagctgggattacaggcgcctgccactaccgccagctaattttttgtatttttagtagagatggggtttcaccatgttggccaggctggtcttgaactcctgatcttatgattcgccctccttggcctcccaaagtgctgggattgcaggagtgagccactgcgcctggccctaatacacttttttatatgaggaagttacattgtaagagcaagtaaatattcctctatacatccccaaccacttccactgtatatagaccagtagctagagttaaatccctgtatgccccaagggaaattacagatttaacacaagagaaggcttacacatcaaaagacttgtaagactttgataatttatgtcttctcttccctgagataattcttccaaagcttagcattcactggcttttgtttatcatgctcatgtccactgccattttttgatgtacttaattcataggtcccttgttggctctttagtcctcattattcatttgaaagcttctggactaccataaggctatctatgagatgttggtatagcgccctgaacatctctcttatcttacttagtacacttgtatgactttaacttgtattttccccactaggccctgttttgtgtgaggattcccagtgtctagcacaatgcctggtacataccatgtgtttaatacctagttcttaaaggaagaaggaagagaggaagaggaaggaaattctatccaataaatgctatctaggaacaatgtggatttatctttctctttagttacttaggagctacattagtatccttagaacttgtgctggagagattagtgttggcagtttattatttcgttacccttcgaaactgcatgggtaataacagactgtggatagtctcacatgctgtctccaaatactttctccctaaaactagagcatatcctcttaaacactggccttgttcgccaccaccatggcccagaagcaggcccaataatcctggggagtgttcctgactggaactctgggtcagaaaggataaagatgacttaatctcgcaatcccactttctactcggttctgatactcttgatgtacacatgttcctctgctaggtgcttttcatttttttgagggccttcagtcttctgttcaagtgtgcatggtgcttctaagccttctcacttagttttgaaattagcattctactcagaatagataaatgctgccaacttgcagttcttttgcttggcccagattcccttatagtttgcaggtaattttcagggtcttcagtatgagattattttcatttcctagtttcaacacagatggttttctctttacttttggttcatttccgtgcattttggggaaaggagatagataaatgtgcacttttcagctacctttctggacaatattagcatttcccctttacttctgaatatcctttggactctcctatattggaaaaagagggtgatttatgactattttaatggaaaacaaaaataaatctatagacaagttgttagatatattaagagtttaacaaggtgaatattataacagctataccttcacccagctacccttgctgggctctaactcgctgtctctttctcttgttattgttgttgttttcccccatgggtgagttctttatggcagtctccaccatttcctcataatcattttccttttgatttctatattctgacatccagttcccatcatactgcggcagctgatctctcaaaataaattcattgatttttttttttataattgcagttacattttttctcctttactttccttgcacacaggactgtatttgatgctgttaattaacccttctttaaaactttgttttttgtttacttctgtttctttactgactgtgtacagtaatcagaaaaatcagaaaaagacctgattttctctaaatcaggcctttttccctcaaggatctttgtggccatttcccctggttttccttgaggagaaaactatctctctacatctccctcttaacccaacttccactccgctattttaatagtctactggatgctacggtgaacaatttaaaagacagaaggactgggtgacaaacgtgagggaatttggactgatgtctgcatgtctggcttgagtaacagtagggacagcagtgctgtttcacatatacaaggaacatgagggagaaaagggctcaagaggatcattttgattacaacaaacaggaacaatggaaaccacctgacaccagtcccaaaccaccagtgacattagtccaaccactttaagagagtctgaactaggtagaaaggcaaactgatagaggctctcgggaaaggagtaactactgagaagtcagcaagagaaaaagtaacttgacaacactgttttcaaaccattgcagctacctgaaaagatcccctttcctgctctgggaggctgttccatcttcagcatcagcactttatcacagaaggcctaagcaggggagaatgttgccacagaagccaaagagggaaagtcttagtgaagagtcaagaaagaaaagtcttggagaaatacttttcggtatggcagtgaggagtgtggtggccttcttgagagcactctcactgccttggtgataggggtcattttgcagcatgttggctgcagagaaggcaacctaaagaaggcattcatgaaatgcagcctgcttcttgaacgaatctggatgaaaggcaggagaatgcatggcagctggaggaaagccaggatgcaggagggcattccttagggcagtaaagtggacgtacatgcggggttagagagcaacccagaagcaggaagcatgagccagagtccagggtgctttggaaagatttagatagggggtagggcccatccttctctgtcataggaagcaggatgtaaatggagtttctctggttggctggaggttgaggaagtttgcttcctatggcttctattctcatctactgaaatgtgagaagaggcagtgggaatggaaaagctaccatgggagtgagaggagaaactcaagataaatgaaggaatttctgcaagcagtgtggaaagctgaactgaggctggagccatgcatttggggtgacatcagatcttcagcggagtgctttttttttttccagcttcacttaataatgtgaataaagatgattttggtataggaatttgcaggatggctaatagtggaaaacaaaggaaaatggggtaataatagagcctgccatttcagagagtgatcaaagtgactcacagtgagatctagactagagagggcagaaatgaaaggaccaaagaggagaagatgatctcagtggagataaaaggtagatggacgaggaaaactagagagctagaaggttgtgattggagatcaggatgatgacatttaagagccagaggtgaagtttaaaaatagggattgtgagctgtccatgttggcacatgcctatagtcccagctactatggaggctgggcggggaggatcacttgagcccaggtgtttgagggtacagtgagccatgctcatgccactgccctccagcttgggcgatagagcaagaccccaactctaaaaaaaaaaaaaaagaaggaaaaatagggattgtgcaatagaatcaaacacagaggtcactggataataacaaacagtagtttatgagtagtttttgtgtagctttgtttttttgatttttgtttttttgttttttgtttgtttgttttttgagacagagtctcactctgtcaccaggctggagtgcagtggcacaatcttggctcactgcaacctctgcctcccgggttcaagtgattctcctgcctcagcctcccgagtagctgggactacaggcatgtgccaccacgcccagctaatttttatatttttagtagagatggggtttcaccatgttggccaggatggtctcgatctcttgacctcgtgatccgcccaccttggcctcccgaagtgctaggattacaggtgtgagccactgcgcccagcctttgtgtagctttttgagcagcaacacaatagtggatagagctgtaaagaacacaaggagaggaagggaaaattcaaacagctgcggcttgttggtcttttaatgcctggttcttgattttgaatccactgctgtctttacaggagggcactaatttccagcgaagaagtgtaagttgctttgatcgtatctcattcttacaaaatgtagactcaccaatggctgttgtttttttcagtgggcctaatgcatatagcttccagatgtaaaggtaaagtactccagtggatgattcattttaaattagaaattagcttaaaggctaataaaagttgaaaataaaatttatctcaaacctagttaggtgttttttctttttggcaagagaaaatggatatgaggaaagtattcttcctgtagtgggagatcaggggcaatatggtgataccatagccatggcacagataaagtgggatctaataatttagttaattttatctgtttatttgactgtaggtacttgagcatatagttgttttgttgttgttgttgtcatttttttaagaaaaagcatcggtgttcttttgttttgttttgttttgtttttttgagagagagaggtctcgctgtgttgcccaggttggtcttgtactcctggcttcaagtggttctcccaccttggtctcccaaagtgttggagttacaggtgtgagccactgcacccagtcaagttttccttcttaagtgataagagtgatacttagaaagatactcacttggaagaagagaaattaaaaattttagcactttttggccacctaaaataattgcatggaagagtgaccaagaaaaacgctgaaaaaaacttttctttgggaaaatatatattccttatattccttaaagcaaaaatgaatagagaaaaattggcacccctgttgtgttagaaactatttgaaaaatgatgaattgtaaatattgtcaatttcaatactctggttttgatttaaagtttgaaatcgagattttgtgatggaatgatttcttctgtttgtatggtagttaaagcttgcttattaccaccatactagaaacttggccgtaaacaggaatctatgtgcctgggcagaaactaccccataaacacgttgttattttaaaatcttaaaggagagaggatatcaaagtatattctttatcattttctcttagaaaatctgacattgtgtttttggactagtaagtagaatagatatttagcaggaaatttatatgtaggcctttgggcttcaaaaatacttatccctgtgatcctttgggcgtatctatgatgtcatgatgttgacggtgtcagcatagtttattttgtcacatttgtgctttcatgaacataaaacctttaattcgttttctttaaaaggtacagcagcaccatcttagttaagcagaacaagtttcacttcatgtgactcaatcaatgaaggaaaatacaacttttgataaagacaccagtgagcattttattgattaatgggatgcgttatttagctttatgcttgcagacaggctcaagattagatcttagtacattgggaaaaacttcagttatacaacatgtcctaacttttgttgtgttgacattcaagctagagtttaatactcctctgatgaaggtattaaataatgtaggtttctaagctgtatgcaactaaagcatatttgcttcatgaccaacatctatatgctgtgatgttatccagtgagtgaaacacaggtcaactctacacgaagcctttttttgtattcctattttgtcttctccatctctcctttcttattatagcatatttttttcactctaaggaaagaacatttatgcagggcttgcttaccccaacaaagcatagcacaggcagggctgacacaaaatcaacgggagaagtttgaaaaaagagaactgctgggattaaatgttcagtgatttacttgttgtattagtccattttcatgctgctgatgaagacatacccaagactgggcaatttacaaaacaaagaggtttattgaacttacaattccacatggctgaggaggcctcacaatcatagtggaagacaaagaggagcaagtcacatcgtatgtggatggcaggaggcaaaaagagagcttctgcagagaaacccccatttttaaaaccatcagatctcatgagactcattcactattaggagaacagcacaggaaagacccacccccataattaaatcacctcccaccgggttcctcccacagacatgtgggaatcatgggagttacaattcaagatgagatttgggtggggacacagccaaaccatatcacttgttgaatgcacttggattgtacggagtggggctgagctgctgatgtgtgtgcttcatccactttggggcaattttcttattgtataaactgaatcatgcgcctgtcctcatttggcttcacgttagaaccaaaagatgagagatatgtgccctttaaatgggcttttagtcacattttataacataataaatctaattttcaatgaatataccaacgtatatatctagaataagccatttgctcaggaaaacatatgtcaacatacttatatgcagtaaacgccaactgaagcttaactttttctaacaattctgaagtctcagaacatttactacctctttttaggaattgcttccagagccataagcacatttttataaatattgccaacagtgatataatatcttcatccattaacattaaattgaattttttgcaaatgatcaaaaggtcattccgagtaaattctgttgtatagtgcagatgatcaagctgagtatttgccatgtttttattttagaaaagagatgttgctataacataagtaaatagattctcgtatgtggcagataaatttacttgtaatctgctctagagtgaaattattttttacatataagcattgtcatcattctaaggattattgaataatgaatataaaatgttcttgtgtatttgtgtatgtgtatataattttttgaaagtttctttatcctattgacccttctcataaacagtagcatatatatattatatgtagtagaatttatataggaacattgtctttttcccagtaatgctgattctaaactagattatgtaaatttcatgtaacatgacattaagaatagtggggtgctaaagatatttagaaatgatttccaaaattgttgtatttctaacatagaaggatattgtcattttaaaataatgtaaagaaaaaatgccccaaactatctctttaataaagtttttttttaaaataaaaaaccatttgttcaacactttataatgtatatgttatttctcatacctggtgttttttttcataacaactagagaaaattgctattatcattattcccatttgaagaggagcctatgaagtttcattagaggtaaatcatcttgctcaagatcacagagcagtaagtgttggaactggaataaacctagattgtctgactccaaatctgtgcgtgtgtgtttaatgttttaacttttattttaaaagttcagggtacatgtgca

SEQ ID NO: 33 - DNA, 7113 bp, Homo Sapiens
gcgctgacccctaggcgccgctggtggccccgcgcgcggccctccggccagccccgcccctctcggggctcctccttggtccccgcgccatggcgcgtccgcgttgaccgctgtcttccctttcgggctgtgctgatcgcgaacgctgcgcagtccgtggtggcgtcgaggcacctttctcgtgcctttacctgtgttcactcctttgctttaaaaaacagccctagaagtacacatcgttggccccgaaggagccccagcagccatgtcggaccgcgaggtgaccttggagggcgggaggacggacgaggggcctggcggagctagactgagagggcgccgccggcgtcctgaaggccctgctccccgaatgtgtgggagtgtgtctgacggtgcgagggtggctgtggcggggcctgagcagcgtgtccgtgtcccgatgccgcccgcctgttactgagttaggcaggagtgcccgagtctggcgaacttcagcagttctcgttccagagctccacacgaggttggccaaagctttgcgggacttacatacccttcttcctccgcccagtcctgcttccttccccttcctttcacgggtgttgataccatgtcaacatcctcgtaccccaaactcagtcgcagcgtctgcttctggagaaaccattctgcagcattaaagctggtgagaagatgggattcgaggctgcatcactcaccagtggtgaagtaggagggtgaactagtgaaatggaatccacgagtgggtgaagtatcagacatttcatatatggtgaacgtagtagataaaaggaaggaaagggggattggatagctattgcttagtgccaaccgagactcttaagaatagtggtcagctgaaggcaagcaacaaacagttgtaagccagtgaatctgtcccgttacatatagagaagcttcatttactgcagcaggtcaaagacaagaaccaggcccaggaattaacatccctgtttgactgaactccaaaaatagcaaaacacccaaacaaggcaatactcttccactaagtttggatccctgctaagaaaagatgaggctgggcacagtggctcacacctgtaatcccagcactttgggaggccaaggcgggaagattgcttgagttcaggagttcaagaccagcttgggcaacatgacaaaaccccatctctactgaaaacacaaaaaattagccgggcatggtggccacggctgtggtcccagctgcttgggaggctaaggtgggtggatcacctgagccctggaagtcagggctgtagtgagctgtgactgcactccagcctgggcaacaggagtgagactctgtcttttaaaaaaaaaaaagaaagaaaagaaaagcccgtcatacatgggttggagatacctgggtagatgccttcaaaggttttgactccccaaactgccttaaacctttttttcgtagacagtgtctcactctgttgcccaggctggagtgcagttgctggatcatggcccactgtagcctcaacttcctgggctcaaacgatcctcccacctgagcctcctaagtaactgggactacaggtatgtgtcaccacacctggatacattttttattacttgtagaggcaaggtcttgctatgttgcccgggcttgtctcaaacttctaggctccagtgagccatcacacctggcctgccttgaacctgaagcctgccggggtggctcacctctcctattaacctgacactactcctcctccctccacttactgctcagtagatgtataattatggttgtttcttttgcattattcagctggaaacaatgagatagaaaagagaatatagctccctccccctcagaagaactgcgttattagtttgctggggcttcagtaacaaactgggcagacatttattgtctcccagttctggaggctagaagtctgagatcaaagttttcacagggttggttccttctggggctgggagggagaatctgtctcatgcctctctcccagcttctggtggtttgctggcagtctttggttccttggcttatagaggcattgtcccagtcctgcctttatattcacatggtgatcttgttgtgtgtgtctctccagacgaaggcataagtaacatcattgacaaaggtcattcgacatgggcctctttttagaaggacaccagtcatactgattagggcccactctaatgagcgcatcttaacttgtctacaaagacccatttccaaataatgtcacattcacattgaccaggggttagggcttcagcatcttttgagagggacacacttcagcccataacaagctgtaccacccagccaacatgtactgacaggagctgggaaagtttggggctggattatgagggtgcttgatgaagggagctggaatgtaaacttgcatagatgtgtttattgaaatacgtgatttaacaccttggcaaagagtggctgcagacttcctgcaaggatggctcctagaatggcggtatagctactgctgcctaacaaattactccacacttcgtggcttaaaacaagaatcatttcttatctctaggttactgtgggtcagacatagtggggatcggtgatctctctaggttactgtgggtcagacatagtggggattggttatctctcttccacagtgtctgaggcctcagctggagcagttcagaggctagaggttggaatgagtgaaggttcatctgctcgaatgtctgacagctgatactggagattggctgcagcccagattggggatgtcagccagcacacccctacacggccggtccctgtggccgaggctttctcacaatatgatggctggattccaagggcaatctaaagacaaaggacaaaagaaagctgtatcctttttgtgaaccagcctcagaagttgcataccatcacttcggctacttcctatttggaagaaatgagtcactaaattacccatattcaaaaggagaggaattaggcttcatcttctaaagggaagaatatcaaaaaatttgccagtatatttttaaaacaccacacttggaaaaagccatgggccatggtaagcaaaattgaaatggcaaaattgctatggcagacagtggtggaagggagtaaaaggttcaggggtgtgggcatgttgaaatttatatactccgtgcatctagaagacatttgagacgatcatattccacatgaaggtgtaaataacacgtcatttataaagatcattagacataggatgatgaaaggggcactgatgtcactaaaatattcagtgatggctcatctctgtaggcaagaatgacaatagaaaggctgttccagaacttggctgggtgatagcactggggatgataggatcctaagacaaaagaggccattctgggacatagtggggaccaaagaaaaaaacccaagaagccaaaggcaacacttagctggcagaagtcagaggattgcaattatagcagccagcagggtctgagtggcagccaaggggacctcacttgtatggttatagaactggtcaataaacatggcatccctggaggcaaaacaggtgggcagctaagaagggtactactcagctggcaaaaaaaaaaaaaaaaaaaaaaatccatccaggcacggtggcctgtgcctgtaatctcagcatttggggaagctaaggtgggaggatcacttgagcccaggagttcaagattacagtgagctgtggttgcaccactgcactccagcccgggcaatgtggcaagactgtctcaattgaaaaaaataaataaagatgcttgtcccagttttaaaaaatcaggattccatgcccagcttctggaactgagccagttttcagaaatggaaacattacttgagaggtggccaaacaccaggaagaaggacctataacagtacaagtacaacagaaatgaatccccaggtacttttccaaagggtctgatagcaatttcttttgataactacatcctggagaaaagtgattagccaaacatttggaagacttgtggacacagggtctaaattgatgtccagatgcctagaatatcatccccttctgttagagtggctgcatgtggtggccaggtaattgatggagttctgctaaaggtccagcttacagtggacccgtagacctagtggactgatctagtgatattttcttagccttcgagtgagtaattggcattgacatacttggcagtgaatgctcattccaggtccctgacctatagagttagataacaaaatggaaaaagccaaacagaaacctgaaactgccccatcccctaccaagattataaaacaattatcccagagcgggaatggcagagataagtgccacttctaaggatccaagtgatgtaaagtggtggttaccaacatttttaatttaccagcatgacccctgcagaagtcacaaggatcctggagaatggcagcctactctatttgctgtcaaccagtagttgttttgggtacactgctgcaaactcatctaagaagtatccctggccgggcacagtggctcacgcctgtaatcccagcactttgggaggataaggtgggcggaacacgaggtcaggagttcagtctggccaacatagtgaaaccctgtctctactaaaaatacaaaaaattagctgggtgtggtggtgtgcacctgtaatcccagctacttgggaggctgaggcaggagaatcccatgaacctgggaggtggaggttgcagtgagccgagatcatgccattgcactccagcccaggtgacagtgtgagactctatctcaaaaaaaaaaaaaaaaagtatccgtaatagcctctctgccagatatggtaggtagttgttgactaggtggatttgttcttttctgtacctatcagggatcaaaaacattttgcatttgcatggaattaaaatgcagttttgccggaaggttatgttacttctcttgctctctgtcgtaatccaaagagatctggaccacctagacatcctgtagaatattacattgttcctttacatcagtgacatgttgatcagccagatgagaagtgcagaagatcctggagacagctgctccagagagtggcatataaaccctacaggaatccaggagcctgctacaatcctaacatttttagggctccagtggtcaggggtgctctagggcatcccttccaaaagcgaatgaattattgctgcttgcacctcctgccgttaagaaagcaagacgcttgttggttctcgagctagttcttgcctcaggttctggaggcagcatgtcccacacctgggagtattgctctggtccagagactagtggaattgggagatttccaattttggaaagagcccagaactggaaacgtctgtacagtagatccgggttgtgatgaagtaatgctattgcctgggccatatagtccaacaggtgtttttttggtgttattaatggtgcagaatgatgcaatgtagagattctgtcatgccacctggagcagagaattgtatgcatttggggggcgggcgggtgtagatctgtcttctggtatgccacttgtctctgacagagatggaacgcctgaccgtaagccaccaggtgaccatgcaaccagaactgcctgttaatgttaaactagcaaaagtcataacatcagttggggccagcaacggtccctcataatatggaagtagtatattcaaggttgagcatgagaatgtacagaggttaccaaatgagctgcagagcacagatgcacatgacttccagaactgttggatcagccacaatgtcatttcacacctgtgacagtgtgagggggcccttatagccagttgacaggagtaaaaatcgtgagcatggtgtataaatgggttggctcagtatgagttcaaaatgaaaatagcagctacattacagccttctcaggggtgaccttgaaaaatggtgataagggcatatcctctcaataggcagaatttcaggcagagctcctggtcgtccacttttttgtggaagaagtagcccaaggtgagaatatacatggagccatgggcaatgctagagggcctgggtaactggttaagggcctggaaggaaaacaatcggaagttggagataaggaggtgtgtggtagatttatgtggtcagataaattggaatagcacgaagtacaatgttctttgtatacaatgttaatgcccaccagagagcatccatgaaagaagcattatacaaccaagtagacagttgactcagccagttgatattggacagcatcttttattggctactgtactactggcatgatgggcacatggacaaggtagccaaggtgatggacgctgttcatgggcctgacagcaacccatgctctctacccagctttggttaatatctagctgcccctgaatatctaacctgccagcaaaagagatctacccggctttggttaatatctagctgcccctaaatatctaacctgccagcaaaagagaccagtgctatactcccattgtgggtcacttcatcaaggagcacaaacatccaggtttacagaggtctttagacatagtccccattttataaggagagtttactgtattggaactctcccatcctggaagggctggtggttcacttttcacaagaatagtctcatattccagatacgaggcttgtcttttcctactcacaagtgtcagccagaaaggcttaaggagtgtttgtttcactgacataagcacacaacatttcaaacgagattcactttatagccaaggaagtgtagtgtccatgggccctcctgcctggcagagcgctgagacagcatgctaaaggcacagcctcccaaaggcatgagccactgagcccggcactgaagacttccttgaaaccgttctttgcaatctttctgttattgaccagctggacagtgcgtaactgcatgggaatgcttgcagatcagtaaattcagacaccttcctttccacataagatggaccaccagctgtaccctcccaagttttgccagctggaaatcttcaaaaat

SEQ ID NO: 34 - DNA, 2578 bp, Homo Sapiens
tctgtgacctgctgatgggtcataacctgcagggtttttgttttattttgttttgtttttgttgacagagtctcgcactgtcacccaggctggagtgcagtagcgcgatcttggctcactgcagcctccacctccagggttcaagtaattctcctgcctcagcctcctgagtagctgagattacaggcacccgccaccacgcctggctgattttttttttttgtatttttagtagagacagggtttcaccatgttggtcaggctgatcttaaactcctgacctcgtgatccacctgcttcagcctcccaaagtgctgggattataggtgtgagccaccatgcctggccataacctgcagttttaaacatatcgggctgaatatagttgagggtgcttaaatgctatgatgctgtgattcagctgggccaggaatatagagaacagtggcaccctactctgtgttgggccagagattgctgaaatgtctagcatattagatcaaccagatttttagttctaaaggtgaaaccagaagcatttttttttcctctcaaaaacacacatagactcagaggtatggatacaatacctgaagggctatagttctttttccaggattgtccctctcagcaggaatggaggatccctagctagagaggagagctgggggtgacaccttcttgcccagtggaggacagctggtggtgtggcctcaacaggttcttaggaaggtgagttccttagcctttctactagtgaggtgtttgggttaaggtgcagcaccattgactgggcccgtgtggggaggatattcaaagcatttcacaattacacagctgcctgggcaccgacagagtcctagagaagtgtcgactgtgccaggtccaacccttcagtcgctggatcatggggaggcatggagtcccattgtagaggctgggtggtggtagtaggcatgcaggaattcagggaagctgctacttaccaccatgtaaaaaggatttcaatattttcaccctggtagggatgcaccagtgtgtgcttctcagcctcagtcctggacgtatgccccattgccctaaggttgtcccaaagaggccaccattagacctcaccttttatggacaggtgggagatgtctgaacacaaccacatgttgcccagtgacaggggctgggctgaccaggacacggagagtgacttgccttctggggctgagccagtcactcatactcccagcgtagccctggagcttcactgcaactgctatgttacaggaagttgtaccagcagctctacactaaggtgtatagtcggtgaccactttaaagaaagactcattagaaagaggcattgtttggggaggccaacaggccagctgttggggaccatgccagaggtactgtgtcaaggtacctggcttgatgcttacttcccattgtctgtttcttgagtttattttgcgccatctgccttcttccacctgatttggaattccaggactgctgtgtaggcttctcttcagatgagatgcagcagtgttctcaactggcaggggcagctttcttgggggcagggactgggcatctgtgttatctatcctgggcccatctgtttctttccccttgacacccaccacaggggtctgtgtacaagagggttggttgataccagttttaatgagggaacctatcttcttggaaccatccagaagctgtggtctttttccctggaacaccccacccccgacatcccagtgctggattcaagctggtgaaccacaggtcaaaattttcagttgctgtcttccagggccttggttgttccattgtcccctctccctgtaccaggatcatcgtgatccaatggatttgatggagttgctacacccagcttggcgtgcagaggtgtttggcacatccctgcctgtggaattctacgctctaagggagatgctgccagggtattacctgattcacgaggcatgtcctaccatctgtgttatattttttttaagatcagaattatgaatatttcaggagtcatctgggatctgaagaagcaagaacccactttctgagtcttttccttaaccattcatagggggtaagaaatgtcacaggtttgttgtgaaggtcaaatgaaagagaacttgagaaaatttgcaaatccttcagttcaaggtgaaagaaggtaatttattattaattcatattgttattatgtagcatttcttagaatatgtataccaaatgccttttttgactggtgcaatctttctataattccattctgggatgttagcttatttgcttagagaatggtgtaaagaggggagcccgaggccggcagatcacctgaggtcaggagttcaagactagcctggctaacatggtgaaaccctgtctctactaaaaatacaaaaattagccaggtatggtggcgggcacctgtaatcctggctactagggaggctgaggcagaattgcttgaacccaggaggcggaggttgcattgagctgagatcatgccattgcattccactctagcctgggtgacaagaacgaaattccatgc

SEQ ID NO: 35 - DNA, 7401 bp, Homo Sapiens
gcaaacgagtcaggcatcgtggtaggacctggcgagtggggccggggagagcgggacgcctggatcgggaacttgtcgcattcacattggctgctaggaggcctcggcgaccacttccggatccggggcgggggtcgcaactcccagcccttgctcagagggctgaactagaattcccagaagcctctgcggccgccttcctgctccttcactcctgcttcccccacaaataacagtgagtgaaagcatctaacaagcgtttccaactcgccgaatcattactagtgcaggcattttattctaagctgctttttactaaaacgtgctcttgtcgctctgaacctttaggactacaatacccagaagtctctgggagtcgccgagccctgtagtttagggttgttttgcggccagcgagacgccggaagtctgggaataaggcgggaccagggaaaaagcaggattccgattggtgaagaggccacatggccttctttaaaggacgggatagagttgcacacgcgcattgaggcgtgtcttccctggttctgcgtccgtgaagcctagagattcccgagcctgggtcacccgggcggtgtcgcatgtcgtctgcggggaggttggggctgctcgcgcgaggcgctctgggtctcatttccgaggccgaaaatgctggctccaaagtggtgccctgggagatgagggcgactcgcagattccaccctattctctgaatgggcttcgagtctccatggtaacggcccctcccagttcccctgtgacttcatagctgcccacgggaggggagaaagctgatgtgaaggggctgtgggttctcagccaagctctgtctttgaggccacctaccctataccactcgtcccggaaagggtgagccggtgacctttcaccctctctgggcctcagtttccctttttgtgaaataatgtctggtacccctgctgtgctcccttactatttcagggccccgggcaagagacacactctgtgtctcagtttccgcataggtaaagtgaggatgatgttagaatttgatgttaaaatttaggtggtggttgtgagaattaagggaacctcagagcaatggccagcacacaatgacccttcaaatgtcagcggctttgatgatcaccattcttaccttttctttggagatttggacaagttaccgccccaccttcctccagggtctttgtgtattgatctgcaggttggatgtattggatgttacgaccactaaactttcttctgagcacacacgagcagtggtgttgttctctctgagaaatactacaggctttggtgttaagacactggaattccggaaacctgtccctgtcataccagttgctgtgtgacctccgtcaatcatggttctttactgagccctgagactccgcacgtgaaaatggatggggatgaacttccagtccaggcagtgccactgactttgcttggggacctggggcaagctctgtggcccagcattgcaccatctgtaacaacataaccaaggggtgcgcaattgagctttgaggttaatttcggtgctaaaatcccggtcagtagttccgtcatcttcacagacctcaccctacccaatgcccttattgtgctccacatcccaatcaacacttactgattccagatttgtaatttttgccattgtagtgagaagtaattaactattttatggttttttaaatttgaatttttgactatcaggattagcatattttttttttcttcgttaaagactagtcaagtgcattagtgaggaggggggaaagagtagaccaaggaatttggtctgtaactgactgtggacaatacattggtagaactcactacctttgagccagccagaatctttttattattcactggatattcaggttttgcctctgtaaattttctttcattgccatttttttcaaatagttcattcaatctttgttttcagatgtgctttccacaatcaggttacaaattctctgccactaatgatcattacaattcctcttctcagcctgtttattgtttggtctgtttatggtttctcaggcttcttatttatttatttagacagagtcatgctctgttttccaggctagagtgcagtggtgtgatcttggctcactgtagccttgacctcctgggcttaagcaatcctcccacctccgccacctgagtagctgggactacaggcgcatgccaccacctgcagctaatttctgtatattttgtagagatggggttttgccacattgcccaggctggtctcgaactcctgggctcaagcgatccagccgccttggcctccagagtgctgggattacaggtgtgagccaccatgcctggactaggcttctttaaacattgaatagtgttcctttctagatgaaggaggatcacatagcacttgggagcaaagatgcagccaagtaacccagtgctggagcccacgatggagaagatctcacggccactctggccttgccctgggtgctttagtaactcgggaggaaggccacccagacactgcaggacaccagcatgctgaaggtcaggaacttggcttcgttgaaagcatcaggcaggttccttgccagaaaggctacagcaagggaccctaaaaccaagaagcccaagtagcccaagacagagtagaaggcagtgacggagccctcattacactggataatgatgtagccaggcatgaactgagggtccttgtttacgaagggaggctctgtccccagccagattccacagagggtcacttgggtaaaggagcaaaggaagacaacagaatttgttttttggggacccatccactttcggatcctgctttctggccttatagcctggaaggccctgcagaaaacacagccactgtgaacacagctgcaaaggtggtctgtgagaggaggcaggtggcagggctggggcggccgatgaagagcgaggaagagagaaagcagagtgtgagggagacaaggagggtgtagctcagagtctggttgctggccttgactatgggagtgttttggtgccacacaaactccacaaggatcagaacagagaggacagagtagaacaaggctgtgcatgccagagtcaggcccaaagtttcatcataggccaggaaggtctcctatttgagaaggtatgttcccttttcttgtttggataatgatattcaggacaaagcctgcattgttttatatctgaaataaacaaaaagggtgtcactgtctccaaaacagagcactgcacgtttggtaagattccattgcccagagctctcaccaccacagcgccatttaggtggactgtttggctggtgtgtgtgtgtgtgtgagagttgtgtgtgtgagttgtgtgtgtgcgtgcacgcaagcatgcgtatatgtgttctgcatgtgttttaaaggaaaacataaatacttcaccagcttttttttttgaccattttaatcagttttattgattcatgcttccggttcttattcagttcaaaacaaggcacattaaatacatcctcttattgctttataaatgcacgtagctcattctctatatcaaaagtaataaataatggccataaaacaccaagacctttataaaaatgacaacccagccttgaacatagtatttaacagtccaatctagaacaataacccaacacggtacatcaaagtgccacatatgaaaacatgcagtgtgtgtagtcactctagtactgagcttgcactggctattctttaaaaacatactagggctttttcactccttaaaaaaggtggacatgatgcaaacattgcaagttatagcatcactgactttaatattacatttatgtgccaaaaatctttacagatacataagagaaaataaaatcaatgataacaccgtatatttaataaaagtgaaaatgagttttttgttgtgccaaagaggaagctacatattttgaaacagacaaagccaagccagaaactgaagcagaagagggatcacgcatttaatagcagaaatcctaatacactcagtataaattgattgaaagcaggaatattgcaaacagcatgatggatatgaggcagaccaccgtggctaaacaaataatccagcattatcattattgttatgactgtggtggggctatttaaaggagtatccaactctctagcacagatgggggttccttcacctgactccccttaaaggctcttgaaataaatcacttgataataaaaggcaatccctgcatacccaccccaaccccaacagaatcaactaatgtcaagtttatatgcaaatggaaaattttttcttttgttcttggaacgaatttcaaagaagctcattcccccctatttcttgtctccctttcttaaatcaggtaaggaagctgtacaggcttaattcagaacttatggctgggtgcagtggctcacgactgtaatcccagcactttgggaggctgaggtgggtggatcacgaggtcaggagtttgagaccagcctgaccaacatggtgaaaccccatctctactaaaaatacaaaaattagccagatgtggtggcgggtgcctgtaatcctcactacccggggggctgaagcaaaagaattgcttgaacctgggaggcagaggttgcagtgagccgagattgcaccaccgcactccagcctgggcgacagaccaaggctccatctcgggaaaaaaaaaaaaaaaaaaaaagaatttacacaaaatgctggggtgctttattcacagtaatggcttgaaatcagttcatttccaaacgagtctctgggattggtgaaggaccgtgtgttttagcatttagcagattttaagtaaaagcagatatgctcaaaagaagaaaagtgtgcttttctttgtccttaaaggaacttcattcatagcaaaatatgcacaaacaagacctgtttaacaaacacagatctgctcgggccagtcgcatcctaagcccggtccctcctgtaactatggtccactggaattgggactcttctgtcgaggttctcttctgcagttttcattagtataaagagccggcttccagacacccttcctttttgaatagcactcatcagctgcaaaaattcattgagttcaacctgtccatttttattcaaatcgacttcatttagaatttcatggagtgtattttcatccatttggacattgatactctctaatacacatggaacatcaacaatggtaataaagcctttctggtctgcatcagacttacaaaatctcttcttatacctgtcactgtctgaaggcagtaggctaatttcagagccatctgttaactgttctgatcaaagtttagtctgtttcataatatagaaacttcctggttgtttcaagttgttcctgtttcttataatcatctcaattctgttctctgcccattagttcaacaatcctgagtagggcttgctctgctgcccggacatttagaaaggccaggcgaggctgaggcaggcagatcacctgaggtcaggagtttgagaccagcctgaccaacatggagaaacccaatctctactaaaaatacaaaattagccaggcgtggtgatgtcctgaccaacatggagaaacctaatctctactaaaaatacaaaattagccagggtggagacccaatctctactaaaaatacaaaattagcctgtaactccaggtactcgggaggatgaggcaggagaatcgcttgaacccaggaggcggtgattgcagtgagccgagatcataccattgcactccagcctgggtgacaagagcgaaattctgtctcaaaaataataataataataataataagccaggcgagtacaacgtgaaatcatatccacggtggtgcaggaatactccttaatcccatagttcacctctgcttcaatatatggaaattctgacacaagacgtactccaacaataggccaccttttgctagtcacacttgccattgtggccacctcaaaagccttatcaccataggtggcagcaagatgctgtgccccctcgctttcaagtccataatcctggacaagcttcatgtagagtgtggggttccaatctttacccccttgaaggaaaagcccagctgttctacttggtcctgctttcaaattgtgggttttgatagcagcatttagggtatcttcgccacagaccggtaagttgtccactttccacctgctgtagtaataagacttctctcactgacatggacaacatgatttcaggagatagactgagtatctgcagatttgggatctgtaacaaggggacggatactgctccacgctgctaggatgtcgcccctcttctcacctcaacatcacagctcaggtaattacgtgcttcattcaaaatgaagttaatatcttcttctgaaggacttggatggtgtgtaatatcagttggggtatcagtagtgccagcaatcatcatcttttgccagggtaagaagaaaataactcgcccatcactggtcaagaagtcccatgccctctgggctgtaataaccaggcatcacaatgtggacaccagcagttggctggcagatagctgcagcatccttatcatctattttgcacacagagtctgtgaaatgtccaacggcattgataacacacttggctttcatgtcaaattcctgccctgtgaggacatccttgcaccatgcaccactcacacgcactttcgctgtctgtctgggtgtctgtcttcttaagcaagctcactacctccctgtcattgactgtggcatccccatatctggcagcagtcagcacaatggcaaggttcatccatgcatcgttatgtcgtccatcatagtagacaattcctcctaccagtttgtccttctggagcattgggaaatgttcaagggctcttgatttgctgaggacataactgcttttcaggcaattacttcctgcaaccaaatcatacagcttgattcctacccagtagtaaggtaactgccaccacttgtaaactggaagcatgataggcaatggagctgataaatggggagaaatttctggcaggttggcacgctcatcaagggcttctgttaccatccggtactgctcaatatccaacttcatcatggccttctgaagatatctcacaccaccatggatcaaattagtgcttctgctgctggtccctggcattgaagactgttcctttctgggtgaaggagaatcacgtagcaattgggagcaagatgcatccatgtaacccagtactggaggtcaagatggagacaatctccacagccaccatggcctttccctgagtgctactataactcaggaggaaag

SEQ ID NO: 36 - DNA, 2457 bp, Homo Sapiens
atgaacctttcataaattcgcagtctcagcttatggtttatggcctcgattctgcaaacctaacagggtcacatatgttctctaatgcagtccttctacctggtgtttacttttgttacctaaataatgagtaggatcttgttttgttttatcaccagcacacagattgctataaactgttactttgtgaattacatttttatagaagatattttcagtgtctttacctgagggtatgtctttagctatgttttagggccatacatttactctatcaaatgatcttttctccatcccccaggctgtgcttatttctagtgccttgtgctcactcctgctctctacagagccagcctggcctgggcattgtaaacagcttttcctttttctcttactgttttctctacagtcctttatatttcataccatctctgccttataagtggtttagtgctcagttggctctagtaaccagaggacacagaaagtatcttttggaaagtttagccacctgtgctttctgactcagagtgcatgcaacagttagatcatgcaacagttagattatgtttagggttaggattttcaaagaatggaggttgctgcactcagaaaataattcagatcatgtttatgcattattaagttgtactgaattctttgcagcttaatgtgatatatgactatcttgaacaagagaaaaaactaggagatgtttctcctgaagagcttttggggttgggaactattcttttttaattgctgtactacttaacattgttctaattcagtagcttgaggaacaggaacattgttttctagagcaagataataaaggagatgggccatacaaatgttttctactttcgttgtgacaacattgattaggtgttgtcagtactataaatgcttgagatataatgaatccacagcattcaaggtcaggtctactcaaagtctcacatggaaaagtgagttctgcctttcctttgatcgagggtcaaaatacaaagacatttttgctagggcctacaaattgaatttaaaaactcactgcactgattcatctgagctttttggttagtattcatggctagagtgaacatagctttagtttttgctgttgtaaaagtgttttcataagttcactcaagaaaaatgcagctgttctgaactggaatttttcagcattctttagaattttaaatgagtagagagctcaacttttattcctagcatctgcttttgactcatttctaggcagtgcttatgaagaaaaattaaagcacaaacattctggcattcaatcgttggcagattatcttctgatgacacagaatgaaagggcatctcagcctctctgaactttgtaaaaatctgtccccagttcttccatcggtgtagttgttgcatttgagtgaatactctcttgatttatgtattttatgtccagattcgccatttctgaaatccagatccaacacaagcagtcttgccgttagggcattttgaagcagatagtagagtaagaacttagtgactacagcttattcttctgtaacatatggtttcaaacatctttgccaaaagctaagcagtggtgaactgaaaagggcatattgccccaaggttacactgaagcagctcatagcaagttaaaatattgtgacagatttgaaatcatgtttgaatttcatagtaggaccagtacaagaatgtccctgctagtttctgtttgatgtttggttctggcggctcaggcattttgggaactgttgcacagggtggagtcaaaacaacctacatataaaaagagaaaaagagaaacttgtccatttagctttcataagaaatcccatggcaaagggtaataaaaaggacctaatcttaaaaatacaatttctaagcacttgtaagaacccagtgggttggagcctcccactttgtccctcctttgaagtggatgggaactcaaggtgcaaagaacctgttttggaagaaagcttggggccatttcagccccctgtattctcatgattttctctcaggaagcacacactgtgaatggcagacttttcatttagccccaggtgacttactaaaaatagttgaaaattattcacctaagaatagaatctcagcattgtgttaaataaaaatgaaagctttagaaggcatgagatgttcctatcttaaataaagcatgtttcttttctatagagaaatgtatagtttgactctccagaatgtactatccatcttgatgagaaaactcttaaatagtaccaaacattttgaactttaaattatgtatttaaagtgagtgtttaagaaactgtagctgcttcttttacaagtggtgcctattaaagtcagtaatggccattattgttccattgtggaaattaaattatgtaagcttcctaatatcataaacatattaaaattcttctaaaa

SEQ ID NO: 37 - DNA, 4554 bp, Homo Sapiens
gcttagttgtgcgcgcccgcgctctgctgtctgcagaccgcgtgcgccggcagtggctctaagggggccgcgagggcacagcggggcaggaccgcggcagagcgcagtaaggagagtgtggaccctcgccctgtcctctaagctccatgtgaaatgtggataatattccttactgccataaatagccactggccgctgactacgcgtaaggcaaacaagcgacctgcgttcaagggacccgaagactaggggagaagcagcgagcgggtcgcggccgcctacccaacggacgcctctgcccaggttctctgccgggaagcttcgtccttccgggccccagcgcagccggaggctggggagctgctgcctggaagggtcagataccgcctgttaggcggagggtgggaaagacactctcctgcttcaggagctatcgcagacaaccggagggcggcttatcgcagagtcccagagccagccagcaaggcaaggtcgcgggtgcacctttcactcccagaagcttgggtctgggactgcaccacgcaacgtttgcccattttgagggctttaggtgtttcatatttcagttaatagaatttcgattaatacataatttgataccattttaattgtttgctactcgggagcaagttttatgtttagctgtaggagttaggctaagttaaatgttgcaatgctatatatatttaataggatatgaaaaaactatcttacagccgggcgcggtaactcacgcctgtaatccccgcactttgggaggtcgaggcaggaggatcgcttgagctcaggagtttgagaccagcctggacaacatagtgagaccttgtctctatttaaaaaacaacaacaggcctggcgcggtggcccacgcctgtaatcccagcactttgggaggctaaggcgggcggatcaccggaggtcaggaattcaaaaccagcctggccaacatggcgaaaccctgtctctactaaaaatacaaaaattagccaggcatggttgcgggcgcctgtaatcccggctactcgggaggctgaggcaggggaatccttgaacccgggaggcagaggttgcagtgagatcgcgtccatgcactccagcctgggcgacagagcatgactctatctcaaaaaaaaaaaatcttactatttggtatggaattttctgatagctagggtaaagatgctctttttccaagaaggaatccgagtatccgaatacaggtggtttagtgttactctttgtttattggaagttgtagcagctgtgtttagatagtctgctaaaacaaaaactgcctaaaccagaagagtttatcttttgccattgtgtattaaaactcttcatagaaatatttattttggagtttgaaatttaagtgaaaatgtggctcatgcataggtgtgggtgtacatatgactttcaagtgacaaagaagattcttagcaaattgtacgtgttcattaagactcataagttacctctttcctagaaaaacaatatactcctccaaaagctcaactgacaatgagaaactgcatttctggacatgaaaagtcaaatgaatgcggggaaaagtaaattgcctatagaggtattttctgtatttccctagagggggaaatgtgtaatttctcaaaaggaagaagtcctcatttatccttctgaaccacaatcatatgaatccattcaattaatattaatcttatcttctattctccatcactctctacatctttctataattgcatcattttcttgtccgtataatacatcaaatgcagaggtgattttaagggagccacaaatcaagaagtctcaattcaataatttcgttaaaatgtaagaaatatatacggattaagaatattcttaggtaattatgttctgtttcaaatatcagtgaaaattttcatagacatttaaggggtaaaagacatttaacagatagaaaaaaatatctaccttttaaaaaatgaccttctcttttgtcctacgtgatttgttgagcagactgggttttttaaaagtttctgttgaaatgagcatgttgtaacatgctcatatcccatttcaattgacaaatatcacttggataataattgtatatcttaaatatgaacatatgaagcaatcagcagcagcatcctttcactgagcaaggcttaaaaataccaaagaatcagtgccagaagaaattctttaacttaaaatatacgtaatcactacattaccatataaaacaatgatttctaaatgctggaaagtatatatcttaatcatgagacgaggcagcactatgcacattgtgcataatatgtgagacattgaatggtataaaataaattttaacttttatctaaggtttacaggaaaagcagcaatacctatgattaagccacccgacttaaatgagtgtttttaagatgtggtgcttgcacataagcggaggagtggtggtaacaacccttgtacagttcacaaatccaggactggcaggaaggtagacaagtgtcattctcagatttcagaacccagcctgaaagtgagaggacgtcaggcaacaataccatgcaacgacagcgtgcaacaaatacacaactggattatctttttaagggagaagcttgtttgggtttctaattgcttttaatgaaccaagtattgattactgttttacccaaaactgtaccaaaatatgtgtaaaactgataagataatttatagctttctagttatggaaaagcttgcaaattaaataattcaaatctcaatttaagaactgtaaaaatgagaaattggttcatgtaccatagtgataataataccaacaatacttaacagtagactatgcagacactaaccataagagatttgtagtggctatactaatatcagatgaaacagactttaagaaagaaatttctttttcttttttcttttttttgaagtgcaatggcacaatcttggctcactgcaacctctgcctcccgggttcaagcaattctcctgcctcagcttcccaagtagctgggattacaggtgcccgccaccatgcctggctaattttttgtatttttttagtagagatggggtttcaccatgtcagccaggctgatctcaaactcctgacctgatgtgatccacctgtctcggcctcccaaatgggattacaggccagcgcgtctggctgacaagaaatatttttagagacagaaattccatactgataagagggtcaatacattgagaagatataacagttataaatgtatatgcacccagtaacagagccctaaattcatgaagcaaaaatgattgaattgaacagagaaatatacaaacaacagtagtttgatatttcagtatcctactcacaataatgtgtagaacaaccaggcagaaaatcactaagtatatagaaggcttgaacaagactctcaacctaaccaacatgtacagaccactgtacttaatgacagctgaatttatgttctttttaaaaagtatactctccaggatagccttatgttagaccataaataagtctcagtaaatttaaaagaattgggatcatacaaagtacattctccagttacagtggaattaaattagggattgacaatagaaagaaatttggaaaatccccagatgtttggaaattagattactcatgggccaaggaagaagtactaaaggaaattagaaagtattttgaaatgaatgaaagtgaaaacatattgaagtcatgcactgcagctaaaacagtgatcaaaagggtatttagtcctttaaacaccaagaaaaagagtctcaaatctacacttccaccttgaaaactagaaaaagaggaggaacgtaaacctttagcaaagggaggaaataatgatcatattgcaaatcaataaaataagtaacaaaaatagagaaaatgaaaatcaaaagtttgttttttagaaaaaaaaaaaaaccagtaaaattaatgagccaacattaaactggccaaaaaattaaaaagaccaaaattaggaatcaaaacaggtacatcactaccaacccaaattaaaaggattgtaagagactgtaaataacgttgtgccaataaattagacaatgcagatgaattggacaaattcctagacagacacaaattgccaaaactggctcaatagaaaatccaaaaagactttattttctatggtggttgtaaaaaaaaaaaaaagtattataaactaggtggcttaagacaacagaaatttattatctcatgttctagagacatgaagctcgatcaaagtgttggcagggctctgctccctctgaaacctggaagagagaattcttgtctctttcccactgctggtgttttcagcaatccttggcctttcttggtgctccttggttttacaactgcagcacttcagtctctgcctgcatctccacatgtgctgttccctcacgtgcctgtctcctagaggctgaagtgcccagcctactccagtgtgacctcatcttaatgaattacatctgcaatga

SEQ ID NO: 38 - DNA, 1710 bp, Homo Sapiens
cctggatgcagtttgcctatgtgaaagatcagtagaacttaaaaatgatcacagtgaataacttacagtagaaattgaaaaaatgataaatgagtttagtgtactaccaaaggaactatctgaaacaaaagaaattaggtcatcacagctagagagccaacaagttgaatgggaacaaaaactcagcaattttttactttaaaacaagaagaagagaagaaatgctgatatgttatatgaaaaaactagggaagatttaggcagaaaagaagaggaatataagaaagaaatcgaagtgaaacaacaacttgaactcagtccgaagatatgttgcatgaaaattgcatgttgaagggagaaattgtcactctaagactggaaacggacacaataaaaacccaggaaacagtaacaaaaacagtatctgactgtaatggagagctgaatgttttgacaggtgagagcaggtgagagattattgctcagttctgaactgaagaaagaaaaagaaaacacggaaagactggaaacagaagttgaatcctatggttatacactggctgctgctatatgtgatcttgatcaaggcaagatatcaaggaaacacctagaatttgctctccagagtgcaagagatgcttgtttacaagaaaaaataaattttgacatgtctaacctaaaaagtaacaatgaaattctttctcaacaactttctgaagctcaaagtaaattcagtaacctaacaatttagttccataacacaagagatgctctcagagatataactttggtttcagaacgtctacaaagagatctacgccaaacacgatgtcagatgaaggacactgaacaaatgtatgaaaatgagcaagataaagtgagtaaatgcactgcaaagcaggaagccatggaagagagattatcccagctacaaaatgaaaatatgctgcttcaacagcaactagatgaggatcacaagatgcagatacggaagaaaagataattaatactcaagaccaatttcttgggaatgaaaagcaacgttgttcactagaagataaatataaggagttattaaatgagtgtgatcatttaaaagaaatactatatcaatatgaagaagagaaagcagaaagagaactaagtaagaaactcttacaaatgacagaaaagaagctcaatgaatgtgaaaatggcaagtttagtttttatggagatgtaaagaccaatcaatttgatgtagatattcagattaataatctaaaatatatctaaatctggatacagagaataaattttttcaacaggagttattatctatgaaaacaatacaaaaaatgtgaaaaactacagaagaaaaaaccatgtttgaacaagaagtaatagacctcaaaagtcatgtagacataagtatggtagaatgtggtcaagtcaaacaatataaacaggagattggagaaagagcaagacagcgtatagaagaattacaagaagtcaatttttaaaaatgtagctgtttaatttgctttagacagaagcagcatctaaagaacatttagagcagttaagatggcatgatattacttcaataaataagatggaactcaaaattaaagctctggaagctgagcagtcccaaatgtaaattgctcaagaaaactttagtgatagcgaattagaaaaacagaagcagctatatctagaagaatt

SEQ ID NO: 39 - DNA, 21561 bp, Homo Sapiens
gccgaggtcctcttccaggattggctacctcctcataaccataagataattaaaacttggcggggggggggggcagggttaaaaaaactttttttatcagtcagaggataatgcaagtgtttaacagatgcttcactattaaaatattttccccccaagtctcaaatattgaagaatctctaaccagggacaccagtccctacgaagaccttgggcgattttgaagtgcgggcacctcgattccccgaatctgtagtgtggctggtatcggtgttcccctggtttaactagcctgtttgaaggcacagatcattcatggggatgtataaccgaaaccagtcctctccaccgcctggggatcttcactttcgcagtctacgactgcctgtgactccagaaagacaaactgcagattggccaagctgcctgaagacccagcccgacagcgatgcctgtcagcccgcgtcgcccaccagggcagctgctctcccaactcgcatggggggcaccaccccgcctcggtgccctagagctgagcgcagccgcggctccacggggatcgccagggcctcagccctcgcggccggcggcgcgggagtgttgcggggcagggaccagagcgcgatcagagcggccacccccgatttaggtcgccagctttccagtcactgcgatggccactggggcgccccttccatcctggttaaattctcattgtgatccccagccctcttctcggttccccacacccaggaggccggttctccgccgctcaggctgggagaggtcaccgctccgggcagggtggacccccagctccgtctcggaggacctttcgccggaggcgagcaggaaggggttaaccatgagcctcccaccctcacctcccagaccctggtgccgggctaaggcctccgcttccctcctgaggtctcattaggaaaccctcaccgctattttcaacatttcctcaatcaagtgcctttaaatagagctgcacaaacagattggcggcaaaagcgtagatcttgtcacgattgagaccaatccagtatttcagccttgtttgctttgcaattacgggttggcttgtggctacggtgccaccggggcaaatctgcagccgctcgctttctcctctgcgctccgggcgggtggaggaagcgacccgcggagtcactgcagggaggagagggggacgcgcgcggggggaggcggcggagggcggaggagactcgcttgcaccccagggccgcgggcacgcagagctgtgttgaaggacatacttttcaggttcctgacagtcactgagctatacgcaataataaagtgcgtgattcgcgtgtggaaaccagtgtcgtgtccttaccagcttccttttctgtccaccttccctctctcttctacctccgtttcgcttttcttcagtgcatgttagcggtttgctggatttcccttctccctcgctgttcaactgctagcatgatttgttacattttccacagctgtttattcttgtttgactttttgtacaaagtcactttaaatctgctgcagaaagaataaagcacctagccctttggatggactcctgcaggcgtgtggctgtccctggcccacttttaattctttggagatggctcttctgtgtaaatcagctgctgggtgcgttcggtcacctcgtaggccagcctagtttgtatcagcagaacagtagtggactcgactcaggtcgtaagccttatatttcacagacaattaaatcttggctgctgttgaacaaaactgtaatatttactttgttctataccgagaagcacttttaaagtaaaaaagaaaaaaaaaccaaatactacacttcaaaaagaaaatatgacaatgaatctctttttatggattctctctgcataagtggaaacaatatgatttaaatccccaacaccccatcccccttttcagacacagctgaagtgatacagatactgtcttctaacacataatctccctctctcgggagaggcacctgcctgtgctacattcgatttagtttgtaaggtttcaggcccctccccgacccatgtaatatgtaacaaggattatcaaataataaggtcttggatgtgaagtctgctttacacaagaattcaagaaagataggcaggacttgagtaattatgttacaacttcatattactttccaaatgaatacccattttcttctcatgtcaacttctagagatgggatgctgaggcagagaaatatttttatgagactctggagtacatactaaaatgtgcttccttattatttaagaatgtgtaaggtatggacctacatttgtttgctggtggtcataaaataaattcatagccattgtggccaataagcaatctccttcacgctttaaaagtttttggtttataatcccacctggattgtattttcactattctgtatcaccctcctattgcaatattttggttctcaatcttatgtaaagcaaacctcagaaatgatcgtttccataaaattgtgcaatggcaaagccacagaataatattttgagtccatatagccgtgcatgctcatctatatagctcttatacagttttctagctgattgctttggtatttcaagaaataggaagcagtagctacctattttaatgaaagggtaccatttcataagaattctattttcactgaaaaaattggtctggcacattattcaatgcaaaagattataatattactttcacgtgtgttaatctgtttagtataaaactgctagggtgtcttaaccattaacgcgttttgccacactactttcaaatggtgatctgagataattacgaagattttgatgttaatcccacgttaaatgaacaactatgaaaataatcttaaagcattattactcccatatacatgccagcaaacccaattgtggagagaacatgattactttttatctgacattatcctataaggatatggctacatttatttcttttaaaattggagcagttttcaattactttttaacagaattgttttcaacacagcattttgcagtgcccataaaccatagcaactttgtcctgatcgatacatatttttctgcattattattcattagcctctttgcaaactcactaaaatagaatagtattaaagtatgaatatatagagaacaattattaggttctacatatttatttaggtaaaccaatgttattaaaattaaaaacatgtgcctggcatataagtgcttcttcaggaattcttttttggatgcatagttattattttttaaacaaactcagattttcaaacactgattttcttctctgaacgggcattgcattgttttaaacagtagctcctggaataatgccacctttagtattttagactttcaaacaacaattggaattggataaatgctttcagctgggagcactttcctaatacctttgtaggtaatgggattctctatttgtgctgggtgacaaacggacagtgccctggacagactgcctaccctctgcagaatctaccaaaaagtagagttttcccatgagactgcttgtggtccatctaaaaatgaaaaaataatcagagaaaatgcgcaaagccttttctaactacagttatgaaatgatggcttaaagaggtatttagaaaataagagtggagtaatacagaaacaaaatctgaagaagaaagtttgcttaggagctgatgctctttgtctacaaacaagagggtaaggagctggatccaattgaattgaattgtttttgtttgcttgtttgttttcttccattcagtgcctttcaaactgttttttactggatgaagaaactcaaccaagaaaatatatgtcgattcttgtatatgggacaatattagctgctgtgatttttaatactagcataaaatataagaatctttttattactgtgatattgttttttcctaaatgaatgcatagtgtaacaattggtgtcaaaaagcattgaatttttttcagatggattaagctggaataataaagtatatctatgagatgatttctgtaaactctgacttgctgagaaaaaagtgaaaaagctttttctggaagaaacatggcaacttaaccgttattaatctggactaaataaaacaggaaactgcttctttacatttctagtaattttttctgcttttccaaacattgttaagttctatgcaacttgtgctattcaagtaaagatgatgtcagtaataaaattacagaatctaatcaagtgactatttttgctttattacaaaatttatgtatttaattgggatgtttaattgcttagtttttagaacactgaatttttctttttccagacaacagagtgatatttaatgaagtgcttataaagataaatacgatggttcatcaaagataaaatagtcataataacaagatggcatttgagtcaatgtggagtggactctgctttgtaaattatactgctttttaaaagcatgacctaggtatttacaatggggacatctgagaagagaaactcaagagtcctcaacttacacagccaagaatacacaatcatgtaggagaacttgccctcagaagcatttctctattgacattgccatttcttttcctccatctagtacttccatttgctctatttcactaaaaagtcacagaattaagagtggctgctgcaactcactgggctttctctgcttaaaaaaccttaatatcacatggtattaatacagctacattaataattgaaagattcactcagctgaccctatgatttttctaattattgttaactatctgaatatttggaaataattgtatttttccactgactttttctcattgccttgggtactagaaggttttttttttttttttttttttttttttagatggagtttcactcttgctgcccaggctggagtgcaatggcgcgatcttggctcgctgtaacctctgcctcccagttcaagtgattctcctgcttcagcctcccgagtagctgggattacaggtgcatgccaccatgcccggctaattttgtatttttagtagagacagggtttctccacgttggtcaggctggtcttgaactcctgacctcaggtgatccgcctgcctcggcctcccaaagtgctgggattacaggcataagccactgtgcccagccgggtgctagaagttttaacatataacttcagacacaactgagtaaatagttagctgtatatattttattgtattgttatttatattatgtcggctttgtgtcagaaaggatttaaagcacttgtttcaagaattggtatgctatatttttcaaaatctgtgtataaaaataattcccataagtaccactgtaatttacttttcatgtgtattacaaaatcagttatgtgttctggtaaacattttgatcccaagaggaagcaggattacatttagaatgtgacaaattttaaaaattaattttgttgtaaagaaatctttataatgatatgccataaagttattactatgcatgtaaggccgcataccatagtgattaagagcaggtccttggagttagaggcacagtctgaacttgactacaaaagttatcagctgtgtgatcttgggaaagtaaccattctcagctttagttaccacagctgtaaaaggtggataataattatagactctgtcctgttgttgtggtgaacatttagtgagacgactcacatgaggggctggcatagggtaagtacttactcaatatcagctgttctctttggcatagctctgttagagtggcatgccacagttaccttcttgagagccactaagcgtgggaacggtaacagtccacagaatttttggagattggtatgaggaggctgcattggctcccagccctcagggttgacagggtgaaggtaatggcttctggctgtctttagagctcccaaaagatatgagaagatggttctagtgatgacaacccactgttctgtcagtggaaatctagttttatgccatcttcatcattcgtggtgtagtctatcggtgcctgacacaaacgtctagagtggggaaaataacaccttaaagaaatagaatatcttaggtccatgatttgcctgctgtgtttattatgtaccccagcagtaaaatattttaagtatatttatttgcaaatcatacatctgtacatctttactgatatgtacatgataaacctgtgcaaaaaataacctaaaaaggggtaagattaaaatgaagaattagacaaaaggtttaaatgttttaaggtaagattcagcatcatcaacagtgggtataaatccatacttcaaatagccttggtggtttaaaaatcctctggttgatttacctttggattcatatcatcagtgtttccgtcttgttttgtggctgagaagaggaggagcagtgtcagttctgccattttcctgtcaatggtttatgtctgccttcttggaatcatatttaatgaaaggttctttgcaggaatatttttaaaccccttgttcatttggtgaagattagtttagttaaaactggattatataatatatttcaatctaactgagccagacaaattgtaacacatttcaggccatgtgtgcttctaagagggccactgttaacccctctgtggtcaagagctcccccttccctgaggttaccttgtgtgctcaaggcagctgagtaacataagaagaagcaagggtgttgatgccaatggttaccctattagtgaactcatttctgattgtttgtatgaaaacaaatatgatttctgttataatcttctgacaccccattccttggggcaccactgtcctagactctgaaatcactgtggttcctgccatttcttgaccttgacattctgtgacagaatgaaggagaccttaggttcagtggacttcattttctataactagctttactctattgatcacatagtggtatagctcttcagtgtttgcaaatcaatgttcacatatttctgtcatttgaactcagcatctttatagggcaggtagagaaggtctgattctgtccattgtaaagatggaagagatgaaaccaccagtgttgctgactgcagatggaagataattgcgtaagttcacacagcggtagacctgggtttgaatttgtttttgaaagcaatatcatcctgattcttttctatcatgttaacacaatttttaaatgatattcatattcatctgaatggagtagagacagacagttatatagtagttgcaagtttagcttttaaagaaactgccaaactgtcttccagaggctgtactattttacattcccattagcagtataggagtgatcctttttctccacatacttgccaacatttcttgttgttcttattaaaaccaaacaagtggtgctgggaatgcattaagagaaaacatatatattattaatagaataaataataatcaatagataatgtgcaggaaggggatttgcatttacgaaacatctattgtatcctatgttctttacacatattatccctttaatatagttctatacttgcagggacaggttttgcatgtaaagaaattgaggttcagagatgttaaataatttgtctaaagtacacagcatttaaattgtagagtttaaaccaaagggatctggtattaaaaaattccaggtaatgttaaaataaaacaatgcattaaatttgaaagtctttctgttactttttgttccaaattggatctctgtctttggctaaaaatcaaccatgacaacaagaaatgttggcaagtatgtggagaaacaggatcactcctatactgctaatgggaatgtaaaatagtacagcctctggaagacagtttggcagtttctttaaaagctaaacttgcaactactatataactcagttattgtactcgtcagcatttatctcagataaatgaagacttaagttcacacagaaatatgtgcatgaatgcttacagcagctttaataacagtgaaaaactggaaacatctcaaatatccttcaatggaaagacaaacttaaccattctgttaacagttaagcatgtatggttaatcgtggcacatggaatactacttggcaataaaaaggaacacattgttgataagtgcaacagcctgaatggatctccagggaattatgctgggtgaaaaaatccaaacccaaaaggtaacacactgtatggctccatttatatagaattcttgaaatgacaaaattatagaaatggagaaaagaaaagtgcttatcaggggttaaggagcagtggggtggaagagaggtgagtgtggccataaaaaggcaacaaaatggatgcttatgataatggaaattttctgtatcaatgtcagtatccttgttgtgatattgtactgtgtttttgtaagatgttactattgggagagactgggtaaagcgtgcatgggatctctattatttcttacaactgcatgaggatctacaattttctcaaaataaaaagcttaataaaaatgcctactgatcttcaggaagttcagttccctgttttccataactgatctgaaaataggggaaggacaattgagaatttaggagttgtaaactctgaggctgattttcagcgaactactcaaattattctgatttttccccttgattcttattatggattgtaggacattcttcctactattttggagaagaaaaaatgccacctctctatcataggacttctgttttacatatgatttaaaaatctattagctgactaatttacacactagaagatgaaacttggttacattagattccattgccacaatttattttaaaaatcagagttctcatctttcttgtttcttcttcctgccttactttattttcttttttccttattctatttgaacccatattttcctatattgtactgtttagtctaaaaactagtaagcatgcatattgttgattaaattagcaattgacgctcttaaaatgagaactataaagactcttgagcttccacacattatgctatgcttgccatatgcttgggtgttcttattttcggagagaagtaatggagattataaatgttatttttaaaatttactggtgatttgttgagaagataaagtaacaacactattacagagggttgctcttgatctcccaggccaccagtgcagtcaccgagccctctgcaaacacctgataatgctgaagagtgtgttagtcattgtagaggagctgctgtcatgacaaataggggttaaattgtgagaatttcaggatatattttggggaaggattaaataaatcaggggacttgctgacagcaaatagtatctttgatttgaaacacagaatcagagaattgagatgaatcccaggtggtggttgggagtttgaaaaagtcccagtgagttggctgactaagtgtagacttcatttcaacatcattaaatagtctttaagtggtgacttaataattgttgccccaagaaaagattttgctaaatacagaggtggaattaagtatattaatccaagaaacattttatttaaatgattttcctaacagtaaggttggaaggccctagaactgcttctaggagcttgaagtgcatttaatagttaactgtcagaatgaaaaatgaaattttaaatttcaacaatgcaattaagttcttattttcttatgatagtgaataataaatttcattcaaggacgccattggcagatgttgaaaagaaccattttcactccactagcttgcagtggactaagaggtagcaggaagggagattggtactacagatcctgaaaaaacaaaacaacacaaaacaaaatccacaccacaaatggacacttccagatgcttaccaacaggaagtgccttggaggacaagggctgtgagacaggtgaactctagggaacaagaattcctagttccatgtctgtttacaagaatttgtcatgactggttcacctcactttatagtttcctcagaccaaagagacaaagaaaaagcaaaaaacaaaaacaacaaaaattctgaaacgaatggacaatacaaccaaaactttaatatgaaccaaaacaaaaattgggctgattttatgaggttgacttaaagtcaggaaaagaatgataaacttttgagaggaagaaagaaatcatcaaagccacgaggagctcaaagtggtgtttaatagcagctatcacattgcgcccgagccttgaccacttctgacgcagctgtttcgttttaagatgttcccattcctgttccactcacacagtcctccacagtgacctgagtgcacgcacccaagccggcaggccactctagaaaaccgtaaacccctcagagagtcactgcaggaataggggaaatggaagtgatgaaattcaatatagcatttagctgaatcatcatctgaggttaagcccagtgaacaattagcagtatcgggagtctcctcgtacctgtcaaaatcgcaccgacgggattttgtgcaaagtatgtatgtgtgtggaagttgttttttatgtttaatagcaatggacctggggtagtaatttagatacaactttttaaaaaaaatactaaagggcaagtgtggtgagaagcttcttactcaggaggatcttttcaaacattgcaaaacatcaggccttgaaataattcattttattaagtagcgcactcttgtcttttcattcacaaaaggaggatgatttattatacagataaatgcttgcataggatgatgaacacctgtaggaatgcatgatattctggaagttgatcaaggtccactgtacaccagtaattagaggtcatgatgatgataataataataataataattaataatggcacatactatgtgtcagctcctgttctaacttcgtttctcatattaacttatttatttttcatgattagccactaagatacaattattatccctgttttgtagacaaggaactgagtgaagctcaaagaagtaactaggatcacactgtcacacaggcaggaatgaaacccatgcagattggctccttagtgtgctctctgatctattatcattcatcacatatttactgagcatctagtatatgaaaggtattaggctttatgcaggcaatactttagcgaagccagggagatgtctctgccttctttgagcttatagcttggtgggcaaaaagctaatggtttaactgtataaaaaacttgatgttgtgaaatgatatatgccaatgtttgcatggtatgatgattttgattaagcaccataataaaaatagggagcctgggtctcacacagccttgattgtcttcttccttctgctccccagtggagtgcgtaggaaggtcacaccctcaatgtcaggctccttcactgttctcagtgagtgtctcaggttgtaggctacatgagcaggtttgcacctggatatgattgtggcagtaacaatagatgtgactatacacagtggcagtggcagtaggggtgggagttgggtgatgggatgatcttagaatgcagtgttggtattaactcagttttgttttgttttgatgtacagccagccatacgactctggaatatgactctgggtttaccaacttggggatggcccggggatttaggagatggccccaatggctctcctcttttttagaaaggactgttcaagttccttttttttttctttttaaacaggatctcgttttgtcacccagatcgggggcagtggtgtaatctcagctcacttgaacctttgcctccctggctcaagtgatcctcctgcctcaggtgtgagccaccatgccaggctaatttttgtattttttgcagagacggggtttcaccatgttgcccaggctggtcttaagctcctgagctcaagtgatccatgtttctgcctcccaaagtgctgagattacggtttgagccaccacatctggtttaagctatttcttctaaagatatagtcacatctattatctttgacccctgcctaagcaattctgttcagatcttaagactatttcttcccgggattcaaactcagagttaagtagagtcaactatatgaggtatatgtgaggttaatttttgaaacttttatttttaatttcatctgggatctcctctagggaagaccactttatgattatgggttgcattcccaagttcagttgattgaatttattcatacattatttaataaatgtttattgagactgaaaataaacttgaaatcctagaattcattggttgtcttaaaaattctaaatatgaaatgctaactttagcttcatgagtatttagaatagaaaataaataattcaaaaattgttcaggaaaaaaatccatgatttattctactctggaggagcatattcaatttaaaacataccgattcgtataaacttattggtaatgaggcgatatactttttatgagaacatatcaaaccatagacattgagatccagcatctcctgagtgagtaaaatgtcagggttttattgatactaatgataatgggagtgacatatgtgcatagagtaagtccatggttgaaagcctggctgattaggcgctgcgttctgtggtttttgccacttgtgtgtgattaaaccctgcagaatagagtctgttgccatgtatttggttcgtgaagaaaactagtaaagtgatattgaatgaatgattcagtttctcaaaagggtagactattggcctaacaccttcctaacttggagctgtcaacgtgtttagtttggttctaatgggagctaggctggagaagagaaaagttttgtgagaaaggttatgtgatattaataagaaccacattccgtttgatgttttctcaaatgattttttttatcttcctaagaaattgaatgattcaaaaataataaatcttccttttctatggcccacaaatgatcaacattttggatgatcaaaacaattttgtctttaagatatcacaacttctagtgcctctttatttgccagtgctgatttacagcagaaagtatcacttcatattttttccaagcatcaaagtcatgtgttttacaaatattcacaagtgcttaaaatccatgaacctctctctgtattcctatttttttattcttctataagtatgtatttaaattggttaaacagatggctttctacttttgaaaaaaaaaaacccactaagaatattcacctcaagatggagaactcataggttaaatttcattctggaatgcacgtttacaaccaggtaattaacctttgaaaatgagggtactcgaaggaaacaaggaaaatcttaacaagatgatctcactaacgctggtgtgttagacttctcagaagtagagatgccccagaagtttaacaatgaaaaactttaaaatatttttaaaaacatagttaatctttgtagctttccagttttcgtcctttattacgataaccttaggaggtaaacgcttcaaggggtgtatccttataatcataggaattggtacacagattttggtggaaagatggaggtgtcaacattaaccagtcaacatatatttgttgactgcctaccacatgcacaagtctcttccatgcttgcgaagagatacagtgatgtgcaatgtgtagaatctgcccttcatgagcttttgatttagttagtctgagaaggaatagatcagtgaaaagttaaaaggaataatagatggagtgttgaggcagtccatgattgttatctgagacattgagtttacaatgctaagttaaaagaatgagagatcactatgggatagaatggacaggaagagttcctctccttgaagcttgcattaagccataaaagacaaagcaattttggaaatgcagaatttggagatatgaagaaagaataattcccagaaagggagaagagttttggagccagacagatctgggttcaaatcttggttctcttgttctctagctgtgtaatcttgggaagttacttagcttttatggacatcttctataaaaaggatatgatagcgactattttgttaattttttaggattaattgagataatatatataaagtgttttaagcacttgataaaaggtaatcctctcagttggagagaacatcctaaacaagtctggaggaaggagacagccagccatgttcatgggacaaaaagaagactattatgagtggagggaaagattaagagaagtagagtgagatcacatggaaagataaattaggattagcttcagccattcacttgtttcttcatttaatactttattgcactctttatgtgggaagctctctcatgtgggaaaccctctgctcggcatggatatgcagagacaaagaaaacttagccttggatttctcttgaatgtcaggttaaggagttggaacttcatgctgaggagaattatatctttcaaaagtggaggagcttgaaagtagcatttttggatagttaacatggaatgtgattcttgtgacccaagatatgcattaagttaccatctcctagtggttgatggttaatgttgtgcctggagatgtgacccagattctcttgtaggtcattcctgacagagggtccattccaatgagtgaggaggaggagcttctgggctgaacttaatctcatctcctgaaataaagcaatgacattgaaatttttcatattgcacttgtgtttacatttctcatctaatctgagatattccacgtttggtgagtcttgctttgggcctgcagtcttggtgacccttattagttgcactggaatagctgtctattcagggagaagtagaatcctgggaatctggtcttcagtgactttctccatgatcatgaatttcatgagaggaggtccccttcctgttagtagatctctatagcaagaggttctgaggcacacaagcacactggatactcacctacagttctagtttaactgatggaacataggtatttctttcatgaaactttgcctggataaacagcttctgtatcttctagtgacaaaattttgcctcctgttttcccctctagctctagtcttaatctctacttccttgttcagtccaaggctcaggagaacccagatcatataagatatggaacctattgcttcctaggatgtccttgtacacagtgactaactgctaatttcaaggatcaatttctttctggagttagaatcatattatattatgtttcagaactgaaataaaattcttttaaggtgattatattttggctctcagcttggaagatgccactggggcatggcatacaagacacataacttataggaggacctcctttaatgcccaagtgccagcttcatgcttgttgttatatatcattttattcctggctttgatgcccacacacagacatatatccacacaaagttcaatctatatattttttgtagctgtttagctcaggtgattagggcattgagctaatgagaacaaggtcacagtttcagtctttgtgtgggccagcaaggtttgctttgttcagaggccacagacctggtccagccagctgtccagcacatgtctgccccaagtcatgagaggacggggcaggagtgtgtggatggacaagagcaaatccatcaccacccttagaaaaagtcaagtcaagcacgtgtcctactaatgggggtcaataatgtctcatttaaatggggctgacattttattacctcttgctgagagggtcttttgagcaccaaatttaaacattgtcgcttttttgtgtgaatttatttctaataaatggaaggttgtacaagaccttagatgattacaggtttccaaatacagattaatgacttcaatatttaagaagttgatgtgatattaaaaaagaaagttcagtatggctattcagttatcttcccttattaaaatctgttttggctaatgaaataaaaagttcataagttcttccgagagtaagtgagaatcattgccttcattcaagaatgaaaacattattattaaactcattgataatgagaccattaaaagttagcatgaagcaggtacaatacaattctttattattgaagtcttcagatattacccagcctacacatcccacctttcatttttaggcaaacaaattccccaaactatattttttttaaatttagcattaggtcttgttaggcttcaaatgggatcaaaaccaatcctttccaaagtgttctaccccagctgtttccctcacctgggtggtagtgagtataaaggcatttgatacagaagggggtggtggggcagagaacagaaaggaaacttggtgagagaatgatgaagaatgatatattagagattcttttaaaattcattcattaaacaaatgtagcataatggaaatgtctattaaattttttggcataggtaatgcacttgcaagggtaaaaacagaaatatgagatggtattttatgaaaagttttgctcaccccgcatccatcatgaacccaattctactgcccttgtatagccatttttattagtttcttgtgtactctttcagaatttctttatgccaatatatcttaaactctttcctttttttcatacaaaaattaacaccctatcaattttgttcctggcagggtgaggtggctcacacctgtaatcctagcactttgggaggcccatgcgggagaattacttgagcccaggagtttgagaccagcctgggcagcttagggaaaccctgtctttataaaaaaataaaaaattagccaagcatggttggtgtgtgcctgtagtctcagataactcaggaggctgaggcaggaggatcacttgcaccagaaggttgaggctgcagtgagccatgattgcaccattgcactgcagtctgggtgacagagaaaaactctgtctcaaaaaaaaggtcttgagcttgctttttctacttaacaatatgttttgtaaatctttctgtatacgcaaagtagcctcatttttcatagttgtatatcattctattgatgtgccacactttatttatctacccccctattgatggaccttcatatagtttctaatattttctattacagacaacaatgtattgaattactttggaatgcattaggtagaaagcattcttctttctttaaacatttgcgtagcattccactgaatggctatatcataacttatttctctagccccctattgatcgtcattgagtttccaatcttttatttttaaagacaatgtcataatgaataactttatacatgtattatcttatatatgtggaattaaatttaccatgtctagataattttatttgaatgcaattaagtatgatatcaaaaattataaaatcaaaactgcagtgagaattcatcttaccccatgtaaaatgactcttatccaaaagagaggtgatcatgaatgctgatgagaatgtggagaaaggggaaccttcatacactgttggtgggaatgtaaattagtacagcactatggagaacagtagagattcctcaaaaaactaaaaatagaactaccatacaatctatcaatcccactgctgggtatatatccaaaagaaaagaaatcagtatattgaagagatatctgcactctcatgtttattacaacactattcacagtagccaagacatggaagcaacctaactgtccatcaacagatgagtgggtaaggaaaatatggtacatatacacagtagaatattattcagtcataaaaaagaataaaatattagttgggcatggtagcatgcacctgtagtcccagcaaccagggaggcctaggtgggaggattgcttcagtccagggaagtcgaggctgcagtgagccctgatcacaccactgcactccagcctgggcaatatagcgagaccctgtctccaaaagaaaaaaaaaaagaatacagaatgaaattctgtcatttgcaacaacatggataaaactggaggacattatgttaggtgaaataagccaggtaccgaacgacatatttcacatgttcccactcatatgtgggagctaaaaattaaaacaattgaactcatggggagagtagcatgatcattaccagaggctgggaagggtagtgggaggaaggaataaagtagggatggtcagtggatacaaaaacacagttagaaggaataagatctagtgttctgtagcacaacagggtgactatagttaacaataacttattgtatattttaaaataacgaaaagagtggaattggaatgtccctggcacaaagaaatgataaatgcttgaggcagtgaacaccctaattatcctaatttgatcgttacacattgtatgccttcatgaaaacatcacatgtgccccataaatgtatactgttatcatgtacccatcataattttaaaaaatagaaaagaattatcacaattattttaaatgaagaagcactaagtaggaaataaggtacaatttaattcagaatagctttccttagtagtgttcaacctactgtacacatcaacaacacgcccttgcagttaacattgttgctggatgtttactgttatgtgtgaccagctgacatgtccctctaaagaaagaggatttaaataagtcatgtatgaaagactgggtaaaggtgagacactgtaagacctagattattttggggctgtagcaatcagattagctattgagtattcattcataaattcattcacttcactgagtcatccacttcttgtcagattctgtatttattcatctcctagtaagctactcattgtgctaaaatgctggtaaacagaagtacaaagcaccagttataactcacagtcttgtagaggaattaagaaatggacaggaaacagtaagggtgcattgtaggtatctcaagaatgatataaagtgttatggcagatctaaggaggaagacatgactttccatagataatggatggtggcatctgttctggagtaccagaaaattagagtaacaaaaacacagcaggatagattttcttacaatgcagtgattcatacaaaggctaccttgactgttagtttgtgactggaaactctcagtcagggctgacggagggagtcctgcccctgccagctgttcacctttccctggtgctggggttgacacttcacatgctcacatagtctggttctgtgctgtctactagggttgagtgtgctgctgggcagagaattttggcatttctccagatgcacatgaggggcagaccgcctcagcagttgctaatgacccaaagaagccttctttcatgacttattttgtcccctcattttattttttgatgtattttggtgagctgagctactaccttctcaggcagtcccaacctcagaaaattaaccatgtagctttctcatatctgacattgcaaattgaggcaaggtcgcatgctttctgactacctgactgcctgggcatttctttcatgcaacttgtttaagccgcccatcctgatccctgttgctaagccaccatggctgcatttggacgcagttcttcccagctttgccgcagcataactgtggaaaggatcttgatgaatttggacctggggagggacgtgggaggaaagagaaatggtctaatggaagaaagtgaacaaacaaagacatgctcacagaaaactgccaagtgtgaggggtgggaaaacagagttcagcctggctgaacgtaggaatctggatgggaatggtagatcttaggctcctgtttttcagcttgccgctctagtgatgattcttgtagatatatttttccaagtaaaaggagcatttccaagtgactgttgtttaaaataaagtacatgttgcatttgtaatgtatgaattatgagtattaaaactgacaatgaaatgagagtaatatacttaattaaaattaattagatctgttggcacaccactagaaggacaaatatgatatttaatatatcactctactccagacctgtccaattaaacttttggccatgatagaaacgttccatatctgttgtccaaaaacagtaacccctagtcacatgtggctattgagaacttgaaatgaggctagtgcaactgaaaactgaattttaactttgtttaatttcagtgaaatttaatttgaatttaaatggccccctgtgagctagtagctaccgtattggacagggaagctctaaacagggttctaaacatgtggaattaacagcacttaagagctggagtagaccttaacctttaccaggtctcaaactttgatttacaaatggggaaatggcagccaagaaggtgaaacaccttgtccagaggcacactagtaggaattagcagaactggaacctggtgtttggatgtcctggctcccggcctgggggactcttgattccaacacgctctctcccagttatgacagagggctgtggctggacccaggtaaggatgctgggttggtagattgagaaaataaggccacgcgtagtctttcaaatcaaccaagcaagagatatttgctgtacatggtggcagacactgagatcaacagagaggttgttgtggtgtgggggagggcctgtaaaatggcataaggagtctactgggaaaaacaggatagtgatagattatatatctctatatttatctttctatataatctaccctgttttcccaaatggatttcccaaatgtgtgtcacttgtatatctggctgtcactggtacaaggtagtccaaatggacagggtacgcaaaccccagacagggctatggaaatttagggagatctgtgtgggtgagtggtcggggagagcttcagggataggacaggcttgacttatattagatagtgtaacacagaaggtaaaatacaactttaggatcattcaaatttaacagtggttgatatgaaacaaacttcttatccagagttggttttgtattcttgctttctgtattaattatatgtgtttactgattcaccacaatcagctatactgtccctagaattttaaaatgtgaaaagaatgtggtttgtttcaggactatttttctgtagaatggtgattgtatagaattaattaatattacagttgcattattagaccacagtaaggtaaatggtcacaaaagaccatacatttaaatcaggagaaaagtaatggctattgttatcctgtaggcatagctgggaaatcatatccttacttggcttgctaaagtcttaacctagtactacatgacagtatctccagagatttttttttcccattcgtaggcacaacaaatgagacccaagtgctcatagaacattccaaagagtcaacagagagaagtggaaagtattagaaacatgattgtgtttgcaaagggagacataaac

SEQ ID NO: 40 - DNA, 1960 bp, Homo Sapiens
actcttgctgcaaacattgggatcagccgtgactatcccataacataatatttctgatttcattcttttcctttctcctaccaatttaatctgcaatcacttcaagagaagtctgtttaaaggatattcacattctgttcacagagtttgagagaaactgtattcaagttgctgaaaccaagaagctacactcacgagtctcacctaaactcgaatctgatttagatgacatcatcctggactttgagttgatgaaaccttggaggtcttgggagtaaagcaagtgtgatttgcatatgatggatatgaattgtaatggccagagcatggctgtggtaggtaacatctagagatggccaccattattttttttttcctctatccgcacatactacttctcctgtactcttgaaactgggatgaaattagcaactttgttaaccaatataatgtgccacagaagtgacttttgcgacttgtgaggttagatcttaagaagtcttgtatcttctttctggatcacttggaatgcttactacgggaaccaagccactgttctatgagaagtgcaagtcacatggagaaaccatgttttggcaagctagtctgcatcttcagattccggtgcagtcctctgaccatattgggaaggatatgtaaaatgatacgagtttcagggaataagaatgggggtgagaggaatcactgaggatgcccaaggacaaagcagccggaacaagtttatagctcagcagtcccaagatggccgaataggaacagctccagtctacagctcccagcgtgagtgatgcagaagatgggtgacttctgcatttccaaccaaggtaccgggtttatctcactggggcttgttggacagtgggtgcaatccacgaagtgtgagccaaagcagggcggggcatcacctcacccaggaagtgcaagaggtcggggaattccctttcctagctgagggaagccatgacagatggtacctggaaaatcgggacactcccatcctgatactgcacttttccaaaggtcttagcaaatggcacaccaggagattatatcccacgcctggctcagagggtcccacgcccacggagcctcgctcactgctagcacagcagtctgagactgaactgcaaggtggcaatgaggctgggggaggggggtccaccattgctgacgtttgagtaggtaaacaaaacactccagcctgggcgacggactgagactctgtctcaaaaaaaaaaaaaagaagacatttatgcagccaacagacacatgaaaaaatgctcatcgtcactggccatcagtactggagaggatgtggagaaataggaacacttttacactgttggtgggactgtaaactagttcaaccattgtggaagacagtgtggcgattcctcaaggatctagaactagaaataccatttgacccagccatctcattactgggtatatacccaaaggagtataaatcatgctgctataaagacacatgtacatgtatgtttattgtggcattattcacaattgcaaagacttggaaccaacccaaatgtccatcaatgatagactggattaagaaaatgtggcacatatacaccatggaatactgtgcagccataaaaaaggatgagttcatgccctttgtagggacacagatgaagctggaaaccattctgagcaaactatcgcaaggacaaaaaaccaaacactgcatgttctcactcataggtgggaattgaacaatgagaacacttggacacagggtggggaacatcacacaccggggcctgttgtggggtggggggaggggggaaggatagcattaggagatatacctaatgtaaatgacgagttaatgggtgcagcacaccaacaaggcacatgtacacatatgtaacagctgcacgttgtgcacgtgtaccctagaacttaaagtata

SEQ ID NO: 41 - DNA, 2646 bp, Homo Sapiens
agacagattttatgtgagagaaaagttggatgctcacgctccatggagcatcctcgcgtttcccggggaaaagcggatcccggagaagcagcctaatctctcagcccttgtggagaagggaatatcagaagcaggacgaaagccaggtcaagtctctttccttaggctccccaaagggacaagtactcacctcccagagacctggcccagcgggtcctcatggcagcaccaccccctcccggtgcccacgaccattcgtctcccatccggcgttctccaggatttccaaagacgcccgtttagatccacagagctggaagacagctgttcctggatcacaccagaatggagaagcaagctcctcccactagcagaaagcctttgctttctgtgcctggattcggaagattagttaagcactggaagaggaggggggaaacaacaactcgtttttgctgtatgttttttttttaattgtttttatatttatagaaagttatgctttgtctgattcttgcgctaatttgggttctgaaatttgagtaaaatcaaatttaaacatacaaaacaactttaaaaccacaaggaacaggaagcaaatgattatacataaaagacatatagaagataatgcatatgtgttcagtggaaaatagaaaagcatgaaagtaagatcacaaatatttattatttaaactcttccttgaactattggtctgccctttggaaaagcagactttccttaatgcagtagctcatattaatattttttgtttgcttaggaccagagcaagaaggttggacttgggagctagtttgctgtctggctttgagaccttgaacaagttttgttctccttctgtttccagttttcttttttgtaaattaggagattaactcatgtgatcactctattttcaactttttgttatgggaaatattcaaacatatgcaaaagtagacagaataaaggactctcatgtgaagatcatccaacttttacattttttcaatgcatggctgatcatgtctcatccataagtccactcactttatcactaccaatcctccctcttttttttttttttttaccaaattcaagctttatatatatcttttcagctgtaaacattcagtatgcatccacaaaatttaaggactgtttaaaaataaccacaatatcattagatgattctttaaaattgcagtgtaatttacacctagggaaatgctcagatgttgtgtccctttaaatcagttttgaaaaagccatgcattagtgtaacccacactattttgaagacacaggacattttcatcattccagacagttaccttgtaccttcatgtgcatattctagaatgtcataaagatctaatcacgtagtataaactttgttttatatttgtctgacttcttttactcagtataatatttgtgaggttcgttcatgtcgttgcatgaatgggtgttttgttttttattgctttttgttgtttctttttactactgttaatagtataagttttccattgtgcctctttacaactagtatctcaatagagtattacaacaattatttaatatattatttcacatgacatatttatagtataaccatgacctccttgagacctagtgctttaagtcaaagaggtaaataaaatgagatattttaggtctcattacaacagaccaatgtgagagaattatttctggacagttgcacttcttataaacgtttaacatgattccaaacttttatttggtaatttgttagtcctttggcaaaggactaatgtactatgttatttagtcataacaagcagatcaattacattttatgtaacttttatagacagagaaactgagctccaagagttttggtgatatgctgagatcacctagctattttaagtggcagagctgagacaatttagcagaaactgttacagaaggcacaattgtctcctgaattagcagtttgtgtctgaagcctcacagattgggtgtggtaaagagtgagaaggaaaaaggtagaacccagctgtgttagaaatagccttcaaatttggatgtgacaatggaaatcaagaagaacttatgttattatgaaacagttcattcatatttaaagttttgccttttctatattggtattcctcaatagggggagatgatttcttactacctacaaaaaaagaaaactgtaaactaatttcgttgtcattttgaattacaactatatgtttaactcttgtcactccttaaaatgccttgaacacagtaaacatccaatgaacttttaattacacataatattgatagtgatattgcatatgttctaggtctgtattcttaaggagggaaagctgctcaagtacaaagaagggaactagaagttaaaataaagtttttttaatttttcttttcattattgatggacagcatggtcttcagtaaatctttagcctctctgaatataacgttaaactaattgaatggcttgtacctcataagaaatatgaagttatgaagtaataacatatttggaagcattactaacatgcatattctgttcataactacaatattcatgttttgttttctctttgctaagtgaaatataaatattttaccagacc

SEQ ID NO: 42 - DNA, 5044 bp, Homo Sapiens
gaacactgctttgctctgcagcaggggagccatctagctggagctctggccagattgcccacaaactcacctgtgttgcctcctcgatgggaaaagaaacaagcgcactaatggtgcatttctgtggagaggagataagtgtcctaattaggaaggctctgaaaatgagtgattgaggcattattggatctgatttggggagcactacagtctaaagcctgaatgcattaaacaagagtgaattagagtcaaagggtttgttaggcagaaagaaaaaagtggaaagtctgtgggggaagaaaatccttaattgagttttctattgaaataaccaataacttaaaagtgcaagagggaggcagaagagagggtcagaatgatgagaggtcaggacttcacccaccattgttgtatctgcagatggaggaagggcacgggagccaggcatgcgggtggcttttgagagctaggagaggaaaggaagtggatatccctgtagagcactcagaaaagaatgtgtccctgcctacgccctaactttagtgcagtgagatccatgtcaacattttaacttttagaactgtcaggtaacgaatttgtattgttttaagccactacctctttggtcatttgttagataacagcaatagaaaatgaatacattcatctcaagtatcattctccctccaacaaccagaggggtcttgccaaaaccttggaaaattcatgtgccttttctgcttgcaaccctccaaatgcatcattttcactcagaggactccagagtccaacaatggccctcagggcactgtgggatctggctctgccacctctctggccctagctctgtaaatcttccctcttttgctccatggccattcctcagacacgtcaagctgtctcctcactgcaggttctttggctcaactcaggttccctctacctgaaatgatccaccttcagagaattggatggtgagtaaacacaattaaagaagttggccaggcctggtggctcatgcctgtaatcccaacacttggggaggccgaggcgggcggatcatctgaggtcaggagtttgagaccagcctggctaacatggcaaaaccctgtctctactaaaaattaaaaaattagccaggtgtggtggtgcgtgccagtaatcccagctactcgggaggctgaggcaggagaattgcttggacctgggaggcagaggttgcagtgagctgagattgcaccactgtactccagcctgggtgacagagcaagactctgtctcaaaaaaaaagttaatctatgtgaacaatttaagactgtactagcttcagctagcaagtaactgtcttaataactgtctcagctcatctgtgtggctcactgtgacttcctgtctctgctcagcttagcaccgtcattctccatcatttatcacattttccactctatacttatcactctctgatatgttaagtatttattggctagtttttattttctcctctagtagactgtacactctatgagagcaggaactttgttttgtccactgttgaactctcagccactgggagactgtgtagcaccggtaggctcctagtgtttgagaattaattcattcccaccaggaatgctgaaaaagggtacatctacagtgaatctgaggttgaactgagacctctaagtttattttcatctcgaagttgaagacattgctaattttttcttttcttttcctttctttttttttttttgaggcagagtttggctctgccacccaggctggagtgcagtggtgtgatcttggctcactgcaccctccgcctcccgggttcaagtgattctcatgcctcagcctctcgagcagctgggattacaggtgcccgccatgacacccagctaatatttttgtatttttactagagatggggattcaccctgttggccaggctggtcacgaactcctgatctcagatgatccacccaccttggcttcccaaagtgctgggattataggtgtgagccattgtgcccggccatggtgctcattttcataaagccaataagaggtagaaccagcacttgaattttgattttttttttgtttgtttaaggcaaagtttgtcacaggtattttctcatgttgcctctagctgatgcctttcccagcagggctctcccatgggacttcttggtttcaccatgtttctacctctgggaaacatatcgcacttgcctgagtccttaagcacctgcttgctgccatgtgatagttgttactcatgccttaataaaacaatcacatacacttaggaagcatgcagctctaatggagctcaaaaggtacatggcctcagaacacctcaaaaggtacaaaattttggccatgagatgaggctggcgggagggaatggcttgaaaggagtgtctccatatcgtatcacacaaagagttggtatttggagctcctgacacttgagctgtgatttttcagtcgttctgtagaaactgcaaaatgtaggatatgacctatttgagattgaagtcctgcagtggtataggccattgatagtcatcttattggaagatatttgtccctggatcttggtggcatttttttgccacatgcagactttgtgtacacagaaatactgggtcaattattttgaataaactgacttgcttagtctcttttgtgttgctttatataaaggaatacctggagctggataatgtataaagaaaacagatttatttggctcataattctgtaggctgtatgagaagagtggcaccagcatctgcttcttgtcagggcttcaaactgcttctactcatggtggaaggcaaacggaagccagaatatcatatggcaagagagggagcaatagagtaggaaagcgctagtctctttttaacaatcagttcttgcagtaactaatagaacaagaaatcactgaagatggtgacgatagcctcaagcctttcacgagtgatccgcctccatgacgcaacagctcccaccagatcccaaccctaaatttggggatcaaatttcaacatgaggtttggagggaacaaatatctaaactatatcactgactattcgggctattgatagatttttttaaataaaataaatgatggtgtatttgattggattaagaaaatcaaggctgggtatggtgactcacacctgtaatcctaccactttgggaggctgaggcaggagaattgcttgaggccaggggttcaagaccagcctgggcagcatagggagacccctatctctacgaaaaggaggaggaggaggaaggggaggagaagatggagaggaggagggggaggagaagaagaagaggaggaggaggagaaggaggggaggaggaaggggaagagaggagggaaaggggatgggggacaggaggagggagctaggaggtggagaaaaaagaaaaagaggaggaagaagaaatgaaaaaggaaaatcaactggttgtctaaaatgtcaatcagcattttggtgcagataataaacaccactttttaaaatattttctttctttttattgtggtaaaatatacataacatttaccactttaataatttttaggtgtacaattcagtagcattaagtacatctacagtgttgtgcagccatcaccactattcatttccagaacttgtccattgtttgaaacagaaactctgtacccattaagaaaaactgcccatagccccctcctcccagctcctggtaaccaccattctactttgtgtctctatgaattttcctattctaggtaatctatataatgggaatcatgcagtatgggtcctattgtgtctgacttacttcacttaatatgctgttttcaaggttcatttatagtgtagaatgtatctgaacttcactcattttaaagactgaatacttttccgtttatgtatagatcacattttgttgtccacttgcctgttgatggacatttggatttccactttttggtactgcaggtaacattgctatgaacattgctgtacaagcatccgtttgagccattgctttcagttcttttgggtgtatacctagaagtggaagtgctggttcatacagtttaacttaactctatgtgtaacttttaaggaactgccaaacagttttccacagcagctgcaccactttctgttcccaacagcaacgcacaagtgttccaatgtcaccacatccttgaaagcacttgtcattattatttatttttttttaggataatagtcatccttatggatctgaaatggtacttcattgtggttttggttatcatttccccaacagctagtgatgttgaacatcttttcatgtgcttacttaacatttgtgtatcttctttggagaaatacctgtataagtctttcgtccatttttgaattgagttatttggttttggttgtgtttgttcagttttatgagtacttcgtgtgttctgaatgttaatcttctcaaagtttcatagttttagctcttacatttgggactttgatctattttatttatttatttattgagacggagtctcgctctttctcccaggctggagtgcagtggtgcgatctcggctcactgcaagctccgcctccagggttcacgccattctcctgcctcagcctcccgagtagctgggactgcaggcgcccgccatcacgccctgctaatttttttgtatttttttgtagagacgggttttcactgtgttagccaggatggtctcgatctcctgacctcatcatccgcccgcctcggcctcccaaagtgctgggactacaggcgtgagccaccgcacctggccaggacctggatctattttagattagttttcgtatgtgttgtaaggtaaaagtccaacttcattcttttgcgtttggatattcatttttttgcagcatcatttattccaaagatgaaccttacccaattgaacgggctttgcaccattgttgacaatcaattgactatatacgtgaaggtttatttctgggctgtatt

SEQ ID NO: 43 - DNA, 1919 bp, Homo Sapiens
gcagaaacaggacggagaagggggctgtatttcccctggcgtgtgaaatggatgttagtgactaaagctcaattttccagttaagggaggagccgagacttttaagtcgagtgttcctgtggggccaaaaggatggtttcagagaaatcccaggaagtgagagtgctgggatatgcgaggggcccacggagccctcccctgcgtgtctgagatcacaccctgcgggtaccctgccgtcgtgtgctgaaggaggtgactggatctcgactccagagtttgctcctgagatcgaaaaacaaaacaacccaataatagtaatgacagccctgggtggggacagttgcagcaggtctcatgagaaactcactaattttgtaggttcagggaaggcgtgggcatgttggggaaatcaagggagaggagaagaggggaggagggaaggtgaggtgaggtgattggtattctgccaatcccattctgcacactagtgagacctagcaaggactagagtttcagggggaaaatacgagaataatgaaagataacagagaggaaagaaaaaagaaataattgaaaagtttgaaagaagaaagacaacagctgaaccaatggaggtgaaaatagaaggaaatgaaaattctgcaagcttttgtttcatggataaaaggactgtattttctggtccattatcaggatacaagatggaaaaaaaagctattgaacttgtggagaaagtggctggtttaaattagtcctgtccctgaaaatccaagctgcgtgtttgtcagtcttatggctgatttaactcataggcccaggagagaaaggatagaaggaagcctgaatgaccagcaaagaatctgcatccaatcaacactcagagcatgtatgctacattcttcagaaaccttcaggagtcatagactgtggtcagttcttcgtcagaattattttagatttacttcagttgttttttcatcaaatgcacataaaacatggaattgttcttagctgtgcagaccttgtctattttctgaaaggaaaaacaatgttaatttttaaagccctacatacattacatctttgtacttttcaaatcattgtgtcacccccttcccttctcttttgaaggtgcctggctgaatctctcctattctcacaatggctttgcctccattctgctgaagtcgcttcccattgctcacattattatactgtttttacttcacttccaagcttgtttctgactacacaaagggtgctgtaattctgagttccctatatatagagttgcttttccaggaacattattaataaaaggaaaggtcttccttttccattatggagatatacccatgttacgttgtgctttgatgatctgggctctgacttataaaaccagtgttactataattttcacatctttgagcagctctgcccagtcagttccccataggtccctcgggagtttttcttgttttatttttgaatcttagctggaatctatcttcattaggagtctagcgtcttgttctccgtagagctctgaaatggtataacagagaaaggggtactagaaacagcaggctgactctctttaattttctttttctttttttttttttttttttgagacggagtctcgctggtcgcccaggctggaatgcagtggcgcaatctcggctcactgcaagctccgcctcccaggttcacgccattctcctgcctcgccctcccgagtagctgggactacaggcgcccgccaccacgcccggctaactttttgtatttttagtagagacggggtttcaccgtgttagccaggatggtctcgatctccagacctcatgatccgcccgcctcggcctctcaaagtgctgggattacaggcgtgagccaccgcgaccggccgactctct

SEQ ID NO: 44 - DNA, 4860 bp, Homo Sapiens
gccatttcttttttttctttttttttttaagataagagtctttctcttgtcacccaggctggagtgcaatggtgcgattttggctcactgcaaccttcaccttctgggttcaagcaattctcctgcctcagcctcccgagtagctgggattacaggtgcccgccaccatacccagctaatttttgtatttttagtagagatgggatttcaccatgttggccaggctcctctggagctcctgacctcaggcaatctgcctgcctcagcctcccaaaattcaaggagtacagatgtgaacaaccacgcccggcctccatttcttttttgtagtctttaataaacagctgctatcattgcagacttgctgtttaggcacttaggaatttttcactagaaggcatgtaaataaagaccatgggcaattgtaatgaatttcgccttcattctttgactacatgactgtccccagagctgtaactttattgaattttttagaagccatttagctagcaactgagcctaaccagccactcactgtcattattcagtgctcttttattattgtctatttctcctccaacttggctacactcacaaagtgataaaaacttgcatttgttttctttccttttcagagacagcgtcttgctctgttgcttaggctacagtacagtgacatgatcatggttcactgtagcctcaaactcctgggctcaagtggttctctcacttcagtctcccaagtagctgggactacagacatgtgccaccatgtccagctaattttttatcatagagacgggatcttgccatgttgctccgactgggctcaaaactcctgacctcaagtgatcctcctgcctcagcctcccaaagtgctgggattacaggcaggcatgaccacctgtgcccagccccctattattattattttaaataatagctttattaaaatattcacataccattcactttatttattgaaatctgcaattcagtaggttttagaatattcacagagctgtgcatcgatcaccacagtcacttttagaacctttcattaccctatagagaaatccataccccttagccactacctcctactctccccacctacctttgcccccagccttaggcaaccattgattaatttttttgtcactatagatttgcctaatctggacaaatagaattgtacaatatgtgatcttttgtggctttttttccctcttagcacagtgttttcaaagttcctttatgtcatagtgtgtatcaatatttcattccttctatggcagtattccatggtagagacacactgcattttgtttatctgttcatcagttggtggatatttgggttgtttccatgtattccatgtattggtcattatgaataatgctgctatgaagattgttgtacaagtttttgtgtggacatatatttttatttttctgggatatatgcctaggagtgaaattgttgcattataggatgactgtacatttagccttttgagaaactgccagaatgttttctaacgtggctataccagttgggtgcaatggctcacacctgtaatcccagctactcaggaggctcagctaggaggatggcttgagcccgtgaattcaagaccagcctgggcaagatagtgaaaccccgtcttgattttttaaaaatccaattaaaatgacaagaaaagaaatacccaaacaaaatggttacacaattttatgttcccaccagtaatgtttgtgggttccaattcctccacatcttcactgacattttttttttctagataggggcttgctctgtctctcaggccgcagtgcaatgatgccatcacagttcactgcagccgtgacctcccaggcacaagtgattctctcatctcagcctcctgggtagctgaaaattacaggtgtacgccaccatgcctggctaatttttagatttttctgtagtggtgggattttaccatgttgcccaggctggtctcatactcctggcctcaagtgatctgcccacctcagcctccctaagttctggaattacaggctgccaccatgcccggccttcaccaacatttgccattatctgttttttttttcttcctttataccttaaagcagtataagaacaagtgtcttcaattataggaaacagtataatcccagggctttgggaggctaagacaggaagatgtcttgatgccaggagttttttttgttgttgttgtttttgtttttgttgttgttgttgttgttgacagtctcgctctgtcacccagggtggagtgcagtgatggggtccactgcaacctccacctcccaggttcaagtgattctcctgcctcagcctcccgagtaggtgagactacaggcacacgccactactgcccagctgatttttgtatttttgatagagtcagagtttcaccgtgttggccaggctggtctcgaactccagacttcaggtgatttgcctgccttagcttcccaaagtgctgcgattacaagcatgagccaccatgcccagcctgatgccaggagttttagactagcctgggcaacctagcaagaccttgtctctacagaatatttaaaaattagccaaatgtggtggtgcctgtgtatagtctctctccctctctcttttttttttctaactttttgtgacatggtctggctctgtcacccaggctgaagtgcagtggtgtgatcatggctcactgcagcctgaaactcctgggatcaagtgatcaatcctcccacctcatcctaccaagtagtagggaccacaggtgtgtgccacccaggtcttgctatgttgtccaggctggtcttgagctcctggcctcaagcaatcctctcaccttggccccccacagtgcaaggattacaggtatgagccaccatgcctggcccctaccctgcctactgagaaccaaaggaaggatccaaattctccttagctcaactcgagccatttcctgattgcttcatcagcgaggagctggttattgggctgtccaggcctcccaagcagcacagaaatgaggtgaaggagttttcctgttgctccactctgtaaggagttggagggtgatgtttactcgtttgcagagagagatgccttgtaggcacctcaggatggagagggccctgattccaatgtcctttttttcttcagaaacaggaccttgccctgtcactcaggatggagttcagtggtcctatcatggctcattatagcctcaaactcccaggctcaagcaatcctaccatgtcagccttcccagtagctgggactacagctggatctaccatgaaagacttgtgaatccaggaagagagactgactgggcaacatgttattcaggtacaaaaagatttggactgtaacttaaaaatgatcaaattatgtttcccatgcatcaggtgcaatgggaagctcttctggagagtgagagaagcttccagttaaggtgacattgaagccaagtcctgaaagatgaggaagagttgtatgagagtggggagggaagggggaggtggagggatggggaatgggccgggatgggatagcgcaaactgtccgggaagggaaaccagcactgtacagacctgaacaacgaagatggcatattctgttcagggaatggtgaattaagtgtggcaggaatgctttgtagacacagtaatttgcttgtatggaattttgcctgagagacctcattgcagtttctgattttttgatgtcttcatccatcactgtccttgtcaaatagtttggaacaggtataatgatcacaataaccccaagcataatatttcgttaattctcacagaatcacatgtaggtgccacagttatccccattttatgaatggagtgatgaaaaccttaggaataatgaatgatttgcgcaggctcacctggatattaagactgagtcaaatgttgggtctggtctgactttaatgtttgctttgttcatgagcaccacatattgcctctcctatgcagttaagcaggtaggtgacagaaaagcccatgtttgtctctactcacacacttccgactgaatgtacgtatggagtttctacaccagattcttcagtgctctggatattaactgggtatcccatgactttattctgacactacctggagttagcacagaccccacaagttaggggctcagtcccacgaggccatcctcacttcagatgacaatggcaagtcctaagttgtcaccatacttttgaccaacctgttaccaatcgggggttcccgtaactgtcttcttgggtttaataatttgctagaacagtttacggaactcagaaaaacagtttattttctttttttctgagagagagggtcttattttgttgcccaggctggtgtgcaatggtgcagtcatagctcattgcagccttgattgtctgggttccagtggttctcccacctcagcctccctagtagctgagactacatgcctgcaccaccacatctggctagtttcttttattttttgtatagatggggtcttgttgtgttggccaggctggccacaaattcctggtctcaagtgatcctcccacctcagcctctgaaagtgctgggattacagatgtgagccaccacatctggccagttcatttcctattactggttcattgtgaaggatacatctcagaaacagtcaatgaaagagacgtgcatgctggatgcagtggctcatgcctgtaatctcagcactttgggaggccaaggtgggaggatcgcttaaactcaggagtttgagaccagcctgggcaacatggtgaaaacctgtctctataaaaaa

SEQ ID NO: 45 - DNA, 4706 bp, Homo Sapiens
ggtttgaataagggttgctggacgctgttttcctattgacaaatccttctgttctgcaggtacacaggggtgggatggctggaggatggggaagggagaggatccaaaggcactaagaactgtcttggcctttctacaataaatttcccagcatgacacagaagcacagttacacacttgcacacacaccactgagcctcccaagtgttgaaatactacatccaggcatatattaaactaacaaatttaaaaagaaactaccatgtccagcaatactctaatcatccaaagtagtaatagtaaaggtaactgatgctaatgtctattaatgccccaaaacatttaaaaactcaagaagaaaaagaaatctaccctgataaatatgaatatatgtttttaatttatgcttttctttatttttaatttatgcttttcttgaaaaattattgtcttccaatgattaattcttttgagtcagggtgatgtatggttttgccctgaaactttctttctaaaagaaatccctagtctcagtttgctttctaaacaaatgacaggagaaaccataggaaaatgtaattcaaaatcaaaaaggctcataagtttcactttctgaaaaagttgccagcacctggatatataaaattatactatttctacaaacacaatccttgaattggaagctggcccagatttctacttccccagattcctacattccctgtgcaaccctcttcaatcctgggcttggtgtctttttggcttttcaccagtattcaaaacgttcccctagttcaggctctgcagccagctgtccaggaggctccctgatggttgcattaacatcctggggcaatactgccgtcgtgtgggcatgtaaaatgctgcaggttcatcccaaagtgaagttgcattttcccaactacaggcacaaatgagtcttctctctgctctttcacttctaggttaatgggactcctgggtgactgaagatgtcaagagggttttgggtagacaatttgtagtgcctgtttgtcctgtctctgagatcttgaataaactttgggaacctattgggtgagagttgttggaaatgtaaatttacaagatgcattcttaatatatcagacctaattaaaaattttgccaataaaacaatgtggcaaccctgtaccatgtgtgatggcatgcttgtgacttgatttatccttgtaaaaatgactttactggatatgtggtcaccagacctaatggcctctgtgatttaattttttaaatatgggaaatatctttgctgccgaaactcactaacatctttttgaactttacgggaattgatgtttccagctgaaagatggatttagagtttgggacagaaaacacagtgatgctaaaaaccaaaagttatttggaaaaaacatttgaatcagcaccgaaatgatgtagtttagcaaaaacattaacaataaaacattacctttcttgtcataagactattttcttttttacaaacagcttataaactttctctgtgatgaaccttcgtatacagttcagctgaagactataagcctgttagagtcccttgggaagaagaaacctatgcatctaggttgttcctaaaaaagctgttgttcaactaagacatgctgtccttacagtgctgtcaccgccagaaataatctttaattctgtcttcttggtgtgaattctcaactagtaaaactctatattgaaatgcaaattagctcttccgagtacaagcttgtaaaaatgtcaaaacacctcacaaaaattctaattgccacataattaggtatctaaacaaaagttctatgctgatattttaattttgcttcattgcaataatgtacattcaataatgggcccaactaggacaaggtgataagttagggaagaaagtagctaatagcaccaaataaggatgcccctgaacccagagcctggcagaaaatagaatggacttccagagaaacatcatggggcctagggaaataaacaccgcttagggagaattagattagccagagtacaacaaacttccattacaagctggaatttcttttagaaggaatacatgaaagtgtgtctttataaagaggtggtatcctggagtgagcactaaatcagtctaatgccttcaatcttcttgatttccccctacagaactgtacttcttattaatgtttgtaatgaccacctgtggcactgtaggatgctgaattaccaaagaaagattaaattatgtcctattgatgacacttaatagacgtctagcaggtgcacatgttacagaatgatatttgacaaatgtagaaatgataagggttatctgatctgtctgaaattaatcagaagcttcagttaagtagaactccagttctgataacattccattattattatcatcattattattgttactattaagaattatagccccttttcaactcatcactacctttattgtggaatcacctgtgttcaatgtacctatattttagaaggacaacggggcaccaaagttgctagcctgatcctataattgccatcttcatctttcagtatggaatatattatatttacattaaaaattatcccttacaagatccctttgaacaatttttcaaatatatgtttaaagacaagtacattaatttcaagaaaatttcttatgagattagaggatgtaatgttagtatgatctactaataacctagtaactatcatttattgattacctacaaagtcacttgtgttttatattcattatctctaatttttaaggtacccctgcaaggttggcagtattatcttcactgtccagaagaagaaatagtttcaagaggctaagtaatcacagtaagatcatatggtcaataagtgcaaaaacaagactcaagcctcactgggttttaatggaagaaccatgtggtgtttgagtagaaaaatctattccctctcctctctctctccctctctctctctcttttcccagtgataaacagtaggaagtgggattagtctgtgttgaaccctattacttcagcccacattcattgctcatctttccactatttttagtttttccttctgttctggactcttcctttcttccttcaaatagaaaaaggtcacacctctatttaaaacatcacagaacacccatatttttgctcttctatcaacttaccagtctaaatcttttttattttcagctaaacttattagatgaatgtcataattgccccattttcactttgctttcactctcatggccaccactggaatgaagctgttcttcagacttacttatgacatctgctccagtttcaaaggctgtctccaagtcctgactttctgaaattctctgcagcatctgacacaattaatctcatccaccctcacctactgccagtaaaaatactggcagctgacacacatggaacagcgacttggtgctaggctctgggttaagcactttatatgcattatctcatttaatccccacaacatccctgtgaggttggcactgttatgggtccccattttacagatgaggaaactgagtctcggggggtaaagtaacttgaccagtattacacaagcaaaaacatggtgaagatagctgttgatccaatatgctgtgctatctttaaaattatttagccagtcttttactatctgctgggcacaaagccaagttcattagaggtattatctgattattttgtgttatattttctcctattatacctaactctaggtctattgcaagatcaagtttgtgatcctctgcctatttctcctcttgactacttcaaattccaagtattttttagaagattttaacttgcatcaaataattattgatgtacaggtcatggtggcagggctctggacataggaaagtgaacaaggtaggcttgctgcctgcttgaagttgacaacatagtggatagaaagtgagacagagaagccacaaatcattacctgagccaatcagtggcccactgagaacactccttccaggtcatgaaatttcaagtgaagtggcacaccagctcacccacctacttcccaccccgaccccagaatccccttcctggaaaccttgtgctacctccaaagccaaactctcaaataaaccccagcaccttccagagatgccgtttcagtggtggggtttgaggtgagtactctgggacccagcctgggtttcacagaactaggagactatctgccctgggctggccccaaggccagtgtcagaagtacccccaccctcctgattatcagtcaacccagaacaaacgctttcctctactttcccttaattgtacttggtgctagtcatctctgtggcaagaatatgagcttctcacaagctaataatgaaacatatctttggttctttcacagcacccagctttgggctaagtatgtaaatgtgggcgtcagatacacctgcttgagtaaatgtctcctctcaatacctggaagaatgatgagtgtttgctcttctacaaaccaactcaaggcacccagaaagcaaggaagcttccaaagaaaaatggagttatattaaaaggatgtaggcattatcttgaagggttttctactggtcaaagttgggataatttaagcatcaaataaatgatagctgtaaattgaatatataagaa

SEQ ID NO: 46 - DNA, 4158 bp, Homo Sapiens
aaaagctttattgctcacacaaagcctgtttggtggtctcttcacacagacgcgcatgaaatttggtgccgtgacttggatcgggggacctcccttgggagctcaatcccctgtcctcctgttctttgctcggtgagaaagatccacctacgacctcaggtcctcagactgaccagcccaaggaacatctcaccaattttaaatcaggtaagcagcctcttcttactctcttctccaacctctctcactgtccctcaaccactttctcctttccactcttcactctcccttctcttaatttcaattcctttcattttctgggagagacaaaggagacatgttttatccgtggaccgaaaactccggcgccggtcacggactgggaaggcagccttcccttggtgtttaatcaatgcagggacgcctctctgattattcacccacatttcaaaggtgtcagaccacgcagggacgcctgccttggtccttcacccttcttccaaacgcctgaaccgcagcggccaggcgttcctccagaacctcctcccacaggagcttgctacatgtgccggaaatctggccactgggccaaggaatgcccgaagcccgggattcctcctaagctgcgtcccatctgtgtgggaccccactgaaaatcggactgttcaactcacctggcagccactcccagagcccctggaactctggcccaaggctctctgactccttcccagatcctctcggcttagcggctgaagactgacaccgcccgatcgcctcgaaagccccctagaccatcacggacgccgagcttcagagcactgctgatggctaacatttttaggttgcaagtgttctggccttgaagatatggtaactggttgggaacacaaagttgtcacctaggcaaaggatgagagtggatgtcaagaagcaaggctatgctggatcctttctgctgttctaccagatccatcctccaccgtcatctatcattgtctgtgtggatcttgatcaacggactttgcctctggctcctgattgggtttgcccaatgggaagcagaagagagtgaagttgtggctccttcttttcacagagctgcaggtttcttgaacttttcatcttgcaaaactgactctatacccactggtcaagtgatcttcaacaagggcactgagactataaagtggggaaagaatattttcttcaacaaatggtattgagaaaactgaatatctatgtacaaaagaatgaagttggactcttacattataccatattttaaaatgaagtcaaaatgggattaaagatctgaaactttaaaactcctaaaataatagggaagaatctttacaaagctgaatttggcaatgatttattggctatgacaccaaaagcacaagcaatgaaagcaaaaatagacaaatggaactacatcaaactaaaaagcttctgcacagcaaagaaagcaatcaacagagtgaaaagacaatttatggaataggataaaatatttgcaaatcatatatctgggaaggagtcaatatcaagaatatatgaagaacacctgtaacttaacaacaaaaataacccaacttaaaaaattggcaaaggacttatatacatatttctccatagaagatatacaaatgcccaaaaagcatatgaaaaggtgttcaacatcactaattatttagaaaacgcatgtcaaagccacagtgagatatcactttatacctattagcatggctgctatttaaaaaacaaaaacaacaacaaaaacaaacaaaaaaaaaacaaaaacagaaaataacaagggctggcaagaatgtggagaaattggaacccctgtgcactgttagtggtgatgcaaaatggttcaatccccatgaaaatatatctctggactctattctggtccactggtctgtatgtctgtctttacatcaataccatactgttttgattgcagtagctttggaatatgttttgtaatcaggaagtgtgaggattctggttttctcatttctcttaggattgttttgactatatggcttcttttgagatttcatatgaatttgagaattttttatttttaaaaattccattgaaatttcatagggatggcatcgaatctgtagattactttacatagtttgcatattttaataatattaagtcttgcaatctgtgaaaataggatgttttttcattgatttgtgtcttctttaatttctttcagcaatgtggtgtagtttttagtgtataagtctttcacctctttgcataagtttattcctaagtattatatatttttgatgctataataaatgaatttttttcttaattatcttttaaggttgttcattgttaatgtatagaaatgcaactgatttttgtgtgttgattttgtatcttgcaactttgctgaattcatttattagcttaaacagctttttttgtggagttcttacaggtctctacaaatatggtcagaggcgttcgaactagagtgactccatcttgaatagggggtgggtaaaataagactgagacctactgggctgtgttcccaggagattaagcattcttagtcacaggatgagaaaggaggtcagcacaagatacaagttacaaagaccttgctgataaaacaggatgaggtaaagaagctggccaaaactcaccaaaaccaagatgatgatgaacgtgacctctaaacgtcctcactgctcattatatgccaattataatgtattagcatattaaaaggcactcccaccagcgccatgacagttcacaaatgccatggcaatgactggaagttaccctctatagtttaaaaacaggagggaccctcagttctgagaaatctctgtccctttcccagaaaactcacgaataatccaccccttgtttagcataaaatcaagaaataactataaatatatccagttgagcaacccatactgctgctctgcctatggagtagccattcttttgtttctttaggtttttaataaacttactttcactttactctttgaactcgccccaaattctttcttgtgcaaggtccaagaaccctttcctgggttctggatcaggatccttttccagtaacaatgtcatctgcgaacagataattttatttcttccttttcaatttagataccttgtatttctttttctttcctaattgtttttgcctaattgctaggactgccagtactatgttgaatagaagtggagagagtggacattcttgccttgttcctgatctcttatatgaaaagctttcagtctttcattattgagtatgatgctagctgtgggcttttcatatatggcctttattttgttgaggtaaagtatctctatttctagtttgttgagtgtttttataataaaaaggcattaaaattttgtcaaatgctttttgtgtcaattgagatgattatgtaatttttatcctttcttctgttaatgtggtttattacactgattggtttttatatgttgaataacccttgcctcttagagataaaacccacttagtcatggtgtgtaatccttttaaggtacatttgaactctgctagaattttattcagaatttttgcattaatatttatcatggatattgaacctcatagtattcttttctcatagcagattgatctggctttgctatcaggttaattttgggctcagagaataagattgggttttgcctcctctttaattttctggaagagcttgagaaggattggtgttaacctttctttaaatatttggtagaattttccaatgaaaccatctggtccttgtcttttcttttctgggaggtttttgattactgattcagtctccttactggttataggtttgttcagactttttatttcatgattaaatcttggtagatggcatttttctagtaatttatccatttttttctaggatatccacttggtataaaataaaatatttcctgtcatatgcaaaacaactttcatttcattcttgagtggtgcttacttctgatcacaattgtgtataacagagatgtccaatcttttagcttccctgggccacactgaaagaagagttgtcttgggccacacataaaacacactaacactaatgatagctg

SEQ ID NO: 47 - DNA, 1003 bp, Homo Sapiens
cacatttatgtgtttaacatagacacatttatgtgtttaacatagacacatttatgtgtttacaatacatatgcagactctatataaacacataaatgtgtgtaatattcatactgtcaccttttcttactcttgcaaaggtgatgtaattcaagtttgacttccttgaaacaattctcgggatatgtctagttatattagaagtttagttgtgtcaaatattgttctaaaagagactaaaagcataggtgagaaatattcctggatgtagtgggaagtttttttaatttttattttttaatgagaattactaaagcagcaaaacacagcacaatatagtagaaagcactgtagatttccaatttgcatatattactgcagagtggattttgctacagacccactgtgtgatcttaattaattcatttcccatctctgatccttagttttcacatctgtaaaacaagaataaatgtctcccctacctcaaggcaggttgaaatagtatatgctaaagcccattaaaactttagaacactatatagatttaaggtggttgctgttattttatacagctgcaaatcactgtaagggtcatatttattcaagctaataataagaactccagactttgtacataaaatgctgtgtgtttgagtttactggactgaaactcatttgtttaaaatttagtttgaaaaataataaagaccagaataacaaaaatcttgtgggccctacattctttttcttactttccaatatggctttatccatttgtttcctcccagccaactaattgccattttataaaagtaatcttccctcacatttatgtaatccaattatagaacccattagaaattataaagtggaggccaggcctgataacaataactgtaatcccaatactttaggaggccaaggtggaaagaccacttgaggccaggagttcaagaccaacaggatgtctacaaaaataaaaaataaatgtggtaaaaca

SEQ ID NO: 48 - DNA, 3803 bp, Homo Sapiens
gccttcagccagaatgctggctttatttttgcggtttatgagcttgagacagggaattcatttccttggtataatatgaccctctggagaaagtcttgtccagatatattttgctcccaaacgccgccctagaagaaggactacactgaaatgaaacggagatgattaaagtctgatttataggctgtacaagccctgaaagcaagaacggggttcacggcatcttgatacccccatgtggggacgttttggcgattttatttacaagaaagggattttacaccggagaggcttttaaatatgctaacagactggaccagctttctcatccccactggctgattaatgattcctccatgccaacccggttctcagagacaccaaggccagctctccaaagacctgggaaaaaattacttcatgtccttgtaaaaacgttttcacaaatttaagtgcaccagctttgaagcaagacagaattgggatcaagtccctgttccacccttaccagaaagtcttttcgtagctcacaaggggacatcaaagatgacaaagaggagtggaagaagacagagagaatcaatgtgaggagcctggaacagggctctgaattgtcttcccacagtgaaatcacttgtctattgctgagccaagaatttgactctgagcatctaggatgagaaagaagaactggcacctacgccatctctgcccctcgggactgactattttggcccagtttcctcaacaatgaaatgggactaattatcccaggtcacacttctctctgggcttaccctgggaatcagatgattgagctttggatctcactctgttgcccaggctggaatgcagtgatacgatcatgactcactgcagcctcaaactcctgggttcaagtaaccctcccacctcagctttctgagtaactgggactacagaatgccccaccccacttagtccatagtgatgcccacctgtggttaatggagctgaggctgctggaccaaagggaggaagtctgttaggcatatgtggaacccaaaagaggaacttcatcaactgtcatggacagctctgccactttgtgaccctgtggactttttgggaagtgtttttgtggttcaccagtctctcattaggcaaggccatttgtcctgggttggtcttcttcattggtggaaagtacagctgggagatttggaatggttgcagattgacttgactctcataaggaactgccaccatgagcttttggggaaagacctcaagctgtggtgtgttgctgaggattgtgggattcctccaaatcttggggaacattttgagtcatcactggcagcagatttctgttgacaacttgagcaacttcagaatgaagaagccatcttcatctctcacatgaatatgactttgggtaaatcatctcgaaatctgaacccatggttgtgatccacactcctcctgagttctgatttttagtgtaacctttttcttctcattttttcttctttgtgcatctcttaaggaggtttttaaaatctcataattaaaaaatttatttcttcaaaactttttattttgaaatcactgtaaattcacatacatttgtataaaatgccacagaaaaatcctgtgtgccttttactcagtttattctaatgataacatccttaaagagatttaaaaattactgagatataattgaaatatgagaaaattcactcttttatgcatttaaatatcctttatgttttttcatagcttattagctcatttcttttcagtgctgaataattcttaattgtctggatataccatagcttatttatccattcacgtattgaaggatgttctagttgcttttaagttttggcaattatgaataaagctgctgtatacattcatgtttaggtttttgtgtagatataaattttcaagctctttgggtaaatattccaagagcacttgccgagttgaatggtaagaaactacccaactgtcttctaaagtagtataccgttttgcattcccaccaacaatgaatgggagttcctgtttctccacatttttgtcaatatttggtggtgcctgtgttttggtgccattctaataggtatgtagtggtatctcattgttttattattcatatatattcattgggtaaagtgcaattttgctgttgacatattgcactgtggtgaagtcagggccttcagtgcatcatttatcactagagcaaggcacattgtacccaccaagcaacctaccatcacccaccaaccttctatccttctgagtctccattgttcattatcccagactccacattctgctttgtgtgtacacattatttagtttcctcttataagtgagaacatgaggaacatgtctttttgtatatgggttgtttcatgtcagaaaatggcccccagttctatccatgtttctgcacaagatataatttcattctttttatggttgaatagtattccattgtgtatataccccacattttctttatccagtcctccattgatgaacacttagattgattccgtatctttgctattgtgagtaatgctgtgataaacatatgagtgcagatatctctttgatatagtgatttcttatcctttgggtagatactcagctgggtaggactgctggattgtatagtggttctatttttagttccttgagaaatcttcatactgttttccatagaggttgtcctagtttacattcccaccaacagtgtgtaagagttcccttttctccaaatcctctccaacatctgttatttttttatctttttagtaatagtcattctgattggtgtaagatgatatttcattgtggttttaatttacatttctctgataattagtaatgtgtaacttttttcatatacacgttggctatttgtttatcttgttttgaaaaatgtctattcatgtctttagcccactttttaatgggattattttttgttgttgagttgagttccttgtaaattctggatattagtcccctcttggacgtattgtttgcaaatattctctcccattccacagattgtttatcactctgtcgattatttcttttgctatgcagaagcttttaactttaagtcccatttgtctatttttgttttcgttgcttgtgcttttgaggtgttcttcacgaattcttgactagcccaatgtctacaagagttttccctatttttttctagcatttttatagtgtcaggtcttacattcaagtctttaatctattgtgagttgatttttgtatttggtgagtgataggggtccagtttcattcttccacatatggcaattcgatttttcccagcacaatttattgaaaaggatgttctttctccagtatatgttctggtcaattttgtcaaagatccgttggctgtaagtgtgtggttttatttctgcattctgtattttgttctattaatctatgtgttgatttttatataagtatcatgctgttttggtaactatagccttgtaatataatttgaagttaggcaatgtgataccttcagctttttttttccccccttaggattactttggctatttgggctcctttttggctccatatgaattcatttcttctaactctgaatcctgaattatttactctaattctgtgaaaattgacattggtactttttttagacctcctgtgtggacatgacattggcattttgatagggattgcactgaacttgtagattactttgggctgtgtggtcattttaagactattaatttggc

SEQ ID NO: 49 - DNA, 1000 bp, Homo Sapiens
gaaaagtctcaagtagtcggcatatctgtttttggctctaactctctgccatccctgtggaacttttagcctacacactgcagttgttttgagaaaacaaaggcatcattctcttctcaaggttatggtagtgatttaaggccaacagacccaagactcatcttgtaatgcatagccaaacagtcatagttcataagcagtcacgtgactggtgacattttaaatctccagtctttgactttgtcattggttgacttttgtcttcaggaaatattctacatttcttggaatacaataaaaatgcccaagtcaatttggttgttgtcaaattattcagctttttcttaccacttactagtactccacctctttgctctagcatccagccaactagactacatagaatttcacagtgatcttcctcagctccagctcttggcatttgctcctcccttctatctgacatatgtttttgttgtccttctggtatcaacctgcatatctcatccaccaaaaagtctacaatattgacccaaaacctggatgtcctatctgtgtgttccagtagtgccctattttaaatgtgtcatgatatctattactttgtgtgaaaattacctgtttgttttttcaggttatataatagtataacactgccaaggagcggattatctcatcttcatcctgtaattccagtgtttgtcacgtggttgttgaataaatgaataaagaatgagaaaaccagaagctctgatacataatcataatgataattatttcaatgcacaactacgggtggtgctgaactagaatctatattttctgaaactggctcctctaggatctactaatgatttaaatctaaaagatgaagttagtaaagcatcagaaaaaaaagtgggtattcctacaagtcaggacattctacgtgactacaatataatctcacagaaatttaacattaatacattctaagatttaattcttagattcttggtaa

SEQ ID NO: 50 - DNA, 1768 bp, Homo Sapiens
caaaacattgttatatatgggtataatgatttaatatttatgaattatagcaactcttcatcatctatttccaggtttctactttccaggtccactggtgtttggtgtacccatgtgactaatttgtccaaagagaggtgagtgaaagtgatgtgtcacttccagatggaagctttttgggcaagtatgtattttctagctcttttcttctgtgttatagaaactaggaatattccagttggtgactgaccccttagttgggttcctagagtgagtttgatgtggaggagcccaaaatgacctgcagtgaagttggagtgtgagcaagaaataaacttttgttttttaattttctgaggttttggaagttgtagattataactgcataacctatcaatattgatatgtttcaattcttaatgaaaatttctaatattctttttgattatttctaacttattaacttaaaatgtcaaatatctataatttcagtatattctgtatcctacatttaaaaataaaaaatagaatgttgaaaatgaaatcatttcaatgagatgacaactcaaaatcttatagtatcatccagaaacatgtagaacagatttaaaaatacacagtactgagattggcaggttgagaagaagacacatatgaagggtaacttctttggaaagaagcagctatgcacagtacttaagaatgaaatttccatgtcccgttaatacatctgaaacagttttactttctatcccaaactttaatgatcctagaaagctggtttgaatcagtttttacagggttgttttggatttaaaataactaaaacttgagagctgggagaaattttatttaacacttttttatcattcatggtttaatgtttaatgaataaattcttcactaagcttatgtggtgagggtctggtggtgaaaagtactttttcaactagatatattagaatgacaacagcaaagcaagaatgtggtagggtcacataaaggagtcgtgatctgtgggaaattattttttatgattctccaagatggctgtacatataagcataaaagtcaataaacaagtgcctaacctttagctctaaattaacttttgagcgctttgaatgcctggcacaaaaatatttaggggtttggcgccatctggtggccaaatatcaacttttcagcttctcttttatgactaagaagtgaattactctgcactttccaataaacactattaataaataaaattatttaaaatgttgatttccagaacttgagaagacaaatcaaagacagatttctgttatgttacctattgttatatgacagaatttcagtcttgagtaggttcttttatacttgcatttgatttatttatgaaagcattatagacataaatctgctatctttttcttaatacaagagaagactctttccccaaaagaaattagacgtgctcaataaaatctaaatttattttttcacaattctgtaaaagattgagctaggggtgcgtgtgtgtgtgtgaatatcagaatttattttaaaaatgcaagagggagaggggaaggagctggtagtgacattgttaattgtctgctttgcaatagcaaagacttggaaccaacccaaatgtccatcaatgatagactggattaagaaaatatggcacatatacaccatggaatactatacagccataaaaaaggatgagttcatgtcttttgtagggacatggatgaagccggaaaccatcattctg

SEQ ID NO: 51 - DNA, 3307 bp, Homo Sapiens
tacatacatacagattccaaatttgcacttaactgctatattatgtatgtacttgttcatgacaccacttggaattcaggtagaggtattttcaatcagctccaacatccctttccttccttggatgtttccaagacaccatcaagccaggcacatttaggcagagaggttgctggggagaatagaacattgccaagctctggcgccaaatactgcactctggcaacgtgtaagtgtaaggcaggcattgtgggtgtgtgacctctgcaatcacacagggcctcatgctcaggagggccctgtgcttgattcaatactctgctggccccatcttgaaattcttaatgatttttgaacaaggggctccacatgtccatttatcagtgagcccctcaaattatatagccagttttgtgtgaggacaaagcaatggacagatactatgaagctcctttctgggtggcattttctctttcttttctccttcctttcagagctaccaagtcaccccacactctagctcaagagctctacctgaccaaaactcaatggcctttcctcaggaaatccagctatgctaatgccaccagaactgagtcagaactcctaactctacaaatatggctcctctgtattgagtgcctgctaggtgccaggcacaacactcaactgggaccaatattatttctgatctgggagatagataggtatgatcagccccatttcacagttgaggacattgaggctcagagagattcagtgacttgtccaaggtcacacagtgcatcaaacacaaatctgatgagccttctcaaaggctcttgatgccacctgcttccagaacattctgccactcactctgcctaggctgctgccctgcctgacttgagctcaggcagttctgccacttgggtcagatcggctacaagtcctggagtatgggcccttcctagccccatgcctatagtttctggctcctcttacctcttccagatttggatgaaaacactctccagcatggggtgggaactggtctcctgagaggctgccattaggactgggtgatacaatcctgaagtgcagaagagttaacccccactaggaaaactttgaccagtggaaaataggagttgagagggagcaggacacatacattccttcttcctctctccatggactgcttcatgacagtctgccttgccgctcatccagctgaatcccacgtgtcatgctgaaaggtcttgtgcagtgaccttctgggtgtctccatggctgtttgtgacataatagccatcaaggaaacacaccacttagtgtggctttgcatccttctttgcctcgcttccttgtgtctcacctttgctgccatggatttgcatcttccaaatgaaacatctcactttcaatttttgccccaggctctatcttctagagaagctagcctaacatacatataggaagggcagccttcccactcagcccagggtgtggtggaacttcatttaggctgcatgtgaaaattggccacctgctttgctgtaaatgtgatttgtggttctctactgtccaactgctgtaggaatggcccccacctgagagatgcaatggccattccagcttgctggccagtacaggccttccttcttctctctctccccactccatctgcatgacccgacccaccccacctcaaggcatggttaattgttcattagtgacacctggcccaagttgacccaatgaatctctccctctgttgggatttttaaactcaggactaagtgattccatctccgcttctttctacatactctctccaaaaccacatatgcagtgtctacagctctaagtaagaaatcctgggagtggtcagtggacatcctttctgttatgtgggtaatgtcaatctgcagcatgagagaagaattccaccaatatgcagagagaaacagaggcaggagctacagagaatgtcctaatggcagtctcaggcttggagtccttgacagattggaaactccagatttctatgacagtaggattgaagccttgaaagatcttaatgtcaccatcatgagcctaaaagagatctttgaaaaagatactacatggatcatatgtgtctttcacagagcagaaatttttaatttccagccattatattccttgacattcacctcaaagacttgaaaattatgtccatacaaaaacctgtacatggatatttattgcagctttatccacaattgccagaacttgtaagcaaccaagacatccttcagtaggtgactgtatccattgtggtacgttcaggctatggaatattgttcagcactaaaaggaaatgagctatcaagccatgaaaaacatggaggaaactcaacacatattactaagtgaaggaagacaatctgaaaaagctacaaattgtatgattccagccacatgacgctctggagaaggccaaactatggagaccgtaaaaagatcagtgtttcctgggagtaggaaggcgggagagatgaataagcagagcacagaggacttttagggcagtgaaactactgtgtatgataccataatggtggatacttatcattacacatttgcccaaacccatacaaggaacaacagcaagagtgaacctaatgtaaactatggactttgagtgattatgatgtgccagtgtaggttaatcaattataacaaatgtgctactttggtgacagatatcgataatggaggaggctgtgtatgtgtggggggcaaggggtatataggaaatctctgttaacttctgctccattttactgtaaatccaaaattgctctaaaaagaggtctattcaaaaaggcattatataactcaatttaatcaatttaatcaagaccatgtttacacagtactttgtgtccacacatcatgatcataagaccaaaatcatgttggaaactgaagaaagaaaattacctgacagtcttccaatccagaggcgaagtccaggtcccatctcctggaattctgataggttccatgcctacttcaactaacacaatgtggacactgccagtttccagagccaggacttatgaagctggcagtttgtattctccgctatttgaaatactgtctctgggagcaatggacttcaaactctgaagccaccatgctaatgtggctgcatgtaggtgttctagccaatagttacaactcatatgtaagttgctttgctggagggatggcttgaaagcctgcctgaatttctgacccacaaagttatatcataataaaatgatgttatcttaaa

SEQ ID NO: 52 - DNA, 3306 bp, Homo Sapiens
tacatacatacagattccaaatttgcacttaactgctatattatgtatgtacttgttcatgacaccacttggaattcaggtagaggtattttcaatcagctccaacatccctttccttccttggatgtttccaagacaccatcaagccaggcacatttaggcagagaggttgctggggagaatagaacattgccaagctctggcgccaaatactgcactctggcaacgtgtaagtgtaaggcaggcattgtgggtgtgtgacctctgcaatcacacagggcctcatgctcaggagggccctgtgcttgattcaatactctgctggccccatcttgaaattcttaatgatttttgaacaaggggctccacatgtccatttatcagtgagcccctcaaattatatagccagttttgtgtgaggacaaagcaatggacagatactatgaagctcctttctgggtggcattttctctttcttttctccttcctttcagagctaccaagtcaccccacactctagctcaagagctctacctgaccaaaactcaatggcctttcctcaggaaatccagctatgctaatgccaccagaactgagtcagaactcctaactctacaaatatggctcctctgtattgagtgcctgctaggtgccaggcacaacactcaactgggaccaatattatttctgatctgggagatagataggtatgatcagccccatttcacagttgaggacattgaggctcagagagattcagtgacttgtccaaggtcacacagtgcatcaaacacaaatctgatgagccttctcaaaggctcttgatgccacctgcttccagaacattctgccactcactctgcctaggctgctgccctgcctgacttgagctcaggcagttctgccacttgggtcagatcggctacaagtcctggagtatgggcccttcctagccccatgcctatagtttctggctcctcttacctcttccagatttggatgaaaacactctccagcatggggtgggaactggtctcctgagaggctgccattaggactgggtgatacaatcctgaagtgcagaagagttaacccccactaggaaaactttgaccagtggaaaataggagttgagagggagcaggacacatacattccttcttcctctctccatggactgcttcatgacagtctgccttgccgctcatccagctgaatcccacgtgtcatgctgaaaggtcttgtgcagtgaccttctgggtgtctccatggctgtttgtgacataatagccatcaaggaaacacaccacttagtgtggctttgcatccttctttgcctcgcttccttgtgtctcacctttgctgccatggatttgcatcttccaaatgaaacatctcactttcaatttttgccccaggctctatcttctagagaagctagcctaacatacatataggaagggcagccttcccactcagcccagggtgtggtggaacttcatttaggctgcatgtgaaaattggccacctgctttgctgtaaatgtgatttgtggttctctactgtccaactgctgtaggaatggcccccacctgagagatgcaatggccattccagcttgctggccagtacaggccttccttcttctctctctccccactccatctgcatgacccgacccaccccacctcaaggcatggttaattgttcattagtgacacctggcccaagttgacccaatgaatctctccctctgttgggatttttaaactcaggactaagtgattccatctccgcttctttctacatactctctccaaaaccacatatgcagtgtctacagctctaagtaagaaatcctgggagtggtcagtggacatcctttctgttatgtgggtaatgtcaatctgcagcatgagagaagaattccaccaatatgcagagagaaacagaggcaggagctacagagaatgtcctaatggcagtctcaggcttggagtccttgacagattggaaactccagatttctatgacagtaggattgaagccttgaaagatcttaatgtcaccatcatgagcctaaaagagatctttgaaaaagatactacatggatcatatgtgtctttcacagagcagaaatttttaatttccagccattatattccttgacattcacctcaaagacttgaaaattatgtccatacaaaaacctgtacatggatatttattgcagctttatccacaattgccagaacttgtaagcaaccaagacatccttcagtaggtgactgtatccattgtggtacgttcaggctatggaatattgttcagcactaaaaggaaatgagctatcaagccatgaaaaacatggaggaaactcaacacatattactaagtgaaggaagacaatctgaaaaagctacaaattgtatgattccagccacatgacgctctggagaaggccaaactatggagaccgtaaaaagatcagtgtttcctgggagtaggaaggcgggagagatgaataagcagagcacagaggacttttagggcagtgaaactactgtgtatgataccataatggtggatacttatcattacacatttgcccaaacccatacaaggaacaacagcaagagtgaacctaatgtaaactatggactttgagtgattatgatgtgccagtgtaggttaatcaattataacaaatgtgctactttggtgacagatatcgataatggaggaggctgtgtatgtgtggggggcaaggggtatataggaaatctctgttaacttctgctccattttactgtaaatccaaaattgctctaaaaagaggtctattcaaaaaggcattatataactcaatttaatcaatttaatcaagaccatgtttacacagtactttgtgtccacacatcatgatcataagaccaaaatcatgttggaaactgaagaaagaaaattacctgacagtcttccaatccagaggcgaagtccaggtcccatctcctggaattctgataggttccatgcctacttcaactaacacaatgtggacactgccagtttccagagccaggacttatgaagctggcagtttgtattctccgctatttgaaatactgtctctgggagcaatggacttcaaactctgaagccaccatgctaatgtggctgcatgtaggtgttctagccaatagttacaactcatatgtaagttgctttgctggagggatggcttgaaagcctgcctgaatttctgacccacaaagttatatcataataaaatgatgttatcttaa

SEQ ID NO: 53 - DNA, 2534 bp, Homo Sapiens
ttaaaaagaagtaaacatgttaatgaaacagaaaaaaagtaaattaatagaccaattcctggcaaagatgatgagaatgctaattcagtttaagagggagaaaataaatcatcatctctgggggcctacaattcagaaagacagtccagggcaggcgggcagactctgctccacgaagtcatccagagattgaaactagcaggtgctctgccattgtataaggcatcctttttttttggtctgcatggcagaaattaaatctctgaaacatttgtgttccagacaataggaggagaaagaaaggagggagcattacaaacaagatcttaagaccaatgttctggaagtgacatgtgtctcttctgctcatattccatcagtaagaacctgatttttggtgagaacacaggggactgagaaatgtaatatagctgggatgccatgtgcctggctggtagaagaaaggaaaaacatatttttgtggtctacttagcagtgtctctcacacctgctacagtggacctttataaattatgtaaaagtagtgtatatatggataaaactaaatatttcagtgacatgaagtgttctgagaaaatgtaaatgaaccaaattgaagaaaagagaagtagaaaatatgaaaagataataattctttccaacattgcctttgtctaaggcagttttactgctttactgctgtgtcttttaactttcaataagtagataaataccatattatagaaacttcttcagagcattataaaaaacaatttgccatcaattccttttgaaaaggtagaataatcctgatgctcaagcttgaaaaatataatacatcaaaggacattctagacccatctcattgagaatagagatgtaaaactcctacataaaatattaccaaatataattcagtagcctattaaatgcatcatgcatgatgatcaagcatgacttatctcagaaatacaatgaagatttaagaaaactatcaatatgtgattacttatatcatgcttcccaaaagaaacactaaataatactactccaaaaatgaaaaggcaaaaagcatattttcttattcctgatttctttgaaaattgttttttatagtactaggcaaaggatgattttttagtatgataaataatatgtcctcaaccaatagccaaaatattttactgtgctttacactaaagttgccaacataagatacctactatcattattttaagtgtttctcataaagtacctacagatggcttatgtcttagttcattctgtgctgctataacagaatatccgagactgggtagtttataaagaacataaatttatttattatagttctggaggcaggaaagtccaagattaaggcaccagcatctgggtctggtgagggctttcttgcagcatcctcacatggcagagggaaagctacaaaaaactccttccatcaagcaagcccttttataaggacgtgtaataccattctcaagggaggaaccctcaagacctactcacctcctaaagggcccgcctcttaatactatcacactggcaacacctgaattttggaggggacacattcgtaccatagcatcttaaaaagagtacagatggctaaataaggaaaatctataatcccctgctcagcctcttcctactcacccttccctttaatcccctttccagtttctaataatcatagcactattttaatttctctattattatcttcatatacttaaaatacttttcatacacatgaaattatttttcctattttaccaaatatagactgtcttgattcttcactgtataattaggcaaacagttctctagcattcttagtaaataaattgttattcagtgtgtagaatcttgataaatgctaattgtgtttagtaataaattgcatcctaattttatttttaaacaaatttgtatttaatgcctgttgctttgaaactttcatacagagtatatacaactttttttccctaccagagaccaacagtgataataactaaatttaaaaataagaaggtttttaacttttatttcaagtttttatttaacaggacaaaaatataaaataggagtatatttctctgttcttgaaattcagaaaatatggaattagaataaaatatttttaaaaatcagtcacataatagcatttcagagaaatggggaaatgggaaatgatgaaataaataacataaacatattgactcatgctttcttagagggtagaatgatataagttcaaaaagttccagagaagatgaccacacaaactgaacaaaatgtaagtacatagaacatgaagaaagatatcatggtaactctataagttcattttaatatttccttgagaaaacaaataattgttccatactttaattgatttgagaacaccaaatttaaaatattggatttataaaaagtcagtaaaattatatttgtattttgggaaaatgaaaaagaaataaaaaagttgtcactctccaaaaaaaaaaaaaaaa

SEQ ID NO: 54 - DNA, 1180 bp, Homo Sapiens
catacagggaggaaatcatataacaatgataaatgtggaaaagctgctattaaaatgtcaagtctcattagacaccaaagaagacatgctggagagactgtccttcctatgcacataaggaaggtgggaaagccttcagtcgcaaatcacatctcacagagaatgagaaaaattcatccaggaaagaaagcccggaatggaatcaatgtggaagtgtcttagctagaagaaatacttcattaaagatcagaacattcacactgtaaataatgagaactctatgaatgtaagaaatgtggaacatcttcagccaaaaggaaaacttcattattcatcaataatccatataaaaaagaaatcttatgaatgtagtaggtatgaaaaagcttttattcggaagtcaaactttataccagagaggtcatactggagataaaccctacgcaagtagggaaggtgagaaagcactcagtggcaaatcaaattccactgggcatgagaaaatccagatttgaggccaggcgcggtggctcacgcctgtaatccctgcactttgagaggccaaagtgggtggatcacttgagcacaggagttcaagaccagcctgggcaacatggcgaaaccccgtctctactaaaaataaaatatataaaaactgaggtctctactaaaaataaaatataaaaacgatcacctgagcctggggaggcggagactgcagtgagccgtaatcacgccactgcactccagcctgggtgacagagtgacaccctgtcaaaaaataaaaagagaagaaaagaaaattcagatctgaggggtgccctgtaaagataatgaaagtgcaacgatcttcgggcagaagctattcatcattaaatattacaatattcatgacgagggcgacaccctatactaagggtgcagaagttttctctgtaatcatactgcttattgtacatgtaagaacccgtaagtatgaatgtaaaatgtgtggtaaagtcttctgtccattcttagccaatgctctacataagagaaccaataccaacgaaaaaaactaatgaaatatctcaaacagaagtcatgccatatttgacaccaaagaattcatactcattaaaaccttatgaataccttggatttaggaaaggctttagcaggaattcatatttcatagcac

SEQ ID NO: 55 - DNA, 2613 bp, Homo Sapiens
tcctgtgcaggacagcttctatccccgtcacttaacaatggagaggattcttccccagcttccttccagaggacacaaaagctcagagctccacagtctagagtctagaccaacaggcctccacactcacgtcccagagatttccctggtcccacctactcccagtggcaaccagacttctgcacataggagagatgtcatactcagagtccagcctcccacatccacaggaccacctcttcctcctctgagtcttgttaatagggccatcccctgccttagacctggcccagtggactctgatcttacagccaatatggggcagcaaagtgggacatctgtctacagggccagtagccccaggtcatctgcttgccaaaaggagggggaccagcccccggggggagcccagagctcggcagggctggggttagtaagaagagaaaacagggttagtaggggctgggttagtaagtcagagcacagcaccagcggacagggcacctcagcagacacacacaggagtcgctaagagaaaaggaagaacgcacgcaggtccgttagtttgttaagggatgatcggggtgcagttgaggcaccccaggggttagacgggttagtaatcgaacaaaagagctgcctacagaaaagaaagctgagacggaggaagaatgtggggaagtgacatggattcaaagccaagtgtcttgccccaggcagaaggatctgtgtgcagaacacccagagaggccagggcctaggcagcagacgtgttcaaccaggtttgaggggccttcctccatcctcatactttttttttttttaggtgtctgccatgtgctgagacccttatattgacgggaatcctcactgcaacctgtaaggtatcagaactcgcattctaccactgaggaaactgaggttgagagaagtgaggtgacttactcaaactcactcaacaggaagtggcagagttgagaaaaggccatgtgaggacatagtgagaaggtgccacctgcaagccaaggagagaggcctcaccagaaaccaagtcttaacaccttgatctggactttccagcctccagaactggcagaaaataaattcctgatgtttaagccatccagtctggcatggtgctgtggcagcccaagctgatgaatagtacacaccactccgcattctgggaaaaaggacatctggcttttaaacttgcctaagggaggccacaagctgctctcttgcaaacgctgggactgtctcctctggagggagctggaattgcagattgtggggcctgtcctgccaccttctgttccccaagaacagaatccaggagcagtgcaactagaagcagcgatctgattggagaagagtgtcctgagactgggctaaggtgaccccttaagcctttgggatggtgcactctcagcccctctggctgcccctcccagagttcaacagcacagggggaaggctccagctcctcccagatcctgactgtctcctctttgtaaccatcagggagaggaaaagcatggaaaagccccaccaaggaagtcccccacaaaatgacaattacgcactgagcaaatggagacaaaggactccagccagcggcacccgaggagctgcatctgccctctgcctgacagcccctccccgactcccatccttgttcctgtccccatcctgtagggtcctttgagacccagccttggggaaagtgtggtcagtggggacttggcccaggccaggctctgtctggtcaccggcagaaacgcgaggaggaatcaagttcacatggggcaggaaagggcccccagacccagacaatagggcccagcaggcagggcccgagcaggtgaggagggagtagtgggctgccaggcctccctcatacccctggagctgtcctccagagccagatcagtcatctgctgagcatcaaccaggaagagttcctatccatgggaggctccatcccaacaggtgtgaagaggatgagatcttcagggagtcacccagcgggctagaaaaccaccggagtctgaccgctaagtcactgtggccagaatccaaggtcacccgaggtccaaagagaagtccaggccaggagtcctggagatgcggcccagatggagccacctgggggagaagacagcgagtgaggatgaggccacagcctccatccccaacttcccacatccccccagcctaattctgcatctgaggggactcatgttcagagatccccccagtctctcatgcccccagcacacacacagggtggaagtgagggttttggacatgaaacatttttagaagaaacttaggccaggcacagtgactcccacctgtaatcccagcactttgggaggctgaggaaggaggatcacttgagcccaggagttcgagaccagcctgggcaacataatgagactctgtctctacaaaaaataagccaggcatggtagcatgcacctgtagtcccagctacccaggaggctgaggtgggaggatgtattgagccctggagttcaaggctgcagtgagccgtgatcataacactgtactctagcctgggcaacagagtgagaccctgtctctgag

SEQ ID NO: 56 - DNA, 3694 bp, Homo Sapiens
gagattcatctcacagcccgggccagggggccggggccggggccggggccacggcggccgccgcccgcagacaaagaagccagtgcggcttggctgggctcggctcggcccgggagctggtcgggacccgccgccgcccccaggcccccagcctgggctgggcagagccgaagggggctccgcaggctaagccgggcggagaggggacggccgggaagcgggaaggggaagccgggtgggggggcggtcaggtatatatttttcttcgttcccccttccacgaccccccccttttccctcccccccttttttccctccttctgctacttggatttttttagctgctgcgtcatgagcataatttatgcaaagagctttgccgcatgctgcaccgcccgcgccagccgccgggggcggcgggctgggagggcggtcagggaagggaggggagcacgggagccaggagcgaggggtgggggtggggaggggaccctctggccctggccgagcgggaggtcccggaggctctctcccgggacagggatggacggtcagtgggtctggttactcagcccctccgaggtgccgcggaggtggtttcatttcggaaggtgccagagtaggagctggagtccggaccctccatgccacatggccttcagctgagggttggggcggtgactcccggccaccgcctttcctctaggtagtcaactgtcctcaatgttgaaagtcaagtttatgtctatccctccctccctagaaaggcgggggaactcagacatcgctcagccaacgtggagaacctctgaacagctgtgccccagcgccaaagcagcgaagggtcccaggtctctcacccggtggcggccgtgggctgtgttgtctaaaagcagatttccggccttcttgtccaagtagacaaggaaatgtgaacagaaagacaaagttcagtggaatggtgaaaaacctctagcagcttcttaaggtagagaggggaccagaaaaggggtggatgtgggtggctgagggaaagcagattggagaagtggtggacaactgaaagaggaaaaagttggaagaccaaagtggaagcgtgggaatggagagaagaactgggaaggaaggaggctctgtaaatccagtgaatgtggatcccaatactgaggccacctgctgtcatcctaggctgttccccctcccaccctctcccgatatttggtggtctgaggatagctagaggtagatgggttagaggcagtgtgagaatgcagttggaggcctcagtcctccccgggactgctccgtaaggcctcgtggtggaagggcattgaatggcccggcctcgtcgttaacctggccagtggactaggctgttatcagcttgctgtttccatctggaagtgagcaggtactgctggcggcggatttatgagtaaccaatgtattaggagtcagaatacttaggttttagtcccaactcttccactagccgtccaggcaagtaatttaacttcttcattacttataaaacaaggataatatttataatgacatttataatgactacttcatagggttaagtttgtgagcctgtatgtgaaaaaactgaaagctgcaagctctatacaactgtaaggtgtcattccttgtacaatagtttgaactcgttttaatggccctgtgaaactctactgcgtggcttgatattacagttcttggggtttttgtttggccggtagtccctgtagtttctctccctggactgtgaattctttgagagcactggttgtgacttactcatgtttgtatttcccactactctttatgtgaaggaggggctcagtattgctgctgaactttgtcacatgaaggttgaaacttttcatttatgtcacttggtttggtgctacacatagatcaaaggctttggatagcatggatatcagcgacagtttgaagaaagaaatatggatgtgatcagaggagttcagggagacatacataaaaatgttaatcacggttttctttatgttgtatacacttctgcattgcttaaatatttgatgagcatatattactttttgtttctgtgtttattggggcataacatgtacacagtatgtgtataccttgataaatttttacatgtatatacatatgtacgtgtatgtatgtgtgtatacatatgtacgtgtatgtatgtgtgtatacatatgtacgtgtatgtatgtgtgtgtatacatatgtacgtgtatgtgtgtgtatacatatgtacgtgtatgtgtgtatacatatgtacgtgtatatgtgtgtatacatatgtacgtgtatatgtgtgtatacatatgtacgtgtatatgtgtgtgtacatatgtacgtgtatgtgtgtgtatacatatgtacgtgtgtgtgtatacatatatacacgtgtatagatacgtgtatacatatatacatgtctatatatacatgtatatactcacacacatatatatatccatgtaatccccacccaaaacaagatatagagcctttccaagacctgaggattcccttatgtaccttcaccggccataaattcccaaagtaaccattattctgatttctgtcaccatagattgattacttgagctgattcttgaacttctcataaatggaatcagacaatatgcaatcttttgtgtttggcttctgtcactcaacaaaatttttttttttgagacggagtcttgctctgtcgcccaggctggagtgcagtggtgtgatctcggctcactgcaacctccgcctctcgggttcaagtggttctcctgcctcagcctcccaagtagctgggactgcaggtgcgtgccatcacgcccagctaattttttttttcttttttttttcgagatggagtctcgctctgtcgcccaggctggagtgcaatggtgtgatctcagctcactgcaacctccacctcctaggttcgagtgattctcctgcctcagcctcctgagtagctgggattacaagcacacgccaccatgcccggctaatttttgtatttttagtagagatggggtttcaccatgttggtcaggctggtcttgaactcctgacctcatgatccgcccacctcagcctcctaaagtgctgggattacaggcatgagccaccacgctcccagctaattttttatacttttggtagacacagggtttcaccatgttggccaggctggtctcgaactcctgacctcaagtcatccgccctcctcggcctcccaaagtgctgggattacaggtgtcggccaccacacccggcctcaatatatgtttttgagattcatccatgttgttgaatgtagaagtattttttattgctgtgtagtattccattgcataattatactacaatttatccattccattattgatgggcatttgcttgttgtttgggcctcttaggaataaaactgctatgagcattcttgtacaagtattttggtgaacatatgcacttatttcttccaggtaaatactgaggagtagaatagctattctattttatttagcttttgtccatactgctaaatagttttctatagtgtttgaaccaatttatatctttatcagcaatgcatgagagagttctaattgttttacatcctcaccagtatgtggtattggtagtcttcttgcaatgaaag

SEQ ID NO: 57 - DNA, 858 bp, Homo Sapiens
ctccgcaacctggtggtgtccatctgcatcatgttcatcaacaaaaggatccctaacatgaacctgaccctggggcatcttgtggtcacctggctgcgcttgcacatctgtcagaaattggttatatttgcctcaacatgtctgccaccccaagatcctccttctggcctttagcttctgtgattacaaggtcttcaccaacttctctctgcagggcaactccacaggcgtccatcagctgatcaaggtcatcattacactggtgattatggccatgcagaccctctgctaccagaaggccttcttcaccagaatataacacaacactgattcctgtaactttaggtgtaatcctaaattcttattacaatgtgaaatgtaatgtccttggaaggatgttttctgctctcagtgttttagttatacccccttatccagtgtgggcagaaaccaagcagaatgagtttcaagtaaactcaatgctgctgcagcactatcaagcaccaataccttctgctgttattggttgcttctctgagtcagtgcatggagagcaagaaatatctagtctctggtcagcttctgctttgcctatggtgcagctatctgaaataatggttgtcatggtgaacttatcaattcactgggtcactaggtacacttcatcagtcacctatgacatgtttgggcacttcaagttctgacttgctttatttggaggacatgtgttatttaaagatccactgttaattaaccagagtcttggcattttatgtagttatttggtgtaagaataagagcttatattcattctgtactctataaacaggaaggaagaaaatgtaaattgctacaaag

SEQ ID NO: 58 - DNA, 3360 bp, Homo Sapiens
tgatactgaagagtagggcattgctataaagatacctgaaaatgtgaaatcagctttggaactgggtaacaggcagaggtttgaacaatttggtgggctcagaagaagacaggaagatgagggaaaatttggaaattctcagagacttgttaaactgttatgaccaaaatgctgttaatgatatggacaatgaggtccagggtaatgagatctcagatgaaagtgaggaacttattgggaactggagcaaaggttacttttgttatgtgttagcaaagaacctggtggcattgtacccctgccctaggaatctatggaactttgaacttgagagtgatgatttggggtatctggcagaagaaatttctaagcaccaatgtgttgaagatgtggcctggctgcttctaacaacctatgctaataatgtatgagcaaagaaaggacataaaactagaacttacgtttaaaggggaagcaaaacataaacgtttgaaaaatttgcaaactagtcatgtggtagagaagaaaagcccattttccggggagcagttcagactggctgcagaaatttgtatagctaaaaggaaggcacatgctgatagccatgacaatgggggaaatgcctccaaggcatttcagagatctttgtggcagcccctcccatcacaggcctggaggcctgggaggacagaatggttttgtgggcctcacttagagcctgactaccctgtgcaggcttgggacactgctccctgcatcccagccattctcgctccagctgtggctcaaaggggcccaggtacagcttgggccactgcttcagaaggtgcaaaccataagccttggtggtttccacatgctgttaagcctgtgggtatgcagagtgcaagagttgaggcttgggaacctccacctggatttcagaggatgtgtggaaaagcctggatgtccagacagtagcctgctgaaggggcagagccctcatggagaacccctaccagggcattgcagaggggaaacgtgggactgtagctcccacacagagtctccactggagtgttgcctagtgaagctgtgagaagagggccaccttcctcaagactctggaatggtagatacactaacagcttgcacctgttgcctggaagagctacaagcactcaacatcagcctttgagagcagctctgggagctgaaccctgcaaagctgtaggggtggaactgcccaagatcttgggagcccatccgttgaatcagtgtgccctggatgtgagacatggagtcaaaggagattgttttggatctttaagatttcaggactgccctactgagtttcagacttgcatggggcctctagcccaattgttttggccaatttctcccttttggaatgggagtatttacccaatgcctatacctccattgtatcttggaagtaactaacttgttttttattttataggctcatagatggaaggggctagctttgtctcagatgagactttggactttagactttcgagttaacgttggaatgagttaagactttggggggctgttgggaaggcatgattggattttgcagtgtgagaaggacatgagatttgggaggggccaagagtggaatgataggattcggatctgtgtccccacccaaatcttatgtcaaaatgtagcactaatgtgggaggtggggcatgggaggtgattggatcatggaggcagtttttcataaatgatttagcactgtccccatgcagtggttctcatgatagtgagtgagttctcatgagatggggttgttttaaagtgtgtagcacctcccccctttctctcttcctcctgctccagccatgagaagatgcctgctctgactttgccttccactgtgaataaaagcttcctgaggcctcctcagaagcagatgctgccatgcttcctgtacagcctgtggaactgtgagccaattaaacttttctttataaattatccagtctctagccaggtgtggtggtgtgtgcctgtagtcccagctacttgggaggctgaggcaggaggattgcttgagctcaggagttcgaggctgcagtgagttataattgcaccactgtacttcagccagggcaacagagcaagaccctgtctcaaaaataaataaataaataataaattacccaatcacaggtatttctttgtagcagtgagagaatggactaatacaccctccataccacaccctactacttcacctccctttccaactactgtagaagatactcactgttatcatttactatcttataagtgcaaaaactaaagtttaaagaggttaagtaattggctcaaggtatcacagctggtaaacagaggcactgagatttgttctcttttggtttgaccctagaaccctctcctaacattttttttttattttgactcttgtttggcagaataagtagcaaggacaccatcatctttgctgaggaaagatgactattattagtagtaggcaagtggagagtcgtcagtgttccatcagcttttcccctgtgtctctcatcccatgaatgaagagcagatgtgaaaattgctgccagccactcacttgtcagatgagaactgacttggctgtgctcattacaaaattaatttttaggcttattacaaaattaataaggcatgtgaaatatagatgtcctcaagatttataaactttaatttagaagtgtctttgattctaatacaaatctatttttacttacagtaagatagcaaagaaaaaagtctctggaaagattctggatatgtctaaggaaaatttgattagatgggccagtgtttcagtaacacacacaagaagcttctgaataacttgtaaaagtgagatgatgtgccccactttgatttaaattccattacatgtatcctcaggaattagcaaaaaaatttttttttcataataaaactcattagatgattttgacttataaagaataacttgtttgagaataaaatttgtctggacacaagtattggttctgtaaaatgaaaggaaatatctaaacttctgtgcaactctccgttaaagataatcctaaggctacttcagatatatttttgttattcaggatatggaatgagcatgaacgtttgcattttaatggtcaaaagaaccattaaggagagaagctcccaaaatataataagacatgactagtttcaactctatgttgcctctgtatgtttggaattccttgtaattccatatgtatttggatgatgtttacctttgctgtatctttgatgaaatgatgtgttaaactaacttcctgcagtaaataaaggaggaaattgtaaagc

SEQ ID NO: 59 - DNA, 1124 bp, Homo Sapiens
ggcccaaatctccagtactttttctgctcataaaaatctgattatttgctaatcctttagaatgtatggtttctattgacagttggaaaaggatcacttcattcacgctgcctagtcaagtgaccctagcctctttaggtaagtgattcaatatattattaataaaagttacctttggttcaagctttgaaaataaattatattgtttatgtaggtaaaacacaaagatcagaaatcaatgacatttgaaacagcaagacgaaagggagtttaacatccagcatatatgaataactacaaccctacagaaaaaaaatccagttcaaaactcggcaaaggatttaagtagacattttttccaagaagatatacaaatgtccaaggagtacgtgaaaagcttctcagcatcattaatcattaggaaaatgcaaatcagaatcacaatgagccattacctcatacccattaggatggctatttttttaaagcaaaaaaaaaaaaaaggtgtagctgctatggaaaataatatgctggttcctcaacaaaataaatatagaattaccatatgatccagtaattccacatttaggtgtatacacaaaaaagctaaaagcagaacctcaaagaggtcttgtataccaatgttcataaaatcattatttacagtagcaaaacggtagaaaaatctctaatgactatcagtggatgaatggataaacaaagtatggtctatctacacaatgaaacatacccagttttaaaaaggagtgaaattctgatggatgctacaacatagatgaaccttgaggccttatgctagatgaaatatgccagacacaaaaggacaattattgtatgattccacctatctgaaatacctggaattctcatattcatagagacagacagtagaatagtggtttccaggatggggaaaagaggagaacaggaagtgattgttcaatagatatggagtttcgcttgggatgatgaaaaagttctggagatgatggtggtgatgactgcacaacaatgtgaatgtacttaatgacatgtaaaaatggttaaaatggtaaatattatcttatgtatattttaccaataataaaaatactttaacactg

SEQ ID NO: 60 - DNA, 5328 bp, Homo Sapiens
atccggagccgggcggctcgcccaggatacggagcccggcggtcacgggggagaaggtagctgtcgggcattcccctggcgctgaagggcagattgctggtctcactccattgcccaggcttcagtacagtggattacagctcactgcagccccaacctcctggactcaagcgatcctcccagcctcctgaatagctgggactataggtgctcaccagcatgcctggctaatttttgtatttttttgtagagacagggtttcaccatgttgcccagactggtctcaaactcctgggctcaaaaaatccacccaccttggcttctccaaagtgctgggattacaggtgtgagccaccatgcatggccaagcacatgaaattgcatgcaaagctgccatgcttccgtatttgcaagagttcctaacctggaacaagattaagaatcagcagcaaaccaagtgagagtttccagggagatggtgcagctttcccgtgaatacctatgaattcaccacctaaatggtactcagagctcttaaggggacagcacaaggacgagcctgggaatctaagcacagtgggctgaacatctgctgggacaaggatggggccagagacagatcactctgactcaccaccctgccaccaaactaatgtttgaaagctctaaatttattcagcttatactgaaaggaaatgaagtctatgtccaaataggaaacaatgtggagtactgctgtgctgtgccttcattacctgagactacagcagcctgcattctccaccgggctcggaggagtgcagatgcctgagctatgcagtgtgattcaacaattccagttggacggaaaatacagctgtcttttttacggagttgaagtcaaatctacgtgcagctttttttacctacaaataatggacaagctcctgaatccaacatattctagctgaaacggatcccaggacggaatgctggagagatgcgtattccagctacaggccctcagagctcagtgtttacctgttctggtctttcctcacatatctgacaatcgttagctctctttgtatttcaaagaaaagctctggaatgtgtctgggacctgtgtatatatgggcaaaactcatcaacgaatgggctccctggtgattatttggcagattcctggcaatttcatcagaggatccaaaaattggagaaactccaagatgaaccccaaagatctccatctccagctgttcacactcctatgtaatctctagcccttgggtgtggaaaggacttgtgacttactttaaccaacaacagaatatagcaaagatgcctaagaactgcaaatgagaaataattttctcacctggtcacagcatctaccaagaatggcgctgggggagagatcagtgagattccatctttattaccatgtccctccttccctgtcaaaagcatttcacatcccgcaagtccattagacatggcaccactctgctgtgggagatacacacacaactaaatacagggtaacaatacctgcctggtcagcacttcagctccaaatcaagcttcactaatgactatgagattaacgaagatggttttgataattatgactgtttgttttgtttttcttaactattcttcatctgagacttttacttttgtttctgccagcatcctgacaaacatttacaaccagaaagggtaagccactagcttgaagccattaagttaagttcagttaacaaggctttgataacaaccctcatgtttttaaggaaaaacaaagaacctagtaatcctttaggccttaccctgaaagggtagccagaagaaaaatcacaaataacatgaacttaccggaacaatccaccggggtgtgatcatggatgtggaagacacctgaaataattttatatgtatgtatttactttttggaaagactgacttattttcatacttataatacttacttacatctattatgaaatccattctaggagggcaattcttaattcttaatggtgttccttgagctgacatggacttctaaatccaagacccttttctgttatacaacacagatgctatccctcaccacttaagaaagtgtcataattttgagaatctcttatctaaaaatttaccattcaagaatctattactactttcagttcacttaataggactgcccctacctcacacccagtattcagtttaacattttattttctgaaatttcagttaattaattacaaataatgatagccttcttggtagcagcctgaacaatggattgtgactaatccaaataaagagcaacaagaaagtacacagaaaaataatctgtttagatacagatcattctctaattatcatgtatgcatgaagaaagcgcaataaaaacacccatattgctcctggttcacagggcctttgatacattatttttatatgtttaactttctattataggtcatctatgtgtagaattataaactaaggaaacccacccattttactagtaatttagactagtccttgcattggtggccttacatactcataagaaaaaactaatgtaagtccaggtattagtaaattagataaccaccaaaagaataaaaacacaggctgggcgcagtggcgcacgcctgtaaccccagcattttgagagggcgaggtgggcagatcatgaggtcaagagatcaagaccatcctggccaacatggtgaaaccctgcctctactaaaaatacaaaaattagctgggcatggtggcatgcgcctgtactcccagctactcgggaggccaaggcaggagaatcgcttggaggcggaggttgcagtgagctgagatcacgctactcctggcaaaaaagcaagactccatctcaaaaaaaaaaaacccacaaaatctgactttcctaccaatactttttagatgcatgttaacagcaggaaataagagagaaaaaatatcataaataatagtaaacaaaaaatagtttgacagacttttccacacttgcagttaattcttatccttggtaaagtctttgtttattaatctaagctggtcattcccaacgggtggttcccagaccacatctgcaccacctgggaacatgttagaaacacaacttttcagaccccacccaagatataccaaaattagaaacttggaggtggggcccagcaatcttgtgtgttaacgtcccctccaagggattctgatatacacaaaaatttgagaattaatgatctatgcaaacattcagtatcatgtgtatttccaagccttcaggatggcatctagcccctacagcaattctcgtcatatcactcataaggtacaaagttagtcatttctgtttttttttttttttttttttttttttgagacggagtctcactgtgtcgcccagactggagtgcaatggtgctatctcggctcactgcacgctccatctcccaggttccagcaattgtcttgcctcagcctcccgagtagctggcgctacaggtgtgcaccaccacccccggctaatttttgtattttcagtagagacagggtttcaccatgttggccaggctggtcttgaactcctgacctcaagtgatctgcccacctcggcctcccaaagtgctgggattacaggcgtgagccaccgtgtccagcaaagttagtcatttctatctctctcatccctggagggaaggaactgtttcagttggccctccatatccatgagttgtgcatctgtggattcaacaactgtaaatcgaaaatatttggagggaaaaaaaggatggttgtgtctgtactgaacatgtgcaggcttttattcttgtcattatttcctaaacaatacaatataacaactgtttaccagcatttacactgcattagatattagaggtaagctagattatttaaaatatactagaggatatgtgtaggttatatgcaaacactacaccattttatatgagatttaagcatgcatggattttggtatccaaggggagtcctggaaccaatcccccacagatactgagggacaactatacttaatacagtatcttccagactgtaataatgattgatatgttcaatgccattcttacgctctcatctttctataaaactttttaaaaaattaaatatatccttattgtctcaagaaactgctttatccccatgttttctctcatttaatatgatgttgaattataaaaggcttatagagacatgtgatttgtagacagtgatacacaaattcaaagtggtaaaattttaggacagagaggcaatgctaagtggttattaaaacataaactcttatcaaatgaaaagtttaactgaattattaaaaaggaaaaaactggaatctagcaggaacatttttcaaaacagaaatttctttccatcatactattttaaagcatatttacctgaggtgcaactgtgtgatcaattagattctcagttagagatgcaagcaaggcatccaattcatctgtagcttcctatggaagacaggaatctagaattgttaaatgacccctttatcatcagatgttaagttttttccatatcctctcaatttataattctgacacaggcctgattagtgttaatcctttaaatacacagggacactcataaatcatggttgttaatgattccacttctgcatggagggaaacctatactacaatcaggatgtgaaaaagctgaagtgctatgtaaattttcaaatagctattctcctttggtaagacaaaacttgggtagggttatgactattctggctcttaactttttctttttaattacaaaaaaattattttggctggatgcagtggctcacacctgtaatcctagcgctctgagaggccaaggcgggaggatcccttgagcccaggagtttgagaccagcctgggcaatatagtgagacctcatctttacaaaaactgagctaagctgggcacagtagcactcagctgtagtcccagctactcaggaggctgaggtgggaagatcacttgagcccaggagacagaggctgcagtgagccaagattacaccaccgtactccagcctggatgacagagtgagattctgcctcaaaacaaattttaaaaaagtaaatacagccgggcactcctggctaacacggtgaaactccgtctctactaaaaatacacaaaattagctgggcgtggttgcgggcacctatagtcccagctactcgagaggctgaggcaggagaatggcatgaacccgggaggtggaggttgcagtgagccgagatcgcgccactg

SEQ ID NO: 61 - DNA, 1990 bp, Homo Sapiens
atcattatctgcagagaatttcagtatatcttcgagttccttgttagtatttatgctctcttatttgtgttgggatagaaagattaaggaaaggagagatgagaaggtggctcaacagttgagacagttttattgggagtaaacctgagaagggcttccagcggcagggtcaggtgcaaacttctcttacagcctgaggcttttttaaagggcccagtggagaagtgtgctttgaaacaaaattctgttagggaggggttggggaagtcctggctgttctgttacagttagggccgttattctctgttgaagttatgggcggggctgacattttcagttttggccaggtggccaaatagaaacttaaagcttaggatggtggagtgttataaagatggcggtgctcttgtcctgtcaatgtgttcctcaataaagtcttcaagcatgtcatagattgttttccccaccaacctcccttgcagcatttgagatattcctgatacttcatcaatagtggagaagctcctgaaatcattgacttcctcactccataatggtttccaacacccaatgaagtagtaggaggaaaacatgggtttcttctcctggaagcctccagaagaaggtatttcaatatggggagagtggtcagctgtgtcacaggtcactgagaatttgaataagacaaggaaaaagggttgactgtagattttggcaagtatttggtcactgggggccttgataagagctgtttcattgaagtattcatgagaataacttgtagtgaaatatatctcaaatagacctccacgatgttgcctagagggcagtgttaccctttgaactaccaacattaaccactggaactgctcatctggaagcctcttacagtgctggtacaaactagaatacacaaaggaagggatcattttatacgtgttactgtgctacttgctctatctacttagtgttccatacatgtaattacctattccatcctatcccaaagtactgaaaatctccattctactttctctgtctgtgaatttgactattcatagagagagagatatgtggaagtatgcatgtgtccttccatgtctggcttatttcacttagaacgttttcaaggtttatccatgtggtagcatgtatcaggaactcattgtttttgtgtctgaataaatttccactgtatggttaaagcatactttgtttatccatttttatgttgataaacatgggttgtttccacagtaataatttgactgctatcaataaggctgctgtggatgtggtatgtctatgtctgtgtgagtccctgctttcaattcttttggatatatgtatccctaggagtgtaattgctggttcacagaataattggtgtaaacctttttcaggaacaggtatattgctttacaaagtggctacaatgttttacattctctccagcaatgcataagggtttctattttccacattgtcacatatactggttgtcgtatttttttcataatagccaattaatggttctgtactgctttttcattgtggttttgatttgcatttccctaatgaccaataataatgcacattggtttttgtttttgttggttgtttatatattttttgaaccagtttgttttaaaatcctttgctcattaaaattgagtcatttgtgttttgttgttgagttataggaattcttatttaaaatttttagtttttaatatttagaaaatttctttcttttttcagctcccaagtgcttggaagagagttgtaggaattctttatacactgtgggtattaagcccttatttgatatgtgatatgcagatgtgttctccctttctgtaggttttcttttcatcttgagattgtcctttggtgcgcaaaagtttttaatttcgatgtagtccagtttatcttttattggttgtctgtgccttaaatgtcgtatccaataaatcactgccaaatttaa

SEQ ID NO: 62 - DNA, 3628 bp, Homo Sapiens
cttagtcgtgtgtacatcattgggaatggagggaaataaatgactggatggtcgctgctttttaagtttcaaattgacattccagacaagcggtgcctgagcccgtgcctgtcttcagatcttcacagcacagttcctgggaaggtggagccaccagcctctccttggtgagtatgtttctgtcatttttagggttgcttctgcagtttgccttggagtctgggctgtgggaaaggctgctgcgtcctggtgaggacactgcgtttctttcagactttgaagatctgtcgttttagaaaagtggctgcctctgtcaccagccccatggttactgtcctttagtgtgactgtcaggaggtgtttctcagtccttcgttgtaagaatgtagatgccggttgcaccttctgttgtcttggaagagactgcagtgcttggctggaaaataagctgctcgggactcctctgagaagccaaagtgaagctcagagatggaagtgggtatacttgtgctaacccagggttgctgaggttgggtgagcttccgcttctccgaggtggaggagaggcagctcctgagccatttctggcctcgtggtcagagctgcccaatttcagtgtgagaaataccagagaggcagaactttggctgccttctctaaaagcatatgaatgattgcaggagcgtattttacgtcctttccttttccttaacgttgaaagtcacaaactgtagtaaaatcaggaagaacgtaaaaatgctgggggccagcgctgggggtgggggactggggaggactgaggagggggccactcagtctttgaggcctgacttgatcttgataggtatttctcaggctgttagtattccgatgaagcttagctttactgtcaagtaaaatacaggaaacatttttttttaatgttgttctagttactgtaaatgaaacggttaaaatgtcataaataccttatgataaacatttttcaaatttgcttaaaaagcaacacatcagtaggcagggtatgacagggagctttttcagtacagtcatttgagtgtgtgggcttcctgagttaataatgagtcagcacccaattctaaaattggagcagctaagagaatgttcaatctgctcctcagcacagcacggtggctggccggccccccgtaggaaggcttggggttaaaatcgacttaggatgccgcccttatgtaagtgaccagctcccagcttgggtcccagctcctctgggctactgctgagagaccccctctgctaagggatctgtctctgaggcaggagctaacacatttggcttccaacctttggctaatgttgacgatttttaggttgtcttgaggcaacaggttgaacatagtttctgaaatgaaaaatctagtgtttattaaggctagggcagctgagggctgagcctgcatctggagccttgagatgttccgcttgcacgtcaccctcgccgagggattgggcgggagagtcggtcaccgagtgaacttcaaagttggcgctctgcatgtgacgtgtagcgtgggaagattaagtcagcttaaaatgagagaacaagattccaaggaagaaaacctccccagaaccttactcgtttatagataaaagaagataaatattgagaaaattaaaaaaataaaacgaaatagttgggctgcaaaccagcagctctgggaccagatgcagccctggtgaaggcatcccccaccaggttctgtttggcctgctcaggattgtttttttgtgttgagataactgtgggtggggtccacactctccggatctcaggccctgccacaccctaatgccacaaagcttggagagtgcgattacagcgaggctcagaagccaggctgagggcctgccagcctcgtggggctgctgtgtggtccccatgggttagcatctgcccggccgccggaacagggcctggatggagaaggaactccatcagcactaactctgctagactctcttattaatctgccctctgaaggcatttgggcttgtggcccttgagttagttccatggctttttcaagaaagatcctgcagttccaatgtgagcagcagttgtttccaaggctaacaatttcacgccaactagaagcctccacaagtcaggtgccaggcatttctaagccagtagagcagctccgcttgtttctctgggtgagtcctctcagggtgagaccctgtctccttgtaagcactcggagacgtgccaccttcatggagacgggagccaatcaaaggcaaactgcgttagacagctcttccatgcggtatggacaccaacattcgatcatccttgtttcagagaaggtgccgggccccagacatgtgcttatcactgggtcccatggccttcaatcctttaaagggttttaaggtggctgatttttatcccagacattgatcatgttttttttcatgcagaatttgggcagttgtctggacattaggagttgagtcacctcctacccatgaggaacaagcctgtggggggactgatattatcacttctgtcatcaagaaataaggccgcaggcatccctgaatatagagcatttattaatcgaactgtgaaaatgaaacacagacagtgatgacagctggaagttggccaatgtcctgttgtcatattgccctcagcctagggactggcctgtggctcactgaccctgtctcccactctccacctctcatcagcaactggacctggtgcacctggtctacctcatgtccagtgttttccgcagtacctgactggtatccccacccttggttgttgtgtggtgagctcgtccctatgttggcaagttacttaattcctaggtgtcccgccttcctcactgtaaaatgagaaaagtcatagcacgaatgtcatgagtccttgtgaagattttatgattagcacacaagttacaaggagacacgataactgttacgtacgtactcattcgttcggaaatataacagacagcttagtatctccacccgggtccctctgccctgtgggaatccataaagaattgattctcatcccccagaagtgagatcccgcttgtgtcatcaattacatggcatgttctgcatttacaggacatttatttattaggtaagtggggaatcctccttggttctctccaggaaaacctggagttctagttatcatcatcatcatcatcatcatcactgtcatcatcattgacatcatcacaataagaactcccattgtattcagccctaaccgtatggtagcaactttatggtattccctttaacctccccccaccccaatatccatcctggaagatgggaaggatgataggtttgttgactcactcaaggcggtgggactctccagcaggtatcaggcacagcatctgcttcaaagaacacatcggcgacaggggagccccttgcactcactcaggacaggagaatcaggaaaagcagcagatctgcagggctttgtgtgtaatccaaccagactgatgccacaggccaggaaaccgaggacggttggcttcagacctaccctggagtggaagcagctggattctgtcctcacgcttcctgtctaaagccagct

SEQ ID NO: 63 - DNA, 2586 bp, Homo Sapiens
cacccatggtcagggaagcgccatcgccctggctttgaggctggggcctccggggaggttccggtaggggctttgaagaggccgctgtttttgcaaggccgagacggcgggccctgcgcaggccgccctattccgcgccctcagggcgtcagtatccgcctgaggccggataccccctctgggcccggatgcccccgctggccccggagcatcctcggcgctgccctcccagagccccgcagaggctgaggtggcgcgggggcggccccggctccgcgagaagcggcggcagcgagggctggaggacccgggctacggggctccggggcgtctggcctggttgggactgagcccatccagggactgggactctgggattctggtgtaggtggatccggggcaggctcaggaccaagtccctctccttccaccaaggagcgcccagaggccggcgggagctccaggttcacctcctcctcctccaggaaatctcacttccaactggatgtctggatgaactactgaaagctgctgagtgtcctgcagcaggtgagctgtggccagagcccaaggatgaagggggctccctcactctgtgactgtgaagaggaagcctgaggtgtagcaggcccaggccccagaagtatggaaaaaatgaggccatttccaatccagcggaagaccttctagaagaggtgatgggtgggagagtgctggcatactacgtgaagctactatttggagttggacacgagtgcatgtgaccttgtgccacagcgggaatgtgagctggatgacaaatggagatttggacttgtgataattggcctctgtgtcattgtgtggaagactgactggtccctttatttcctgtagcttgactaccacacaaatgaatccactcaaatgttggcaagtggagcagagtcccaggacagtctgcaatctctacaggtacagaaacacccccagttcaaggatcttcacacctggatttaggcctactcctgcaactaccccaggccagttatccaggcagtgactttcagtgcagctacagtcacctctggaaacctgcggagactttaaaaatttccagaaggtcaggaatttttggagacctttctcatggctacattgcctgcaaaggtgaatcaataagcttctgaactgacttagaaaatgttgcagagactcttgtgaacagatagaccctctcctgccactcagatagacgtatcagggtcacacacacctgatttaacaacatgtcattatctcaggcaccaatttgatcttctactatgttgcagacatctgttctgcaaacaccaaacaaattgagacaatgaccttccgcaggacccaaaccacctcttactgaaggaaagaagatccagtgagatagttagtccacaaatggaatgtaaatccataaacactcttaagtaacagaataaatttagtatgaacgtttttatgtgggagctcttgacatggttgctgctcatatgtcagagacacatgcagtttaagaaaggtagcagttccaatcctggtttggcccaacagtcactgcatttttggtggggaaaagggatgtgggaggagatggtacctcttcatctttttctctgggttttctgtcagaaagggatgttgcttactccagtggcaaaaaatgccagtgtcttctgccagagtgggttactgagggccctggtgcttccaccttgtggctgatacagatagtccctttctgcttttgtttctagccaaaaaagatgtttctggcatctcaggtatgctgatttcagcagctgttttttctatatggctattttttttttctttcactctctctctctctctctctttttttttttttttgttggcttcactgtgttgccatagtttcttaaatggtcccttgaaccctcccagtgctattttggtttgtacataactatctatatattttttttctttgggggagtgtgtagagctaaaggctggtatatgctgctcctgctccccgaaagtgacattattcccctaagctaatatttcaggctttcaatttattcgtggtttcacctgtttaaacataagtagaaattactttttctctccatatttagatttgatctatctactttaattgctaatagtgtcttagtcatagaatagattagttagaaaaaagtgtttttgacattataaatgattctttcaatttgtgtctaaaagtggaaaatactagaaagcttaacatttattattgtattcagaccagtatttcctccagatgacctttattacaacaaagataatttaatgaagatctctctaatggtaaagctgatggctttgtgctattacaatatccttcgaataaagtgacagtctggtggaaagaacaactaaagcaaggattaggaagaaaatagttaataccttcattttggtctcactctgcattaagagttgtcatcgtgttaagggtttattatacattaagtaatttaatgtttatttaataataaatggatcctattaaatatgatttttaaaattataatcaca

SEQ ID NO: 64 - DNA, 7458 bp, Homo Sapiens
gagggatggcgccggcgcaggcctgcgcgccacgcgctttaggtggatgagggatggcgcaggtgcaggcctgcgcgcctcacgctttatgtacatgagggatgaggcagcacaggaattggcacaacctgaagtcagctctgcagctttccaagcttcgttctgcgtgtcctgtactcaacagtcatctcatgctgcagggtggctgcgtgtgctccgtacatcacacccatatttcaggtagggacggttcccggagggtgctcagcaccatgccgactactgctggctggcacgttcgcacgtggccatgtcagctccaaggaggatgctgacatcctgctggctggcacgttcgcacgtgtccatgttagctgcgagggccatgccgacatcctgctggctggcacttccacaggtagccatgttagctgagagggcgatgccaacatcttgctggctggcacgtttgcacgcggccatgttagctgcgaggacaatgcttctgcaacttttggtttcttccctttcatcctcccacccctgaccgtttttgcctgggagcaagtgcctaataaattacctgcactcaaatctttggctcagagactttccgagagaacccaagctgaggcagacaatgaaatcaacactaccagccacttagctgccagctgggtggagagtgggctgctcttccaagacgcttttcagcctctgaaggctcatttccagaaggtcctgtctatctgggctacttgcttccagagcagttgcatctggctggatagctaatgagcgataaggcctgcaaacctcaagccacatctttaaagatgagggccctgatgttccacagtgtgcgacgttactggggtccagccagttatgttctgggagctgcctgaatgaaaatcaatttgttattttagttggttggcttgtttaaaaaaaaattaaataacaagaaataagaaaaaacgtgcaatggctttgaggtagaacagaaaatccagtgagccctctctgtgcctctggcagaagaaactgtgaagatttgcatttagaaaaacgcctcctcaactttggcggcacctgatggttcatggttcctaaaattagaaaatgctagagccttggttcttttttttttttttttgacggagtctcactctgtcaccaggctggagtgcagtggtgtgatcttggctcactgcaacctccacctcctggattcaagtgattctcctgcctcagcctcccgagtagctgggactacaggcgcccgccaccatgcctggctgatttttgcatttttagtagagatggggtttcaccatgttggccaggatggtctcgatctcttgacctcgtgatccacccgccttggcctcccaaagtgctgggattacaggcgtgagccactgcgggagccttgcttctatgcgagtatttcggagacaattagacaaacatcccacagccccattttgaagcctggcattgtgttggctgcagtgaattctgggggtggaggtggctggagggaaagagttgggagtcttgttttgttttgtgtttcctggagagttttgggttctgcgggataatatgtgcttgcaggtgcagcaggagtagcattctcatttctcacggcagttcagtccctgagcagacgggagaggtgaaatagaaacacacattacagaagggacatgctttcttaagggcacggggaccgtgacacattgctttgatgaacggtgatggagtcacacatggggaaattcaacatggacacaccagtctcgctatggagacatctgtgttgtatgggagctaatggctttgaatgagcccatattcatttttctagcagttttgatactaacataaagagagaatgtgtgtggacagaggaggctgtcctgcacggactctgggtgtactttgtgccagtgacattttgttccagagtgattttgcttgttccagtttttctgaaaggaaagcttccccacagttttggggactgctgtttgtctcatgccacatgtgaggatttgtggggtccacagtctgcgactgtgctgtccagcatcgattccattcacactggttcttactttcaaagtctattctgttacagggagaagactgcacatataacacagctctgcatggaaaaccttccgcctggaggggtggcttcctagaggtgtggcgttgccctctgtcttgaacaggctgcactttccagggcacatcacgtgggtgtgcggtctggctgctgggtccacgcgggttctcaatcatgacctggcttgcaagctctttccacagttggataaatgaagccgttggggaagtatccgcaaactcttacagtgagtatgtgataatgacacacgcgtggcccttctaagacctccgctaggcattatcagtgactgtgctcgtgagcgctgacctccgctaggcgttatcagggactgtgctcgtgagcgccgacctccgctaggcgttatcagggactgtgctcgtgagcgcggacctccgctaggcgatatcagggactgtgctcatgagggcggactttcaccagccacgcttccgaggagtggagtctttctcagctctgcctctccaagatgaccatcttgtgaagacgatgcgttctttatacacaagttctgtgtgtgtgtgtgtgtgttccacacacaggaccaaagttgagataggcgcacattttcttggtcccacttgtggccccagtcggctgtcagaagtgggtgtgctccacatgtacccaccatgtcagggcacagtgctcacatttcacacctcagcaggtgccttgatgttgaccagaggccccaaaatcatctctttctatgacttctagatcttagattcccaggaactgggaaatgcagtcagtatcttttgggtccaagaaactttgtcagagcccttgtgggagaaccatagattctcaccagataaacagaagagcttcgtgttagagaaacccgcctgtctccccacattctcagttttctggagagcagctgaaagccatctgggtggagattaagagctccaaccgtgtagctttgatgtatcgggcaagttgcttaagctctttaatgctgtttcctcatttattgtgtgaggccaaaaatacccattccttaaagttgtgaggattaaaaacagtaatgaaaagtgagtggcaagtgccgagtacacagtcaagtacctgatactttttagtgtaaggtaagtagcaagaaagcatgaaatttattttcatttactcttactacatgtggtaaaccatctatgcacagagcactgcattgggtgccatgaatgacagaataagagtaccaggtgcatgaaaagcttaaaagacaaatgagacagagctaggctgcagaagacttaaaaagttgatgtatttaacttttaatggacacactgtacatgtttatggggtacgatttgttgtttccatgcatatctgtgttgtgtaatgatccaatcagggtagtgtgtgtgcccatttcctcaagggtggatcattatgtgtatcatcgtgcatcatcatgtatcatgcatgtaccatcatcatgcatcattgtgcatcatcatgcctgtatcattatgtatcacctcatgcatatattataatgtatcacctcatgcgtgtattatcatgtatcaccatgcatgtattgtgcatgtgccatcatcatgcatcattgtgcatcatcatgcctgtatcattaatcacctcatgcatatattataatgtgtcacctcatgcgtgttttatcatgtatcaccatgcatgtattgtgcatgtaccatcatcatgcatcattgtgcatcatcatgtctgtatcattaatcacctcatgcatatattataatgtgtcacctcatgcgtgtattatcatgtatcaccatgcatgtattgtgcatgtaccatcatcatgcatcattaggcatcattgtgcatgtatcatcacctcatgcatgtattatgtatcacctcatgcatgtatcatgcatgtaccatcatcatgtatcattatgcatcattgtgcatgtatcactgtgtatcatgcatgtgtcatcatgcatcgccccatgcgtgtatcatttctttgtggtgagaacactcagaagcctctcatctcgctatcttgtcatatatgctattttattgttaaccaaagtcagcctattgtgcagtagaacaatctctcctcatcccctgtcctcatcctcccctcccaagcttccataaccactgtttactctctgctcctaggagatcaacttaaaattttgtgttatttttggatttcacatacaagaaatccatacaagagctccatatgagatcgctcagtacctgtttctctgtacctggcttatttcgcttaacatgatgtccaagctcatccatattgtcacagatgctgggatatcatttttttcatgggagaatggtattccattgtgtatctacaccacattttctttattcattctccgttgttgggcaccaagggcgattccataccttggtgattatgaacagtgctgcgataagtgtgggggtgccgatgtctcctcaacccatggatttcctgtcacctgggtctttacccagcaatgggttgctgagtcccatggtagttctatttgtgtttttttgaggaacctctctgctgttttcctgagtggctgtagagagctatagaactttaggtctgtgagagataagtcctccagtacacatgccattttcagaagggcaaactgtagcccaggaaggtcaggtgccttgaccaaggcaggcacagtgagaaagaggcagtgttaggaccgcaactgattttcctctccagtctcttttgtgaagattggatgctaaggtcatataggaagcactatggaatatgtaggaggtgctcagtctgttttgtgaagattgtatgccaaggtcatatgggaagcactatgcattatgtagtaggtgctgtgtgccatacattaagattacattgtaaatagcaggcactatgtattgtatattagcatgatgcactgggtcctgttgtctgggagcctggcacctggcagcttcaaagaacttacaaggtccacaggaaggaacctgggacagcccagggagcatcactgaaagaattggcctggaacagaagccccacagctcacctggggggagcagggggaggataggggtgaggagggagaggaccaggggagcagcgggaggaccaggggtgcaggacgagcactgggggtgcacgggagagcagggtgcaaggaccttgctggctgagaagacagcgggaatggcgggtcctgggagaggggaggaggggaggcaggccaccagccaccctgacttcagccaggagacccatttcagaggctcaaagggtggagatggtgcagccatagtgggaagctgagccccatgctggatgctcagattgagggggctcctgaggggctgcgttcctctctccaggggccgtgggacggtggctgctcatctcacaggtatttattgggtttttcaccacctgccaggactttgctgcccacgtcacacatttcatgtaacctgtaggtgtagaggcctcattttcagacaaagatgaactaagaaagtgtcttctcggaggtcacggctggagccagatggtcaggctcaggctggggctggcttccctcgatgtgatgcacggctcccatgtcacgtttccctgactatcaggagctcccagaggccaaggatggggtggccgcctggacaattcagacctaaggaagggctcctggcctcttccctgagagcctctaagctgactgctctcttcctgctcagcagctcatgatccccggtggcttccttgagctgggacttgactgaaacccctgggactggccctccagccaccctgacttcagggggtcgaggtgctcactgggccagtgctcaggaggctccgtgccagctggaacaccgggaaaccctctatctgaatctttgacccagggaggagcctggagaggtgacgtcccggcaggcctctcccgcaaaacccagaatcagaagtggccacaccaggtccggcacccacggcagcagcaggagccatttctgggacaactttggggatatacttgtccttccaagtgaaaggagcttaaaaagacccctgagcaggagagaaaaagtatcttcaaagagaactcccttcatcttgaagaaagtgtctgcgctagcctcttggccattgcgccgcagtagaatcttaggctccgtcactcctgtgacttaattcaattggcatcggtattttgaaaataatgatttttcctaattgtaaatgtgaaatgtattatagaaacgtcgtccacaagcctctcactcagagagagacaccgataactgtttctttccatggagtacattccaccgtcccgttttcccaccacaccgcgtggcctgacgctttcctctgtcatgaacggctctgatacaacgtgagatgaaattccatctcagacatgcactgtgatcactcacccctcactcctcaatgcctgtgtgtcattgagcacctcacctgtgctatatatttctctttagggtcacaaaagaattgctctgtaatctctgtgggcaaggagatttctcccgagtttgattggtttttctgttttcttaggatagaaatttttctagcagtcattggtctattgaaaacacaaataagcttcacttcatacactagaaaacttcataatataaggtttatatttgccatgagaggaaacaaaatgttgtcttaaatgcattcacgtaccctaagaaaaatggtatgaaacggtcaaggaaaagttccttctgatagtaaaaaattcacccccttattaaaccaacaatgaagttgcactagattagagtttagttccgaaactctgtgcttttagatatttggtccgttaggatttcctggtggggggcacacgcgcgtaagtctcttgatggtggggctctggttctctggccgagaccacagatgtgtctccaggcaggtacttcctctgcaagtgtctgatgaccacagtgaggtgggtgtgttgataataatctactgtcatagacaccttaccttattaatactgctaaaccaggaagggcacaattgatattctcaggttttttaatcctttaagaagaaaagataattaaaaaaatcttttcactcaagaagcatacgatagaatatggtgatacagacaaagggtaggcccactgattcgaaaattacagattgaatccctgagacaaatatctcccctgctttcaggtagattactgtctacaggtgggataaccat

SEQ ID NO: 65 - DNA, 2542 bp, Homo Sapiens
ccctgtggtcaggttttctactctacacacagtgatatgctacccccggctctatccattgttgctgtataggaatgctggctcggtgtcacaagattttctgatttttcaagagaagatataaggcagatgctgcaaggacctggtaagtggggcacaaagccatgcaaatccatctgaagtcagttcatttcagagataccaccagcttctgatggtgttacaccctggaaatggcagtccagctctagcttctggaaggcaactggcaagaggtaaggaagagatggtgggaaggtagcccctctccttgttggggaggagctttcatcttattccagttctcagcagtagaagctatgcctggagacttccaggtgtctcctgtcctggttcctgccttgttctttctcttttccctcatcctcatttatgttttcactcctccttctccaatattccagaatattcattcatccattcaatgaataggcatttattgaccacctcctttgtgccaattgctgttcttgatgctgtggtaacagcaagaacaggactgaacccatcccaatttccatctgagctacttctagtagaggctggcaaataacaaacaagtaaataaaatgaaaagcataatttgggagagtgagaagtgctcccaagggcagacagaatggagaggggagcaaagaaagggaaggagggtggaggagaaagggcccagcctcttagtgcctgactagccctttgctgtgaaggctcacctttcacgcttggcttctccctgaagctgggagctacttcaggcaggagccatatttgattcagctgtgtccaaggtcagacgcaaagcttccccaaacgctgttgggcagcagattataccacagtgtcttgaaatacctgcatggtgtctatgtgagcaagacctgctgcctccaagtgtcctgtcggttgtgttaatcacgtgcatgggaggtgaggggtggtatgtacttggagggggagcccatagcgaagggcaggggagagagatattgaagggatatatgcacttcccttgataggccccttgcaattgagtaggggcaaatattaatacattctgagtgctcactgtgtgcctggctgagagccaaatgcattccttgcatcttcttatcatctcatagcaaccctatattgaagatgatgttcttattcctgtcttttaatgaggttactggatgataaatatattaattgaccacttagcagatggaaactattgaaagcctaacccaaactgccagggttaaaatcctggctgtttctcttatgagttgggtaaccttaggcaagatgcccttcttctctttggtgcttctattttctcctctgtaaaatggagacattgctatgaaggtgaaataagttaatagatagaaaatgctcagaactgtattttacagtatcccagcagtccagttcatttttttaatttattttattatttatttatttatttattttgagagtgtctcgctctgtcacccatgctggagtacagtggcccaatctcggctcactgtaacctctgcctcccgggttcaagcgattctcgtgtgcataaattgggactctctgaaatatgtgggtttgagatttaaaagcacatgactatgtttttaaatgttcaaagcatcataattgtagcgcttacaaaccattgagtctatttctctcattttaagcataagaaaacagccgaagattagattttgataatgagagagcccaacgatcctggacccctggccgggaggacaataggggaaacaggtgaaacactgtgtgagctggaccacccaggctctccaacaccaggacaccagagcatccttcctccttcttctcttctgctgcgacttcctggaggcatagcagagttacaactgctggccatgtggaacttctcttctcctataagtttgctctgagatggagagattgtgcctgtggttcattaggaagagctcttgggatcaatgcctgtaataaggaagggaaggaatcaggattggccagaaggagaagttgagctgtgttgaagcctcaatggagacctcagccaattctgagtcatgttggaggtaagccctggtgggaggtgttcgggtcgtgggagcagatccctcatgaatggcttgggccatcctcttggtgatgagggaacactcactctgagtgttcacaagatctggtggtttaaacgtgtatggcacctctccccacccccactctttcttgttcctgcttttgccatgggactcgcatgatccctttgccttctgccaggactaaaagctccctggagcctcctcagaagctgagcgatgttggcgccatgcttctggtacagcctgcagaaccatgagccaattcaacctcctttctttataaattacccagtctcaggtatttctttatggcaatacaagaacaccaggggtttgcaggtaacccgggcccctgtccttgaggacacagcagcaag

SEQ ID NO: 66 - DNA, 1947 bp, Homo Sapiens
cagagagacaacagatttacatcccagacacattcacactgggccaagagcagctgccattgcagattcgagtcacgtccttttttccttccttctccttcttggagttacaacagaagctggggaggtgagagtgcagaaaggacgtggatgaagcagagaggcacgtgcctgtctcattcgcctctggatctgctgcatccaggactgtgccagcacaaagtgggagcccgataaatatttattgaagaaatgaaaggtgacaaaaggcagaaggagggagaccccaaaaagagaccccaggctccagaagcagatgaggagacaaacagaagagcagaagaatggcagaatggcacagcagagagaagaaaaggaacatctgaatgttgagaggaatttggctgggggcggttggagaggagattagccactggacagccaaactccaggggaagatcatcttcccactccatcccccttccagctccccatccatcctgctgagagccacctccaccactcagtgaaaccgctgcattcatccttcaagtttatgtgtgacctgattcttcctggacattggacaaagacctaggtccagtgaactgtctaacacttaagtcatccacggacagcaaggctaacagaacgctgtaacatgtgcccacttggactctgggagttgcagacacccacccataggtgctgccatgggtccggagcccaaaaagtgcttgccctggctcctgcacctgcccgtctgcatgctccccctccggtaaggggtttgaggatgtggcggctgaacataagagctatgcccctgtcacacatcatgggacaggggtcagggaactctcccatttcactttcaaatattccaggtcccctttttgttcgggagccagagtctaatggagacagagatagaaaccctgaaataggatccaggcaatataaacctacacgctgtaagccaagtcagagtgaggctgatgtgataacaaaagtctgaatacaaggtgggagacaattattctgactgaaagggaggcaagagttctgccataggcttgatgctgtgtgcccctggcttcctaactcatttgcaaatggaaaatactattccattgtaggaaccttctttttccatgtgtctggggaaggagaaagaatggctgggctgaatgaatttatcccttggtcctcttccaacaaagctcagctatgaaagataaatccagctctccccaccccctctcagtggagctggggagaaatcaaaagcccctctgccaataatgagaccaaagtttgcaagggcaggacgagcccgtgctaacagagaaagtgttgtttcctcaatttggttttagactgtcttgtcctatgggggagaaaagatctgcccttgggagaggtgccaactttatagatctattaataaaagaactggcaggcttacagttcttgccaatgaggaaacttgaatgagagaagccaggctcaaccttggccaacagactggagcccatcaccctaacttcaccccgcttctccttacccaaccgtcaaaggctaggcagcacccacccagcagcttccacctggctgaagcctgcacctgcttcagaccaagggttagatggaaatttggcatgggaagagagggctcacctgtgggcaggatagactctatccaagaaggagaactgaaaaatgaaaacctatgagacaaggggtgatcctgaaggcaggcaggagaaagggctggagggagaggcactggggaatttttcctggtgaatactgaagttactagatgttttgtcttgcaaaactcaagggaaaactctcaaactctaatgtttgtctattctgtgtccaaactgtccttttgaaacggacccacctttcagtaaagaaacttgcattggcctgccc

SEQ ID NO: 67 - DNA, 1096 bp, Homo Sapiens
ataaatatttgttgaaagaacatttgttcaagaatgcatcattagaatgcattcattttcagccaggcgccatggctcacgcctgtaatcccagcactttgggaggccagggctggtggatcacctgaggtcaggagctcaagaccagcctggccaacatggcaaaaccctgtctcttctaaaaatacaaaaattagccaagtgtggtggtgcacacccgtaatctcagctactcaggaagcagagggtgcagtgagccgagatcacaccactgcactccagactgggcaacagagtgagactccaactcaaaaaaaaaaaaaaaaagtcttcattttgaaaacacatgacatgactttaaaagtgaaagctaccgaaattctgactgggaaacaatgatatcaagctaaaggtggtcaaagaagagctgggacgagcccattgaaaaatactcctatttaaacaagaaagaaaggtacattttggacaggagaacagtatgacactgtaatgaaaagtaaaaataaagtatgcctaaaaaaactataattatatcagactggagacatgggctcagagaaatgtgcacagcggtaaacctgttacgttgaagccgtattaccaagatttccagagaacatgtcaagatgcaactgaaatatatcagactgagacagaagtgacatgacttccaatctgaagttgtgaattaggtaataaaatgatctaatttttccttttaaaagatcaccataggcggctctgtaaagcacagacaatgcagagcaagaatggaagctagatgactagttagaaggcaagaacagaaaacaaacagtggcttgatctatggtaactattctggaggtaagtggttagattgggatatattaacaaggcagagatttgctgaaatgaaggggaagaagcaaagataaatctcatttggccttgccaagtgaataaatggtcgtgtcaccactaaaaggaggatgggaacgcaagtagaaatgaaaagttccattcataacatccactgcacaactggctatacccttcatgtggaaacaataatgaacattttttcctgacttat

SEQ ID NO: 68 - DNA, 1984 bp, Homo Sapiens
actgccaccttgacgagttccacttaggaacagccagagcagcccctgtcagcatcaggaaaagcccagtgggggtatgtgccccccttttcctggagtgtctccaaagggaccccagctgaagtggaagggaggagggctggcttttctcgtggccttggcgagcagggcgtggtgcagtgtcgtgagaacactttcaggacctgccgcccagcttgggtctctccagctgtgatgcaaggaccctggagccctcagcccacatattcacagcttctccatgacctcaggcctcagttttcccgacccaccaggctcctgtgagggtggaagagccggaaggaggtgggatggccgctccacaaatctgagttggcctggggttgtcgtgagaacagggtatatggcccctactgacaccacccccagtaggtcaggcctggcactctcgacaccccagtggcccgggcctttcaccacactcttctgggggggattggggaggactctgctaccagtgactcacaccctgtggggcatggggtaattatgaccctgagaagcacccacactctttctggctaggccagagcctacagattctgtgggtacaccccagcaaggccagagcctggtagagaggagcaagggtggcaggaggaggggaacctgctcacccctctgcttcatgctctcagggctgcctgcaggcctggctgccttcctcatcctcgccgctgtcacgccctcccacctgccttctcccatcccctgcttctggccttctactgacccgcactggggtgggcaggacaccgcctgcatgtgtcctcatttatccacatccatcaaccgtagatgggggtgccttttacagatgaggacagggaggctgtgagaggggacttaactgtgcagggtcaccttcagcatgacagcgagtggagcagaggttcagactaccactgtccgcccagctcctgatgccaccctgtcctctgaaggcctggcctcttcctgccttttcgtcctctctccagctctccgacctccacactgactgtccctgtgactttggacaagccccatccccgctctgtgcctcagtttccttatttgcaaaatggagaagtgggaccaggaccagactggggatgtccacactgtttctgtagctgtggagagattcagtgtccaacagatcccagagccaaggcccctcctcagccctgacagctgctgggttcagtgtcctttgcattagtgcctggtcctgagaaggagagacagccggcaggtggaggcagcctggggccaggctcacctcagctgtctccagccctgtcgtcttgatgaggccctgggcttccacctcccaggatccttgggtcacggccaccctcatacttagtgcatgtgtggcctccagttacctgccattgttagaatgtttttagcaggataataaagcactgggaaaaagcccactgcaccatctaaacgaggacctgtctctgcatagtaatggcagcagcaatggtggccgggatgttgaggttgatggaggtggagggagctggtgatgatgacagtttctaacaactgtgcagggcaaatgttcacaaagtcatgccgagcctctcctcatttccattctcctgccaccattgatggaagcagcgggtgtgctgttcccattttgcagatgaggaaacagacagactgagttccattcaacaaagagttcccagctctggctcagtcccaggcccactctgggtggtgatgcagctcattaaaatttatctttttgtggatcctgaggatatttggaagtcagcagagagggagacaaggccacacacagccacagagtcacagaggacgggctgagatcggggcagaagggctcattctgggagcactgagatccgagtgcatccactggctttggggctggcaactgggcaaggcgaccgctcag

SEQ ID NO: 69 - DNA, 939 bp, Homo Sapiens
aacttggtccagttcaatcaagccatcaacagccaggtggctttagtggccactatgcatattaccccatgcctaaaggttctggtacaagagcttctctataagttgcacattgccatagtggaagacggcatgggagatttggtggcaaacacttacggtgcaataatagctgtttttcctatatcatgacaatatgtggcacacttctagactcatttcatgccaaagaagttcctcagaagggtaaggaaatggagaatcttacatggtccaatgcagtccccaagaagtaattttgaatggacagttacactggttactacaatgctgtctctgaccttctcaggatcgaagataatcatgagtatcaaggtggagatgggtctaggcgagagaaaaggaagtagtggttcttgagaagaattgtatggccaagataagcttgaactatctctcctcttccagttcctgcaacttcttattgcctgattgaggtcattaccctatggtggtaatgacatcagcaatgtaataaattctctcgtggctttgtatctggtttataacatgggaaatgtttcctcaagagtggtgatgccagtatggcttctgctctctggtggtgttggaatctgcattagtctgtgggtttggaggagagtgattcaggccatggggaagaatctgacactgtaacaccctctcgtgccttcggtactggactggctcctgccccctcactatggtgattgcatcaaatatcggcctccccatcagtacaacacgttgtaacatgggctcctttgtacctggctttaatccaagaaagttgttgacttgactctttcgtgatattgtatagcctggtttgtcacagtctttatttctggaattgtcagtgctgccatcttggctgtcttcaagtatgtcatcctc

SEQ ID NO: 70 - DNA, 1850 bp, Homo Sapiens
aaaccaaacaccacatgttctcactcataagtgggagttgaacaatgagaacacatggaaaagggaggggaacatcacataccggggcctgtccgggggtgggggctaggggagggataacattacatgtatacctatgtaacaaacccgcatgttctgcacatgtaccccagaacttaaagtataatttaaaaaaagaagtatttccagaatctcatataaaaaaagaaaattaaaaatgcagtttatttatgtaaaagatcagtggaacttaaagataatcactgagtgacttacagtaaaaattaaaaaatgaaaaagactagtgtactacaaaagagactatctgaaaaaaaagaaatatcacagaatatcaaaaacttgaatgggaacaagaactctgcagtttgagatttctgatagtcatgaaaaagaagaagacctgttgcataaaaaccatttgatgcaagatgaaattgccaggctcaggctggaaatacacacaataaaaaatcaaatcctggaaaagaaatacttaaaagacattgaaattataaaaagaaagcatgaagaccttcaaaaggctctaaaacagaatggggaaaaatcaacaaaaacgatagcccattatagtggacagcttactgctctgacagatgagaacacaatgctccgttctaaactggagaaggaaaaacaaagcaggcaaagactgacgaaatggaatcataccatcgtagactgaatgttgctctacatgatcatgatcaaagtcactcaacagaaagagaccaagagcttgatttccagggcacagtagataaattgcgtcatttacaggaaaatttgaattctcatgttctgattctttctcagcaactttctaaagctgagagtaagtccaggtgcctcaaaactgagctccataacacaagagaggctctgaaagaaaacgctttggtttttgaacacatacaaagagagctaaaccaaacggtgtcaaatgaaggacattgaaaaaatgtacacaagtggccaagataaagtagaaaaatgcacagaaaagcaagtaagattatgtcaactacgaagacaaaatatgttgcttcaacagcaactggatgatgttcacaacaaagctgacaatcaagaaaaaacagtaattgatagtcaagccaaatgtgatgctacagcacaaaatcttcaagctgagtgcataaagcaccgtcttttgctagaagaacaagaggatgatcaataaagttaatcatttgaaagaaaaacaatgtcaatatgaaagagagaaagcagaaagagaagtagttgtgagacaacttcaacaaaaacagggtgacgtcctaaacaatcaacaacaaaagctttgctggatgcttcattgcgtcactgcgtccattgagaaagtgagatgtaggattcaaggaagaaattaggtcagatgagaattcaatttcaagaaaaatggaatcaacttacagcgactataaaatgtactaaggagacgcaaggccacgtacaaaaacttgaaatagaaaattctagtgttaagaaatacaattaaaaagcaagatggccaaattgagcagcttcagaaaatcctgcgaagttcaagtttgatgcagcagttattgcaagaaaatgaaactacagaaatagatgaagcttcttctgaatttaaatctggatcctctgtagcagaggttcccaacctacaggccatggacaggtccatgacctgttaggaaccagctgcacagcaggagagttactgtggatcttctagatcatctgcatgccatgtgaatcttaaaaccagtttttaatttctacaa

SEQ ID NO: 71 - DNA, 5489 bp, Homo Sapiens
agaagcggactcaaaggccggagtctaagggcctacctaagggtaggggagtgggaagaagaccagggccgtcgttattaggccacacaggcctggcactgagggaaaaaggggaatttcccgaggggagtcctgtggggatggggaaatctttggaggaatccagttattcgagaaggacttccccaccccacctgcctccttcagccatcccaagcagcagctagaacttctgtagttcttcctctgagtgccccgagcctgctgtctgccagaaagactcctagactagaggattggacagtagggtcaaaaccctaacccttggttgaccaccggccttccctatcaggacgccccattacctcccttttcctcctgcttcccctgaaagaggagtctcagcagttatttacaaagatttattacagcacgggaggggttcaggcctggagtcagggaagaaggggaaaggggcagagcagctgggggacaaggaaaacctggcgccccccgctgtgtgccccaccggggacataaactaggcggcattcctggcatcaaagcacaaaacgcaacaaagaggtctctgccagtccatcttccaggcacccaggaggagcaagggtgattaagggaagattcccaaaatgttgaggctatggagaaaaacgccttagtcctggaccctggtagaagccggtgagagaagtggtgacttggaatcctccataggaaagtgggtagaaaaggatctaagggtacctcaaggttctcaggacctcctttccccagatcttagggtcctgccctgtgggtctcctgtgtccaggggagaggatctggggagtagaattgtgaagggcaaatccctgttcccggttttctggattttccaatgtgggctgtctcacatcccacctcccgctgggtgaatggaggaatgactggcaggggtgggcatcaggcagcaagtgcccaggttctctgggtatcagccaaaggtgggcaaacaagcaaacacagaccagccttagtcttctagaagtcagaagccgcagccctagcaggcgaggggaagagcacaaaacagggtgaggatagagtgggtttctggggaacagcgatgtcccctccacttcctcctgggagatgcaggctgggtgcctatgtgccaggctcagagggggaagggcgctgaggttcctccccaggctctgaaaggcaagcagagagggactcagggcctggccccacccaccaagatcccagcccctcctccccatttcacactcccaagccttaccacttagtgctgggtcttccacttggtcctcagagcctccatctctctcggactcatccagagggggtgggcgctcccagggcccttccagaccctggccacaggttgtcttttgcccagctggggatgggaaagaagagataagaacacaggctctgcgtatccatccggctgtcctggagtgtgagctaagtgtctgatggctgaggttaagctttccaggggcatcatggaagcatggagagagaactgggctagaacagctctcccagcaactagccatatggcttacgtaagtcagttagtacctttctgaaggaaatagaaagggggaaattgtgtagattaccttaaacaagatgtaatagtgaataccctgcccagcccagcgccagcacccaggagccactaggagtcgtggtggtttatattgctccatcataggactatcatttgacccggtgcccttctgcattttttgtttgtttgtttttttttgttgttttgttttggttttttgtttttgtttttgagatggagtctcactctgttgcccaggctggagtgcagtggtgcgatctcagctcactgcaacttccacctcccaggttcaggggattcttctgcctcagcctcccaagcagctgggattacaggtgtgtgccactgtgcctggctaatttttgtatttttattacagatggggtttcaccatgttggctggactggtcttgaactccagacctcaagtgatccgctagccttggcatcccaaagtgctggaattacaggcatgagccaccgcacccagccacctgctgcttttcctgagggaacagtctcctctcacccctcttccactgttttggaggggtctcagtgaggactgattcaggtcttccagctgtctcttgcccacaaagggactgaagcccagcaacagcttttgcccccatggccaatctcttcactgccagatatgcaggcaggaggcccaaggccttttgtttgtgtggaagagctgacagcttctagtaggggtggttgactcttcagtattcccataaataatgagactaaaaaggttaatgggccgggctggttcttgaattttaaattctacatctaaacactagagggcaccctcccactccatcctaggaaggaaaaagaggagaaacagacaacagtcctggagagggcaagtaaatgaggcagccctctgcaccccagcagagaccacatcctaggttcaaaaatgtaggtgaaatgcaggtgacaggggtgttggactctcctggtcctccatccctgaatgtcctcacgcccccttactgccataggtgggaagtcctcttttggctctagcctcaaaccccaaacggccttggccttaattctcagggaagagaggaattattagggaaaacctgattgggagagggactgagccaaggatggaggaaacccatgtctcaggtagggctgagttcggggcaccccatggagcgagaagacagggaggcccctgtggtgtcactacagtttgcgtgtatgagacactgaactagaaggggacgtcctcgtatactcaaggaggacccacagctaatccacatgtcacaggcccctcagcttaccagactgcctgatgaccttcaggacttcagcctggctgtcctcttcttcttcctcttcttcatcatcctcctcttcctcctcatcttcctctcttggataacccagctcccgaagctcccccagctcatcctcctcctctgaggcctggttctcattcaaattgctgatagactgcaggtgagactcagcaatgcgctgcacagctggcacagaggagaccgaggaaagcaagggtcagctagacacagcccatggatctggagatagcctgtggcctagcccccagcctccttcccgtaggcctggggcagagaataccccctcaggggcccaagttcaaaggccaaagttgacaggtcagcctgatgggtgtcagaccagggcagaggcagccaggggtagatttgatcatgtttggctcttaagctgtcctaagatgctagcccccaggcagctcccccacaccatagggcactaggctgggcaagaccaggcgggcacagcagcagcttaacattccctggctggagagcttgattttccaagtacccagtacgggagacagtgtctcccagcttcaagcccaggcagaaggcacagggcgtaggaaccagggcctggggatttgccactttccatttcttgggggtgcccagcctgctgagggctcactgcttaccctgatcctacctcccatgcgatgcatagtccccactccctggcactgcccagtcatagatgccaatccacatactcctgccccgggctccaagggacagaacaattccgaggctgaggacataatagtctgcagccagtgcagtctgtgccgggggatgcggcatgctcagatgcggcccccacaatcttgacccacatccccaggttcccagctccctctgcggtgacctagaaagcaacccccccagcctccaaagacctgctcagatagggctgggaagggaacagtgtgggcagctggagacaagtttccaaaagatggaaaggagcaaggggttagagaaaggggccaaggccaggggttctgggggatggcagaggttgaggggccactgaggagaggctgcaggagctggcaggatcttagaacatatgcgacacaaagttcacaggccacagacaagatgctgaggaggggctgggggtggggaatggggagttgctgcagttccttcttggtctgccagtggcccctcccctcagaaggcccagaggggtagggccaggctggaaacctccggcacagtgagcagggtgctatgctcctgccaactcggggacaggcacagagggtgctttgtatgtgcccgctgccccacccagcccccagctcccagcccagtacctcctgctggctctgggcaagctatccaggcaataaaagcacaataaatcaccctaccctgaccttggggacgcggcagagcttcatcttgagccaagtgtgagagctccagccttggagcacaacccctcaagctaagacttagtgctgtgcccctctctctagggccctcgattcttccctgacaagccccaaccctgccgggcaccttcccttgcccacaaaaggactgaagcctacaaaacagtgccctcctggtagagaaggatccatgagggctgtggggggaggtaaggcaggagagcaggtggcagcccaggcagcttccttctcccccagcgggggaggagagttcacttcgtgagccacagtgacaacagaaggtgtgtgcggtgcttgcgctggtgccccgtgagcctccctcgcttcccccacctccctcatgcctcctgggctctctggggtctccccatcactccttccaggctgtctccttctctgccccactctgtggggccccaaactccccccaccacaagtcttccttcttcagttggaaggtccccagccttgccccagactggccacccctctcctgatccctttcctcttccctgcctctactcacctggactctcctaagatgtggcctaaaggggcagttgagggggtgcacaattttgaccactgcacggtgcatggtagcaccctggccctaacatcttcatcctggcctgttcgcccatgcttgcagtcaagagccaggtcttcccctcacatccacccagcctctccctacccagcccaaggtgggagggagagggatttcttaaattctctcctgagaagatgacactctgtccctcatgcctgctttggggcccttccacacacccctctaggtggggaggtccttccaggtgctgagccacactgcccacttgctgcagctctgacccttcattttcctgtcctggggaaagcaaaataaccccttcccttctctcctcccttcccagcctctcctctctgttcccaaccctggcaagtgggctgacaggtatacctgttgaccttggctggtgctgggaacttattaaaccctcccccgaaccacttcccagcatactcttccggtagctctccctcccaacctccgcaggagcggagggggct

SEQ ID NO: 72 - DNA, 15399 bp, Homo Sapiens
gtaggttctttaagcattgacgagctaaagaccattttaaattctaagcctagggaagcttacaatggaactaatcagatgtttttatgtcggtttgttccgagacagtggaagactggaggtcatgtgcttgtgtctaatgtttagcaaaatcttagtgaaacgagggcgataggaatgggggctggggaagacttagatgggataaaaagaggtgcggctggaagaactaaatcactttaaaacttctgaaaataaatgttgaccattgtagtcagaggagtaaaatgttcagagaaatggggatgattaaacaagaacggcaagccagattgagtcagaaaattatcttcctgccagaaattctgtctcccacaacggcatcagggggtggttacttgcccagggtgtagtcagtttttaaaaagcttaagggttaccaacatattcctaaatttcctgaatttgctgtgattccaggattcatttaaactcttgagactgttttactttcggcacgaaatcagctcatgggctttataaatgtagaacctactgcattatagttcttctttttgtttattctaaaactgttagtagcagccagcgtattatatgatttggattgggccatgaacaaccgtaacgagtgataaagcaccctttcctgttccaatgcaaagaacaactatgaaaagaaagtactggcaaatttatcatcttgtagttagttcctggccaaagaaaatggtaaggccattcttttaagcagttaaaaaaaaatggggatgggctcttaaactttggcatgctaaggccattcttttaagcagtttaaaaaaatggggatgggctcctaaactttgacatactaaagcagtcgtcatttaggtaaaatctaagtcttaatggaaatcgtgatttcatatctactgcagcgttagcaatcacataatgataacttaaatcagtaaatcgttgaactcggttctctaatctttgaagaatagaaatactttttatcccaaaagatgttttgagaattaaatttgcagagaattttttaggtctttagttgtaatttatagagctaggtcttttaactttagtggaaaccatgccctccaaacccaagtgactggagtcagaatgtgaaataagacgacataaaatccctatttcttaaggggctgggcgaaagtaatggaacaaaatgtaacgttatgctattgtggcagagatagctaatggaatgtttcatttctaagtctgtaatttcagtaattgttagaggcagttttccatcaataagttagatcaaatggttaaacccaatatgaatttataaaagcttaatttaattttggattgatttaccagatgtttaaggtggttataatgggtagtgttgatggtggtgcttttggaaaaatgagtattatatgcctgctcatccctttacattatcttatcatataaacttcttgattactcgttatgatactcttaaatcgtacatttagaggaaaaatcttaaagtaatctgtaagaccatttctccttaaaatgatatattatgagatgaaaggaaagataaagataatttagaagagatccagaagtggactaaatttctggtaaggagggggctaaagatgttaaaagacatcttaggaaaagcatatgatttataacttttaaaagtgtcatttagatggttaaggatttgtgtttaatagttctcttgaaaatattgttttccaaaagtttaaaagccctagctacttttatacatttgcccttaaaaaatgtacagaatttattacatcaaactgctacaaagaaataagaattctgatttttgcaagtaagttggaaatcaacgtagaggacaaaaagtggcatagctatatctaaacaaaaaagtatgtaattcaaaagttggtccacaaagaattgaaagcctttcaataactaatttaaatgatagaaagcagtatgtatatgcaagtacatatgctccctgtatagagagtggttagtaagtaagatggtagcctaactcactggaataaagagatccttggagtcccaaacctcaagactaggagtcttaatgcagttaccaggctgcatgcctgtacccagagaccatactagaggctgtgggaatcctcgattactgctcttagagcccccaacttgactgtttcttctgtacctggtacttttttcaaatatttcaaattgcagtgatgcatgggagatacatttagaaaacataatgcaggggaataaaagcagttaaaaactaaggacagtttctactgatgaaaataaaaaactgctacagcaacatcttttcatcatctgtaaacatcatacccccaaattttcctaagttattatctaacctcatcagtagcagatggtgaattatttcatagaaaatcctggaatgtaaactctagatactcaagaaaacctcttttttttcaatgaaggtatattatatttaaaataataatgatgcattaaacattatgggataaagaaaatactttccatagaaattaagcaatggcctaggcaaagagaagtaaccctttagcattaatactatcagttagacagtgacatttattgaacattccctgtgttgtgtattaagaattggactacctatatcccagtcaacaattttttctggagtttagaaatagtttatgcttattttctgtgttttttattaccaaattgttattagtttggtgcaaaagtaattgtggtttttgtcacttacatgatggcaaaaactgcaattacttttgcaccaacctaatagaaaaatacaaaatggagaatagttttcaggttccacaaagcatttgctggaaataaatatcagttgtctaaataagtagtacttgatttattactatgattttcgtagggttccatttctggaacaatatcatattaataaaccctttcagtgagaccattgtgtggtattgcccaaaaaggaaaaaaaaatgtaatgagaaaggactaaggctaataaaattccataaatactattataaagaaaagtataatttgactgagatgcacaaatgcttacttgataatgaggtgtttttaaggaaacttctattaaatactctttttgagtttaatatactatgaaacaatgttgtcttttttttttttttaatgaagatttccttgacttccaaagacctttgatgttcaagcaaaatgtagcaatttggtaaaagtaaagggtgcatttcgaactgaaataaacataatgtcctattaagacctgtattatattttatggaatttaacttagaatgtaagatattagctctgcggttttacaagcttgtttaaattctgcaatgtagggcaacagaaaatccaaacaaaatccattaatgactatattacttctttatttttctttttaaatattatatgtggccagtcaggatgaagttttttttaaactacatttcctagttggacagatcaagagtaagctccagttttgctataatctcgttttgtgattgctgacaagtctattactccctcagttcccctatcactaaaaagaaataacattgtggtaaagaggtgttaaactaccaaatccactgaaaaagtatggaaaaaggtcacagatgtggcagctttggcatcttcagaagaaaagatagcaactcaatgtgatactattggcaataccatttgttaattgaaaaaagaagaagaaagcagttactagacatccatgattttatggagaagccatattctgtcatagatgagctatttacagacattcaatggcacattctttgacaaagtgaatcatcactgtctagtctttcttgtatatgaatttgaagtattgattaaagttgtagcatacctgtaattttaaactgtaaaactctaacactcacaaaagaacattgaaagactgcaaatttctagacttggaggttataattccttctgtatgttactactatcagcttataaaattttaaaaaatgtgagtgtagaaacttatataaactgtattcacacatgaaggatagcctaaatgctccggactgataatctgaaggtcattctcacctggctgattgaactacttttattcatagaagccaaagttttgaaaggtacagatagaatcttgactaccttgcattcgcagttacgttttaattgcaaaataacaagctctttagtcactggaaacaaaacacttttagcatttaactttataatacttgaaatcctaccttgaaagcattcatactcattaaaagctcaacacatgatccatgtttacataaggatttgggtgttgcttaaaatgatcatgtaatgagctgcttctctgcaaattaatattcactcccttccctcatccttaatgtgggatctttgaaggaaaaggaagtgaccaaactaaagacatagggaaatgcaaaatcaaggtgaaaagttacccagagggttgttttaattttggccatcaaccccctagtgaataatggtaacagtattgttttgagacccattttgtggcatttacctattgttaaactaaattgactagatgtaaatatattttcatcttcagatatttagaatttctatccttccccattgtttctggattttgatactaatcttttttctttgcatattgtatatatttactcaacaactaatctaattttagatttttagcttatccacatttcatttttgtttatttcattggtatttcatcaatacaatggctctacccttcaaggaaaaaaaacatcagcccgtcccacaaaaacacatatattcaagaaagataaattacattgtgatgattcaatcatagtaagtattcaccactgaatttctttaagaataactactgtgttcaaaataatttttgtactaatatttcatttgagatattttatttctgtggaataaaaagatttatcatagtaacatcaagcttgtatcttgaacaaacagctccaaatataataatacaagctctacttcatgcattcaacatgtatttagaaacctggctgggcacagtggcttacacctgtaatcccagcactttgggaggccgaggtgggcagatcacttgaggtcaggagtttgaaaccaccctggtcaacatggtgaaaccctgtctctactaaaaatacaaaaattagctgggcatgttggcaggcgcctgtaatctcagctacttgggggactgaggcacgaaaatcacttgaacctgggaggcagagattgcagtgagccaagatcacaccactgcactccagtctgggtgacagaacaagactctgtaagaaacctactgtgttgacctctttgttggacttggggaaaatagttgtgaaccagaaaagaaaagcaaagtccttgttcaaataggtcttatattttagtaggggaaacaaccaccaaagaaataagcaaaaaaatataatttcaaatattcataagtgttaagaaaaaaatgaaacaataatgcaaggtgggaaaggagacagtgtaccttactcagatgtactgtaggtaggcctgaggaaatgttctttgagctaaggacaagctcatcaggggagcatttgattaagggagacagatgaggcaatggctttgtgctggaaaccagtatgtggttggaagggagcagggggcatctgagtagtaggcaagggctagatcatatggacattgttggccacgtaaaggcacagatattttattttaaatgcattgagaagccacaggcaggttataagcagaggattaacatgatctgatttacatttacaaggaaacctttttaaaaaatcttaacctctaatagtttataatatattgtgtattatgtttagagagatttaaaaataacttatatgatcaaagacaagtttctttttgtagggctgtactatttgtgtgatatcaaaatggaagaaatatttaacaatctatatggcatttcttacagagacttaataactttgttgcaaaatgactaaatctttgtaagagagaaatctttttctccatgaaaccttaactttaatttaagggcagtgattttgatatttaagagaagcttgaaatgccccacttaaaaaaaaaacaactctggacaacagtgaaaaagaagtctttttgtttaaatgtaattattaaataagtgtgacaaaaatagagctaattttagggatgctcagggctgagactgcttttcttcagtggataaaaatatccataggcaaatctagggacactttaaataattcaagtagtcataaaagggtctcagaggaggggacctcttctggaagaggtaggtggaaaggccatgcattttgatattggtggattgcttttcatttagaaactactttgttttccttatccagtacaattgaacagtagatgatttctactctgtttcacgggctatttctttattagcaaggttacactcttgagcacctgtggggacaactggcctgggcactttcttcgtatctgcctttatcttctctcaactcaggcctgtatgtacaaaggttaaatttgttcctactcagttaaaatctaaaggaaggccaccataggccattactttctctagagcacgcaaaggtaatctgttttcctagttgaacatgggagaagaaacacctagatgttttataccataggctccaatgtaaatgtgaataggtgatataaattccaagcaaaaagaagaaagtttgcttatcttatccaatacttttgaaatatattactatttgatggcatttggcattttataagatatgataaaaacttaagactaaaaaaagaaggccagatgcggtggctcatgcctgtaatcccagcactttgggaggctgaggtaggcggatcacctgaggtcaggagttcgagaccagcctggccaacatggtgaaaccctgtctctgctaaaaataccaaaacttagctgggcatggtggcgggcacctgtaatctcaggtacatggcaggctgaggcagaagaatcgcttgaacttgggaggcagaggttgcagtgagacaagattgtgccattgcactccagcctgggcaacaagagagaaactccatctcaataaaaaaaaaaggatagcatgccaaagttattgcgtaaattctttaaaaggggtacacatgtgctcgtgttgcatttttgttaaatatcatcctaaaacttagattattttacaacttaattataaagcttacgaatcctgatcatattgctttaaaatagcaccttgttatgggtagaaaaatattacccaaactttatagcccaccttattaatgaactttgcttctagttgacttattttatttatttatttatttatttattttggtgacagagttttgctctgtctcccaggccggagtgcagtggcgcgatctcagctcactgcaacctctgccttctgggttcaagggattctcttgcctcagcctcccgagtagctgggattacaggcacatgccaccatacctgactaattttttgtatttttagtagagacagggtttcaccatttcggctagtctggtctcaaactcctgaccttctagttgacttctgttttcaaaagtcaaaatcattttgaagatgaacatttgtcatttgttgaaaatttttaaaaatgttaaatatgttagaatatcaagtaaaaaaaattaaaattatatcatgccttttaaaaattacatgtatgcatagtaaaagaatttgggagaaatacattggaactttaataatggctatctctaagggatgaggtaataggcttttttttttgctttatatatttttttcaaaatttctgcaatgatcacaaatcatttttatttaaatatattacttttatatatttaaaaaatgtacccacagactccagactaagccaaaaataactttgtaagggtgtattaacaacagccaagattatagttttagctgttgtgatagatgatagttcataaatgctatccaaagataaattgtcccttgggaatagtatatatttgaatgccctcaaagataatattagaaataattggtgccttttcagttgaatcaaactaatgcagagcaacttttaagagtcaatttatgaaatacaagaggattttagaacagaattacaaggacagaaaggacagaaaaataattaaaatattagaagcaaagttgaaagagagtgggacgtcaggaacttttgttctgttacagtctctgcagcattgtgtctagttgtgtgtccctgaacaggtcataatttcgatgggcctcagtttctttaactgtaaaataagagttgactgaacagatgactattttcagtgccaagactttatgaatctaaattccccaaacaaatttggattcttggttttacgtgcagcagtcaatatataaatgggtccagaagatgtctttgcttcagctttggtaacactcaagtgtgctggttattgcctgatttcctcttctctatcattttcctgctcttctctgcactcttgcattccaggaatgggatgttctggctctcattaccagggatccccttgtcttccctgggtttagccaatgagaactgctggcaggaggtcagagggtagtagaaaaaagaatttgggttatttctttccccctccctttgagctagcctgagattctggtggtgatggcattcctctacaactgcgtaccctgtcagatacccgcccatggctctaactttcactgggctgcttcagatccagctgtggtgatggcatcccaatgtactagcccctgaatgcctcagcattccttgtttggcctcttaactctgcccacatttctgtaattgttctttacattagtttgtactcaaaatctccttggaactgtgccttcagtttcctgctaggacaaggtgaatacatccaagtcatttctatttttctgattcctacaactttgctcaaattcattgtttcctgtcatactcagaataagagtcaagtcttaacaataacctacaagatttgtgctgtgctcaccctactccagccacaatgatctccttgctattcttatagcctaccaatgtaccctcctgcctcaggacttttgcacttactatagtttctccttattccctaagctgtttgcatggctaattcccttatcttcaggtcttggcccaaatgtcaccttttcagtgaggacttccctgactacactatttaaaacagcaagcctccacctcccatccctctttttgcttgatttttctctagcacacttataaccttctaatatactacattatttacttattttgtttgttgtctctcttcccatactgaagtggattattccaagagggagagggttttcatctgtcttgttcattcttatattctcagagtgaataatacagcctggcacatactggattctaagtaaatattatgtaaataaatgttccatttttacaacatgctacaacaattttattcaatatttatgaaagtaaagtaataaacatgctgaaaaacatggaacattggtaaagtgggaaattccctgcaatgacagatacttttggaacatgtcttttttttattgtttttgagatggagtttcgctcttgttgcccaggctggagtgcaatggtgtgatctcggctcaccacaacctccacctcccaggttcaagcgattctcctacctcagcctcccgagcagctgggattacaggcatgcaccaccacacctggctaatttttgtacttctggtagagatggggtttctccatgttggtcaggctggtctcgaactcccgacttcaggtgatctgcccacctccacctcccaaagtgctgggatcacaggtgtgagccaccgcgcctggccaaaacatgtcttttataaaggggataaaagagagatactattttacttacaagataaaagtttctttacctttttattgatgcattttatttgttgcaaaattttcagaaaatatgcaaggtatgtattggatcatatgttgaagtccttgagaaaataccttatttagtatttagaaagtataagattaaaatcttgatcaagagtacgcattactttgacactagctattcttaatcgtatttaattcaaggcacattgacatattttaaatatttggtataatggctaaaataacatttcctttgcatagaaaaatctaaaaaatatagacactgtaagggtaaaaacttcttatttagttttttaaatgtaggtctatagatatgtcactgtagtaacaaagtattaggaaaagctctattttgaattcatagagtctaaatgctattgattaataatgaatacttagattttttaaatgtcttttatagactcattgggctttgttttcttcatctgtttggtttggctgctctcatttacatacttgctctcattagggtttgaatttcagagctggcctcactctgcgatgagaacaaatgtcttgccatgtgatactaactttccattacatgctgaagcatttgcagtcccagaggcaaagaatttatggttggtacatgagagatagaaccatcacataaaagaagccaaatttgcaatcatatttttccttagtgctaatatagtttcgggataatgagaactcagaataatcagctaatgaccagaaatgaatcattattaaaacactgtttttctggcataaaatagctaatgtttctagttggttgataattttcttagcaaccatggtatttggcacgtcctaaaccacttttcactagaagccttcagaccccactgaagcagttcattatactctgaaacagttctgagaatcagggagaataatatacaagttttgctgatattctatagctgtatagccagtatcctgtagcaaatacttaaaatttcctacaagatttctcagtaattctccagccaagtaggaaattaagtagatgcagcagaagagattaaaaagtattggaagtcgatccccaagttagagtttggtcagaatttcaagcttgttttattgttttttaaaaagtaaataaacaagttgttttatactttaataatagggtcaccattaatataacatttacatggcatcatatttccaagggattctgtatatgtcccagcttcttgttattactgactatgctctgtgagattttttggcggcatgtattactttggttttggccagaaagtcaaaggaaaagagtattgagaatagcagccaataactatgaaaactcatcacagatttattcatatatctggtcataccctgcacacatatagcactgtatggttgtcaaactcttggcatgcatgatatcatttgatctttataaccctatatctgtgtgaccttgagcaaatcactcagcccatggctgtgactcctgtttggaagctgggtttaatagataccctctcctaagtctataggaatgcttcagaattaataatagagtagttcaatgcattgtgaactttgtaaaagaaaggtattattataaatgcaaaattattttattcacctagcttgggacactaaaatttagggagactaagtgagttggctctaagtgtttaaccacattggtcccaggaaacacacagaaccatggattaaaaggttgatgttttctagtttagataagaagcatgagattttatcataaagggcaaaatactgctcataagtagagaatattgttttctaaagaatataaccaaatattcattctgaaccatgaactcactaatttaatttaaatgtgtcaaacagtatgattttattagttattgatcaatattcaggctacatgtaacaatggatgacaaccagttttcttgaaaagatatccaatttggaggcaattaatcccagaattattatgaattacataaactgagaagataaattggtaatatttctgatcaaaataatattttccaaatacatatattttctgagtaatattgtataaacaataaagtggtcaaccttgtcactaatgtttcatatagctcacatattagaataaaacctacttaagaacatcagatatttgataagatgtgtcagtttcaattaagctaggttttgcaccagcctaataaataaagaacaataattcagaagctaggaaatgtaatttcattgaaagatggaaaggaataagtatctagcatgagccaggcagtgtggtaaatacattttaaatgtgactttatttaatctctacaacagctctgtaggataaacattattatctctaatttagagataaagaaatcgaaccttcaagagattgagggcttcctcaagagtttgtaaatcagagccatagttgacctggatctgagtgatacccaggtatatgttctctccattactccattttataatttaggaaccaccagatcagatgttcccaaatttgtgaagaggaactacattctggttttttgttttgttttgaaacctcatattggtggagggaggggccaggagaaagaggttgaacctgatgtggatgaatgtgaggataagggcccctgatagtgaggggctacaggcatgcgccagcagggccggctaattattttttttaaagctcttgtagagatgcagttcctcactttgttgtcccaggttggtctcaaactcctgggttcaagcaatcctcctgccttggctgcccaaaatgctgggattacaggtgtgaggttcttcacaggggaatgaagtgagcagaaagtagctgcttgccaagtgaaagaagcaatggaccaatataggctttgaggtgcacttgtaagctggtgtgttgggaactgccgacgtggttagatgatgctctctgatggtctttctgttatattaaggagtagagatttttaaatattagataattttatgtttctattgctaaattggggttgagggggatgttggtctgtcattctatttcacttcaaatgaagatgcatttttatctggaacgtatgtggaactgtcttggaatttgactctgccgggtcagattatgtccacacagcatacaagcaaattcccaggataccaggttgctgtttgaggttggctgctgctaattcctctcctagagaagaggacactctagttctagccccagctctgcaactggcagatcacctcagctctctgggcctctgttcttcctcctctgaaaaataaggaggctgaactagacaattcctaggcctcactttcagtccttctgttctgcagttccatgagaaacagaaagcacagcttatcctttaagccctctaaaaggcaaaaaaaaaaaaaaactaaaacaattatcttccatggtaaaactgtctgctatatacattttaatgttccaaaggattaaagtccatcaatcttgtagacttgttgggaaacaagtcggttggcattttcatagactttttatttcaccgtgttttagcattattagaaaatttttctgtagaggaaaattttgctaggagttaattcaatttttttttacatctgattttgaaatttaaagtaaatcacttgttttgagtatcttatgtagacgctttttaagccacaaataattttgtcaaacttcgcaaaagtacactctgccctcagaagttattttaggtacaaattacttgttatgttaaattgaatagatgaaaatttaaatgctgtaatatttaagttattccaacatatacactttgatgatgaatacatgctaactggaaacattttactgtagtcttactttatgcttttctactaataatgttcataaattcatgaatgggtggataatcttggcaagaaaatgaaaaggcttttaattgtgtaaaaatatggatttgtcttcttctggagttgttgcttgctcagcagacacgtgttgagtcctgctaacttgacaagcactgcaccacttgctgagattacaaagataagtaagatatgctctgtggctctggaaaatcaaaagctagtagaagatgcctgtagttcatctggaaaaagagagcttataaagttttttctacaatatgacctcatttgaacatatggggtgcagttattattttccttattttacacaggaaactgagtctcatggaggttaagttataatgctcaacttgttattacttgcccagtatctgttgtcccttaaacaaggactgggaccatgtctatctttttcattctgtagttccagtacctagcacagtacctggcacataataggtgttccatttgagcacctatttgatggattaataaatccatcaaacatatttgatggataatatctccaacaaatattggatcataggaaagcattactagcattagtcttcttactcttgaagtaagtactctttcactatgccttgctgcctctgtaattataaacctgtttagtattaacaggatgaatgcttgtggtatggaaaaagagctatatatgctgcctaattttttaaataaggaaagagattgcctttgaaaggtagaggctgaacacccttggaaaaacaataggataaatcccccagaactcagacatcttgatactcaaccacaaaacattcttttctttatgaagaaataatttggtcatatgtgtcaagctttctcattatttagtggtttggaatcattttaaattggccattagaagtaatggcagcaggtttgagggtctagaagtattatatattgtgtactttatcagtaatttttatgatatttatgaagctcagtatggctgatgttaagagacagggttattagcacttcagaacataagaatggaatttaaaatgaccttagaaaaattgagaggtgttgatcctaaataggaacacatgtggggagaaaagacaaatgcactgtaactgcagtatgcaactgtgtcagggaggaatttagaagaccaaattcagaatcacaaagtattaataattcttgtattacattcttcagactattactggaatactatggtcagtctcagtcccaccagtttaagagatttgtaacaaattgtatgagatttagagaatatagaaaataattaaaggttagaaatttaggaatgtgaaaacatagaaaataagttgaattttagtcatgtaaggtctcaaaatat

SEQ ID NO: 73 - DNA, 2027 bp, Homo Sapiens
atgtgcccaaaggctaggctgctttgtagctggagtagtgcccctgtggccagggcgggtaggcaggggcagcctcagagttgatacccatgtggaagggtcagcatctgctggtccctggtgggctccgccttcaatgtcagggctaccacttggacctgtttagtgagcactggggtctttttggatgtcctgagctcagcgctccagaaaaatttaatattgcccaataaaaagccttgagaaagacagaattgcttgtggaacatgcatgttccaccccacctggaccccagattgtgcgcatcttcgatgagctctcagattccttgttcagagtggctgacttggatgaacacaaatgtggaattatgtcaaagtttgcaaaaattactagctgattaaaaacaaaacaaaaactaggcaagtggcctaactgtttatgtttgattttgaaattagtggaatccatctagacaaagaaaagtgtaaaagagcagtggacctcaatgttaaaatcttggatttgagtagtacatgtcttacggcaaacaactttcccaacaagattgagaagcatctcttactagaacacattcaccataacttttatctgatggggatcgtatcataattgatggtctccatgcagaagcaccaggcgacttggtgtgagaagctgcttacaaaatttttcttcatccctatactggtcagttaaaatgtttagaagaattgctcagcaacagagatcctctgcaaaagttggtagggtattctgtgttttccagcagggctctccaaggaacaatagttaaaaattcagagactgtcatccagttccctgagaaactctctgacaaactttctgaaagaacttgaaaagattttgagatgatacgacagatgaaaagtgaaaaatgaaacagaattctcaaagttccaaagtaatgccttgggacccccactaccagagtggtgtgattcatgcacaaaggtataatattgaccctggcttatattgcctgtttttctcccttggagcatgcatggaaggcctgaatatttggcttaacaaactgttggagatttccttatatgcagagtagcctgcaaaaggagaggtatggtgtgaagatgtccgaaaactggccatcattcatgaatctgaaggactgttggggtgcatttactttgatttttttcagcaagcagacaaaccacatcaggattgccattttcgaatccacagaggcagattaaaggaagacagagactatcaactcccagtcatagttcttatgctgaatcttccccattcctcaaggagttcacaaactttgctaactcctggaatgatggaaaatcttgaccatgaaatgggacatgctatgcattcaatgctaggacgtacttcttaccaacacatcaccggaaccaggtgccccattgattttgcaggggttccttctattctaatagagtactttgcaaatgattattgagtaaccagtttgccagacaaaattagaatgggcagccactgccaaaaaaatatggtgtctcagctttctgaatctaaaaaagtttgtgctgcagctgatatgaaacttcaggtcttttatgcccctctggatcaaatctaccataggaagcatcccctgaggaattcaaccacagacattctcaaggaaacacaagagacattctgtggcttaccatatgttccaaatactgcctagaagctgcggatcacctacctcatgggctatagggccaaatattactcttacctcatgtctagggcagtcacttccatggtttggaaggaatgttttctacaaaatccttttaacagggccaccatggagtgctattgcagggagatgctggcccacagtggaggcaagaagcccatgctcatggttgaaggtgtgcttcaaaagtgcccttctattgattactttgtaagtgcccttgtttctgacttggatctggactttgaaacttttgtcatggattatgaa

SEQ ID NO: 74 - DNA, 1773 bp, Homo Sapiens
gaataaaggaaattatttgcaatatatttatcatataaagaacttgtattaatcaataaagacagacaatcccgtagcaaatgaacaagacacttcacgaaaatgatattccaatgtccaataaatgtatataaaagtactttatttccttatcagagaaatgcataccatttcaatgttattacaattacaatctcaccagaatggctagaattaaaaggattggcaacacaaatgcagaagatgccagcaactggaacttttttttttccccagatggagtcttgctctgttacccagactagagtgcagtggtgctatctcagctcactgcaacctccacctctcaggttcaagcaattctcctgcctcagcctcccaagtagctgagattacaggcactcgccaccacgcccggctaatttttgtatttttagtagagatggggtttcatcatgttggccaggctggtctcgaactgctgacctcatgatctgcccacctcagcctcccaaagtgctgggattacaggcatgagccacagctcccggcagcaactgtaacttttgatgcaggatttttcttctcggtcactttgcaaaccgggacctccggccagcgatgccccacccgcgccctgctcagccacgctggcatgccccagctcgcctgtgttatagcttctatccgcgttcggcggttcccaagctcttgtacccacgttcggcggttcccaagctcttgtacccgcgttcggcagttcccaagctcttgtaccacgcctgagaagaatgaggatacgttggacattgaagggtgaagagggcggagaagaattttattgagcaagggaacagcaattagcggagaagggactctggggggtggtcgcccacccccttagtcggatggttttttcctcccctcgtggctgggtcacgagctttttataggcttagaataggggaggggcaggtcataggtagtattggaaaaggcaacgcttgatcggttaaaacgcattatttagaaataattaatcaggaaagagcgggggcaaaaaggaacagaaatactcagcctgtgtcgcgggtttcatctgggaccagcagttcagtgtttttggctggaaggtggggtttcaccccatcctcctgggcatttagcagcctccagccgctctcactttcgtgtgccatggacgagatgataaactgagattgtagaggagttgcagttcttggcagtgaccaggtctagagaacgaccactgaggggttgcttgctctgatggaaacgttattcctaggcttcatttctgaatatggatgtcccactgccagctttgggaagccttcaccatctctgcctatacagatggacacactccctgcctgtgctgctgctagactgtgcttacacttccatcacagaatttatttgattgggttatcatggcttctctgctggaatggaagctacttgggagcctggggaaatgcttggctcaaagcacttctgcacttctgatggttggatgactccactgagacccaagacttaagactcacctggtcctatagcccccacccagaagtggactcagcacataagaaccattttctacatctctatgattgcacccctgaccaatcagcagcacccattccctagcccccagcccacctaactatcttgaaaaaactctagcctccaaattttcagggaatctgatttgagtaataaaatcaacccatctgttattattagtct

SEQ ID NO: 75 - DNA, 1093 bp, Homo Sapiens
acagagtctcactctgtctcccacactagagtacaggggcacaatctcggctcactgcaacttctgcctcctgggttccattgattctcccgcctcagcctcccggatagctgggattacaggcgtgcgccaccacacctggccctacagtttcaagatgatgggatgacagcatttctaccttactctctgcctgaaccaaaatgaggtggcaaagtcacaggaacagaagtcctgcttttggtgagactacaagacacctggaacctgaatcacagtgtagaagaacgtcagcagacagtggacgcaaacatgaccccacagagcggacagtctggagcagccagtggatccctccacatgacctgtgtgaaaggaaaggaaaatctcgagaccaaactcaccatgccaaagggaactgagtcatgcaatgcctgcctgccttctgtttccagacagctgtgatccccatgcctgcgttatcgcatgtcaaatgtagacctactgagcgtgagacagatgcatgactggctttcccctaactctgttctttttttttttttttttttgagatggagtctcactctgtcatctaggctggagtgcagtggggcgatcttggctcattgcaacctccgcctcctgggttcaaacgagcctcctgcctcagcctcccgagtagctgggattaccggcgcatgccaccatgcctggctaatttttttggtatttttagtagagatggggtttcggcatattggccaggctggtctcaaactcctggcctcaagtgatgtgcccatctcagcctcccaaagtgttgggattacaggcatgagccaccatgcccggccggctccattctttacacaggtgaaatgtagattctctgagtgctaatcagagcctcatgagaatgtggcctctcacctgtttgcctaccctctttgtttcccttttctcctttctcttgaaacactgaagtccttaaaaccctctttggtaaaagcacaggacacagattctattgtgccttgagtttctttttcccgggcacatgctcaacctcagcaaaataaatctctcagccgat

SEQ ID NO: 76 - DNA, 21562 bp, Homo Sapiens
gccgaggtcctcttccaggattggctacctcctcataaccataagataattaaaacttggcggggggggggggcagggttaaaaaaactttttttatcagtcagaggataatgcaagtgtttaacagatgcttcactattaaaatattttccccccaagtctcaaatattgaagaatctctaaccaggggacaccagtccctacgaagaccttgggcgattttgaagtgcgggcacctcgattccccgaatctgtagtgtggctggtatcggtgttcccctggtttaactagcctgtttgaaggcacagatcattcatggggatgtataaccgaaaccagtcctctccaccgcctggggatcttcactttcgcagtctacgactgcctgtgactccagaaagacaaactgcagattggccaagctgcctgaagacccagcccgacagcgatgcctgtcagcccgcgtcgcccaccagggcagctgctctcccaactcgcatggggggcaccaccccgcctcggtgccctagagctgagcgcagccgcggctccacggggatcgccagggcctcagccctcgcggccggcggcgcgggagtgttgcggggcagggaccagagcgcgatcagagcggccacccccgatttaggtcgccagctttccagtcactgcgatggccactggggcgccccttccatcctggttaaattctcattgtgatccccagccctcttctcggttccccacacccaggaggccggttctccgccgctcaggctgggagaggtcaccgctccgggcagggtggacccccagctccgtctcggaggacctttcgccggaggcgagcaggaaggggttaaccatgagcctcccaccctcacctcccagaccctggtgccgggctaaggcctccgcttccctcctgaggtctcattaggaaaccctcaccgctattttcaacatttcctcaatcaagtgcctttaaatagagctgcacaaacagattggcggcaaaagcgtagatcttgtcacgattgagaccaatccagtatttcagccttgtttgctttgcaattacgggttggcttgtggctacggtgccaccggggcaaatctgcagccgctcgctttctcctctgcgctccgggcgggtggaggaagcgacccgcggagtcactgcagggaggagagggggacgcgcgcggggggaggcggcggagggcggaggagactcgcttgcaccccagggccgcgggcacgcagagctgtgttgaaggacatacttttcaggttcctgacagtcactgagctatacgcaataataaagtgcgtgattcgcgtgtggaaaccagtgtcgtgtccttaccagcttccttttctgtccaccttccctctctcttctacctccgtttcgcttttcttcagtgcatgttagcggtttgctggatttcccttctccctcgctgttcaactgctagcatgatttgttacattttccacagctgtttattcttgtttgactttttgtacaaagtcactttaaatctgctgcagaaagaataaagcacctagccctttggatggactcctgcaggcgtgtggctgtccctggcccacttttaattctttggagatggctcttctgtgtaaatcagctgctgggtgcgttcggtcacctcgtaggccagcctagtttgtatcagcagaacagtagtggactcgactcaggtcgtaagccttatatttcacagacaattaaatcttggctgctgttgaacaaaactgtaatatttactttgttctataccgagaagcacttttaaagtaaaaaagaaaaaaaaaccaaatactacacttcaaaaagaaaatatgacaatgaatctctttttatggattctctctgcataagtggaaacaatatgatttaaatccccaacaccccatcccccttttcagacacagctgaagtgatacagatactgtcttctaacacataatctccctctctcgggagaggcacctgcctgtgctacattcgatttagtttgtaaggtttcaggcccctccccgacccatgtaatatgtaacaaggattatcaaataataaggtcttggatgtgaagtctgctttacacaagaattcaagaaagataggcaggacttgagtaattatgttacaacttcatattactttccaaatgaatacccattttcttctcatgtcaacttctagagatgggatgctgaggcagagaaatatttttatgagactctggagtacatactaaaatgtgcttccttattatttaagaatgtgtaaggtatggacctacatttgtttgctggtggtcataaaataaattcatagccattgtggccaataagcaatctccttcacgctttaaaagtttttggtttataatcccacctggattgtattttcactattctgtatcaccctcctattgcaatattttggttctcaatcttatgtaaagcaaacctcagaaatgatcgtttccataaaattgtgcaatggcaaagccacagaataatattttgagtccatatagccgtgcatgctcatctatatagctcttatacagttttctagctgattgctttggtatttcaagaaataggaagcagtagctacctattttaatgaaagggtaccatttcataagaattctattttcactgaaaaaattggtctggcacattattcaatgcaaaagattataatattactttcacgtgtgttaatctgtttagtataaaactgctagggtgtcttaaccattaacgcgttttgccacactactttcaaatggtgatctgagataattacgaagattttgatgttaatcccacgttaaatgaacaactatgaaaataatcttaaagcattattactcccatatacatgccagcaaacccaattgtggagagaacatgattactttttatctgacattatcctataaggatatggctacatttatttcttttaaaattggagcagttttcaattactttttaacagaattgttttcaacacagcattttgcagtgcccataaaccatagcaactttgtcctgatcgatacatatttttctgcattattattcattagcctctttgcaaactcactaaaatagaatagtattaaagtatgaatatatagagaacaattattaggttctacatatttatttaggtaaaccaatgttattaaaattaaaaacatgtgcctggcatataagtgcttcttcaggaattcttttttggatgcatagttattattttttaaacaaactcagattttcaaacactgattttcttctctgaacgggcattgcattgttttaaacagtagctcctggaataatgccacctttagtattttagactttcaaacaacaattggaattggataaatgctttcagctgggagcactttcctaatacctttgtaggtaatgggattctctatttgtgctgggtgacaaacggacagtgccctggacagactgcctaccctctgcagaatctaccaaaaagtagagttttcccatgagactgcttgtggtccatctaaaaatgaaaaaataatcagagaaaatgcgcaaagccttttctaactacagttatgaaatgatggcttaaagaggtatttagaaaataagagtggagtaatacagaaacaaaatctgaagaagaaagtttgcttaggagctgatgctctttgtctacaaacaagagggtaaggagctggatccaattgaattgaattgtttttgtttgcttgtttgttttcttccattcagtgcctttcaaactgttttttactggatgaagaaactcaaccaagaaaatatatgtcgattcttgtatatgggacaatattagctgctgtgatttttaatactagcataaaatataagaatctttttattactgtgatattgttttttcctaaatgaatgcatagtgtaacaattggtgtcaaaaagcattgaatttttttcagatggattaagctggaataataaagtatatctatgagatgatttctgtaaactctgacttgctgagaaaaaagtgaaaaagctttttctggaagaaacatggcaacttaaccgttattaatctggactaaataaaacaggaaactgcttctttacatttctagtaattttttctgcttttccaaacattgttaagttctatgcaacttgtgctattcaagtaaagatgatgtcagtaataaaattacagaatctaatcaagtgactatttttgctttattacaaaatttatgtatttaattgggatgtttaattgcttagtttttagaacactgaatttttctttttccagacaacagagtgatatttaatgaagtgcttataaagataaatacgatggttcatcaaagataaaatagtcataataacaagatggcatttgagtcaatgtggagtggactctgctttgtaaattatactgctttttaaaagcatgacctaggtatttacaatggggacatctgagaagagaaactcaagagtcctcaacttacacagccaagaatacacaatcatgtaggagaacttgccctcagaagcatttctctattgacattgccatttcttttcctccatctagtacttccatttgctctatttcactaaaaagtcacagaattaagagtggctgctgcaactcactgggctttctctgcttaaaaaaccttaatatcacatggtattaatacagctacattaataattgaaagattcactcagctgaccctatgatttttctaattattgttaactatctgaatatttggaaataattgtatttttccactgactttttctcattgccttgggtactagaaggttttttttttttttttttttttttttttagatggagtttcactcttgctgcccaggctggagtgcaatggcgcgatcttggctcgctgtaacctctgcctcccagttcaagtgattctcctgcttcagcctcccgagtagctgggattacaggtgcatgccaccatgcccggctaattttgtatttttagtagagacagggtttctccacgttggtcaggctggtcttgaactcctgacctcaggtgatccgcctgcctcggcctcccaaagtgctgggattacaggcataagccactgtgcccagccgggtgctagaagttttaacatataacttcagacacaactgagtaaatagttagctgtatatattttattgtattgttatttatattatgtcggctttgtgtcagaaaggatttaaagcacttgtttcaagaattggtatgctatatttttcaaaatctgtgtataaaaataattcccataagtaccactgtaatttacttttcatgtgtattacaaaatcagttatgtgttctggtaaacattttgatcccaagaggaagcaggattacatttagaatgtgacaaattttaaaaattaattttgttgtaaagaaatctttataatgatatgccataaagttattactatgcatgtaaggccgcataccatagtgattaagagcaggtccttggagttagaggcacagtctgaacttgactacaaaagttatcagctgtgtgatcttgggaaagtaaccattctcagctttagttaccacagctgtaaaaggtggataataattatagactctgtcctgttgttgtggtgaacatttagtgagacgactcacatgaggggctggcatagggtaagtacttactcaatatcagctgttctctttggcatagctctgttagagtggcatgccacagttaccttcttgagagccactaagcgtgggaacggtaacagtccacagaatttttggagattggtatgaggaggctgcattggctcccagccctcagggttgacagggtgaaggtaatggcttctggctgtctttagagctcccaaaagatatgagaagatggttctagtgatgacaacccactgttctgtcagtggaaatctagttttatgccatcttcatcattcgtggtgtagtctatcggtgcctgacacaaacgtctagagtggggaaaataacaccttaaagaaatagaatatcttaggtccatgatttgcctgctgtgtttattatgtaccccagcagtaaaatattttaagtatatttatttgcaaatcatacatctgtacatctttactgatatgtacatgataaacctgtgcaaaaaataacctaaaaaggggtaagattaaaatgaagaattagacaaaaggtttaaatgttttaaggtaagattcagcatcatcaacagtgggtataaatccatacttcaaatagccttggtggtttaaaaatcctctggttgatttacctttggattcatatcatcagtgtttccgtcttgttttgtggctgagaagaggaggagcagtgtcagttctgccattttcctgtcaatggtttatgtctgccttcttggaatcatatttaatgaaaggttctttgcaggaatatttttaaaccccttgttcatttggtgaagattagtttagttaaaactggattatataatatatttcaatctaactgagccagacaaattgtaacacatttcaggccatgtgtgcttctaagagggccactgttaacccctctgtggtcaagagctcccccttccctgaggttaccttgtgtgctcaaggcagctgagtaacataagaagaagcaagggtgttgatgccaatggttaccctattagtgaactcatttctgattgtttgtatgaaaacaaatatgatttctgttataatcttctgacaccccattccttggggcaccactgtcctagactctgaaatcactgtggttcctgccatttcttgaccttgacattctgtgacagaatgaaggagaccttaggttcagtggacttcattttctataactagctttactctattgatcacatagtggtatagctcttcagtgtttgcaaatcaatgttcacatatttctgtcatttgaactcagcatctttatagggcaggtagagaaggtctgattctgtccattgtaaagatggaagagatgaaaccaccagtgttgctgactgcagatggaagataattgcgtaagttcacacagcggtagacctgggtttgaatttgtttttgaaagcaatatcatcctgattcttttctatcatgttaacacaatttttaaatgatattcatattcatctgaatggagtagagacagacagttatatagtagttgcaagtttagcttttaaagaaactgccaaactgtcttccagaggctgtactattttacattcccattagcagtataggagtgatcctttttctccacatacttgccaacatttcttgttgttcttattaaaaccaaacaagtggtgctgggaatgcattaagagaaaacatatatattattaatagaataaataataatcaatagataatgtgcaggaaggggatttgcatttacgaaacatctattgtatcctatgttctttacacatattatccctttaatatagttctatacttgcagggacaggttttgcatgtaaagaaattgaggttcagagatgttaaataatttgtctaaagtacacagcatttaaattgtagagtttaaaccaaagggatctggtattaaaaaattccaggtaatgttaaaataaaacaatgcattaaatttgaaagtctttctgttactttttgttccaaattggatctctgtctttggctaaaaatcaaccatgacaacaagaaatgttggcaagtatgtggagaaacaggatcactcctatactgctaatgggaatgtaaaatagtacagcctctggaagacagtttggcagtttctttaaaagctaaacttgcaactactatataactcagttattgtactcgtcagcatttatctcagataaatgaagacttaagttcacacagaaatatgtgcatgaatgcttacagcagctttaataacagtgaaaaactggaaacatctcaaatatccttcaatggaaagacaaacttaaccattctgttaacagttaagcatgtatggttaatcgtggcacatggaatactacttggcaataaaaaggaacacattgttgataagtgcaacagcctgaatggatctccagggaattatgctgggtgaaaaaatccaaacccaaaaggtaacacactgtatggctccatttatatagaattcttgaaatgacaaaattatagaaatggagaaaagaaaagtgcttatcaggggttaaggagcagtggggtggaagagaggtgagtgtggccataaaaaggcaacaaaatggatgcttatgataatggaaattttctgtatcaatgtcagtatccttgttgtgatattgtactgtgtttttgtaagatgttactattgggagagactgggtaaagcgtgcatgggatctctattatttcttacaactgcatgaggatctacaattttctcaaaataaaaagcttaataaaaatgcctactgatcttcaggaagttcagttccctgttttccataactgatctgaaaataggggaaggacaattgagaatttaggagttgtaaactctgaggctgattttcagcgaactactcaaattattctgatttttccccttgattcttattatggattgtaggacattcttcctactattttggagaagaaaaaatgccacctctctatcataggacttctgttttacatatgatttaaaaatctattagctgactaatttacacactagaagatgaaacttggttacattagattccattgccacaatttattttaaaaatcagagttctcatctttcttgtttcttcttcctgccttactttattttcttttttccttattctatttgaacccatattttcctatattgtactgtttagtctaaaaactagtaagcatgcatattgttgattaaattagcaattgacgctcttaaaatgagaactataaagactcttgagcttccacacattatgctatgcttgccatatgcttgggtgttcttattttcggagagaagtaatggagattataaatgttatttttaaaatttactggtgatttgttgagaagataaagtaacaacactattacagagggttgctcttgatctcccaggccaccagtgcagtcaccgagccctctgcaaacacctgataatgctgaagagtgtgttagtcattgtagaggagctgctgtcatgacaaataggggttaaattgtgagaatttcaggatatattttggggaaggattaaataaatcaggggacttgctgacagcaaatagtatctttgatttgaaacacagaatcagagaattgagatgaatcccaggtggtggttgggagtttgaaaaagtcccagtgagttggctgactaagtgtagacttcatttcaacatcattaaatagtctttaagtggtgacttaataattgttgccccaagaaaagattttgctaaatacagaggtggaattaagtatattaatccaagaaacattttatttaaatgattttcctaacagtaaggttggaaggccctagaactgcttctaggagcttgaagtgcatttaatagttaactgtcagaatgaaaaatgaaattttaaatttcaacaatgcaattaagttcttattttcttatgatagtgaataataaatttcattcaaggacgccattggcagatgttgaaaagaaccattttcactccactagcttgcagtggactaagaggtagcaggaagggagattggtactacagatcctgaaaaaacaaaacaacacaaaacaaaatccacaccacaaatggacacttccagatgcttaccaacaggaagtgccttggaggacaagggctgtgagacaggtgaactctagggaacaagaattcctagttccatgtctgtttacaagaatttgtcatgactggttcacctcactttatagtttcctcagaccaaagagacaaagaaaaagcaaaaaacaaaaacaacaaaaattctgaaacgaatggacaatacaaccaaaactttaatatgaaccaaaacaaaaattgggctgattttatgaggttgacttaaagtcaggaaaagaatgataaacttttgagaggaagaaagaaatcatcaaagccacgaggagctcaaagtggtgtttaatagcagctatcacattgcgcccgagccttgaccacttctgacgcagctgtttcgttttaagatgttcccattcctgttccactcacacagtcctccacagtgacctgagtgcacgcacccaagccggcaggccactctagaaaaccgtaaacccctcagagagtcactgcaggaataggggaaatggaagtgatgaaattcaatatagcatttagctgaatcatcatctgaggttaagcccagtgaacaattagcagtatcgggagtctcctcgtacctgtcaaaatcgcaccgacgggattttgtgcaaagtatgtatgtgtgtggaagttgttttttatgtttaatagcaatggacctggggtagtaatttagatacaactttttaaaaaaaatactaaagggcaagtgtggtgagaagcttcttactcaggaggatcttttcaaacattgcaaaacatcaggccttgaaataattcattttattaagtagcgcactcttgtcttttcattcacaaaaggaggatgatttattatacagataaatgcttgcataggatgatgaacacctgtaggaatgcatgatattctggaagttgatcaaggtccactgtacaccagtaattagaggtcatgatgatgataataataataataataattaataatggcacatactatgtgtcagctcctgttctaacttcgtttctcatattaacttatttatttttcatgattagccactaagatacaattattatccctgttttgtagacaaggaactgagtgaagctcaaagaagtaactaggatcacactgtcacacaggcaggaatgaaacccatgcagattggctccttagtgtgctctctgatctattatcattcatcacatatttactgagcatctagtatatgaaaggtattaggctttatgcaggcaatactttagcgaagccagggagatgtctctgccttctttgagcttatagcttggtgggcaaaaagctaatggtttaactgtataaaaaacttgatgttgtgaaatgatatatgccaatgtttgcatggtatgatgattttgattaagcaccataataaaaatagggagcctgggtctcacacagccttgattgtcttcttccttctgctccccagtggagtgcgtaggaaggtcacaccctcaatgtcaggctccttcactgttctcagtgagtgtctcaggttgtaggctacatgagcaggtttgcacctggatatgattgtggcagtaacaatagatgtgactatacacagtggcagtggcagtaggggtgggagttgggtgatgggatgatcttagaatgcagtgttggtattaactcagttttgttttgttttgatgtacagccagccatacgactctggaatatgactctgggtttaccaacttggggatggcccggggatttaggagatggccccaatggctctcctcttttttagaaaggactgttcaagttccttttttttttctttttaaacaggatctcgttttgtcacccagatcgggggcagtggtgtaatctcagctcacttgaacctttgcctccctggctcaagtgatcctcctgcctcaggtgtgagccaccatgccaggctaatttttgtattttttgcagagacggggtttcaccatgttgcccaggctggtcttaagctcctgagctcaagtgatccatgtttctgcctcccaaagtgctgagattacggtttgagccaccacatctggtttaagctatttcttctaaagatatagtcacatctattatctttgacccctgcctaagcaattctgttcagatcttaagactatttcttcccgggattcaaactcagagttaagtagagtcaactatatgaggtatatgtgaggttaatttttgaaacttttatttttaatttcatctgggatctcctctagggaagaccactttatgattatgggttgcattcccaagttcagttgattgaatttattcatacattatttaataaatgtttattgagactgaaaataaacttgaaatcctagaattcattggttgtcttaaaaattctaaatatgaaatgctaactttagcttcatgagtatttagaatagaaaataaataattcaaaaattgttcaggaaaaaaatccatgatttattctactctggaggagcatattcaatttaaaacataccgattcgtataaacttattggtaatgaggcgatatactttttatgagaacatatcaaaccatagacattgagatccagcatctcctgagtgagtaaaatgtcagggttttattgatactaatgataatgggagtgacatatgtgcatagagtaagtccatggttgaaagcctggctgattaggcgctgcgttctgtggtttttgccacttgtgtgtgattaaaccctgcagaatagagtctgttgccatgtatttggttcgtgaagaaaactagtaaagtgatattgaatgaatgattcagtttctcaaaagggtagactattggcctaacaccttcctaacttggagctgtcaacgtgtttagtttggttctaatgggagctaggctggagaagagaaaagttttgtgagaaaggttatgtgatattaataagaaccacattccgtttgatgttttctcaaatgattttttttatcttcctaagaaattgaatgattcaaaaataataaatcttccttttctatggcccacaaatgatcaacattttggatgatcaaaacaattttgtctttaagatatcacaacttctagtgcctctttatttgccagtgctgatttacagcagaaagtatcacttcatattttttccaagcatcaaagtcatgtgttttacaaatattcacaagtgcttaaaatccatgaacctctctctgtattcctatttttttattcttctataagtatgtatttaaattggttaaacagatggctttctacttttgaaaaaaaaaaacccactaagaatattcacctcaagatggagaactcataggttaaatttcattctggaatgcacgtttacaaccaggtaattaacctttgaaaatgagggtactcgaaggaaacaaggaaaatcttaacaagatgatctcactaacgctggtgtgttagacttctcagaagtagagatgccccagaagtttaacaatgaaaaactttaaaatatttttaaaaacatagttaatctttgtagctttccagttttcgtcctttattacgataaccttaggaggtaaacgcttcaaggggtgtatccttataatcataggaattggtacacagattttggtggaaagatggaggtgtcaacattaaccagtcaacatatatttgttgactgcctaccacatgcacaagtctcttccatgcttgcgaagagatacagtgatgtgcaatgtgtagaatctgcccttcatgagcttttgatttagttagtctgagaaggaatagatcagtgaaaagttaaaaggaataatagatggagtgttgaggcagtccatgattgttatctgagacattgagtttacaatgctaagttaaaagaatgagagatcactatgggatagaatggacaggaagagttcctctccttgaagcttgcattaagccataaaagacaaagcaattttggaaatgcagaatttggagatatgaagaaagaataattcccagaaagggagaagagttttggagccagacagatctgggttcaaatcttggttctcttgttctctagctgtgtaatcttgggaagttacttagcttttatggacatcttctataaaaaggatatgatagcgactattttgttaattttttaggattaattgagataatatatataaagtgttttaagcacttgataaaaggtaatcctctcagttggagagaacatcctaaacaagtctggaggaaggagacagccagccatgttcatgggacaaaaagaagactattatgagtggagggaaagattaagagaagtagagtgagatcacatggaaagataaattaggattagcttcagccattcacttgtttcttcatttaatactttattgcactctttatgtgggaagctctctcatgtgggaaaccctctgctcggcatggatatgcagagacaaagaaaacttagccttggatttctcttgaatgtcaggttaaggagttggaacttcatgctgaggagaattatatctttcaaaagtggaggagcttgaaagtagcatttttggatagttaacatggaatgtgattcttgtgacccaagatatgcattaagttaccatctcctagtggttgatggttaatgttgtgcctggagatgtgacccagattctcttgtaggtcattcctgacagagggtccattccaatgagtgaggaggaggagcttctgggctgaacttaatctcatctcctgaaataaagcaatgacattgaaatttttcatattgcacttgtgtttacatttctcatctaatctgagatattccacgtttggtgagtcttgctttgggcctgcagtcttggtgacccttattagttgcactggaatagctgtctattcagggagaagtagaatcctgggaatctggtcttcagtgactttctccatgatcatgaatttcatgagaggaggtccccttcctgttagtagatctctatagcaagaggttctgaggcacacaagcacactggatactcacctacagttctagtttaactgatggaacataggtatttctttcatgaaactttgcctggataaacagcttctgtatcttctagtgacaaaattttgcctcctgttttcccctctagctctagtcttaatctctacttccttgttcagtccaaggctcaggagaacccagatcatataagatatggaacctattgcttcctaggatgtccttgtacacagtgactaactgctaatttcaaggatcaatttctttctggagttagaatcatattatattatgtttcagaactgaaataaaattcttttaaggtgattatattttggctctcagcttggaagatgccactggggcatggcatacaagacacataacttataggaggacctcctttaatgcccaagtgccagcttcatgcttgttgttatatatcattttattcctggctttgatgcccacacacagacatatatccacacaaagttcaatctatatattttttgtagctgtttagctcaggtgattagggcattgagctaatgagaacaaggtcacagtttcagtctttgtgtgggccagcaaggtttgctttgttcagaggccacagacctggtccagccagctgtccagcacatgtctgccccaagtcatgagaggacggggcaggagtgtgtggatggacaagagcaaatccatcaccacccttagaaaaagtcaagtcaagcacgtgtcctactaatgggggtcaataatgtctcatttaaatggggctgacattttattacctcttgctgagagggtcttttgagcaccaaatttaaacattgtcgcttttttgtgtgaatttatttctaataaatggaaggttgtacaagaccttagatgattacaggtttccaaatacagattaatgacttcaatatttaagaagttgatgtgatattaaaaaagaaagttcagtatggctattcagttatcttcccttattaaaatctgttttggctaatgaaataaaaagttcataagttcttccgagagtaagtgagaatcattgccttcattcaagaatgaaaacattattattaaactcattgataatgagaccattaaaagttagcatgaagcaggtacaatacaattctttattattgaagtcttcagatattacccagcctacacatcccacctttcatttttaggcaaacaaattccccaaactatattttttttaaatttagcattaggtcttgttaggcttcaaatgggatcaaaaccaatcctttccaaagtgttctaccccagctgtttccctcacctgggtggtagtgagtataaaggcatttgatacagaagggggtggtggggcagagaacagaaaggaaacttggtgagagaatgatgaagaatgatatattagagattcttttaaaattcattcattaaacaaatgtagcataatggaaatgtctattaaattttttggcataggtaatgcacttgcaagggtaaaaacagaaatatgagatggtattttatgaaaagttttgctcaccccgcatccatcatgaacccaattctactgcccttgtatagccatttttattagtttcttgtgtactctttcagaatttctttatgccaatatatcttaaactctttcctttttttcatacaaaaattaacaccctatcaattttgttcctggcagggtgaggtggctcacacctgtaatcctagcactttgggaggcccatgcgggagaattacttgagcccaggagtttgagaccagcctgggcagcttagggaaaccctgtctttataaaaaaataaaaaattagccaagcatggttggtgtgtgcctgtagtctcagataactcaggaggctgaggcaggaggatcacttgcaccagaaggttgaggctgcagtgagccatgattgcaccattgcactgcagtctgggtgacagagaaaaactctgtctcaaaaaaaaggtcttgagcttgctttttctacttaacaatatgttttgtaaatctttctgtatacgcaaagtagcctcatttttcatagttgtatatcattctattgatgtgccacactttatttatctacccccctattgatggaccttcatatagtttctaatattttctattacagacaacaatgtattgaattactttggaatgcattaggtagaaagcattcttctttctttaaacatttgcgtagcattccactgaatggctatatcataacttatttctctagccccctattgatcgtcattgagtttccaatcttttatttttaaagacaatgtcataatgaataactttatacatgtattatcttatatatgtggaattaaatttaccatgtctagataattttatttgaatgcaattaagtatgatatcaaaaattataaaatcaaaactgcagtgagaattcatcttaccccatgtaaaatgactcttatccaaaagagaggtgatcatgaatgctgatgagaatgtggagaaaggggaaccttcatacactgttggtgggaatgtaaattagtacagcactatggagaacagtagagattcctcaaaaaactaaaaatagaactaccatacaatctatcaatcccactgctgggtatatatccaaaagaaaagaaatcagtatattgaagagatatctgcactctcatgtttattacaacactattcacagtagccaagacatggaagcaacctaactgtccatcaacagatgagtgggtaaggaaaatatggtacatatacacagtagaatattattcagtcataaaaaagaataaaatattagttgggcatggtagcatgcacctgtagtcccagcaaccagggaggcctaggtgggaggattgcttcagtccagggaagtcgaggctgcagtgagccctgatcacaccactgcactccagcctgggcaatatagcgagaccctgtctccaaaagaaaaaaaaaaagaatacagaatgaaattctgtcatttgcaacaacatggataaaactggaggacattatgttaggtgaaataagccaggtaccgaacgacatatttcacatgttcccactcatatgtgggagctaaaaattaaaacaattgaactcatggggagagtagcatgatcattaccagaggctgggaagggtagtgggaggaaggaataaagtagggatggtcagtggatacaaaaacacagttagaaggaataagatctagtgttctgtagcacaacagggtgactatagttaacaataacttattgtatattttaaaataacgaaaagagtggaattggaatgtccctggcacaaagaaatgataaatgcttgaggcagtgaacaccctaattatcctaatttgatcgttacacattgtatgccttcatgaaaacatcacatgtgccccataaatgtatactgttatcatgtacccatcataattttaaaaaatagaaaagaattatcacaattattttaaatgaagaagcactaagtaggaaataaggtacaatttaattcagaatagctttccttagtagtgttcaacctactgtacacatcaacaacacgcccttgcagttaacattgttgctggatgtttactgttatgtgtgaccagctgacatgtccctctaaagaaagaggatttaaataagtcatgtatgaaagactgggtaaaggtgagacactgtaagacctagattattttggggctgtagcaatcagattagctattgagtattcattcataaattcattcacttcactgagtcatccacttcttgtcagattctgtatttattcatctcctagtaagctactcattgtgctaaaatgctggtaaacagaagtacaaagcaccagttataactcacagtcttgtagaggaattaagaaatggacaggaaacagtaagggtgcattgtaggtatctcaagaatgatataaagtgttatggcagatctaaggaggaagacatgactttccatagataatggatggtggcatctgttctggagtaccagaaaattagagtaacaaaaacacagcaggatagattttcttacaatgcagtgattcatacaaaggctaccttgactgttagtttgtgactggaaactctcagtcagggctgacggagggagtcctgcccctgccagctgttcacctttccctggtgctggggttgacacttcacatgctcacatagtctggttctgtgctgtctactagggttgagtgtgctgctgggcagagaattttggcatttctccagatgcacatgaggggcagaccgcctcagcagttgctaatgacccaaagaagccttctttcatgacttattttgtcccctcattttattttttgatgtattttggtgagctgagctactaccttctcaggcagtcccaacctcagaaaattaaccatgtagctttctcatatctgacattgcaaattgaggcaaggtcgcatgctttctgactacctgactgcctgggcatttctttcatgcaacttgtttaagccgcccatcctgatccctgttgctaagccaccatggctgcatttggacgcagttcttcccagctttgccgcagcataactgtggaaaggatcttgatgaatttggacctggggagggacgtgggaggaaagagaaatggtctaatggaagaaagtgaacaaacaaagacatgctcacagaaaactgccaagtgtgaggggtgggaaaacagagttcagcctggctgaacgtaggaatctggatgggaatggtagatcttaggctcctgtttttcagcttgccgctctagtgatgattcttgtagatatatttttccaagtaaaaggagcatttccaagtgactgttgtttaaaataaagtacatgttgcatttgtaatgtatgaattatgagtattaaaactgacaatgaaatgagagtaatatacttaattaaaattaattagatctgttggcacaccactagaaggacaaatatgatatttaatatatcactctactccagacctgtccaattaaacttttggccatgatagaaacgttccatatctgttgtccaaaaacagtaacccctagtcacatgtggctattgagaacttgaaatgaggctagtgcaactgaaaactgaattttaactttgtttaatttcagtgaaatttaatttgaatttaaatggccccctgtgagctagtagctaccgtattggacagggaagctctaaacagggttctaaacatgtggaattaacagcacttaagagctggagtagaccttaacctttaccaggtctcaaactttgatttacaaatggggaaatggcagccaagaaggtgaaacaccttgtccagaggcacactagtaggaattagcagaactggaacctggtgtttggatgtcctggctcccggcctgggggactcttgattccaacacgctctctcccagttatgacagagggctgtggctggacccaggtaaggatgctgggttggtagattgagaaaataaggccacgcgtagtctttcaaatcaaccaagcaagagatatttgctgtacatggtggcagacactgagatcaacagagaggttgttgtggtgtgggggagggcctgtaaaatggcataaggagtctactgggaaaaacaggatagtgatagattatatatctctatatttatctttctatataatctaccctgttttcccaaatggatttcccaaatgtgtgtcacttgtatatctggctgtcactggtacaaggtagtccaaatggacagggtacgcaaaccccagacagggctatggaaatttagggagatctgtgtgggtgagtggtcggggagagcttcagggataggacaggcttgacttatattagatagtgtaacacagaaggtaaaatacaactttaggatcattcaaatttaacagtggttgatatgaaacaaacttcttatccagagttggttttgtattcttgctttctgtattaattatatgtgtttactgattcaccacaatcagctatactgtccctagaattttaaaatgtgaaaagaatgtggtttgtttcaggactatttttctgtagaatggtgattgtatagaattaattaatattacagttgcattattagaccacagtaaggtaaatggtcacaaaagaccatacatttaaatcaggagaaaagtaatggctattgttatcctgtaggcatagctgggaaatcatatccttacttggcttgctaaagtcttaacctagtactacatgacagtatctccagagatttttttttcccattcgtaggcacaacaaatgagacccaagtgctcatagaacattccaaagagtcaacagagagaagtggaaagtattagaaacatgattgtgtttgcaaagggagacataaac

SEQ ID NO: 77 - DNA, 1473 bp, Homo Sapiens
cattaatttataatatatatttatttataatatatgtgtgtatatatacgcatatatacatatgtatgtatgtctatatctctatctttcgggttgttttgagaattaaatgacctaacccatgtaaagccctgtgtaccgtgcctggcatgtaggatacttcatcactgtcacctgtttttgttgttatgacctgagcatctccctgttcaccagcccttgttctttagccacaggttgaagatgacagtagatcctaaggaacctcagttctatcccgaaatgcgaaggcctttttactcaaccacaaagaagtggtcagcagaaaactggtcatcccggcctctggggccatgcacagcactcaggaggagctactattttccctgcctgtttacatgcggcctggggccttgtgggctatttgaaaattaggacacgagaagtccaagcagcacctggtaattaaactgagtcctctatcagagagaggcgtgaccttgaagggcatccatacaggagccaggggcaaagcagaaggtgggagggattctccaggcttgaccctctcagcacatctcagtcaggggtgcctggcagcctagattccagccctgcccagtgccacccagagacctgagggaggtggacagctgctcagctgggtgatgggagcctctagaaatagttgtcaacctcatcaaaccagagatgagcccttaggacagccagggtgttgatttccagccaggcagggcattggttctccagtgggatgtggacaaggttcactgcagcctctcagcagatgaactaggggagagacactaccccaaccatgctcccccgacccttcggtgttaagtgaaagtatcttccttttttctctctgctctctccgctttacaacaaaatattatctttagtctgcaaaaccagggccaggaagaatcttcacagctagacagggccatggaaagatgatgaggcatatcaggaactatgtaatcttgtaatacttctgctgcaaaacctcctgacgttctgaatgaacagtcacatgcagcctcttcagtgcaaaactgagctcataagaaagtaaagcaaatctgtaggggccaaatgaagagtgaactggaagtcagagcttcaagtacatgactgatgtggtgtatcccttggggatgggggtgtacacgctggttttgggaagcagggcacttgggtttgaaagttcatccaggacatttgtgtgactctcagtttttgaatattggtgaatagtgctgcttagaacattctggtatgtgagtttttgttgcacataaggtatttatgttgaacaaatatttaagagaaaaattattgaatttaggtatgtataacctcagatttggagaatactgctaaacagtttttcaaagttgctgttcattttaaataacagcatatgggccaggcactattgctcat

SEQ ID NO: 78 - DNA, 3267 bp, Homo Sapiens
agattcccagccatatgaagacaccctagctggacgatcagtccttgtcaaaagtctgacccctcaaactctacagcctcaatggaccagaccctacccggtcatttatagcacaccaactgccgtccatctgcaggaccctctccattgggttcaccattccagaataaagccatgcccatcagacagccagcttgatctctcctcttcctcctggaagccacaagattaggccgagagccgatcagacaaacaacctacaacccttaagctcctggcagcgcccagccaaggccatgcttccttgcaacactccttccaaatggccatcccagcatgcttccaagcaggcttcatccgttcctctggaccctcatctcttaagacctgccgcctataaaaaggattatatcttgagaccctatcctctaaaattttttccacacccaaaacaaaaaatctctgggtcaaaagtctaaaacgcttaggctggcaaccatcagatccttgcccatggtgtcctcaagcctactctcatgaaatggacaacagtacacgcatatggggccagttccacatatttggcaaccagaccagcatccaggacaacacaaagtatgttgtttgttgttagagggcttgggacatttcactctttgccagcctcagcttaatccaggagacaaagattattttccttattatctcttctgcataggatctgcaatcagaactattgaacttctccattcagaccgccactcacacctatgggaaaagggtaatgtatcatcggcttagcaacagggaatactattcgtatgatggaaaatggggacaaaaggctttggtacataaaacattattccttccttggcctaaaaactcatcgccacctacattaaagctaatatgcctgattactgtttttagagaacttattttattagggcagttccaagctcaaaaatacgctaactggcaccttgttagctacataaaaatgcaccctagacccgaaacttactagactcattataaaattttctttaaggtgtccacgcagtccctggtcacacttgaagcagtccggagaaatatcagccctaccccagtaatccccagaaggaacttacacttttttttaatcttttcctacaacttcatattttataaataaaaagacaaaaatgtcaggcctgtgagctgaagcttagccattgtaacccctgtgacctgcacatatccgtccaggtggcctgcaggagccaagaagtctggagcagccgaaaaaccacaaagaagtgaaacagccagttcctgccttaactaattaacccaccttacgacattccaccattatgacttgtccaccattatgacttgttcctgccctgccccaactgatcaatcaaccctgtgacattcttctcctggacaatgagtcccatcatctctccaccatgcaccttgtgaccccctcctctgctgaggataaccacctttaactgtaactttccacgcctacccaagccctataaagctgcccctctcctatctcccttcactgactctcttttcggactcagcccacttgcacccaagtgaattaacagccttgttgctcacacaaagcctgattgggtgtcttctatacggacacgcgtgacaggaacctcaacccaaaggcagtctgatgaggtgtctaagataaaagtagcggcacaaaggcttttgtaaacagaggcgtttcatgtggttttcctttcctttccttatatgtgaaaaggtgacagaaaagaaatcttcctaaaagagtcagccactgctctgtggaacgatgatcatttaaatgccacgtcgatttgaaacgtacaacaaagggactaacagttgagaaccatgtggattgcagtggagacgctggcgttagagaatgcggggagggaaacgttcattacaagatttacggccagcccaagggggagcgaggctgggggaccgggtcgcggagacccggcttcgcacaccttttggaagactcagggagaagcgggggccgccttcggggggaaaggcgggactggggagcccacaggccatggctcctcccacaggatccccaggccggaggcgggatccccccatgatcctcccgtggcccccgcacaatctggggagatgcggagctgcccagagagggctctggggcgacagtcactgcgcagggacaggacaggactcccggagtcccagctgccggcccagccccaccctgcggccgagaggaccgagggccgagctgctccaggggaactcgggtcccagaccccggagtcgcagcggacaggcccgggtcccgccacagccagatccggctggttccaccagctcctcctccggtctcgggacgtccggccccgcacactcagcatttccggcttccgggtgtcccggcgtcctcccctgggcctgctcacgtcgcagaggggcggcgacggggattagaggggaggagggcctgcgcgagcagcaaagaccccaaaccccaaaaaacaaagaaaccgccagaaactgaagcttccacagcccgccacgtcccccggctacggctacgctcctgattggatagttagtacggcccctagtgcccctgattggataccgcttcaggtcccgccccctggggttagaaagacaggagacccgagaagacacttggctgcgtggagcccaaatgggcggttcctggcaactgggcttgttgtcttcctcgtgtcaggatgtaaaaagaaaagtagaggttcttcttcaaagacttccttcttcatctaattaagaataaatagtgtttgaaatgcttggtttttggtgccataaagaaatagcactttaacattaatttatttagcaaggccatttttactccctgcagaaagggtacactcgccagcagttttgccacgagcgtacaccgagcaaaggagacagggtcatttataacctgaggtgtccaccctactgctgtgtccagtttccattggctggaacgggacctcacattctgtgtttgtcctgattggctagcaacttagaacgttttaaaagaggcaaaggtggaggagaacaaaggaagaaggaagtaacttgtggaatgctgagaaaggtaaaaacaccttcaaataaggaagaggaagaggctatgacttaatgcttgcttggaccagtataagcataccagggcaaatatttgggctaaattgtggg

SEQ ID NO: 79 - DNA, 918 bp, Homo Sapiens
tctccttaaaatatggtcttgacttggtttccagggcaccagggtcttggttctctctcgctcacttttctgtatctctgatctctagtgctggagggcctcaggattcagtccttgtacatcacctccactctagttacagtcagattccaggtgatgtccccgcaattctcagctgaaattccttctacatactgatgactctgtatttccagcctgggcctctcccttgcatagccagctgcctactcaacactgctattgaggtatctgatagattgctcaacctcactatgcttaaaaaccaaatctctgatcaccctacccaaatgtgctttactcgtaaccgtctccatttcagaaaaaggcaattccatttttccagctcctcaggccaacatttcagattcattttttactccgccctcttttgcgtcatccaatcttgatcaaattctaccagcttcaccttcagaacacacacacactacaatcttccctctcctcactacctcccctacacccatcctgttgaagcatatgtcatcttttgcctggataatttcaataggctccaaactggtctccctgcttttgcctgtccttctgcagtcttgttcatacagtagtctgtagcagtccttttaacacaacagtcagtttgtttcattcctcttctcagaactctccggagtctttctcttccattcagaatataagaccccatgtcctgcaaccactgctgctctgtgccctccacttccccatggctcctaaaccctccacactcactccactcaaccacacttgcttcctggacacaccaaatactctcctgcgccaagccttgtcacttgctgctccctgtgtctggaatgcttttccatcaagtctctgttccttcatttcttcaagctt

SEQ ID NO: 80 - DNA, 4003 bp, Homo Sapiens
acttttcactcatgagattggcagaaacctaaaaagacgatgatattgttagagacagtgtagtgctgtggttcacatccctcctgctctggacttaccagctgtgggaacgtggacaaagtgtgtaatcctctgtgcctcagtttcctcacctaaaaaatgagtgtcaaacccagtactaccccacagagtcattgtgagggatcagtgtttagaacagtgccccatgcagagcacacataagtgtctgccgtgactattactatttagctgacgtacctgaggtgggtgcgcaggtgtagaggaaagacgttcacgcctggccaggagtgtgaaacgtagacagccatttcagagggctcttgatgtttcaaaactttcaaactacatacaagactccccccaaggtgccccctctaaccctgaaattccacctctaggaccctgaatcccttggggtcaaacatgtttcagattttcggaaggtaacttggcgcatatgccccatcctgtgttactcttccccggggtctggggctgccccatgctgtagaccctctggggtgttcagcccacctcaagtgcaactggggaattctggggagtgaaggcccttcgggtaaccctcagctggtagagcccaggggcaggtgggtaagcgcccagcagcctctagtccttcagagaagcaccccacattgctcaggaggtcctagagaagttgaccgccccctcctgcagtgccctctgcagtgacctccgtaacgacccttgtattatcttctcccaacccccgtctcactctccccggttgctccctcctggattctggtgtcaccttccaaaaaaacacctgcactcaagtcctgtctcaggctttgcttttggggaactcagcccaagacaaccccctgatgaaacacattatttcttcagcaagctgcacacatatcacagcaagtgggagaaacaaaagacgctgaacactctcacgtcaatttgggtcaggtttgctggcaaataggtagaagaaaagacgtatggttctgggagcatttgggtttcatggctgtggatatgggactggactgcactctgcggagcacaaaggcaacctctcttgctgagttcactcggtgtgagtggagaggctcccccggccacggactgcactcagaaggcctgagaccacagcagtcaccaggagttgggccctccaggagctgatacttgagtgtagaagatgtctgctggggctcctggcaacacttgggaagggagccctttgggtggggagacaaggccacaatcgatgggtgctcagggatggccccgctgcagaggtgaggtctgagaagggacttgacaatgagaggaagcctaggacgccagcaccacctccacctcgccaccacggcaggtgctcctgatgggtctcagggcgagcgcaccctctgccagtgacaggtcaggtgtgggctgtgaccagtctcagccaatgagacatcagggagggcccgcaggtggcctcgggcccggccagcctggatgctgaggccgacctatgaggctgactcgaggtggggaagagcagaacaggcaaacggccagtgctcaccctgctccctgccaggcagcactgtggatgggcttgtggcccacgtgagactgagcagggatttctgtcacttgcggcagaaaacctcccactggctagcaagcacctggtccatcccaagggacagactgacaggctatggcttgtccccatcatggaacacagcagagcgccgaaaagaaagagggggtatcctcccgtcctgaaaaggaaccagcgacgagagatgtcatctgttctcaaccaggggtaattttgctccctaggtaggttgccaggttaaggaaataaaaatgcagggcagccagttcaagctgaatttcagaccgtgcatgttaactagatgtcctgtatttactgtggcaaccttacccccaggggacatttggcaatgtctggaggcagttttggttgtcactggggatggttaggtgctaccagcatctggtgggaaggcaccgggggtgcttttaaacatttcacaatgcataggacagctgaggccaaaaaaaaaaaaaaaaattatccagcctaaaatgtcagttgtaacaagggtgagaacccctgtattaaatgaaagatagcaaaaaccccataagaaccccataagatatggtaggatctcatttgtacgtcctgtatttactctggcaaccctacccccaggggacatttggcaatgtctggggttgttactgcggatggggttgtgtgtgtgtgtgtttctttttttctttttacacacccaactaagccatagaatcgcatagaaaaaggtatggaaggtcacatacctaagtcatgtggggtagggagtggtcattccttttactctaaataccttctgcagtgttttattatttgtgaagttaattataactgaagtgaatatatacgtgtatacacacacacacagaaagcatgcctatcaaaacaatagatatttcacaaagtgaacacacccatggcatggcctcctgatgaagatgaagaacatggccactgctccatgaggccctttgcagtcctgccagcctctccctcgagggctgcgaggggaactgctgtcctgacttccaacctgctttgggctccacatgaaccgaattctgcccgacgtcctcgcttgagactggcgtctttccctcagcaacgtgtcatgattcattcatgtggatcggagcagcggttggatcattttcattgctgtgaaatacaccacaatggatttatgcattcaaccgttgatggacatttgggtcgtttcccgtttggcaagatgatgaagaaagctggtatgagcattctttcacacgtcttttcttgggcatatgtactcactcctgttgagtgtaaacctaggaatgaatcgctcagtcatagggcaaatgtgtgttcctctttcctagataccattcgagttcccaaagtgcttgcacgggtttacgctgccatccaccagagatgaaagttccgcctgggctgctgcctcctggccaagcctggctgggttgtagcttttgcgctttagtccctctggtgggtgtgtaaattgctaatcactgtgattttaattcgcatttccctgatgatgaagctgagcactttttcataactttatgggccatttgattgtcctcttttgtgaaatgcctattcgggccattggtccatttttccatgaggttatctccgtttctctcattgatttgtaattaagagtcctgttgcaaatctcttttcccgctgtgcggcttcttgccttttccttcgcttacaacgctccatgctgtcctggaccctagcatcacccaggcctaggtaatagaagggtggcttttgtaaagcgactcaaggctgagaagggaacagacactcttagcacaataagctacaggctgaaaaacagccggaggtgaatctttgcagcgtgaatggtctggctgtcttttataaaagtaactcgattggactagaccccatgagggactctgctcctccgctcccctttccctgaggacctaattccccactgggtcagccgcagaaccagatagagctggggactcacgacccgtgctgacgactggatgcaagaggaggaaggactttggtggagagaaggaatcaaaaggaaccaagaatgtgagacaagaggacttgctggtggggtcccctgctgtgtccccagagtcccagcatgtgcctgacacacagcaggtgcctgattgatagtgacggttccccaaaggctgctggagtcacctctgggattctgcacaggctccaccctctggggaggtgtgcttggtagaggacacgaaggctgcttgttggggttaccttagtacctgggtgaagagtaaaaagtaattaataataacg

SEQ ID NO: 81 - DNA, 987 bp, Homo Sapiens
ggcaacctactcgggttcccttccatggtgtggaagcttagttcttttgctattcacagtaaatcttgctgttcctcgctctttgggtccgcactacctttctgagctgtaacactcactgcgaaggtctgaggcttcactcctgaagttagcaagaccgcaaacccaccaggaggaacaaacgattctggacgtgccacctttaagagctgtaacactcactgccaaggtctgcggcttcactcctgaagtcaagtgagaccacgaacccaccggaaggaagaaactccagacacatctgaacatctgaaggaaaaaactctggacaaaccatctttaagaactgtaacactcactgcgaaggtctgaggcttcactcctgaagtcagcaagaccacgaacccaccaggagcaacaaatgactctggacgcaccaccttttaagagctgtaacactcactgccaaggtccctggcttcattcttgaagtcagtgagaccaagaacccactggaaggaactaattctagacatgctagttcccagatcctgtttctctggagaggcctaactaatacatagacaaagccaaatgactttttcccctctctgaactttgatattctttaaacatttccagctagttcttttaatatttcttgaggatttcctgggattttttttttggtaaatactgtatttcaccagctactccttcaagaacatagtcgtcatatgctttattatccatgaagattattagtgaacccacagttcgtttgtcaaaatgactctaaattcgtgatattcagatgatcacactccataatactgccaccagagccaagttattggagttactactttttatgatcagcacaattatttttctatgaaagaattgttggtattaaaagggccacagtagactatttgctattgaatgattgttggttagtacttaattaaaacaaaaatgttttttata

SEQ ID NO: 82 - DNA, 1916 bp, Homo Sapiens
aacactagccgccaggagcgttgcttctcaacctaggattcccgagggtctgtgccactctcatctggccaggagcgccctagcttgagatccacgagccgagagtagggcccacttccacccctacccctttttcccggggaaagggaaaagggaccataggcccgggtggggtagaagctgggggtcatcacctgtttaaagacgctgccatgtcttaccttgatgtaagacgacgtgtcggggactgtctgaaacatcgtgggtagctaagggtcgggaacgcccaagaaccagcctgggagggagaagcctcggttacccgcgagtggagcgagggagagacggtgggatggtgatgaagtggggatgcagatggagagactgtaggggtttgggaagctcagatccgcctagtccggcgagggagggtccgagtggttgggtgttgagcactctccctacgcctcagtcccgtccccgggcttcaggccaggggacggtgagaactgagagccacctcacaccattgggtctcctccctacagtccttttactctcccctgcccgaaatcagactgccgcctcccccagggcctgggcagtttcgaactggggatgcccgcagcttgttctggaaaccaggatgttctagttcttggtgcgtgttgaggagagaacgcgaccaggacagaggaggatatggccaactccctttgtcacctggagccttcaattcaccggaagaaaattgctgaaattggcaacagctgccatgaaacaggagcaagagagaggcagctgggggcagggaggactcattaaagccaacttacccctcaaaagggagaatggggtggggagggggttcttgccccacagttatgctccctcgccagcctataccaagctgcttccctgggccatagatttgcaatgcagagcctgggtagaaagagactctcgtgtggaggttacagcagcaagagattggaatccaagaagggcactccagtaggagagcaggagaagatatctgggcagtgcccctctgaatcatccatgcactccatcattctgagcaagacaattaggacttagcttccttctttggcaaatgagagggctacattatatcatcatgaaatactttcaaatttgaacatgctatacttctgtaagattatttagcccggggaaaggatatgaacataaggcaaattaatgttctaggattaggaactttgggttccagtcttggttgtgctcctgatgacgggcactatgggctgaattttatcacttccaaattcacaagttgaagccctaagctccaatacttcagaatgtgacgctgatgggatacagggccttagaaagggtgaacaaggtaaaatgagatcatagggtgggccattatccactatgactggtgtccttataagaagaggagattaggtcacagacatgtgcgattacagaggaaagcccgtgtgagcacacagtgcaaaagcagccaccgactagccaagaagggagacctcagaagacatcaacttgctgataacttgatcatggactttcagcctccagaacttcgaggaaatcaatttctgatgctccagccacgaaatctatggtactctgtatggcagctctagtaaaccaatacaactgtggaataatattttgccatgatttggtttctccaagtaagtaaaagggaataaacaatggtgactcgtttcactcaacccttctagaacctactctgatgatcagtatctattatgaacccacaatgtgttttgttttgtttgttttgctttgccatgtgtggctttgtgtataaagcaaagcagtgctcctgtctttatggttcttttcactccacataaaatccaaaaccaccctga

SEQ ID NO: 83 - DNA, 2165 bp, Homo Sapiens
agatggccacctcctccctgtgtctacacgtggtcttcactcctcctttgtcatcttaatctcttcttctgataaggacacccaccagtctgaccatattggagccccgccacgtgagctcagttaactgtacctctctagagaccctatttccgaacacagtcacgttctgaggtatgggtgagtaggacttcaacctatggttttaagggggacagaattcatccagtcatagtcaccaagcttccctgaagctctactagtctggcatagagaaatcagagtgaaccaagatcaaaatctgagggcaaccttggctttccccttctacacagaattggatgacagctaggagatggatctatgaattttctcccctgagaaaccagacgggaccacctagagtcggtctccttcccccaaacgccctggacctaccatgggcacaagctggggctcagggaatacctctgtgctccaccactcagcagctgcttttcaagagaaggaaaacactactacacgccatccacagccaccgcacaatactgtatccctttgtcagggataataaaacagacgggaagtcactctggaacttactatggccttgggtcaaaggcaggctgaccggggctggcagaagaaagctaaaacttacttctctgggattctaggaatttcaacaaatgagaccaacagcagatagtttcagattaaagaaaggcaatgtgttcccaaactttgacccctgtgcacaggctctgcagaaaagctgtcactttgcactcagtttccttataggtaaaatggggataataatattgtctgtctgcctaatttgtacaaggctcttacaagagggtatagcacaaagtaagtgcttaataaatgtgagcttttctttgtattcctgtttcatagtatttgtaactatttcacaagattcagaaaccttgtccctggactgtgatcatcgccttttcttcagtcttccattcacagacccagcctctggtgggcagtcacaacacagctggccatgtccagagaggtccaaaaacctgccccaggtgtcaaagcagctaagaaacagggccgggtgagactctgcctgactctttcattctgccaaatctaagctaagcagtgattcctatgcccacctgggaggggagaaacctgaggcccaccttgtaaatccctacaggctcagtgtgcctggcattgggatgggcagaggagacagagggaatgccaaaaaaagagcagttacaaaggacagaccacaggtccaggatgaggggactttcaacggcttgttcgtggttccgtttttgcccaaactctctcgatccacctttgagcaacagtaattatctctttgcctccatcaactccatttaccatccctgtccaattctttcccaataagccagagaataagagtgcagacattaaaggtcagattttcatggtgctgaacccatttaacccagctgtgtggctttgagtaagctacctaagctctctgagcctccatttcctcgtgtgcaaaccaaggaaaatactcacctacttattagaaggaaagaaaagactgagtacctgccatgtgacaggctttcaacaagggaccacctcttgtcataaacaagaggcacatgaacaagtgaccacgggtttaacttgtacacaggtattatgaaaacaacaagtctgcatttcaataaatatttgttatataaatgaacgggactgttcccagagcctgctgcttggaggaagctagggaataaggaactcaaaaacaaggtaagaatgtcagagcagggaagggaagggaggagggagggagtcgtgaccttgggtcaaaggtaggctgaccgatgctggcagaagaaaacttaaacttacttttctgggattctaggaattccaacaagtgacaccaacaacagatactttcaaattaaagaaaggcattgttcccaaactttggcccctgtgcacaagctctgcagaaaagctatcactttgtactcagtttccttgtagatcaaatggggataataatattgcctgtctgcctaatttgtatgaagctcttacaagagggtccagcacatatagtaggtgctcaataaatgtgagctcttctttgt

SEQ ID NO: 84 - DNA, 1357 bp, Homo Sapiens
catatgtataacaaggcttttgggctgatttccttttgtggtgactcagaacgtctcctcaatcattatattgagaataaaagtaaaaccttctaagattttgctcctcaagaacatttaggtcttagtataatgttcttgtagattgcaggccccccactggttaatgcttaccaacatgttcacacttagcttcactattttgcatttttctttcttccttccttcctttcattctttttacttgttctatgaagaggcctaacttgaaaatgtgacatatggcaaatagagaaaattattcttgcaaataaaaatcatccttttaaggaatccctgcatgtgagtatagggcagaagtggcaaacaaggagcccataaaccaaagtaagcttaaaggcagctgttatttgactattgccagaaaataaaaaataaaactatttaagttagttattgacagttaaaaattcaagagattttatatgaacatcagtatttctggcctcttttggaagattctgaatatctggcagccctaggtctgcgttcacgcatgtcaacacctgttggagctctgtagtggctgctgctgttagggcaagcttcgcactttgccacagtcaccactcctccttattacttatacccagcctgctatcctcatttctattctctcctggcccctcctgtagtctttgagtttgccaccgttgaaatagaattttttttttcattttaccttaattcctttttgcaaacctcagcctttggatctctaatactttccttatctgattcatgaagtcagcctactgattgggattaaaagatgtggtgtagaaactgatagtgcatttcacgttctaaaggtgtttgaggaaattggtagtgataatgagttggaatggtgtaatagccaaaatatacacctaagaagaaaaaaagtaaaaactgcttggtgtttttaatttcataactgatttcctattgttttagacctccttggaaggtaccttgaagtattctgtgaatcaccaaagtggtaatgatttatcaggatacctaactcggataaaacccacaagtcttctttttagtgttccaaatggatttagtagcactatctactggaacttagaaaagaaattggtatgattaataaataactcctattgctgtttaattaaaaagataacatctcaataaggttaaaaattaataatcaatgttaacaacaataactgttttcatttttgtatgactggtttttgtttacatgaatatatactttatattgttatcattacattgtttaagccatgaacattatatcacaagcttttccatgttgcta

SEQ ID NO: 85 - DNA, 3054 bp, Homo Sapiens
caccatgtcattaagctaattgaacaggccaacttttctcaggaaggcggtgatggcaggggagcaggtaataataactttggatttggcaattgtcattcacatcctgaccgacctctgccaccgttcttttctggaactactagatccaccagcccctgccaagggcagggatgataaatgctatgcatggggaagaattattcttgctaatgatctccgccttagaaaacctcagcccctgatgagaccctcagttcatctttctacatttgttgaggcttcaaccaacagaggcaacaagaaagccatttccagcaacaagggcctgcctgtgtcgacagcaatcatgtagaaaccaaggctcagatgggataaccgacttttccaagtccaacagacagtaaggaaaggaatggcgagatcaactcagatcttctcttagccatgctgagggtaatcgccttgcaattacctcttcaatggatattccttgcaagaattaaaactctattaggctttttccaagatagctccttccagaactcagttcatccaggtcaaaaaagcactggaaggtaaattggcaaccactcatcatatcacatgatgttttccaaaatgtaagactgtcccaatcaaaggagctggtagcaaacataatgaacgtcagctgagactctataaaccaaaaaagccctgggttgactgtgttcatgtgacttcaaaagagggtaatctgcagggggtgttcctgcagggcctactttgcaccctttgctaccctttagataccatttgacctcattttcctctctgtgtgatggccaaaccacaggctccctcttctatctggccccatgagcattaatcaacttcaaccttccccaagacctggcaggagagatgcagtacctacttcttaataaactcaaactgtcattgaagatgaaagatgagactgcaaaacttcgagcatcccaactccccagcttgccaagtgctgggaatccggaggggagtgccctcgaggacaggtctctgtggatggtgcagaaaagtcagctagctgccttctcttttttcccttctctttcttcccctaaatgctccctcagtgataccactgtgtctgcagtaaagagagactgtctagctgtttctttttcagcaagacaatttggtgtgtggtctgtggtgcccacacattcttctttgcaatgagtggtgggtgaacagtgttttccaagttggatgttacagtaccataagtagaaacagatctcccggagctccgaacactttttctgcctgagttgggaggatcagcaggctcctgtgtagatggcccagcagattccttgggagcagctttgcagcatttccccactcactggccctcaccaatcataatgaaagctcaattaggtggtggacttccacttttgtaactgccaggttagttatagcattacacgttcatgcaagatgaagctgagatatttggaatcggtacatgtaactatttaaatgaccgggatgctaactgctctctacacattcccacccccaaacccctttcaccaagcagctggtactaagtactgtttacagagagttttcaaaaggcaagtcactgtgctaagcattttacagatattatttcatttcaccttcacaacaatcctatttgatagatttttttttatcaagaaggagaaatttgaagcctagagagactgaatgatttgcataaagtcatgcagttaatgagtggcaacgtcaaacttgaattcaggtctgcagattctgaatatcactcttcccacaactacaaccttaccttttaggcaaattaataaataagcaagcatttcctgagcacctactatacaagaggttctgtgctaggaactttcacatccacctaacaacaatcttgatttttaggggaggaaactgaaggcctagcttgttagcactgtcagggccaacccaggatttgatgtctatttaactgtaagatcattccctcccttccttccttccttcttccttccttccttccttccttcctccttccttccttccttccttcctccttcctccctccctcattctgtctctctctgtttcttttcaattaatcatgtatcaattcagctaaggttagaatcttatctttgcattcataagagataatttatacattatgcctacctcagtatttggcacactgtatttggaggcagttgaatcatgttaatctctgcccccaaatcacctagataagttttttattgctacttccctccctggtaaatagaaaagagatgctctttccagctacctggtgagaagaaagtctgtccaacttggctcgtgtttcctctacttggggagctgtgccctgcaaatggtatagcccagccccttcagggacacttggaagaactgatggcatcatgtcaggactgaggtctcctttcttgtagtttctgaagaattaatgaaaaggtaaactttgcaggatctcaacacacaggctttgtttttcccttacttcttgttttgcaaagaaaggcccctgctggccttttaagcccaaggaaaacttaacaaacacttgctgcaaaacaccttgctttttaccctgcatcaaataacctcccccactccagagatttgcgttccaatctctgcaaaggagcagcgagaggaagcaggatattgagtctcattaagtttctttgctgtgtcagtcatctttcccagagggggatgtaatattctcttcataatattcagcccctctcacaagttggcagctcctttctctcaacttatattcttagctaagaatgtgttcacagggattttttaaaagcctccccaaatacctgtttactgactttctcagagcgtttctgagatggcacaaggatgtgtggtctctgaagtcagcttcttcttgctaatgaggctcagctcagcacctctccccagcactccaggcaggggttgggggagcccgctctgcccctcttcctgtcc

SEQ ID NO: 86 - DNA, 2918 bp, Homo Sapiens
aggaaacacatttctactgtttaagccacttggctgggagtacttggttatggcagcctgagcagactaaaccagcacctcaaagagttgttatagggtatgcttagtggtaactggttcctaaaggccttgctttctaaggctgactcctcaccctgcaaggatgcattctccccactggcagatatgcaaccaggaacaggcattaacacgctttattcccagagttttaatattttccattgcataaaatatttgttcatgaaaatgacaaaattgctattagattctatcaccacatctctgttgattttactttctgcaaacacatacaagtaatgtaggcatacagttaaaaatgaaaccttatcctgtagttccagctactagggaggctgaagcaagagaatggcatgaacctgggaggcggagcttgtcgtgagcccagatcaggccactacactccagccggggcaacagagcgcaactccgtctcaaaacaaacaaacaaaacaaaacaaaaaaaacttatagacaagtacaaaatgagaagaaaaagtccctttcccttcatgcctctacttcctgctgtattctcaaaggtaagcactgattacagtttacttatggatctttccaggaaaatattttatgcatttatcagaaaatgtaagtatatgcatcctttaaaattctgcataaatcaaactctgcagggtactatcttcccatcctcatttgatattttgtagatcttttcctattggctgtacagatcacctcattctgtctcctgggtcatacaatatagctcacataattctaagtctgaaggttggtccaaatggttccaagaatgcaggtaccaaaaagtagtctcttgaagaggccatcagagacctggctgtttgtatcttcctcctctgccatccacagtgtcatcttcacccaaggtggctggagaagctgttaggaatatgtggttttttaaaaattacattcataggaaaaggggagggaagagaagaagaaaacctctccccctaagctcatggctctttttagtcaggctgagccaactaaagtcatgtacttcccttagataggtaactgttgccaggaaaatgccctgtgtggattggcctggactaagcaggatcctcctctaaagagagagatgagatgaatgcctgacccaagtctgggatcttgggtgggaagcgtgtggatagtaggtcagaggtcagcagtgtctgtggtgtaggatgtaatcccatctccacagagctgcatacaagtgtgtttaagtgtgtgcaagtgattaactttgattagtagtttcaactctttacaatgaacatatttatcttttttaaaaaataaagccattttaaaagatcttgccataaaacaatcattccttaagtcaccacttaggatagacctagaatatttgtcctttctcaagagcaccagagagttttctggtaatccacgcaataaacagttataaaaggtaattgttgagatcaggggaagatggcagataggaggcagtgctaatgtgtagctcccacatggatggacaaaacaccatgtggagactcacactgtgaccctgttgtgctccaagaactatcataggaacatactgggaaaaccaaaagaattcacggatcctttgaaagaagacgcacaccactgtaaattctgtggaacaggagaaaaactgtcttggaggaaggcatccttctattctactgatcagaaagctggacaaagtcccactgccaggctacacagttggtgccatttgcggaggtgacctttgacctttaacccacgcggccacccgcccgagctcttacccctgctgcccctcgcgcgtcccactccccgtccctgccggatccgcttccctgcgctgggcccagcgcgccgccagggaaggggccggagcctgggagcccgccccgccgtcgcccgtcctccgcccgcaggcccacccgcagcggtcacgtgaaggaccgagcgccgcgcgcccaggcggggcctccggcctgcacgaggagggcagagtccgttgcggctgccgccccgacgcccgcgcatccccgctcgccgcgcccgccgccgcgatgtccggggccggcctagccgcggtggtgagctgcctgcgcccgcagcccggcgaggagccgcagacccatgaggaccttctcctggcagctgcctatgttttggatgcccagtacaacagaaatgttccatttgaaactcacctcaggccatcagacgttactatttttataaccactagacaacgcaggttgccgcatacttctttatttgtgtagacctcgctcttgccctgtttgaagagcctgagttgcttcccctgcctttcttggccacctcaatagcagaagtactctgcctgactgcatactttggcagactggtacattttgcaaaagtcactcctcaaatggttttctggaaggatacaaaagacatctgcaccatggtaaccacagtggcgagtgttcattgtagtacctgtaagagtttatgaccgaaggcaggagccatgaagaaaaaagactcaatagatttgcttttgatgaaacaacaacacttccatacagtgaacgccataagcacaactgcaagcaaaccgcaaactgaagaacaaatagggcaaaatgtggcagtgcagacatttcagcatatcaagagcacttccaaattacaggaaaaaaaagatatctcaatagataattttgctgaagataagtgaaggcaactcataaggaaaaaatatgtaaaatggccgataggaaagatgtttaacgtcactaattaaaaattatagaataaaacgacaataaaataccatgtgtttgcctataaaacaa

SEQ ID NO: 87 - DNA, 1398 bp, Homo Sapiens
ctatggtctgaatgtctgtgttcccttaaattcatacactgacgcctaatgcccattgtgacagtattagaaagtagggcctttgggaggcaattgggaggacctcctttgggaggtcatgaaggccctaccctcataactggtattacgaagagacatctgaagagctagttagctccttccaccatgtaagaacacagcaagaaggcaccatgtatgaaccagagagcaaaagctctcaccacacaccgaaactgccggtgacttgatcgtgaacttcccagcctccagaactctacagagcagcatctgaagagccacggggcccccaccttcatccctgagaattttaggagccagcctgcctttccaggtgacactggacactttcatctgagaaccctgtcacatgacagttgtttcctttcttcctcctctcctgggaatgctgctgcttcgatgacccaagagcctaagaagggtagctgtttctcaatacactgagagagagttctttctccgtcctgaccatcttgggacccgatggcaagactggaaggatttatatctccttttgtacagaaaactgcctccccatgttggtttgtgaagtgaaatgcatataaaacagaggattccagactctcagaagtcaatacataaataaataaaaataaaactgagaagatacctcaaaatggtcagactcattagcatcatccaggtgtattttctcttcaaacagtgtcagtgggtctctaataaagagatgagcaacatgctgggccaggagatgatcaatgcctgcaaaaagagatcacatgggaactcactgcaaagcgagagataccacttcctcttagtccagaaagacgacaggatagctcaggaagtttgaagaaagggtgtctagaagcttgaaatagctggtttgattagtatcctcacctcacccagtattttatcctgcggacactgcgggagtgtcagcgttttattcactacttacacaatgcctgctggggcactggtgtggacctagacacagacctccaaagtaagctccttttgctaaaaatcaagaaaatctcacaagtatttggaacctgaaactttaggaacaagtagcctcatgagagaagttaaagactttgcactaaaaatagaaaccagaccaggagtcagcaaaaaagtgtaaaagagctttgaagaactaaaggcgtacattcaaacccagaaagatggagtagaaacccaccttcctgcaacagctgttcgtagatctctttatctatcgtcaagtcgatgtcattatatttctcaccacacttagataaatagctgtctattgagtcatatcgggatttactgatcctatagttattgttcttcaatggc

SEQ ID NO: 88 - DNA, 4422 bp, Homo Sapiens
gttttcaggcggcctcctgagaaatgtttgcaattgtaaggcgtctctctcatccaggtttacccagattcgcaaactatggcgacaaacaaccatagcagaagcatgtccggattatttcacatatatcacaaaatcctgcaaagggtctgtccccattggatcacctcccatcacgccacacacgacgtgaatgacttcgtgcttctccatacctgcattgatctctgggtccattgccagttataaacctccaagggcaatagccatgaggtgatgtacagtcaagcatcacttaataaccaggatacattctgagaaatttgtcgttaggcaattttttcattgcacgaacctcacagagtgtacttacactaacctagatagtagcatccagtaaacacctgggctatatggtctagcctattgctcctaggctacaaacctgtatagcatgttactgtactgaatatgtaggcacttgtaacacaatggtaagtgtttttgtatctaaacatatctaaacataggagaggtaatgcattgtgctacagcattacaatggctatgacagacactaggcaataggaattttccagctccattataatcttaagggaccaccatggcacatgcagcccattgttgaccaaaagttgttatgtggtgaatgactataattggcttttcagagcaaccactcacaagggggtgtagtatagcttactagacaaaactgcagccgctgctctgttttttgctcttagaaaactgagtacctgatttggacaaaatcataataaaatttagatagagccaacatttgtcctctggaagtttctgacaagatacaagtcaccgttataatagtcaaatgtcaaagtggtatatctaacaaaattaaaacagacagctaggagtgagaagatttaagaaaattcaggtggcccaaaggaaagccaagacaagacattctctcccggcctttgggcctggattttcatttcagcaggtaacgaggagaccaaaggcctagttatttatggagatctggggccacagcagagctcctcatggcaggataaggcagtggaaagcagactcaacggttaacccacagtcctcctcagcaagctgggagaagcaactgatgccacttagatgcttagaccgggccttctgggagagatctggcccaaggagcagccggcagcttgacacagtgaccaattggaagcacagcagccacacgccatgaaacaaggtgatcatcttcactcatttcctgaggccagagccttccttacgcaggacatggataccccagtcccagctgtgctgaagcgtcaggaagcctcccccgaccccaccctgaacaacagtgaggggggttaggtgtcctcaaaagatctactctgtcaactggagttgttgagaaactcaggaaagggaactaaaaaggataagaaagtggtgcattccagtgtcttcctgttctctgttgcagagagccagctggtggaccgcagagacagacttccagccagggccaagcccttcaggaagggagtcatgcaccaaactcagctaacagaccaccagggcaccactgggtctcctgctggggaacagcacacctatgggtgggctctaggggtggggtggcctggttgctggttctgctctgccacttcttagctggacttgagcaatttgtaacatttcttggctcagtttctccacctgcacaatcaaaatatcactaccttcctccaagattgcattaagtgtgacaatttatgtaaagcacttagtccagtgcctggcacctagtaagtactgaatagtgaaaacaatttaagtctaacaaatccacacaccatgacgtcagacaaattaggcatctttcattgctgttgtgaaaattgcgctaactctaaactctaacgtacatctggctcactgtctttctgtaagaccagtcagagcagcagctccttccttggtaaaatactttaaaaaactcccattcctggctgggcaccggggctcacgcctgtaatcccagtagattgggaggctgaggcgggtgaatcacttgaggtcaggagttcgagactagcctggccaacatggtgaaaccccatctctactaaaaatacaaaattagctgagggtggtggcagacacctgtaatcccagctactctggaggctgaggcagaagaatcgcctggaggcggaggatgccatgagccgagatcgtgccactgcactccagcctgtgcaacagagtgagactctgtctcaaaaagcaaacaaacaagaaaccccaaaaactcccattcctgggcacccattctgattttcttcctcatttacttccctgcccaatcgttgtctctatgttgcaatttgtgggggtcagtcagaactgcttttcttcagaagccactcttacccgttcagtgacctcattcagctcatgctagggcagaatccacagctctttctctgacgtttccacagtgtgaagactcacacatctaactgcctgcagaacatctccacttggatcttgttagattgtgtgggtttcccagaaacagacaccaagacagagtttggggcacaagataatctattagggattaacacctgtgaaaggaaggggctggaggcctatttggcagggggaagaggtgaactgtgatataggcctgtgggaaccttagacaatccagcagggagcagggggaagggagcagggagctctgcagcgaatactgcccaggacatagttcctgggctatatggcctagcctattgctcctaggctacaaacctgtatagcatgttactgtactgaatatgcaggcacttgtaacacaatgttaagtatttcatcagaggtgccccgcatcaggccaaagtggcccagcctttgtgccccgacttgctcagtcatggatgcaagctgccttaagaagggtgtgacctcagacaaagtggctttctgcaggccagttgtggccaggtggaagccatctaccaacttcactccccacagctgagcaagtccctccttgaaggggatctgggtggggtgtctccaagtttgctagattatctcccagccatttcaaattcaacaagtccataaccaaacccttgattttacctggctccccagtgtccccttcccactctttcttctcttaccactttgctcaggccaaaaccaaagtcccagcctctcttccacaaatgccccttggtcaatctatctacacatatccttccatcgctcccttcagaatacgtccagaacccaaccacttctcatctcctccatggttcgacccatactcagccacaccccagcaccaaccccacggataatcgcagtagctccatagcttcctacctaagcgttacccctgcccacttttcttgctctattttctgcacatgcattggcgtgaaatattttttattttattttattaaatagagacagggtgttgctatgttgggcctgattatatttttaaaaaataaaaaagggccaggtgcagtggctcacacctgtagtcccagcactttgggaggccaaggcagtaggatcacttgaggccaggaatttgagaccagtctgggcaacataatgagatgctgtgtctctgtttaaaagatacatataagtttaaaaaatattttcatttatatacaatcagatcgcctcatatgtctgctcaaagccatttggtggctcccattcatactcagaattaaacccagattccttactgtggcctatcagccctgcatcattctgtccctctcctcaacatgatcaactattgctcttccccacatgacatcctactccctcatcactctctaaaccagagctgcccaatacaggagccaccagtctcatatggctactgagcaggtgaaacctgtggctagtccaaattgagatgctgcctgtatcaaatacattgtttcagacttagttcagaaaagagaatgtaaaatttcttttctgtttttttgagacaatcttcctctgttgcccaggctggattgcagtggcacgatcttggctcactgcaacctccgcctcctaggttcaagtgattcttatgcctcagcctcctgagtaactgggattataggcatgtgccaccacacctggctaatttttgtatttttagtagaaatggggtttctccatgttggtcaggctgctctcgaactccttacctcaagtgatccactcaccttggcctctcaaagtgctgggattacaggcatgagccactgtgcccagtccaagaatctaaaatttcccattaataatttttaaatattgtttgtaaattgaaataatatatttaatatattgggttaaatg

SEQ ID NO: 89 - DNA, 1875 bp, Homo Sapiens
atctcttcagaatggcactggggaaacaaaaagattggttggccgggaccttcaacagtatcagagtcaggctaagtaactctttcgaaagttgaatgaacagtcccctaccagatgtaccttggaagcaggagccatgacttttcagtacattattgagcagggggtgtgtgatttggttttatgtgaagctgccttccctaagacgttggcttttgcctacctagaagatttgcactcagaatttgatgaacagcatggaaagaaggtgcccactgtgtcccgaccctattcctttattgaatttggtactatcctgattcctggtaaggaaaaatatattatttccttataacaaggcaaggagaaatgctattttattcctgataatttatatagctagaataatttttttcctttcttttatggacctaaatctgccaattgggaattttgtgcatgaaatatgaagttactttttatagataatcagtgcttttaagtccctaaaaggctcctgctgaagtaatgatgaagttcataataaaagcctttgaaaggctgaaaacctacatagtggtaccatagtatttggagcttctataggagtggagaggggcagctcattgttgagagttgcatgctgcaacctaatggtcagcaatgaaagaaatacttgtagaatgttcacttcagtgtgaagttttgttatctagttaatttatatacatatatcctttgtagatacatttctatctaatcttgttgagctaattaagaaataaggggtggggtaattgtcaacaaagggagaagaaagtggtttaagatcagggcagcagaaaaattagagaacaagaatatcataatatggctcctggttttctttataagaggcagtgggaagatctgactagatgaaatgtatcatcaaccaaactggcatctaaaatagaatgggataaatactgtatggggttattggaggcatattaagaaaggacacctaatttattttgggaagaagtatgttaagagaagactttctagagaaggagaatggggcattctaggaagagtcaatggcatgtgcaaaggcatgaataaagacagtgaggcatgttttggaaatgtaacagcttgattcagcttagcccatagggtaagcatagacaacagaggagacttgaggaatgagaactagatgggtacactatcataaagggacttgtctatcatgctgaggagtttagaccatcttaatggtagtggccaaggatggcatcagatttatagtttcaagtgatcataatattggcataaaagatatattagggaggaagcctgaagtagggagatgaaaataaggagccatcaaaggcagaatgaaacttaggcagatttcaagtgattttcaaaaatgatgtgatcagaggtaccagataataactattacataacactttctttgttaggagcttatttctcacactgaccaaagcttttgaagtaagtactctttacaccactatataaataaaccttacaaaggattctgctttgaggcatgagagagttaagtcatttgcccaaagtcacagagttagaaagtaatagagctaagatttgaacctaggcagtttggctccagagtctgtgctcttacactatattaccaccaagaggtcaaataaataccaaagaatgtattttcgaatttaacaatgaggaacttaatcatacaggcagaagtaattccagagcaccggagacagaagccagattgccatatgggttaaagagtgtgtaaaccactaggaagtaaagacatagaactactctcacaagtgcttttctggttattgtgacgctgaa

SEQ ID NO: 90 - DNA, 1477 bp, Homo Sapiens
gagctattactaacttctccatttgattttttatggatgtgaaaaatgctgctacttgtctatgttattatgtggtatttgttctcttggattgaaatttatgcccacagatttttcttttcatttgaaaatgaatgtgaagatactgtttacagcttttgttaattgcacttttcatcactctgatcaatttcttgtaaagtgctatgggaattatttttcctgtgaatattaatgattttactactgcctccgaagttttaaaaaaggttctgtagacagaaaacagttgttgcaaccaaaaacaaccaaaaaaagaaaaaaagggaaaactggcttacctttctcagatgaattaaatgattttaataacttcccaattaccagggttataacattgctttcttcagttattaatacagtcaaattaattttaacaatataggcacaattcatttacaaattcagtacagtagtccagggctacatgtaagtggtctctttattttattctttacatcagaaaaatcatgaatgtcagttttgccagtattttacaatgaggcttatcgtttaaaattttatagtgtatgacatgtaaataaaccagtatttattgtaggttgtttgattcaggcatttcaaatggatataggttaatggcaatggaatcctatttatttggtagttggttttgtttgtttttgtttatttacttttgctatttgttttgtattgtctaaactttgcttcaactgaagacagtgtaaggagttgaaaatacaatcaacatagcaatggaaagcaatgcaaagagggtaaatcttgttttaatttttttaactttttttttttgtaaataaatagtactgtgatactttaggtgtgacctctattccacatgatagttagaaccagaaaaacacttttgctttctagttatactattggttcattgtaaatgcattaccaaaagacaatatgaaaaagagcaagattaagtttttctaacattgtccacttcaggggcaagcatgcttggtatagagctctagcttgtgtataccttaaactgtaacttgcaggtgtttttcagttgctgcactttttatttaatcttgctcagtcccagtaactatctcaaaggtaattgctggaatatgcattttgaaatacggtttaaaaaaaatctgtgtattgtttcatctaaaaagaaaagcactattggaaacactaaaaacgtgttaaactttgtagttattttgcattcctgtactttacaaactgtcatcacagcaaaaagtttaaaattaggtaatgaaatatttttgtaaataaataccgttaagctggtattttaaaaaatgtattataaattaattaatgtttctggaaaatgttcatatatatgtatatgaatgtctctttatgctgaagggctctgattgggcaaaataaaatactctaatctctcctg

SEQ ID NO: 91 - DNA, 5834 bp, Homo Sapiens
actccgcactcttaggctgcgtgtgaggcctgcgagtgctcgggagctgccgcggtcacaagagaaagcctagctgtcaatgacagccccagagcatctgggcgccttgcgatacccgggtgtctgtaggcagccaggagacacttccaagctgatctggaatctttcctcgcccagctctgtccctcgcagggatggcaaaggacattacgacctacatcccttcccggatctgatggcttcagattggcagattgtgttaaagtggaaggctcgtggtgcccctttgctgagtttttatggacttagttttcccaagtagttctaattatcgctgggggggtggggtggggcgggaacgtaatttctgcgtctgcccttaaatacctttaaaccttggctgcattgccgcttttatggaatttcacccatagtctgtcttttttagtttccctgatacgcatctttcttaataataataataataaataaataaatagcactttgggaggccgaggcgggcggattacctgaggtcgggagttcaagagcagccaggctaacatggtgaaacctacctctctactaaaaatacaaaaattagcggggtgcagtggcgcgcgcctgcaatcccagctactccggaggctgaggaagaattgcttgaacctgggaggcagaggttgtggtgagcctagatcacgccaccgcactcgcactccagcctgggctacagagcgagacttcgtcttaaaaaaaaaaaaaaaaaaaaaaaaaaaaaaaaaaaacaaggcatgtggccagtattccctgcctatacttgttttctttagaaaaatgtaacttttaaacataatttgacttgaaacggtttctttccaggatttatcattttttataggtgattccagttcaaactatttattacattaatatgttgacaaattgtcgttgctgaacaaattttttatgtgcaatcatacggaacattttatatttaaggatgtttatatatcaagtatataatcattggcagaaactgggcagggcgcggtggctcacgcctgtaattccagcactttgagaggctgaggcaggtggatcatctgaggtcaagacttcaagaccagcctggccaacatagtgaatccctgtctctactaaaaatacaaaaaatagcgagcgtggtagcacgcacctgtaatctcagctactcgggagaatgaggtgggagaatcgcttgaaccccaggcggcggaggttgcagtaagccaagattgcgccactgcactccagcctgggtgacagatccagattctgtctccagaaaaaaaaaaagagaaagaaacctaagaaagctatattgtttatactctaacatttctaacatttaactacatttatccattctcaaaggaagttggtcatcacaagattggaaaatctgtacttccctggcttatatgacttaatcataaatgtctaaatttgacagatgtcccaggaaagaaaacttataaaactactctgttgcattctatgtgtttatgtgacatttgagatctgcatattatacatagcaatctggtttttaatataatgtagagagactgaaaaagttttagcagtttagctgccactttagctgcttaaagtaatatatgcatcatctgccccctttggtggtagggatgtcagattccattctctgtagggtatttcatacaaatctgttagtcgctggaggaatcagaaactagacacacaactggtccacctggctgtctggtggcagcagaggaactgggatttccagggcaactgacggggcgataggacagggcagcagggaggaaatctggggacgtacataagatttaggtccaatacaagcactgtgctttaaataccattctgattctcatttatgtttaaccacctttatatttaagatctatccacattgccttcttccattttattccttcagatttctacattgtattacataatatatgctgtcttttactaactgattcattttgtgataagcatagtttgcctacaaccttttactaacttaatgcattgtctctcaccccaactccattccttaaccaagtctgactggtcaagaaatatccaacacctggtatcaacctgcatcaacctgcatgctagcaaattagcaaataataaatgcttttggaactaactggtttatggaggtcctcaaaaactgggtggtgtgtttatttaatgctaggtcaatttggcaaaaataaatgtacagaaagccatttccagaacaaaaaatgtcagaatacaatttgccaaacaaattttctaaattactaatttgatgaattgttgaggcttgttaaaaaagtttaagccctactaatgcctcagccttgtctgaggcaagcccaggagcaggggcagagcgtgagtatacaaaaagtggggaactgcaaactccacttcagaaaaacttcacctatttgtgtatcaaaaggctggggtaaatgcaaaactaaagctctgaaaaactctatttgacaaactagctttcaactgctagtaaaaagcctagatattggccaggcacggtggcttatgcctgtaatccaagcacattgggaagccgaggtgggaggatcacctgaggtcaggagttcaagaccagcctggccaaaatggtgacaccctgtctctactaaaaaacacaaaaattagccaggcatggtggcgggcgcctgtaatctcagctacttgggaggctgaggcaggagaatcgcttgaacttgggaggcggaggttgcagtgagcggaggttgcaccattgcactctagcccgggcgacagagcaagactccgtctatttaaaaaaaaagcctagaaattaaacaaaactggttttatttcataagatgtttagagacaggcaatggctggtgttgggtcagcagctcaacaatgtggcaactggcatcttcgtggttctcttggcccttcgtcgtggttcaaataactcctccagctccagtcatcactttggtgtttatggcagtaagggggggaggaggtggcctagctgcatatgtatctttaatcaggaagtaaaagttttcccagaattcccaaggccaaagctgtgtcctgaggccactgagagttgttagttgcaacagaggctgaaaggggagcaattagcttttctgggttctttagtgaaggcaggtaagggagaagggggttgggaatggctggcaaattggagcaccaacattacctttatggataatttctttttcaaaatgggcagctgatatgtgaagaaatatctaacaacaattttaaggttgtaatttgaaactcagttctgctttcaatcatgacatttttaacagatgcatttcagctatactattttttcttgtgccccactccccaacattctagaatggaactaaaataaaattacttaatctttcaagaaaaagtgggaaaaaaaaatcaaaaggccaacagtggcaagatactttcaactactcttgatgtcattgtccttctacaccaaagaacatctggaaaacatccccacatcctttggtgtttaagaactgatagagctgaccaaagtccatgtggtttcccctggctccattaacactgaacactttttcttcaaaaatggaaaatttcctttgtctttccgtttcatcatttgtaccatcaaaaggaatgtcttctcgatggcgaattaaaattctcttccagtttaattttctgagtctgaaaagaaatttccaaagtaaacattttcaaaatgtatattctagagcatttaaaacagaagttataaaacagatttatcaatgccttttcctagaagtagtctactttttaaaatgtttataacttttacttattgatttagtagaggcaggtcttgctatgttgctcatgctggtttcaaactcctggctgcaagtgatactctggcctcagcctcccaaagtgctgggattacaggtgtgagtcatacacaccccgtccaagaagtctacttttatctcacagggatttattttaatcaaatatgattctggtcataatctcatctctgaactcatttgttgcccttactacagccatgtatcagtagtttagaaatgtaggaattactgaatcccaaactactatggaccttctcagaaattcatttagtatatcagtagagaaatgagactagtggcaattctaatgcttctagaaagctccttacttcacagggtatacagtttgcagcatcactaaaatgagggaaggaccagatccatggaagtggatggggtcatagtgtctggggcaggagctcaattcattcagtgcatatttacagaatgtctcctacatgcacttgtcaggtgacggggaaaatgctgactacatgtgatttctgccatatccatcaacttgagattgaatccccataaagacacaacccctgggacatacttatctccacatctctaatagtcatgtgttgcttaacaacggggatacattctgagaaatgtatctttaggctattttgttgttgtaccaccacgacagagtgtacttacacaaacctagatggtactttttttgcatttatattttttcatatagaaaaccaaatgtcccagcaccattactgaatatcattctgatattcaatagtgggaagatcaagtgccatatatcaggtttctatatgtgctccattataatcttatggcatcactgttttatgtgttgtccactgttgaccaaaacgtcactaggcagcacatgactgtatcttgtttagtattaacattattgacatgacttcatatacatatgtaaaagcaaaccttgaccagaattcttcacaggcactttgtgggccttccacacaaacaacaccaggttttccaggcatgctaaacccagacagggaaagctcctttgcccactctagaatattctttcttttgcatttgttatagatatgatggctgtagatccagagtctcgtgaagatgaggtcaactgactggactgtgcttcctgtggtgggtgaagatgaagtatctctgctgacatagccagaggcgtgttctctaacccactctgtggcattcagtatacaaacatctccatgacaatgtttttgcaggaatgcagtcagatctgtgttcagctgagtctgctgggatctactcaataatactgatctaatagaaaagatacaagaaaaatattgtcttggaacagaaaacaaattcgagaattgcttttattctcagattaattttgacctccaaagttggccagagcttctgtaacgtacctgacagtaatttcaggcagaactgccgggtatttaaagggaagaatacaggccagagaaaacatcgcctgattaaagagaagaagaaaaagtgcactaaccaatgttttaagtctcaacatgtttcaatccctctaaaagcaaaactgaattaccattttttcgtcagatacatccaggttcatattgatagtaaagtagacttttgaagatcgcccctccattgtcttcttttcaatacaatctttcagttctgctacagccagctggtcattcactatgagctcattctcaccagggaacatactggctagcaggtctaactcagcaagctgggcctccgcctgctccatctcaatcatttttggacatgtgtaagtttctaaggaggtaaagataagagagacaatttacatatgcaatcttggaagaaatgaatacatcaaca

SEQ ID NO: 92 - DNA, 1077 bp, Homo Sapiens
aggaaacattagttaaaatttaagcagaacattcagaatcaggtcagctcgtgggtgtggacctgaacacaggtgagcccgtggtagcagcagaagcaggcattatgggataacgattgtgtaaagaaacagcttcttcattcctgcactgattgccaccaacattctcttggttgatgagatcatgcgagctggaatgtcttctctgaaaggttgaattgaagcttcctctgtatctgagtcttgaagactctgcaaagtgatcctgaagaatacagctgtggaatttttgtccaagcttcaaatgagtttcaagggaattttcccatgtgaaaaaaggagagaacactggcatctgtggaagttctgaaattataattacagtattttttaaaaattgcactgaagtgtacacagataaagcaggtctttcacccagtgaacaggatgttttgctttagcagcagtgacataaaattccatgttaaataagcatatattacctaccttattaaatattccttgaaaaagcagattttaatggtttaattttatgtggacatatgttaaattattcagcagtaccctattgttaagcatctggttttaaaatttttatgctaatataaataacgcttagtaatttaaaattttggaagcatcccgttagtgtaaatttctgagtaaatttattgatcagttggacttttcacgcttttgaaatagctttgctaaaatgctccccctacaaagttgtaggaaatgggaagaggagtaaactagaggcaagggagttgagagagctggaaggcatggtggctaagggctacggttatcaggtgaaatttgagatttgtaggctgactatattttcaagcttctgaacttttgcttatgcaaaatattcatcccaaagcctctagcgtcatagtttcctcacccaaattactatgtttccacaagatttatatagttggtctatctctgcggtccttgaaagtgaagttggtgttactaggctgtgggttttgggggctcagcagtgacctggagtgtgcaaataaatgttaagttgaa

SEQ ID NO: 93 - DNA, 5177 bp, Homo Sapiens
gtctgtttcctcagaacaccggtcttcaccaaaggcgtgggaaagggcagagagcacaggacatattctggaattcaggtcaccttttacatctgcctggagttgggtgagcgcctcacgaatgactcggcaggactgactgccactgctaaccaggcggatgcaagcaatgaggaggacctgcccaggccgggtgggtgtctgctccctccctctggtccctggcacatctctggaccccctgccctgctgtcggagagagatgacgggcaacggcgtattctcagagacagggcctgcctgcaaatcctttaaagtcaatgggatgaaatgtatacccattgttagaaaaaaataggacttagcaagttgagtgcaaataactgatgcaagactgggatggagatgggaggggtttggggcaaaagcagaagtctttctgggtccgcaccagctgtgaaatacctggcttgttgttctgtgcctgtctccagcacccaggcagggctacctgaccactctgctctctcagccccgccctggctctggagcgagcctgtggaaagggggacacttagccaaggccccagccacatagcagcagcagctgcgccctctgtcagctccttgcacctcctcactgggcctcctgcaaggcacctgctccactccaccactatcacctgggtcctcctggccttggcctggcttgcttaccttgttatcaagtcctgaatgggggaagcaatattccttctccactacaaatcaccacagtattcacaaagaattccagagaaataagaacagagacatcagaccacactgagcactcaataaagagaaaattcttcaaaggtagctgattgatgagagtttccacatgcagatgggacaggcactgatttgtgcacaagaagatcaacttgattgaatccaaaataaaggaatgtgtgtgtgctgcatgcacgcacacacatatccccatggcaaactcttgctatcccaggagcgcagaccgcatgtgaggatcctggctccttatctcccctccccgtatctcccttccctgattacctttgcgatctgcacacaccagttgagcaggtactgggagccaatattgtctttgtgttcccggacatagtccaggaggcagccgaagggcatgagctgcgtgatgagctgcacggtggaggtgaggcagatgcccagcaggcggcacacgtgggggttgtccacgctggccatcacgtaggcttcctggagggagggagaggcacgtcagtgtggcttcgcatggtggccagaaggaggggcacatggaccccttccaggtgaagacgcatgaatgcgatcttgagtttcaaaatacgtactcatggaggaaaagctgtgcctgcaaaagacctagcacagggacgtttacgcagggctgtgaagtgacagatgcagtgggagagggcccctcctgggtgcatctggggattccccatgacagagaggcccaggcaacagtggccatgaggagcacattggataaaggaggagtcggagtcacctgatctctgagtttgggaactgatagtatctttgttatgaagacctccgcctcaaggttgaggatgctgtgttttaaaatatcatgagggcctgtaggaatctgtgtggggtccggaacaccctgggtaatgactgaccctgcacatcaggaacgctggctgtgggtgctgcagaggacaagcgatggagaaggcatccggggagcaccgagccagcagggagaaaggcctcccttccccacaggccaggcttggccctgactgtgctctgggaaatgggtgggcatttgggctggggaccctgcccacagcacctctgcaaagagtagctggataagctctttcaatagaccagtcccaggttttgaaatggacagagcattcaatctacagtgactaaaggctgcctggctgcccgggacccatttctaaagagaagtggtctctctgtgctgtgcccccaggctccctatgggaaatccatgctgcactgagtcaggcatctgctgccctgctaattccggctggctgccaaggcaggggccttcctttgacagagccataaatacagactttattttaacccttctgctattcttgggctgaggaagctaaatttatttgcaatcaggcacacaatggggccctcttttctgtctgactgagaatgagggaatccccaatttccacccataaattctctttctctttaaaatacaaatggtggtgaccttttattcagatatggaaaagaacacacagactgtagcagaaagcatccacagctgcttttcacatctcagcaatgcctatgttttgagtgtggacttgggcaagttagtttctctgcagaagtgaacacactgagccaggctctgagatagggtgctgctccagggtgcccgggcaggtcaggagcaacaggctggcgggaggcagggtggagataggagacaggagacaaaggcaaggtggggcgaggggacacagacagtggaccctcagtatctggggaattggttccaggacctcccttaaatatcaaaatgtgaggatgctcaagcccctgatataaagtggcacagcatttgtgtgtaacctacagacatcctcccatctacagcatctcctgattacctatagtacctaatacagtgcaaatgctatgtgaataattgttatgctgtattgtttagggaataatgacaagaaaaaaagtccgtatatgttcagtaccgatgcaatttttttccccaacgtttttcattgtggttgattgaatccatggatatgaaactgcagacatggagggcaaactgtaaatatttactaaaatacaaatatgctcacacgctttccttgccctaaaccctgccctggccgtccctgttcctgggaagccccgaggctgactgccctcctccctccagcctctggtcctcctgcccaccttctccccaggagagcttccctccacccttacccacgggagaacctctgtccccagaacccacctcctccttccttagcagactctttctcagaggagccttcctcgactcttcaatctaaatgaaactctcctggtatcttgcagtttttccttcagaaagcagcctcagcattgcctgggaaccttttagagccacacattcttgggtcccgcccccaggccaagagggtgaaatgcaggagacaggcctagccttccatatgaacaaaccctctggactctgaagcttgatgaagctgaagagccactgctttgaggcagtcatcataatctgtacttaaatatttgtgtgattttaaaaataccctccccaccaagtttttgaggaaagaacggcttggtcagcccctagcacacgcttagggtctagctggcgctctgcagtgtcggatcacccggcacacacttgctcttacgttgactcaagtctccgccccgtatctgttggcaagtacgtggcaagtgctctgagggcctggacctttgcttcttcaacattccagcagggactagggcagatctaggcacatacctacttcaaaactgtcagggttgaactgtactgaagtcatgaaggtcaaagactcaaagcaagtcaaagtccaggccacttgcattcaagacaaacaaacaaaaactatagctttaaatatttcctgcagagtgtttaggctctctattttcaaggagagtgtgtgttattttccttttatattctaaagataatgccacaattttaaagaagagaggagatatttaatatctgtggactcagtagatattgaaaatatccctttaacttggataagtgcttgtttataaaaagtcagaactggacagggccaggaagcgtattttgtctgaggtcactgtagtcagagggtaagctgaggctgacgaggtgaacggcccacctgaggccaccctgagcagggtcaggtcaggcccacaaccaggtctcctgaccctggctccctccatggcccactgctcaccccaatgggtcggaggcgccccaggtcctctgtgtgaaggcagcctgtggggcctgttgggtgctccagttaacagactttagacgtgggagacacacacacagtacacctagaaatctgttttgcgttcccttccattgcctaccctaaatttaaactggaaagcctatgaaaatttaatacgccatgggattgccagaaagcacaaatcacatctctcccccggagtctgggaagctgtacaaccataacaccaaagaaaccctctggctcttcctattttctcaagatctggttgagacttgaaaacatattgtattcatttgagagggaagaaaaatctgcaaaccagagcagtttgagcagcccatctgctgcagggcctcgcagggctgacctggggctgggaatggggagcagagcggggggcgtgggtgtcggccacacagagcctggagccccgccaggccccatcctactaacatctgatagacccactgggccatcacttcctccccacccagcaggcacaatgggaacgctgttcagtcgtgtgtcccgttcggtgtacgcagaagctaaagcgagctttgttctcggctgtttgtcttggaagtagtaaacgtgcaccgtgacctacagcaagcatgcttggtattccacaacaatcttcgtggagccccagcacccacaggctggcaggcagagcgcacagttggagcccccatggctcctagcccagtcccaccgcaggagtgtccctgaggctttgtgaccttgaaagcctgttattttgtcctaactgctgacatgacttttggttccttccttctggcttgtctctctcatctgtgaatggctctaccgtatgaattgggattccactagctcttgaactccttaaggagaggtgtacgtccagccttatgaatgaagggcaggtgtcccctgcattttaagaactttactcattcactaagccactgctagcaacatggaactggggctgcagtgtgtgtgccggctgtgggggcctggtgtctgcaggggaacggctttgctctggcaaactggccagagctgatgttgaaggaagcccttttgcct

SEQ ID NO: 94 - DNA, 21719 bp, Homo Sapiens
acacaacctggtgcaaacaaccttgaagcgggacgcagccaaagaacacgagatgccatttctcagcccaattggaaagaggccgggagcaccagttccctgaccccctcagccccaccgcctgccgccccctggtactgaccagctccttcttcctcttctcctctttcacgtcggtcttcttgatctctgccttgaaggcctccgcctcgccattctggtcgtccttggccagcaggtccatgagtggaagtgactctgaccgttcccttaagaatctttaatgctcttacatgagatgagcctcagaacaagctaagaaccatcgaaagaacatcaagcctggaaggtgacagaaggagcaatgtgttcttgaagatgtcacctcagcccacctgctccaaggacagtgcttcttgcgacactctgatagctctgcattcttttctgtaccaggaaggcacagatcattcatggggatgtataaccgaaaccagtcctctccaccgcctggggatcttcactttcgcagtctacgactgcctgtgactccagaaagacaaactgcagattggccaagctgcctgaagacccagcccgacagcgatgcctgtcagcccgcgtcgcccaccagggcagctgctctcccaactcgcatggggggcaccaccccgcctcggtgccctagagctgagcgcagccgcggctccacggggatcgccagggcctcagccctcgcggccggcggcgcgggagtgttgcggggcagggaccagagcgcgatcagagcggccacccccgatttaggtcgccagctttccagtcactgcgatggccactggggcgccccttccatcctggttaaattctcattgtgatccccagccctcttctcggttccccacacccaggaggccggttctccgccgctcaggctgggagaggtcaccgctccgggcagggtggacccccagctccgtctcggaggacctttcgccggaggcgagcaggaaggggttaaccatgagcctcccaccctcacctcccagaccctggtgccgggctaaggcctccgcttccctcctgaggtctcattaggaaaccctcaccgctattttcaacatttcctcaatcaagtgcctttaaatagagctgcacaaacagattggcggcaaaagcgtagatcttgtcacgattgagaccaatccagtatttcagccttgtttgctttgcaattacgggttggcttgtggctacggtgccaccggggcaaatctgcagccgctcgctttctcctctgcgctccgggcgggtggaggaagcgacccgcggagtcactgcagggaggagagggggacgcgcgcggggggaggcggcggagggcggaggagactcgcttgcaccccagggccgcgggcacgcagagctgtgttgaaggacatacttttcaggttcctgacagtcactgagctatacgcaataataaagtgcgtgattcgcgtgtggaaaccagtgtcgtgtccttaccagcttccttttctgtccaccttccctctctcttctacctccgtttcgcttttcttcagtgcatgttagcggtttgctggatttcccttctccctcgctgttcaactgctagcatgatttgttacattttccacagctgtttattcttgtttgactttttgtacaaagtcactttaaatctgctgcagaaagaataaagcacctagccctttggatggactcctgcaggcgtgtggctgtccctggcccacttttaattctttggagatggctcttctgtgtaaatcagctgctgggtgcgttcggtcacctcgtaggccagcctagtttgtatcagcagaacagtagtggactcgactcaggtcgtaagccttatatttcacagacaattaaatcttggctgctgttgaacaaaactgtaatatttactttgttctataccgagaagcacttttaaagtaaaaaagaaaaaaaaaccaaatactacacttcaaaaagaaaatatgacaatgaatctctttttatggattctctctgcataagtggaaacaatatgatttaaatccccaacaccccatcccccttttcagacacagctgaagtgatacagatactgtcttctaacacataatctccctctctcgggagaggcacctgcctgtgctacattcgatttagtttgtaaggtttcaggcccctccccgacccatgtaatatgtaacaaggattatcaaataataaggtcttggatgtgaagtctgctttacacaagaattcaagaaagataggcaggacttgagtaattatgttacaacttcatattactttccaaatgaatacccattttcttctcatgtcaacttctagagatgggatgctgaggcagagaaatatttttatgagactctggagtacatactaaaatgtgcttccttattatttaagaatgtgtaaggtatggacctacatttgtttgctggtggtcataaaataaattcatagccattgtggccaataagcaatctccttcacgctttaaaagtttttggtttataatcccacctggattgtattttcactattctgtatcaccctcctattgcaatattttggttctcaatcttatgtaaagcaaacctcagaaatgatcgtttccataaaattgtgcaatggcaaagccacagaataatattttgagtccatatagccgtgcatgctcatctatatagctcttatacagttttctagctgattgctttggtatttcaagaaataggaagcagtagctacctattttaatgaaagggtaccatttcataagaattctattttcactgaaaaaattggtctggcacattattcaatgcaaaagattataatattactttcacgtgtgttaatctgtttagtataaaactgctagggtgtcttaaccattaacgcgttttgccacactactttcaaatggtgatctgagataattacgaagattttgatgttaatcccacgttaaatgaacaactatgaaaataatcttaaagcattattactcccatatacatgccagcaaacccaattgtggagagaacatgattactttttatctgacattatcctataaggatatggctacatttatttcttttaaaattggagcagttttcaattactttttaacagaattgttttcaacacagcattttgcagtgcccataaaccatagcaactttgtcctgatcgatacatatttttctgcattattattcattagcctctttgcaaactcactaaaatagaatagtattaaagtatgaatatatagagaacaattattaggttctacatatttatttaggtaaaccaatgttattaaaattaaaaacatgtgcctggcatataagtgcttcttcaggaattcttttttggatgcatagttattattttttaaacaaactcagattttcaaacactgattttcttctctgaacgggcattgcattgttttaaacagtagctcctggaataatgccacctttagtattttagactttcaaacaacaattggaattggataaatgctttcagctgggagcactttcctaatacctttgtaggtaatgggattctctatttgtgctgggtgacaaacggacagtgccctggacagactgcctaccctctgcagaatctaccaaaaagtagagttttcccatgagactgcttgtggtccatctaaaaatgaaaaaataatcagagaaaatgcgcaaagccttttctaactacagttatgaaatgatggcttaaagaggtatttagaaaataagagtggagtaatacagaaacaaaatctgaagaagaaagtttgcttaggagctgatgctctttgtctacaaacaagagggtaaggagctggatccaattgaattgaattgtttttgtttgcttgtttgttttcttccattcagtgcctttcaaactgttttttactggatgaagaaactcaaccaagaaaatatatgtcgattcttgtatatgggacaatattagctgctgtgatttttaatactagcataaaatataagaatctttttattactgtgatattgttttttcctaaatgaatgcatagtgtaacaattggtgtcaaaaagcattgaatttttttcagatggattaagctggaataataaagtatatctatgagatgatttctgtaaactctgacttgctgagaaaaaagtgaaaaagctttttctggaagaaacatggcaacttaaccgttattaatctggactaaataaaacaggaaactgcttctttacatttctagtaattttttctgcttttccaaacattgttaagttctatgcaacttgtgctattcaagtaaagatgatgtcagtaataaaattacagaatctaatcaagtgactatttttgctttattacaaaatttatgtatttaattgggatgtttaattgcttagtttttagaacactgaatttttctttttccagacaacagagtgatatttaatgaagtgcttataaagataaatacgatggttcatcaaagataaaatagtcataataacaagatggcatttgagtcaatgtggagtggactctgctttgtaaattatactgctttttaaaagcatgacctaggtatttacaatggggacatctgagaagagaaactcaagagtcctcaacttacacagccaagaatacacaatcatgtaggagaacttgccctcagaagcatttctctattgacattgccatttcttttcctccatctagtacttccatttgctctatttcactaaaaagtcacagaattaagagtggctgctgcaactcactgggctttctctgcttaaaaaaccttaatatcacatggtattaatacagctacattaataattgaaagattcactcagctgaccctatgatttttctaattattgttaactatctgaatatttggaaataattgtatttttccactgactttttctcattgccttgggtactagaaggttttttttttttttttttttttttttttagatggagtttcactcttgctgcccaggctggagtgcaatggcgcgatcttggctcgctgtaacctctgcctcccagttcaagtgattctcctgcttcagcctcccgagtagctgggattacaggtgcatgccaccatgcccggctaattttgtatttttagtagagacagggtttctccacgttggtcaggctggtcttgaactcctgacctcaggtgatccgcctgcctcggcctcccaaagtgctgggattacaggcataagccactgtgcccagccgggtgctagaagttttaacatataacttcagacacaactgagtaaatagttagctgtatatattttattgtattgttatttatattatgtcggctttgtgtcagaaaggatttaaagcacttgtttcaagaattggtatgctatatttttcaaaatctgtgtataaaaataattcccataagtaccactgtaatttacttttcatgtgtattacaaaatcagttatgtgttctggtaaacattttgatcccaagaggaagcaggattacatttagaatgtgacaaattttaaaaattaattttgttgtaaagaaatctttataatgatatgccataaagttattactatgcatgtaaggccgcataccatagtgattaagagcaggtccttggagttagaggcacagtctgaacttgactacaaaagttatcagctgtgtgatcttgggaaagtaaccattctcagctttagttaccacagctgtaaaaggtggataataattatagactctgtcctgttgttgtggtgaacatttagtgagacgactcacatgaggggctggcatagggtaagtacttactcaatatcagctgttctctttggcatagctctgttagagtggcatgccacagttaccttcttgagagccactaagcgtgggaacggtaacagtccacagaatttttggagattggtatgaggaggctgcattggctcccagccctcagggttgacagggtgaaggtaatggcttctggctgtctttagagctcccaaaagatatgagaagatggttctagtgatgacaacccactgttctgtcagtggaaatctagttttatgccatcttcatcattcgtggtgtagtctatcggtgcctgacacaaacgtctagagtggggaaaataacaccttaaagaaatagaatatcttaggtccatgatttgcctgctgtgtttattatgtaccccagcagtaaaatattttaagtatatttatttgcaaatcatacatctgtacatctttactgatatgtacatgataaacctgtgcaaaaaataacctaaaaaggggtaagattaaaatgaagaattagacaaaaggtttaaatgttttaaggtaagattcagcatcatcaacagtgggtataaatccatacttcaaatagccttggtggtttaaaaatcctctggttgatttacctttggattcatatcatcagtgtttccgtcttgttttgtggctgagaagaggaggagcagtgtcagttctgccattttcctgtcaatggtttatgtctgccttcttggaatcatatttaatgaaaggttctttgcaggaatatttttaaaccccttgttcatttggtgaagattagtttagttaaaactggattatataatatatttcaatctaactgagccagacaaattgtaacacatttcaggccatgtgtgcttctaagagggccactgttaacccctctgtggtcaagagctcccccttccctgaggttaccttgtgtgctcaaggcagctgagtaacataagaagaagcaagggtgttgatgccaatggttaccctattagtgaactcatttctgattgtttgtatgaaaacaaatatgatttctgttataatcttctgacaccccattccttggggcaccactgtcctagactctgaaatcactgtggttcctgccatttcttgaccttgacattctgtgacagaatgaaggagaccttaggttcagtggacttcattttctataactagctttactctattgatcacatagtggtatagctcttcagtgtttgcaaatcaatgttcacatatttctgtcatttgaactcagcatctttatagggcaggtagagaaggtctgattctgtccattgtaaagatggaagagatgaaaccaccagtgttgctgactgcagatggaagataattgcgtaagttcacacagcggtagacctgggtttgaatttgtttttgaaagcaatatcatcctgattcttttctatcatgttaacacaatttttaaatgatattcatattcatctgaatggagtagagacagacagttatatagtagttgcaagtttagcttttaaagaaactgccaaactgtcttccagaggctgtactattttacattcccattagcagtataggagtgatcctttttctccacatacttgccaacatttcttgttgttcttattaaaaccaaacaagtggtgctgggaatgcattaagagaaaacatatatattattaatagaataaataataatcaatagataatgtgcaggaaggggatttgcatttacgaaacatctattgtatcctatgttctttacacatattatccctttaatatagttctatacttgcagggacaggttttgcatgtaaagaaattgaggttcagagatgttaaataatttgtctaaagtacacagcatttaaattgtagagtttaaaccaaagggatctggtattaaaaaattccaggtaatgttaaaataaaacaatgcattaaatttgaaagtctttctgttactttttgttccaaattggatctctgtctttggctaaaaatcaaccatgacaacaagaaatgttggcaagtatgtggagaaacaggatcactcctatactgctaatgggaatgtaaaatagtacagcctctggaagacagtttggcagtttctttaaaagctaaacttgcaactactatataactcagttattgtactcgtcagcatttatctcagataaatgaagacttaagttcacacagaaatatgtgcatgaatgcttacagcagctttaataacagtgaaaaactggaaacatctcaaatatccttcaatggaaagacaaacttaaccattctgttaacagttaagcatgtatggttaatcgtggcacatggaatactacttggcaataaaaaggaacacattgttgataagtgcaacagcctgaatggatctccagggaattatgctgggtgaaaaaatccaaacccaaaaggtaacacactgtatggctccatttatatagaattcttgaaatgacaaaattatagaaatggagaaaagaaaagtgcttatcaggggttaaggagcagtggggtggaagagaggtgagtgtggccataaaaaggcaacaaaatggatgcttatgataatggaaattttctgtatcaatgtcagtatccttgttgtgatattgtactgtgtttttgtaagatgttactattgggagagactgggtaaagcgtgcatgggatctctattatttcttacaactgcatgaggatctacaattttctcaaaataaaaagcttaataaaaatgcctactgatcttcaggaagttcagttccctgttttccataactgatctgaaaataggggaaggacaattgagaatttaggagttgtaaactctgaggctgattttcagcgaactactcaaattattctgatttttccccttgattcttattatggattgtaggacattcttcctactattttggagaagaaaaaatgccacctctctatcataggacttctgttttacatatgatttaaaaatctattagctgactaatttacacactagaagatgaaacttggttacattagattccattgccacaatttattttaaaaatcagagttctcatctttcttgtttcttcttcctgccttactttattttcttttttccttattctatttgaacccatattttcctatattgtactgtttagtctaaaaactagtaagcatgcatattgttgattaaattagcaattgacgctcttaaaatgagaactataaagactcttgagcttccacacattatgctatgcttgccatatgcttgggtgttcttattttcggagagaagtaatggagattataaatgttatttttaaaatttactggtgatttgttgagaagataaagtaacaacactattacagagggttgctcttgatctcccaggccaccagtgcagtcaccgagccctctgcaaacacctgataatgctgaagagtgtgttagtcattgtagaggagctgctgtcatgacaaataggggttaaattgtgagaatttcaggatatattttggggaaggattaaataaatcaggggacttgctgacagcaaatagtatctttgatttgaaacacagaatcagagaattgagatgaatcccaggtggtggttgggagtttgaaaaagtcccagtgagttggctgactaagtgtagacttcatttcaacatcattaaatagtctttaagtggtgacttaataattgttgccccaagaaaagattttgctaaatacagaggtggaattaagtatattaatccaagaaacattttatttaaatgattttcctaacagtaaggttggaaggccctagaactgcttctaggagcttgaagtgcatttaatagttaactgtcagaatgaaaaatgaaattttaaatttcaacaatgcaattaagttcttattttcttatgatagtgaataataaatttcattcaaggacgccattggcagatgttgaaaagaaccattttcactccactagcttgcagtggactaagaggtagcaggaagggagattggtactacagatcctgaaaaaacaaaacaacacaaaacaaaatccacaccacaaatggacacttccagatgcttaccaacaggaagtgccttggaggacaagggctgtgagacaggtgaactctagggaacaagaattcctagttccatgtctgtttacaagaatttgtcatgactggttcacctcactttatagtttcctcagaccaaagagacaaagaaaaagcaaaaaacaaaaacaacaaaaattctgaaacgaatggacaatacaaccaaaactttaatatgaaccaaaacaaaaattgggctgattttatgaggttgacttaaagtcaggaaaagaatgataaacttttgagaggaagaaagaaatcatcaaagccacgaggagctcaaagtggtgtttaatagcagctatcacattgcgcccgagccttgaccacttctgacgcagctgtttcgttttaagatgttcccattcctgttccactcacacagtcctccacagtgacctgagtgcacgcacccaagccggcaggccactctagaaaaccgtaaacccctcagagagtcactgcaggaataggggaaatggaagtgatgaaattcaatatagcatttagctgaatcatcatctgaggttaagcccagtgaacaattagcagtatcgggagtctcctcgtacctgtcaaaatcgcaccgacgggattttgtgcaaagtatgtatgtgtgtggaagttgttttttatgtttaatagcaatggacctggggtagtaatttagatacaactttttaaaaaaaatactaaagggcaagtgtggtgagaagcttcttactcaggaggatcttttcaaacattgcaaaacatcaggccttgaaataattcattttattaagtagcgcactcttgtcttttcattcacaaaaggaggatgatttattatacagataaatgcttgcataggatgatgaacacctgtaggaatgcatgatattctggaagttgatcaaggtccactgtacaccagtaattagaggtcatgatgatgataataataataataataattaataatggcacatactatgtgtcagctcctgttctaacttcgtttctcatattaacttatttatttttcatgattagccactaagatacaattattatccctgttttgtagacaaggaactgagtgaagctcaaagaagtaactaggatcacactgtcacacaggcaggaatgaaacccatgcagattggctccttagtgtgctctctgatctattatcattcatcacatatttactgagcatctagtatatgaaaggtattaggctttatgcaggcaatactttagcgaagccagggagatgtctctgccttctttgagcttatagcttggtgggcaaaaagctaatggtttaactgtataaaaaacttgatgttgtgaaatgatatatgccaatgtttgcatggtatgatgattttgattaagcaccataataaaaatagggagcctgggtctcacacagccttgattgtcttcttccttctgctccccagtggagtgcgtaggaaggtcacaccctcaatgtcaggctccttcactgttctcagtgagtgtctcaggttgtaggctacatgagcaggtttgcacctggatatgattgtggcagtaacaatagatgtgactatacacagtggcagtggcagtaggggtgggagttgggtgatgggatgatcttagaatgcagtgttggtattaactcagttttgttttgttttgatgtacagccagccatacgactctggaatatgactctgggtttaccaacttggggatggcccggggatttaggagatggccccaatggctctcctcttttttagaaaggactgttcaagttccttttttttttctttttaaacaggatctcgttttgtcacccagatcgggggcagtggtgtaatctcagctcacttgaacctttgcctccctggctcaagtgatcctcctgcctcaggtgtgagccaccatgccaggctaatttttgtattttttgcagagacggggtttcaccatgttgcccaggctggtcttaagctcctgagctcaagtgatccatgtttctgcctcccaaagtgctgagattacggtttgagccaccacatctggtttaagctatttcttctaaagatatagtcacatctattatctttgacccctgcctaagcaattctgttcagatcttaagactatttcttcccgggattcaaactcagagttaagtagagtcaactatatgaggtatatgtgaggttaatttttgaaacttttatttttaatttcatctgggatctcctctagggaagaccactttatgattatgggttgcattcccaagttcagttgattgaatttattcatacattatttaataaatgtttattgagactgaaaataaacttgaaatcctagaattcattggttgtcttaaaaattctaaatatgaaatgctaactttagcttcatgagtatttagaatagaaaataaataattcaaaaattgttcaggaaaaaaatccatgatttattctactctggaggagcatattcaatttaaaacataccgattcgtataaacttattggtaatgaggcgatatactttttatgagaacatatcaaaccatagacattgagatccagcatctcctgagtgagtaaaatgtcagggttttattgatactaatgataatgggagtgacatatgtgcatagagtaagtccatggttgaaagcctggctgattaggcgctgcgttctgtggtttttgccacttgtgtgtgattaaaccctgcagaatagagtctgttgccatgtatttggttcgtgaagaaaactagtaaagtgatattgaatgaatgattcagtttctcaaaagggtagactattggcctaacaccttcctaacttggagctgtcaacgtgtttagtttggttctaatgggagctaggctggagaagagaaaagttttgtgagaaaggttatgtgatattaataagaaccacattccgtttgatgttttctcaaatgattttttttatcttcctaagaaattgaatgattcaaaaataataaatcttccttttctatggcccacaaatgatcaacattttggatgatcaaaacaattttgtctttaagatatcacaacttctagtgcctctttatttgccagtgctgatttacagcagaaagtatcacttcatattttttccaagcatcaaagtcatgtgttttacaaatattcacaagtgcttaaaatccatgaacctctctctgtattcctatttttttattcttctataagtatgtatttaaattggttaaacagatggctttctacttttgaaaaaaaaaaacccactaagaatattcacctcaagatggagaactcataggttaaatttcattctggaatgcacgtttacaaccaggtaattaacctttgaaaatgagggtactcgaaggaaacaaggaaaatcttaacaagatgatctcactaacgctggtgtgttagacttctcagaagtagagatgccccagaagtttaacaatgaaaaactttaaaatatttttaaaaacatagttaatctttgtagctttccagttttcgtcctttattacgataaccttaggaggtaaacgcttcaaggggtgtatccttataatcataggaattggtacacagattttggtggaaagatggaggtgtcaacattaaccagtcaacatatatttgttgactgcctaccacatgcacaagtctcttccatgcttgcgaagagatacagtgatgtgcaatgtgtagaatctgcccttcatgagcttttgatttagttagtctgagaaggaatagatcagtgaaaagttaaaaggaataatagatggagtgttgaggcagtccatgattgttatctgagacattgagtttacaatgctaagttaaaagaatgagagatcactatgggatagaatggacaggaagagttcctctccttgaagcttgcattaagccataaaagacaaagcaattttggaaatgcagaatttggagatatgaagaaagaataattcccagaaagggagaagagttttggagccagacagatctgggttcaaatcttggttctcttgttctctagctgtgtaatcttgggaagttacttagcttttatggacatcttctataaaaaggatatgatagcgactattttgttaattttttaggattaattgagataatatatataaagtgttttaagcacttgataaaaggtaatcctctcagttggagagaacatcctaaacaagtctggaggaaggagacagccagccatgttcatgggacaaaaagaagactattatgagtggagggaaagattaagagaagtagagtgagatcacatggaaagataaattaggattagcttcagccattcacttgtttcttcatttaatactttattgcactctttatgtgggaagctctctcatgtgggaaaccctctgctcggcatggatatgcagagacaaagaaaacttagccttggatttctcttgaatgtcaggttaaggagttggaacttcatgctgaggagaattatatctttcaaaagtggaggagcttgaaagtagcatttttggatagttaacatggaatgtgattcttgtgacccaagatatgcattaagttaccatctcctagtggttgatggttaatgttgtgcctggagatgtgacccagattctcttgtaggtcattcctgacagagggtccattccaatgagtgaggaggaggagcttctgggctgaacttaatctcatctcctgaaataaagcaatgacattgaaatttttcatattgcacttgtgtttacatttctcatctaatctgagatattccacgtttggtgagtcttgctttgggcctgcagtcttggtgacccttattagttgcactggaatagctgtctattcagggagaagtagaatcctgggaatctggtcttcagtgactttctccatgatcatgaatttcatgagaggaggtccccttcctgttagtagatctctatagcaagaggttctgaggcacacaagcacactggatactcacctacagttctagtttaactgatggaacataggtatttctttcatgaaactttgcctggataaacagcttctgtatcttctagtgacaaaattttgcctcctgttttcccctctagctctagtcttaatctctacttccttgttcagtccaaggctcaggagaacccagatcatataagatatggaacctattgcttcctaggatgtccttgtacacagtgactaactgctaatttcaaggatcaatttctttctggagttagaatcatattatattatgtttcagaactgaaataaaattcttttaaggtgattatattttggctctcagcttggaagatgccactggggcatggcatacaagacacataacttataggaggacctcctttaatgcccaagtgccagcttcatgcttgttgttatatatcattttattcctggctttgatgcccacacacagacatatatccacacaaagttcaatctatatattttttgtagctgtttagctcaggtgattagggcattgagctaatgagaacaaggtcacagtttcagtctttgtgtgggccagcaaggtttgctttgttcagaggccacagacctggtccagccagctgtccagcacatgtctgccccaagtcatgagaggacggggcaggagtgtgtggatggacaagagcaaatccatcaccacccttagaaaaagtcaagtcaagcacgtgtcctactaatgggggtcaataatgtctcatttaaatggggctgacattttattacctcttgctgagagggtcttttgagcaccaaatttaaacattgtcgcttttttgtgtgaatttatttctaataaatggaaggttgtacaagaccttagatgattacaggtttccaaatacagattaatgacttcaatatttaagaagttgatgtgatattaaaaaagaaagttcagtatggctattcagttatcttcccttattaaaatctgttttggctaatgaaataaaaagttcataagttcttccgagagtaagtgagaatcattgccttcattcaagaatgaaaacattattattaaactcattgataatgagaccattaaaagttagcatgaagcaggtacaatacaattctttattattgaagtcttcagatattacccagcctacacatcccacctttcatttttaggcaaacaaattccccaaactatattttttttaaatttagcattaggtcttgttaggcttcaaatgggatcaaaaccaatcctttccaaagtgttctaccccagctgtttccctcacctgggtggtagtgagtataaaggcatttgatacagaagggggtggtggggcagagaacagaaaggaaacttggtgagagaatgatgaagaatgatatattagagattcttttaaaattcattcattaaacaaatgtagcataatggaaatgtctattaaattttttggcataggtaatgcacttgcaagggtaaaaacagaaatatgagatggtattttatgaaaagttttgctcaccccgcatccatcatgaacccaattctactgcccttgtatagccatttttattagtttcttgtgtactctttcagaatttctttatgccaatatatcttaaactctttcctttttttcatacaaaaattaacaccctatcaattttgttcctggcagggtgaggtggctcacacctgtaatcctagcactttgggaggcccatgcgggagaattacttgagcccaggagtttgagaccagcctgggcagcttagggaaaccctgtctttataaaaaaataaaaaattagccaagcatggttggtgtgtgcctgtagtctcagataactcaggaggctgaggcaggaggatcacttgcaccagaaggttgaggctgcagtgagccatgattgcaccattgcactgcagtctgggtgacagagaaaaactctgtctcaaaaaaaaggtcttgagcttgctttttctacttaacaatatgttttgtaaatctttctgtatacgcaaagtagcctcatttttcatagttgtatatcattctattgatgtgccacactttatttatctacccccctattgatggaccttcatatagtttctaatattttctattacagacaacaatgtattgaattactttggaatgcattaggtagaaagcattcttctttctttaaacatttgcgtagcattccactgaatggctatatcataacttatttctctagccccctattgatcgtcattgagtttccaatcttttatttttaaagacaatgtcataatgaataactttatacatgtattatcttatatatgtggaattaaatttaccatgtctagataattttatttgaatgcaattaagtatgatatcaaaaattataaaatcaaaactgcagtgagaattcatcttaccccatgtaaaatgactcttatccaaaagagaggtgatcatgaatgctgatgagaatgtggagaaaggggaaccttcatacactgttggtgggaatgtaaattagtacagcactatggagaacagtagagattcctcaaaaaactaaaaatagaactaccatacaatctatcaatcccactgctgggtatatatccaaaagaaaagaaatcagtatattgaagagatatctgcactctcatgtttattacaacactattcacagtagccaagacatggaagcaacctaactgtccatcaacagatgagtgggtaaggaaaatatggtacatatacacagtagaatattattcagtcataaaaaagaataaaatattagttgggcatggtagcatgcacctgtagtcccagcaaccagggaggcctaggtgggaggattgcttcagtccagggaagtcgaggctgcagtgagccctgatcacaccactgcactccagcctgggcaatatagcgagaccctgtctccaaaagaaaaaaaaaaagaatacagaatgaaattctgtcatttgcaacaacatggataaaactggaggacattatgttaggtgaaataagccaggtaccgaacgacatatttcacatgttcccactcatatgtgggagctaaaaattaaaacaattgaactcatggggagagtagcatgatcattaccagaggctgggaagggtagtgggaggaaggaataaagtagggatggtcagtggatacaaaaacacagttagaaggaataagatctagtgttctgtagcacaacagggtgactatagttaacaataacttattgtatattttaaaataacgaaaagagtggaattggaatgtccctggcacaaagaaatgataaatgcttgaggcagtgaacaccctaattatcctaatttgatcgttacacattgtatgccttcatgaaaacatcacatgtgccccataaatgtatactgttatcatgtacccatcataattttaaaaaatagaaaagaattatcacaattattttaaatgaagaagcactaagtaggaaataaggtacaatttaattcagaatagctttccttagtagtgttcaacctactgtacacatcaacaacacgcccttgcagttaacattgttgctggatgtttactgttatgtgtgaccagctgacatgtccctctaaagaaagaggatttaaataagtcatgtatgaaagactgggtaaaggtgagacactgtaagacctagattattttggggctgtagcaatcagattagctattgagtattcattcataaattcattcacttcactgagtcatccacttcttgtcagattctgtatttattcatctcctagtaagctactcattgtgctaaaatgctggtaaacagaagtacaaagcaccagttataactcacagtcttgtagaggaattaagaaatggacaggaaacagtaagggtgcattgtaggtatctcaagaatgatataaagtgttatggcagatctaaggaggaagacatgactttccatagataatggatggtggcatctgttctggagtaccagaaaattagagtaacaaaaacacagcaggatagattttcttacaatgcagtgattcatacaaaggctaccttgactgttagtttgtgactggaaactctcagtcagggctgacggagggagtcctgcccctgccagctgttcacctttccctggtgctggggttgacacttcacatgctcacatagtctggttctgtgctgtctactagggttgagtgtgctgctgggcagagaattttggcatttctccagatgcacatgaggggcagaccgcctcagcagttgctaatgacccaaagaagccttctttcatgacttattttgtcccctcattttattttttgatgtattttggtgagctgagctactaccttctcaggcagtcccaacctcagaaaattaaccatgtagctttctcatatctgacattgcaaattgaggcaaggtcgcatgctttctgactacctgactgcctgggcatttctttcatgcaacttgtttaagccgcccatcctgatccctgttgctaagccaccatggctgcatttggacgcagttcttcccagctttgccgcagcataactgtggaaaggatcttgatgaatttggacctggggagggacgtgggaggaaagagaaatggtctaatggaagaaagtgaacaaacaaagacatgctcacagaaaactgccaagtgtgaggggtgggaaaacagagttcagcctggctgaacgtaggaatctggatgggaatggtagatcttaggctcctgtttttcagcttgccgctctagtgatgattcttgtagatatatttttccaagtaaaaggagcatttccaagtgactgttgtttaaaataaagtacatgttgcatttgtaatgtatgaattatgagtattaaaactgacaatgaaatgagagtaatatacttaattaaaattaattagatctgttggcacaccactagaaggacaaatatgatatttaatatatcactctactccagacctgtccaattaaacttttggccatgatagaaacgttccatatctgttgtccaaaaacagtaacccctagtcacatgtggctattgagaacttgaaatgaggctagtgcaactgaaaactgaattttaactttgtttaatttcagtgaaatttaatttgaatttaaatggccccctgtgagctagtagctaccgtattggacagggaagctctaaacagggttctaaacatgtggaattaacagcacttaagagctggagtagaccttaacctttaccaggtctcaaactttgatttacaaatggggaaatggcagccaagaaggtgaaacaccttgtccagaggcacactagtaggaattagcagaactggaacctggtgtttggatgtcctggctcccggcctgggggactcttgattccaacacgctctctcccagttatgacagagggctgtggctggacccaggtaaggatgctgggttggtagattgagaaaataaggccacgcgtagtctttcaaatcaaccaagcaagagatatttgctgtacatggtggcagacactgagatcaacagagaggttgttgtggtgtgggggagggcctgtaaaatggcataaggagtctactgggaaaaacaggatagtgatagattatatatctctatatttatctttctatataatctaccctgttttcccaaatggatttcccaaatgtgtgtcacttgtatatctggctgtcactggtacaaggtagtccaaatggacagggtacgcaaaccccagacagggctatggaaatttagggagatctgtgtgggtgagtggtcggggagagcttcagggataggacaggcttgacttatattagatagtgtaacacagaaggtaaaatacaactttaggatcattcaaatttaacagtggttgatatgaaacaaacttcttatccagagttggttttgtattcttgctttctgtattaattatatgtgtttactgattcaccacaatcagctatactgtccctagaattttaaaatgtgaaaagaatgtggtttgtttcaggactatttttctgtagaatggtgattgtatagaattaattaatattacagttgcattattagaccacagtaaggtaaatggtcacaaaagaccatacatttaaatcaggagaaaagtaatggctattgttatcctgtaggcatagctgggaaatcatatccttacttggcttgctaaagtcttaacctagtactacatgacagtatctccagagatttttttttcccattcgtaggcacaacaaatgagacccaagtgctcatagaacattccaaagagtcaacagagagaagtggaaagtattagaaacatgattgtgtttgcaaagggagacataaac

SEQ ID NO: 95 - DNA, 2430 bp, Homo Sapiens
aaaaatgtaaataccacgagccctatctgagaagggtgagggaagcccgaatgagataatgtgtgcgaatggctaccatgttggagggcttgggttcttcgcactcggtcctatctccacttccaggcagtcgactttcctgagacctgggtgccttggccgcccaggctaggagacttgaagctcttctctcctcaaacctgggccgatttgcttgttatcttctcaaagggtagagtgagggctgctgacgcgctcctggaacagtcaccgtgatgactcggggctccgctggcaccctgggcacacaggccgtgctgttgcctcccctcccacaccctccggagattgccattttctatttccaaaccaaacaagacaccctgaaggacgctcctcctgcggccccatcatctgcttcaggccagatttggaaagtcagcgtgattgaggaaatgctggaagagcaccagcctgcacgctgcagaggcctctttagaaacttctgctggaagggacgtccccatgctttaggtcgcaggacagagcttgcagatgccttggaaaccggtaggagccaagctgcgtcctgggagacccccgagctctgcacaccttccctccgccctcccggctgtggcaacgctcgggggtcgtttaggggtccgcgtgccttttgctccgcggcccccggcctcggatcccctctcccatcatgattctgaggcctccccagccatgtggaactgtaagtctaattaaacctcttttttcccccagtcttgggcatgtctttatcagcagtgtgaaaatggactaatacagtaatatataaaaagtttgctgctatattgctccatttactctcctctcctttgtcctgttattgttatacaaatgacatctttgtatgttgtatgcccatcagcacagatttatggctattgctttatggagtgcatttaaaattaagtaggcaaaaaaagagagttgcaaacaaaatatgcaattatactctcttttataatttcctatgtattgagctttactagtacttttattttttcttgtggatttgagttactatctagtgtccttttattttagcccaaagggcttcttgtaatttttattgtagggcaggtctgctagctatagattcttgcagtttttgtttatcttaatgcctgcttcgtgtttgaataatagttttgctggatgtagaattcttggttgacagtcttttccattcagcatttcaaatgtgtcattccattaccttatggcctccattatttttgatgagaaatcagctgttaatgttatttatgagttcatgtatatgatgagttgcttctttcttgctgtttttaagatgctgtcttggtctttgtcttttgacagtttgtttgcaatgtatcttggtctcagtttctttgtgttgatcctccttggagttcgctgagttttcttggatgtgtagattaatgttttgcatcaaatttttagctatttggtcattatttcatcaaatatgctttttatatttttctctactctacattttggactcccattatgcatgtagtttatatgcctcattatgtcctagaagtttctgagaatctgttcatttttttgtcattctttttcttttctgttcctcatactggatcacctctattaatgtatattttagaatcttgatttttaatttggcctgctcaaatctgctgttgagttcctccagtgaatcttcatttcagtttttataatttttgtattctagaactgctatttgctgtttttttaaaaaaaatttctatctttttattgatattctgtatttggtaagaaatcattttcagactttactttttaagatatggttgcctttagttttctggagatatttaaaattgctgatttaagtgtttctctggtaaatataaagtctaggcttcctcaagtatagtttcttttgattgcttttttccttgtgtttaggccataacttattgtttctttacatgtattatagttttttcttaagaactggacattttaaattatgtaatgtggcagctctataaatcaacttttctctccctcttcacccagggtttgttgttgtttgtttgtttgtttagtggcttttcagaattaattgtgtcaagtccagattctttgtcatgtgtggctgctgaaatctctgctcagttagtttggagatcagctaatgattgggtagcaaatcccttaactatctggaaccaataagttttctagtttctgccaaggggctctgtgtgttttggggcatgcctttattagtcagttgtgtggttttcgtgtccaccttagccatcacttgctgcttgcacagagcctcaaggtcagccagagacaagaatttgggaacttctcagg

SEQ ID NO: 96 - DNA, 6857 bp, Homo Sapiens
tagacttctggcaagtttatacttttgtgaaaattagaaagatttttttccattacattttttacctggttattgctggattggaagagtcacaaaattccacgcacacaacttggatgtaaacaaaaaatacagcacacataatctggtctttttctgaattccacgtccaaaatttggcagaaaaaaaaaagtgttcaatctcctgtgaatctactctgatctgctatactaaaaaatacttagtctttttgtgctgcatttttccccccttccccattatctcctcctaagccttgcctgggaattgcaagcccaccagagatcctattctgtcactaagcaaaatctgatttacaattttggctgaggagagggaacatattaaaacatatcaacaattttagaatcaatattattaaatttcatgtaggttttagaaatgttttacttgtatactttagacttcattttataaaattacatttttaaaactttttacatttttaggaaatacatgttagctaaaaaactgtgttttgctccctgctacgtttgcttatcctatccttcattactccttggattttagtctaactggtcttgggacatgcctcttccccacaaacacccccaccaccataccacattgctgtgacacatttagcttgttaatgtggtaagagtggagctcacttacagaatttttgcagactagaccttaggctacaggtctttaccatggagcagaaaagtggtatctcaaacctcatccacaaaggttgatctagtccaagcccctctccaggttcatgtccatgtacagctttgttcttattgtaacaacctacattttagaataggcaacgaagaccattaccaagagcagtaggaggggcaaccttcggctgtttgtttttcaggatctcaacttgtgaacttactcttctcttcacagaatgggataactgcctggcactcaccaagctacacttgaagaggatcaatccatgtcatcatgtccccaatttcatagcaccaagtattttgtttattcacaaatgccctattatggacatctagcaaacaatgatacatcagaaaaggagatgtgcataaattttcatggaataaggtataaagcccaactctcaatacatactaatcataacaggagtctaagaaatattctgaaataaatgggaatgcagaatgtgtcaggcctctgagcccaagctaagccatcatatcccctgtgaccagcacgtacacatccagatggccggttcctgcctggatgcgcatgaaagaatgtgccacagaaaatgagacacatcaatgaggcctagacaggcaacttatgccattgtgagatacaaaatagttcatataacatagcaaggggatatcattctagaattaaactcatgttacagaaatttcatcacgaagacagtgtaccaacagtatacccccctgccccctgctgacatagtgaagacttgtgggaagtatcagaaagagaactggaattaaggaggaaaatcaagatttatgtttcttatcgccaatttttaattttcatttgtaggttgtggaaaatgcactagaatcaacaaacatggggactaattcaactcggatatcatgtcttcagagaagtttctcctgccctcctctccctgtagaattaagtattcttccactgtgccaccctctaacttgtgctcatatcttcctctattgtagttatgtgttcacatccctgttgtttttgtaccggcttctcccaaagggagacatttagtcttattcttcttggtaactttagcacagacctggcagattgttgacactcaacaaatgtttattgactcaaatgcattcagttgaacattgacctttgatcaactctgggaaaagtctgcaaagctagttaggacattcagaaattcatttcatttcaatcctaactaaataaattattgaagtctcagaacttctcagtacttgatttagacacatagaaacttgggtaaataacacctatattgttatattcctcaagaaaaagtttatcttttcatgaaatgaatctactgaggatatttatagaaactgaatgtaagtgagcagaataaagtggtgtgtgtgtgtgtgtgtgtgtgtgtgtatgtaatttgaagagtaggtgggagaaggttgtgataggatagcagatcttgtttatgatagtcaccagctataacagacactgcctgatgcctttccaatatccacttcccttttcttttttttctttttggaacagagtctcactctgtcccccaggctggagtgcaacagcacgatctcggcttactgcatcctctgcctcctgggttcaagcaattctcatgcctcagcctccctagtagctgggattacaggctctcgccaccacgcccagctaatttttgtgtttttagtagagacggggtttcgccatgttggccaggctagtcttgaactcctgacctcaggtgatccacctgcctcagcctctctaagtgctgggattacaggcgtgagccaccgtgcctggctctcttttcttacttaatgtctgtgtcaattaaatagaaatgtatcaagttaaaaaccttgcctcggtagcttccagtgcaaataaaggtacccatgccaccccattctggccagcagtaaaattgatggaagcctctggttggggcttcaaggaaagctttatcaaaagataaactcactggctttgtcccttagttcagtggtccccaacctttttggcaccaagagaccagttttgtggaagacaattttttccatggaccaggagggttccgggggatggttttgggatgaaaatgtttcaccttagatatcatcgggcattcaattctcataaggagcctgcaacctagacctctcacatgtgcagttcacaatagggttcatgctcctatgagaatctaatgccactgctgatctgacaggaggcagagctcaggcagtaatgctcactagttccgttgctcgcctcctgctgtgcagcccagttcctaacaggacacagaccagtactggttcgcaacccagggtttgggggcccctgtcttagttcctttgccttccttccagatggatgcctggaggaacaatcatcccgcaattgtgaaaattgaagccatattttaaagttggtttcaattgtaatacagaagaaatctggaccttgatgacatttgagctagagtactaatcttgatcttcctattcatgagcttgttgcaagagacaagacttttactgatttaactcattgttgggatttcttggaactaaacacagtcataatacattttttccttcccaggaaaatggtagagcatgacttttcaaatctaataaaactcatgtgtagctaaaaccactctactgaaacaattccatctcagcccatggtacaagggattttcctgaatgaaaaatggtgtctgatcattttgttggtttctttgttggtttttcctgaaacttagggttaaagaatccaggaaagttgtcttagatagagttataatttccgtggacatcaactgataaatgcaattacagtttgtatgcctaggtttggcaaaaatcatataagcaacatccctcacataatattgttttaattaaattttatttctttcttggtatgaaacatactgcagaagcacaatcaatgaacattggatagtttccttaaatcttgctctttgtcctatttatataatttattgtgtcagtggttctcaagtggtatgctcctgcaactcatcatctgaaaatccttcccagatgtgctgaaaaattttcattaatttgtatattctattttatttttataactaagtacacatgcttgtgactggaagagaagacacccctcatttaatcccagaggaatatttggccttgattcatgccctgctcactccaccccattattaagatagagatcgctgaagaaatccctgctctataaatgtagctgatccaaaaacaaaatggaaattcattattttaaatatttctacaagatctttgtacaactctatttttttttcctattaagaattacatgattctagaataagttccaaccctaagtatcaacactggaacacaattttaaaacaggaggcgattatctctatagtgagatttaactacagaggtgatagctctggttagtgaatttcaggactagaaatcaggcctgctgtctcttagcttagaggaggtataataagaagaggattagaactactgtgtatattaacaagaagaactctattatgttcagctatcattatatatgatattatgtttctttttatgaactatagttcactgtctttaagcataatgtttgcccaaggtgggggtgttggtgtgtgtctgtgtgtatatgcatgtgtgcacatgtgtgtatgtatagttgattcattcattctgacctactgaatttactgaaggaataagaagaaataccttgaactgagggacctggcttagctcaacatctgtaccatctacctttgagtatccattcctttactatgaagcatggatgctaaaactaaaattgcatttgctaaactactttgtagctagattcctgggtgagattagatttggtcaattagatgttcttgtgtaacatttagaaggtgatagtaaggcaaaggtcatgtgactggctgattttatttatgttcaatgatctttattggggtacactttatatataataataaataatgcacacattttaagtgtacaatttgatgagttctgacaaatttatatgcatgtataaccagcatcaatatcaagatatataatgatcccctcattccagaatagtctcttgtgttctttccagccaatgccccacccctggattctggcaacaattgatctgctttttattaccatggattatatttgtctttcctagagatacaaataaatgaaataatgtagtgtgtcctctttaactttggcttatttctctcggcacactatttctgaaatttgtccatactgttgatatggcagacagaattttaagatggttcctaaaattcttgcctcctggtatgtataattttctctcggttttccgctgaacactaacctaggtgctattgtaaagggatttctcaagtgtaattaaagtccctaataagtttattttaagttagaaaaattttcccaggtgagcttgagctaagtgagtgacctaagcaggtgagttgttagaaaaaaattaagagatatttgaagcgtagacaaaattctgttggcttttaaaagaaaacttccatgtgatagagaaagccagatgatagggaacacaaggttacctctaaattgacaaccagcaaaaaagctgagacttcagtcttatcatcataaggaattgaattctgtcaacagccacgtgaccttagaggaggcccctgagccgcagatgagatcatggccctggccaataccttaaattcatcctggtgagatatgagcagagaactcagctatgccatgctcagatttctcacctgtagagcagtaaattaataagtgagcattatttgaagctgctaagtttgtggtgatttgttacacatcaagagaaaacatatgctgtatatattattagatttttcctttatattggtgggtgtatttgttatctattacttcctaacaaatcgacaataattaagtgtcttaagacaacacatatttattacctcatagtttctgtgggtcagaaatctgggcatggtttatgtgagttctttgatttaaagttgttggcaaatctgtaaacaaggaagcagtcaggaccgaggtctcatctgaaagtcaacttgggatgggtctgcttccagcctcacttaacataacagctggcaggattcagttgctcttgggtagttggattgatggcctcagataactaggtagctattagctagatttcaccctcagtttgttgccgtgtgggcctccctaaggtggcaatttacttcatcaaaaccagcaagggagagagttggctacaatctctagtaatgtagctacagaaatgacatccccttagcaatgagatattttattaattagaaagaaattactcaacaggaggggattacacaatgtagtgaataccaggaggctgagatcagaaggagctagtgtagaagctgcctaccacagtgagtagtattctattacatgaatataccagaatgtctgaatccacccaactgggcatagacgtttgtgttcattcaagatacagactattattattttaaaaataaaagttactatgaacatttaagtataagcttttgtgtgggcgtgtttcatttgttttgaatgaaattgcagggtcgcatagaaaatgcatatttaatcttataagaagctgcttaaaatgctttgcaatgtgattttaccattttacactcccaacaatgtatagcaatatatcatagatctagtggtttcatatctccacaaacacttgatattgtcactcagtttaattgtagctacttaaataggcttataatggtactcgttatgattttaatatgcatttccctaatgcctattagggactaattatgttaagcatcttttcatgtatttggaggccatttgtgtaccttcatttgtaaaatatctgtttaagtagcttgcccatttggattgctttacattttattatagagtcataagcatcctttatatattctgaatataactctttt

SEQ ID NO: 97 - DNA, 7156 bp, Homo Sapiens
aaaggctatgtattctgagctcatctggatcagaggagtcagcactgtcatttgtgtttggcagagactgaaaggcagatgttcgtctgaagatttcaaagcccactgctgatttaaggtcattcacattcagccatgaagctgctctgaagacacaggaactgcatagctccctactgggaatgtcaagggctgtgaaaggtctaaggttttatcctacttgcaaccaacaagctatgcagccacagttttatggatgctgtcaaaagacatgacactcctgggtaagagacgaaagactttaccacttgtggtgtagtagccagctggagcatcttgtgttttgagttagtgccagttgtcccctaagtcccacagcatgcagtttaggctgctaacaacagcatgagggcaacctgctgtggtgacctaagctatgacaccccaccccaagtccgggatgcagctaactgagcaaactgcatgaactgggaggcggccgaccattgttcacgcctctccttcgcgtatgtgttttctactgttcttgcactgtaaaggcagaggttgcatcgggcccttatgcaaagccccaaataattactggctgactcttctcagggaacatttgctaaccctgtcacaagccataaggttccaccacagattgccctgtggctctctcgttacgtttctgtgtggacgtttccacatggtctgaggcattcatccaagaagagcaggatgtattagtgactgcacagattctgccttggcccacaaagaggacatccagggcagtcctggtcatctgtaataacattgcccagtgagttgaggctgacctgagtactgacttgggttgagttggtgtcactgatcacttcagccaaagatgggacatttcttagcacctgttctgattggctgacttctatggtcaggataacggctctcaggatgcgtataactgccaagtctctccgggaagcttccctgggttaccaaggaatcctcatgtctgagagagctccaccatcatccaagggccacacggagtttcttgcaatgcttcaaggtctcctgtaataactcctatgatagaagtcactgtgttttggggaggtagactgcagcatgcagttttgacagcatgaccaaggtcattgttcaggtctgattattcaaattcaaaaaactgcaacctcaggcataaaagattaaggatggagcccaagtctctgggtccccaagggggactgaagcacatactcacccatctgaatatgctggagaacaggaaggagagactcaagcttgtctgggtctgttggatacagactctcccatctccaccccatcaggtcctatggaggcccaagttcagctgatgaagttaagggagtgctcagtgcagaagggtgggagggcacttggggcattttggggtcctgtttttgttgcttctgcatctgatacagcaggaattgaagtattgcacacttgtccttcccatttccaagtgctgccttcccatcagtaagagccacagttagagagggaccaacaggaggataactcccacatgcttagcattccaataatggaacactaggcataaattgataagatgctttcaatgcaatcagtactctgccaggattcactaagtagagaatgactaaatatttacccatctcctaacaaaaatgcacaactgaggacagatgttttgcacttttatgtgtctacggactgtgtaagaggatttggctgggtcatcatcttcttcttcttcttagactggttgatggtgaccgttcattgatccaatatggtaaagtcatgtcctggtctgtgttcttcggggtccacaaccctctttaacagcctgttgtaaggttctcgaccacgtcactgtctagctaaaccattctgcatttcagtaggtaaaccagcaggagggcttaaaaaccacattgccctgtccacatccctatttctgattcttttctggcctgcgatcctacatctctatcctcactttaaactgttttcctcttttcttctcctttttcctgacctcctttatgtttttcatttctcctccatctgaatataccaaaccatccttttgcttcctcttttctcttcattaattattctaggggctattttttttattaggaagatgtattattttaacatgctttataaagttagtggcattaaggaattaatgtccttggaaactcatacatgttcagcttctagaaacccctgattccaaggagcaaaaacatgccatctctgacagtgtccacaagaacaataccagatcagacgataaagccaacacacagcatagccaatggccacacatccagaaaacactctcaacaaatttaacccttcagtattcactgtagccaatatatattcaatatatatagctgactttgtttttatatttgatgaagtcctgctatttgaaataaaataatcaaaccaacaacaacaacaacaaaaaccccatacatggtgatagcatatgtgaggcagtagcaatttctccatcttttctgtcctgtctttcctgttcttcgttcccatgctaagaagggatggatatatctcggagattacacaggttctagtcaaagacttcattgtgaacgtttgtttcacattttccctggataaggactaattaaaagtttggaaaagtatacctttttttttttttttttttgcaaacttacccatattatgtgctttttcttgatacagctgctaatctttgctgtatatgtagtgttaggaagtctactttaatacacacacacacgtttaatgaggtaaaatatgcataacataattaccattttaacaatttttaagtgtagagttcaggggcaagtacgttcatgttcttgtgcaactatcaccaccattttttctccagaaccctttttatcatctcaaactgaaactctgcacccactgaacaataactccccgttctctcctcctcctagaccctggtaacccctcatctattttctgtctctgtgtatttgactattctaggtaccacattaacgtggacttacacagtattcgtccttttgtgactggcttagtttatttagcataagatccccaaggttcagccgggtgccgtggctcatgcctgaaatccaagcactttgggaggccaaggtgggtggatcacctgaggtcaggagattgagaccagcctggccaacacggtgaaacctcatctctactaaaatacaaaaattagctgggcctggtggcgggcgcctgtaatcctagctactaggtaggctgaggcaggagattagcttgaacctgggaggcggaggttgcagtgagcagagatgggaccactccactccagcttgggcaacagagcaagaccctgtctcaaaaaaaaaaaattcaaggttcatccatgctgtggcatgtgtcataatttcatttcttcatattcctgaaatacatttctaaatataaatttttcattactgttttcatttcaagttaagtttatcagatcctgtagtccagggacttcagtctctttgaattatgtctttcttggacaatttgggagctcttttgagaaactgaatacaatttgaatacactaaaatctgaatcacaccatagataacgacatagtgtcttagtgagaagaaatttgattctgctgactaggatactaaagtttgacctttatggtcatctcttaataaaataaaaggagagcactgggctattaaatagtttattcatggatcatagggtgaataagacctagatcctagaggaaatcctccccacaaagacactcagacttttattcctgtcaatgttcttgtggatttcagggagcaatgatggctataaatctgcaactcatagcatttcaggctaaacacattcagcctttattaccattgttcatttgacctctttatccaatttttttcccacccacttgccaatatcaccttgttcttatgtaggctgtgtttcagccagcttaagccttactaacaaatgaggtgaaatccatctgaggaggaagccggggcatggtggattgaaatagcttgcctcaggagcagaaaatttggtgtggatcaagaaatagaactccaaagtatacctttccagtcattggctttagctggagccagcatccttcaatgaatcagtcaacatttacctatctgttccccacagcagttttgcaaatcgctttcagaaatcattgaaccactaacagtttatccactctgcaaaatatacacagctcttcccatatccaggagggttatcccttctcagctgcgttcaacactttttacaacccctgatttcaataagcagaatacatccacctgcttagggaaattactcttaccatataattgcctcttatgttgaaatgtccatgagaccctctcatgaaataggggacaagataaagcacagattttcccccaactcaaacatgcctgtctcatacatgtcatgcccttggaaatggccaacactgctctctgcctcctgtttagggttaaggctttcactatctcttgccacctctgatgaaattactaacaaatatattatccttaccctttgtcttctattccagcacttcaaatgcatcaaaggtccagagagaagcttcttctggtcaccttgatcttgtgatgcaaggcaggtgggagcaagggctccacctctgcagacacagagatgacggggtcgccatgccggcgttttagtcccggtttcctctgctcgagtagttggtggcctcctgcctgttccctaacataacttcactttccttacctgcaaaacgaaattagtatttcctccctcacaaggttatttgcaacttacctggctaagctgaactccagaatttggactagaggcttcaggatgctggtgcagttcaagtctggtccacatgtctcctcctccttcgagggtcattgactactttgtgtatcttcttttcatgacagttcatatgagtgcaagatggctcgatagacttgcacacaagtttaaagatttttgtatacacctcattccattgttaaagcaagttgcatggtcaaatctaacatctctggacaaggacatgcattcataccactctactgcactgcaagctcacgcagaggagcagatcataaaacgtgattgatgcatgatgatgataatgaccaacctaccatcatggacatgaccgtatgttgatactaagcctcttagtaaaatgagctaaagaaaccagaactatctgccttcagctcagctgtctgatcaaaaacttgaaatctggaaacagtggtatctggaaaacctactaaaagtggctttgggaaaatatcaattaatgtcaatttcattaattattcagggaaatccaatccaaaatatcagagatgcttacgtagaatttggaaaactttaattttcaccaaatactcatgtgctttgggcttacagcatatgaattttggcagaagagaagtgaaccagaatagaaggaggaggggatatttaataagagattacaaaaatgctttctctgggtaagagatgtggtcttcatttaatgttcaacttaaaaaaataaaaattataccatggaaaatgtgtgatttacaagatatgttaacaagtaataaaacctaataagtggatttgtatttttttaagagcataaaaatatcagtttggctattcaaatgcattaggctgttatttaggtcctctttttctttatgtgcccagtactttcatctttagaccttactaatgctagatgtcttcttgtcttacttgatagttttatattatattttattcagcctagtgatgggaagaatacgtttacaatatgtttacattgcacattagtttcttgtcatatttccagagattggataataactgataacaagagacagggaggttttcaggattttaagtccttttttctaggacttgcttctttttgataaagcagtctctacactgggtctttatatagagtacttttctctctgtccataaatagacttggttataggagaaatggcggaacagtttgagagtatggagtttcaaagcagagctcattattgatgttaataatttattaatttattaaacgtggcatgtggagtgctgttctaaatgctttcatgcatcgatgcatgagggtgctgtgtgcagtgatgccgggtcacattgccaggatcatcctcaaggactgaatgacccatttgcaggagtgtcaggacagtggatgctgactgatcacagcaaagtctgtctccaggaataacccctggccgagcaagcagcctcactcccactggaggcatccttgaagggtcacgggccagcacagttccagaagtccccctacattagtatttatattgtgtgattaattcagctacttatgttgcatttatatttatgttttttgattattgctgtgtctatgtgtttatgttttttgactataatatttatgctgtttgtttaattctgtatcaattaaaaaaaggaatgaattaatggcattcgcagcaacctggatgagattggaggctattataaatgaagtaactcatgaaaagaaaaccaaacatcatatattctcactcataagtgggagctaagctatgagatgcaaaggcatatgactgacacaatgggctttgaggactcaagggaaaagagtaggaagggagtgagggataaaatactacaaattgtgtgcagtgtatactgctcaggtgatgggtgcaccaaaatctcacaaaccaccactaaagaacttgctcatgtaaccaaacaccagctgtttcccaataacctatggaaataaaaaaattaaaagatttaatgaaaaataagtctagaagaagttcttaacccttagagtcttgtggtcacagacatttagatccatatttttatatcagcaaaataatatggtgatgagcaaagcactttgaagcatagaaacatttacattaacataaaattatatggaagaaatggaataatgtttatattcaag

SEQ ID NO: 98 - DNA, 13201 bp, Homo Sapiens
actccgctcactcccccgccccggccaatcagaggccgccgctccccgcctcccgcgccctcccgcgccggcccgcaccctccagccccgccggcctcttcctaaatcccgagcgaaagcccaagctgaacatgaactctgcccggaggcgacgggctgcggcggagggggagagagaggaggacaggctgcgaccccgggctggggacgccagggcagggacagcgagcatcaggaaggagagcgtccggggaactcgagtggccgcgccctgggtcctgcaccgtgaggctggggggaccaggaccggcgggcgcccaccttggtcctgagcccagctgccgacgctgggccagcaccctctccaccgccgccctccagtgagcagagctgggctcaggcagcagcccctgggcgcgggaaggtagcgggagctgcatttaggggaggggggaggtagcaggagctccgccagtgggaaccttggagtgaattcgtcggcgggtgccaagtcgaagcgccgacctcctgtctctggactggggcccggacccctgcgtccccaaactgcgtccccgccttgctcgtcgcccggtgccttccttaggcgcagcagaccctcggtaaacagcggttaattcgatggaatcggatcacagggccctcggtgaagcagaaaggcggaggaaatccaggaggcagaagtgaggaccctggcgcctggcgccgctgcgttgttcgtataagaagaggcatcccggaaggggcttcaaaccacttaggaccgactgctgaaacgaatccaagcttgtggtgtctgcagaatttaactgtccgcctcaaccccagtttttgtttctaagattatcgaaaactgtgcggtttgagtgatgtgctacaaagtgtttaaaacagattgtttcccaaattaggggtttccacacaagaaatcgctgctgtcggcaaacacaggaactatctatggttaagacaaggtggtgttcgtaaccaaactataaacctacatatacgaggtggtaagagaaccagaccaatgaacagtttcaggctggcgtggtgtgcccgtgaacaaagaattgtaatactggcaaaaatctaaattgctttctttccctttattttctcatcactaaaattaggaaaatgaacagatatgtcaaatctcttctaacacccatgttctgtaactctcctcgtatgtaccttataataagacaaaggtaaagacatttccatgtgcagcgaggaaaagtaataataaaaattaaaacaactagcaagtatgaagccctctttttatacggtatgtgctgtataagcacttccctcatccacctctatgttttcacagcacctctcaagggcttggacacgtgcaaatgcaaactggcaaagccaggagtcaagccaggctgctcagtggcctttgtgcttcaccccagtttaatgcacccgtcttcagaagggacatcgtgtattaggtgcttcaacacaagatccacgaatatctcgtacatccctaaaatcaagcaaatgtcatctgaacccaattactgggacagccccctcattactcccacttacttttagccgtatcttccccaatccaatctcaagtgtgagccccaaaatacttctgatttttcacgcctccacttaaaaatcttttgattatgtcatattgccgttagggtaaagttcaaacaactcagctgattttgagggctacattggtgggtggtggagtactgcccgctttcccttcatactgtcatgacagtgaggttctgaactgttctttgtgcaaaccccacacgctctctgctctctccattcccatttttgcacgtgtgagtctgctgtctcctcttctttgcttctccttttcctaagatttgccaagccaactactctacacctccatcggattttagtttacatgtctctccccatgtttctccccactagaagcctccgttgatgatccctttctagactgtgatggacgtacctcccatagctcccattgcaccattgtactaaacttggaccactgcaactgtcatgtgtctatttatcccacatgtatataaacgctatatgttgtttatcactatatcttcagtaataataaacaggtaacataattgcataagtgtgtatatcatagaccatcatgaagtgtttattgactgagaaaagaaatatacatcgttgtgaacataatgaaagacgtcatttttcagaacaaacagtttgataatagatggtattgatgagggggtatgaaaacaaatgcttcctcaaatttttgatatactttaactagtaaaatctctctgatggtaaattttacaatatctatccatgtttgaaatgcatgacctaattaactaagcaatttcacttctaaaaattcgtcctctgatatacttgtaggtatacacaaggatttaagattgaaaacaacctaaattgttattcatccaaacaatggaattctctggaactgtcaagatacataaggcaagttaacattcattaatataaaacaatctcaaatatataatgttaacaaaaaaagaaaaacaatgctcagagtatttagtagtatgctatcatttatggagaaaagaagatctatagagatataatatttctggaaggatacataagaaaatggtcacagtgaagcggagttgaatggctctagctagagtcttgaggttttgcctgattcaataagtacatgccaacagaatgtctcccagcctatcagaaaagccagctggacctctcaagtgtgtatttatatgtttaaatagtgtattaatgggttgctaatcagaggaatattgggtttttaaaaaaacagtcattgaacattaactctaacttaagacagagcgacatttgggaagcacaaataattccagcaaaagacaaatgaattctgttgtggggtgatctcctgagaagttacttaaaatattagtcattctcttagacaatttattttcctttctatttttcaacgatcaccaagtaaccttgtaattattcatcctgcttcttagtttccttgacactaaaaagtggaatccttgaaaatgggtcaaaagcattctaatcacaaaaataaattgacattctgctttgaaactgcattgcatgtgattttgagtaacataagtacataaccaagaaaatgagcatctctgggtatattgaaacatccagtgtctggacctggaagtataatctcagacctcagatggacaatatttccatgactgggcccaaagccatgccccatttggtgagcttcctaactcacctttctattattaattactgttcaatctaaaacaggtgtcatcctagtcttaaataccaaccttgagtctcctaaatgccgagcttgataaaagggcttcaatgtgaagtttgaaagaaagaagaaaaaaaatttaagtctagataagactgcaagaccagataataatgagaacattatatttaacatttttaaatgtatgtagttttcaggaatttcaggaattttccagaaataacacagaatgtttttttaaaaagtgacacatttaaacatgcatatgcacacattggagacctcagttatgtataaaaccaggaaaagataatagagcttttgaaaatgttgtcactgaggaaaaaaagaaaaagaagtttccaggattaagtttccaggatgtatcatgttgtacagaaatgataactgagctctcttgtcaaagcctacaaggccccacttggtctctcctgtgcctcctccatccctgcagtccctcaccttctgactcagctctcctaacatcccatttctcatacatgctgtattagtccattttcacactgctataaagaactccccgagactgggtaatttacaaaggaaagaggcttaactgactcacagttctgcatggctggggaacccttaggaaatttacaatcatggcagaagatgaagggaaagaaaagaccttcttcacatggccgtaggagaggcagagcagagagtgaagggggaagagcccctcataaaaccatcagatctcgtgagaactcactcactatcttgaaaacagcatggggaaccacctccatgatccaatcacctcccaccaggtccctccctcgacatatggggattccagttcgagatgagatttgggtggggacacagagccaaaccacatcacatgctgagcttattcctgcctgcccgtaaagctctacctcagaggttcccagactttctcagttcacaccaccctttactgaatgtctcagtaattatttttcctggcacttctaggctgagatttatgaagatgaacctaacacttatgtttattaagtattcagatgctaacaattcaataaacatttacttcttgacaacattagtagctatttgaaaaaaacataaattgaaagaaaaaatgtttgtacttcatttgtaagcagccacaatcacttaccaatgggatagtaatgggcatgacacaacctctcaaatcttaggatcatattagacaccaccaccttcatttcctgttccacactaattttcatgtggtattgctccttaataccacatgaaattgcaaccaccaaaacccagctttgcaaacataatgatgtcactgaaagaatgtagtgtaatctagtgttgaaactatcaactacattgagtcagtagtatgcatggtgtctaacaaatgtcaagtatctctgagtttctttcaaaattttaatatatcctgcggtgcccctgtgaatatacggcagaaacctgagcacctccatgaacctgagcacaattcctgaactatggttcatatttttgtattgtgtttgtttttgtctgagttttctagaaaacagatcctgaggcaaaacttacaagccaagactttatgtgaagttgtaattccaggactcaagaatgaaggaaaaagagaatcaaggctgaaaaggaggggaaagtaaattcaaggtggcgagttatgaatgactacagcatcacaaaacaacatacctgctttcttggtcaccagcacttcttccagacaggacctacatcattatatccagaaacattctgtccacaggagagagtggagattctctgccaatgtcttcttgtctcctgttgaaactggttgaagtttgtcccttagagaactaattaattcaccctcacctccaggttctgttactggctctttatggcaactgctagggaacccagatcccccagtgattggaggaacctctgaggatacagactgattgcacctgagcaccaaacttgtgagtctccttctaatgcaatctcagtggaatccagtcactgggagaggctgaggtcactggcacagttgggatatgaggcactggcaatggcaatggtggcttgggctggccactgagcaagcaaagacacaaaggtgtgagagaatagatggaagccagccattctggggacataaattgtgtcttatgtgctccaattcttcttatcattcaggtcttacttctcatgttatctcatcagagaagcctctcgctccctaaactgcccttctcagccattagctaacatagaactgtgtctgtgttaaactgttcccgtgttcaacctagagttgaagattgtcagacttatatcatggccataaaaaatatgaagctacagtgggagcttgctgaattagtatggagaaaaatattttaggttctattgataggaattgatttcaacaggcagtgtctaagctagatttaactaaaaatagaactattatattgcaaggagggaagaggtctttagattacccagtccagccccctctcatgcatggtgctcccacagcatctcttcatgtgatttttttttttagacttaaacaattgaagttacagaggagtcactactttctaagacaacctagtcattttcaacaggctctgtcataaagtgctttccattttttttttttatcattattcctcattcgaactgctggtgtaccaaaaaaacctatgtataatttacaatgactgtacttgagcagctagtttgcggggggcaaattgaggaattagcttgcattcccactcaatttcctcttgctgtgttctgactctcactctctcaggcaaaagtctttgggatccagagtctgacattcattgcattcactatttttcttggttacttatcaagagcaggcctgatctgcagcaaactcaatgaagtcaccaataaatttcctcccaaaaaggataaggttggcctcagaatgtgcaatgcactcctggaaaccttaattcattctgacagtcatttgttttacaggcagttggtaaatgtctacttgtaattataatgtactgttcaaggtaccagtaattcagtgaggaaaaactaaagaccctgctcttttggtgctaaacattccaatgttccactaattaataacttctgtgtatagttattaaaatccatattaaaacattcagctggactctcattcaatctgcattcctgtatttgtgtgcaaagtttggttggtaaactatgcctaatattctttttattgcatttccctaaggtatcaaacaagaaatgctatcaaggaaaatgatgctaatctaatatgactttttaattaatccatttagatttgcagggaacatatatttactgtttcagcatattacaaagactttttgagcctcttcgtgtatgaacattctgctaatgctaaggattcaaagatggatacaattagataacttccctggaagagactaccatttaattgtaataaatgaaaaccatttcctttcgtcttcacttctttttacgtagagtaatgaaagtcaagtggcaaacaccttgaccttttaacttaaaagccattcacattccctttctccatcttcctagaatatagagatgtacaagatgaaatgctttcttttccactgcccttaagtgaagtgtgactatgtgacctggttctgaacaaggagatcaaagccaaaataatcaaatggagcttcttctggagatgtgttttattagtacagaaagataatatgccctctcagtcctttgcccttttccttcttcatgcttagagaggagctcaatgcccacaagtataataaccgtcttgcaaccatgaaaatgaaaaccattcactaagcatggaagagtcagaaaatgtaataggccttagtccttgatgacttctttgagcagttgccagccgactacagtccacctactgctagactttttattatgtaaggaaattaaactctgatctgtataagccactgttaagtggatttatttttttctttacttgcagccaaatgcattcttataacatggcacaaataaattcagaaaaatacttgatatattgattgaaatattcataataatccatataaaataagatatttggactatcttgtccctaaaattatacttttatggataatttccaaacttaactataaaattagcaatattactctttaatcaaataatctcacttctagaaatgcatcttaagaaaaaaatcccaaatgaagattccaagtaaagaaagatatttgttatagaattgtttataatgttaaattaaagaaagtgacttagctggtcaacaataggaaaataattaagtaaatttttcaatgtccagtggaggaaccttatgcagacctccaaaataatagttgtgggtctaagtagaaataatacaaattgctgatgatgtgctaaatgaaaacactaggatataaaattaagtgataccatccttgaaactatatagaatatgaataaacaaagaaaaggaacacaaaacaggaaattagttgactttaaagataactcttaatttttaaattatttatagtgttacacttgtaagacattttaaatgataaatattattttattaaatactgtattattttaaaatatatcttctcttgtgcctctaccagggacagaggtattataaacctatggtttagaacactggaaaaatataaacagagctatagatttaaacaaacaacataaaacattttaattcagtatatagaggtaaaattgggaatgctcataaagattagaatggttccactcaagaatgaacatgaaatgtaaagtcaaataaggtaaagaaatttggttatggttttgttttccttgagtgtcatgcacaatgaagttattttaataattaaggttgtcttttgcacaaatgaaaatggcaataataagatgtcagagctgtaagggatgttggagattatctgtcatcatctttcactcacaaattaagaaacagaccttgagaagataaatgactcacccaaggtcacataagtagtcagtggagaaggagcaatgaagttcaggtctttttcaatgttattcatcccccagaataaacacgcattaaataagcattcattaagtagctagctattctgtgctagctgtatttggacactgtgaatatacgggacactgtgtttcacactctacacaaagataagttgtggacatatcctacccttaaaggatcagagttttgtggggtgaacattagggtaataattataagacatattgatataagtacttgcattctactaagttccatgtgccttggggcatgaccttgaaggacataacataacatttggtgtctgagaagtctcaggaaagaaatgacttttgccttatctctaaaggtttgagtgaaattttaccacccagaaacagcacattgcaaaagcacagaaaaatgaaaaacttgggtgttctacagaatgcagaatacattgatatggcacaaatttggaatgggggtaggtggcaaggaagaaggggaggcagatgaggctagagtggggcaagttacagacacttggagagattcttctattctgaggattttgaaatttgtggaataggaagataaaatacatggattattcctaggcaggaaaaatggtataatcatataatgtaagtttcagaaatgtatcaaggtgtggaggacaaagctggacaggaagaagcaggaagacaagttatgaggctattgaggtagtctgtgcaagatatactaaggacctgatatgaggaagtgacagtgggctaggaaagggaataaatacttgaaagatatttctgaggtataatttttaaaattttaacaaattggttgtaaatagggaaatggtggaataagagttaaatccaaccatcctgaagtagtttaatcaataagtagctctagaaattttaggcaaatttaaataacacaaaaaccctaaaagaatttaatttgctcctatctgtacgtcacaaagtgatgctcaaaacttccataattagcacatcaaatctcttggtaatcaaatgcaagttttgcaagggagatcttgaattaagaatatatatcacacttaccaagactgaatcaggaagacatagaaatatgaatcagatctataactagtaatgagattgaattattaatcaactatcaaacaaaggaaagtccaggaccaaatgggtgtcactggtggattctgctaaacgtttaaagaagaattaacactaattatcctcagactcttccagaaaattaaagagttccaaactcattctataaggccagcattaatcttataccaaacccagacaaaaacacttcaggaaaactatagactaatatccctgatgaatattgacacaaaatcctcaacaaaatgctaccaaacagaattcaacagcatatttaaaagattctacacaatgactatgtgagatttatttctggaatgtgaggatgattcaacagatgaaaatcaatcaatgtaatatatcacattaacaaatcaatcaatgtagtatatcacatttacaaaacgaagggtaaaaaaaactcagtcgtctcaattgatataaaaaagaacctgacaaaattcaacaaccttgaataatacaataaaataactcaataaactaaggatagagggtaactaccctaacataataaaagccatatatgaaaaattcacagctcacgtcatattcaatggtgaaagactgaaagctctgtctccaatatcagaaacaagacaattatgcccacttttgccatttctattcaacacagtcctggaagcttaagccagcactattaggcaagaaaaatcagtaaaaggctacacactgaaagaaagaggtaaaattatctccgtctgcagacataatcttaagtgtagaatgctttaaagatttcaccaattattattttttaaactactagaactaacaaattcagcaaagttgcaggatacaaactcaacacaaaagaagcaggtgtgtttctatacactaacaatgagcaatccaaaaaaataagaagcagcagccaattccatttacagtagcaccaaaaataataaaatacttcggagtaacttaaccaaggtggtcaaaaaattgtatattgaaaactacaaaacaatgtttaagcaaataagacacaaataaatggaaatatatttttgtttattagttaaaagacttaatattgttaacatatcagtactacccaaagcaatctatagatttatgcaattcctgtcaaaataccagtagcattttttgcagaaatagaaaaatccattttcagattcatatgaaatcacaggggaccccaaatagccaaaacaatcttctaaaaaaagaacaaagatggaggttttacatttcctgatttcaaaacttattaaaatgctatattaatcaaaactatgtggtactggcataaagacatgcatatagaccaatggaatagaataagagagctcagaaattagctctcatacatagggtcaaatgatttttggcaagagtgtcaagactgttcaatggggaaacagtgtctcctcaacaaatgatgctgggaaaattggacatccatatgcaaaagaatgaatttggacctctatcttacaccatatacaaaaattacgtcaaaatggatcaaagatctaaactgaagacctaaaactataaaatgcttaccagaaaatatagaggaaaagctttatgatattaaatttggcaaagatttcctggacatgacaccaaaaacacaggcaagaaaagtaaaagtagacaaattgaaatatatcaaaatataaaacttctgtgcatcagaggacacaagcaacagagtaaaaaggcaaactatggaattaaagagaatatttgtaaatacatctgataaggaattaatatccagaatatattaagaactcctacaactgaacaacaacaaaaaaataacctgatttaaaaatggaaaaaaatctgaacagacatttttcaaaagtgatatataaacggatataaatggccaacaagcatatgaaaagatattcaacattgttaatcattagggaaatgcaaatcaaaaccaacaatgagatatcactcacacccattagaatgaagaagaaagaaaaaaaagatggaaggaaggaagaaaaaaaaagaaagaaagaaggaaagaaagacagggaaagaagagttgataaagataaggagaaattggaactttagtgcacgattgggaatgtaaaatggtgcagacacaaggaaaagagtgtagcagtttctatatgatccaacaattccactgttgcacatatatatgcaaaataattgaaggcaagatttcaaagagatagttacatactcatattcatagcagcactattcacaatagccaagaggtaaaaccaacgcaagtgtccattaatggatgaacagataagcaaaatgagatctattcatacaatgcaatattaattagccttcaaaaggaagaaaactctgacacagtcaacaacttggatgaattttgaaaacattatgctaagtgaaataagccagtcacaaagagacaaatactgtatgattccacttaataagagatatctagagtcgtcagattcttagaaatggaaagtagaatggtgattgccaggcaccagggcaaggtgaaagaaacagttgttatttaatgggtacagagtttctgttttgcaaatgaaaaagttctggagattggttgtacagcaatgtgcatatacttaatactcctgaattatacaattagaaattgttacaatggtaaattttatatatattcttaaccacaatcgaatttttgaaaaaagaatactagtggtggaaaacctctgaaagaagggtaaaaaactatgttatgggcaacaatgaaaataaatttacactgaggccacaaattattgaaattcatctctgactttaagtctcagaccatgagcaaggaaaataaattctcttaagaagataggcccaaatgactaagagtcaggtagaagcaatttgcaaagcaaggaaagaaataatttcttgatggagtcatctacactgtgatgccaatccctgcaccagttttcgttggagcgtgccctcccctcttcattaatcaaaggtaatgcagaattacagaatggaattacttgccaaagagttttccattttctgtccctgagatgatgctgattggagcgagaaaagttttctgaggacaaatgctcacgctcttagcaccagagtttgcttgtagcaaaaacagaatgcttagaggtgtgcttttgttattattctcagtggctctggtgagcccagtgcaatcagcgatactcatccaggccaattcaccattagggagccgcacatgaaaccatttacatttcccattttgtttcaagcaagtcaggtctttaactggattgtggtaattgaaccttcctgttacaacactgcttttgctgcccaacggattcaaaagctgctctcgttacatttatttgaacttttatttcattcatactttatacctctggttctcaatcttcagtcctgtagcgaactctataaaaggaaaaagaaattcttacagactctcacagattcatttaaattctttttttgttttattttattattattatt

SEQ ID NO: 99 - DNA, 3564 bp, Homo Sapiens
tgaaattccacatcctcgggctgacaccgattctaaatgatcaaaggcagaagatttataccagataaagccatatggattgctggtctaaaattcaaggcaggttagttgacttaattctttggtgctggtgactgttagtttgtaaaagttcaataagtcagatgaaggaagggatggtgccgggagctgtcaagctgtactggtggggtctgtaattagagctaactggagggatcatgatgtctactgtccagtttggtgttgagccatggctctcggtagaagttgccggctggggcctggtcaggactggaaggagagtggtgggatgtgctgtgcctatggtgggctagctgcagccagtggggtgcctgccccacactgctgcccaccccttcatcagctgattctgctcccacataaagaaaggtgttggcttagtgtcacttcttcctagagccatgggagttttctgtcagcatgtttttgagctgtcctggtaacttggacgggaagcagtctggaggtgggtgccttccaaatctctgccacagaatctgaacttgcactttgcagcctgttagtcagagctgctaagtttgctctacctggtgtgcctcttggcaccacctgagagatgtatgtagagaggctgctaagaaatgagtgcccctggcatgaagacgtcatatcccagatgtttaacttctggctggagggagggaacttaatttggttcattatctactgggtacctttcctgtgcggaggggaggaccagtgactttccataataagctttctcctttaaaaaaacttcagactcttacttactcttttggttcacactaattagcattcattttccagagaaagctgcttgactttgaggaaataaagacaggtgtccttaaaaatggactgcaaatctggatcagtgtcaggtctgctttagggtccatgaaatcacccaagagtgttggtactaaaagtggtgtaggctgggcgcggtggctcgcgcctgtaatcccagcactttgggaggccaaggcgggtggatcacctgaggtcagacattcgagaccagcctggccaacatggtgaaaccctgtctctactaaaaatacaaaattagccaggcatggtggctggtgcttgtaatcccagctacttgagaggtcgaggcagaatcgcttgaaccaggaaggtggaggttgcagtgagccaagattgcaccactgcactccagcccggttgacaagagaaactccatctcaaaaaaaaaaaaaagaaaagtgcataggggtttgttcccccaccctctgaaagaccccaaggaaattctagaagcaaaaatttgacctcttggagcacagagactaagtataagtggaagaagcagacctaaccctcctcccaggcagtcagtcctatgagttttaggctgaggtttcattttagcctctgatcgatgtatctgtaaagctgatctaaactcccagtttcctagaagccactgctgtgagcctgggggttgtactgaatggctctgctggcacccaagagcagctgactccactgtcactgcccccgtttctgagcctccagacaggttctgggaggagccagccccctatgaattgtatcacttgtatagatagagatttgacttcaggacctccctggatggtggagattgtgtgtgcccatgtgtgcaaggagatagatagattctcaatccagtgaagcagtagccagctagaacagaacactgattgtgggctattaaaggagtttctcattagttatggcaccagattcccagcttccattttggctcaaaaaaggagcctaaaacccacttgtgggataatttaataagccattagatgcttggagggcaccaagccagccttgttgctgaaggatttactagaaagggcctaggagtccttcttccctttttgcttgctcttcccctagccccagttaatttaactatcactgtaaagctgctgtaaaccagaatccagttttttattcgtaaggcaccaggatagaactgttcttgccaccctcctatttcagtaattgcctgaatttccctgaaagggtgacatacttcacttcttgacatttaggaaggacagtggccactcagtggcaggtgactgtcccgaggatgcagtagacaagccagcatgctggctcagactgtaaattaggtagggtttgcatagctgtttctgactacaaaaatagcatgggtgttagttgaaacagtgcactgaaataagcagtggttaagttttgaacctgaatcctttaaagaaattagtctgaggtaaaatgttttaaatcatttttgaccttcagcttgtgcctctgacagagcttttgtcctaaagctgagagtagaagcaggattagatgtggtcatctgtggtgtggacacagcagacctgccatgtggactgacggtagatgggagaaccgcttgttagtgttctgggcttcctgatgatccccccctcctccccgtagaaagtctgtcatccgctgtgacagtgtcagtgaaaaagagaacaagtttccactgccagctctggccctcaccccaactcctttctctaagagtaacggggactgggcatagggaccccgggcaggagctagcggcatcctctaacaagaactacatctgtaaacaataaggagaaagccaggtggatagatgaaacctacaggagggcccttcaacaggcctaatagaagggtcacttccaaactggcacgagcagttaacagtgtcccttaaatctttctctggaaggaaggaaagatcaattacattcacaagttcacacttctgcctgtgctcctcaagggcagctgttgaggcctggaattcctcactggtcagagaggtgtgtactgattgtctatggcccgcaggtggctccgggaggatgagtccatttcgtagtccgagtcccgggctcgattcacaggctcatgctccaggtgctgcaggctgttggccagttcttcgggcgaaggcaccaggtggaagatctgctcggggggtgaggatcgccctgggagaccctctgggctgagcccccggggacagccagaagaactaaggtggggaaggcccaactctgaaccccagtgaggaagggactctgaatcccagtgaggaagggagaaagggaagaggaccgtgttgcaggaacctaggacaagtgaccaagagagaccacaccatcagtcttgaggcaagtgctgacaggacacagaacaagatacctgtacccctgggtctgcagcaagcctctaccctctacccagtgtcagccacccccttcagcaaagggcagtagggtcagacctggtggttgggagacgactaccacgtagctggagagccggacatcacaggcggcgccgcactcgagtgggatgggcgagcgctggaagtggtggagcatgtccacgaccgagggaaagtggaggtgctgcacacggcactggccccgctctgtcagcgacaggcgc

SEQ ID NO: 100 - DNA, 2986 bp, Homo Sapiens
aacttggcctgtgattcattaaaatgtttcgtgaatattgccaatcttccccacttcgttagacttttcccctgcttctactctctgtgtctggctcagtcttgtcctggcctctaaatgtgtttattctatacagtttgtgtgtttgttcatttattaattcaataaatatttattaagtatctgcttatcttaagcacttatagtcacagatgttcataccattaagcatgccatccaagataaacttgaaaagtttttgggacttgatacattgcagaaacatcaaacttatttaagttcaatgtacacttgaagaatctgcattattttttcctatctagaaattttatactttaagaccctgagttactctttacatccaaaagaaccaaagtcatgagattaaattaaaaaagggtttggtagatccagagaattattagctgtcagtgttagggagaatagcattaacattttatggggtatttctactttatgcctatcacctcatatactataatctcatttcaccttaatatatataggtatgaagtatatatttatatatgtaatatatttatacaagtaatatattaatcccataaaaaggtataaaataaaaaataacgtatcttcactccatcatctctcttccctttgtatatatatccagaaaaaaggttttatgcatatacctgtatgtttagaaatacaatggatatgtgcatatatgtatatactttttattatatatgtataactttaattaacacaaatagagtcatatgatccacaccactgcctatgtagcttttaaaacataaatacatatgggagctgtttcctcaaaagcacatacagaccaagctcattactgtatttgactgtgtggcattccgtagtatgagcgtaccagagtatattacctggttcctattggtggacatttagattgtttcttgtttttataattataagtagttataagaatgtattaatatctgtgtcttggcagatatttttgactatacatctccatagaaaactttctaacatgaaatgactgggttaaagtatattggtatttagaaatttgatagacatagctgacttgctatcaaaaaatattatgtaaatgtacacttttccatcaataatagaagttgaaaacaaaattttagtttctttttccacacactatcgccaatattggttattttggcaaaatgatatttcatttttttatgtttctttaaattttagaagttgagcatattttcatgtttacaggacctttttattagttttcctaaaagcttcctgttcacagcctttgactattttctattgcaccatattttaaaaatggatttatattaggtcttttaaaattaagaaattggctttttgcatccacattgcacatagttttctaagtattttgtcttttgactttatgcatttttatgtacaaaatgttatatttctgtgtagacaatttatcattcttttaaaattgcatctaggttttatgtcctgtttacaaaagcccttccaattccaagattgtaaataaatttgcctgggccttattctagtgtttttataggtttattttgaaaaactttgattcatctggaattaaaactttttcgtggcataagaagcaatataatgatccatcctctttccagcccttcaccctttcttcttccctctctctctccctttgtcattggctagctacatgtcctaattctggttactgcatactccattcttacccctgctttgaaatgcctcttttatcatgttagtatctccagctcacatatgagaagctacactaacaaagatagtggcagagccagaatttgattccttgttaatttaaagctaaggtctgaccttttctcacttcagtgttttggattgatactgaggagaggcatgtttatcatcttttcaaatttgctttttttttttttttttttttttagtttttgtgggtacatagtaggtgtatatatttatggggtacatgagacgtcttgatacaggcatgtggtctgaaatagcacattatggggaatgaggtatctatcccttcaagcatttacactttaagttacaaacaattcaattacactctttaagttattttaaaatgtgtcatcttaatttagatttggattttatttattactttgaaactcagatcctcaattcatgccatactctcctcgttggtccaggcatgacttttaagttaattatttatttttaatataaataaacagccatatgcccaccactcaacctggaaatgaacattgatgaatatggtttttttcctttctagttccttgtctttcctacttgagtttccctattctaaatcttgtattgatttatctctttttttaaatatgggaaatacgttacttctggtatgttattataagaaaaataatgctatccttcctaaaaataatgtaatttagtgttagttatttttaactttataaaagaggcaagaagttgtatgtaacattttgggacttagtttttagctttttttttttttaactcaatgtcatatttctaaaattcatccatattcttattacagttaaattgttactgataatttggaaaaccgtcagcattatcttatacagttgagtctacacattctttacaactgataaatttcactctcatttatatatcccacagagactcttgcaatgcctaccagagataagtacaagaatgttaatagcagcatgtttgtaatagcaaaactctagaaataatccaaatccccatcaataggagaaaagataaataaataatgggatattcacatcaaataacattttgtactattaaaaattttaatgtaattaggctcatttaaatatttatcataacaaattcaacataatggagacaaccaatgtttcactaatttatgatg

SEQ ID NO: 101 - DNA, 1146 bp, Homo Sapiens
ttctgacaggaggagtcacatgcctaggaagtatcctaacaggatgatgcagcatgaaggcccccctcagatgctggtgcaatgatcttggacttcccaacctccagaaccatgagccaaacaaatttctattgtttataaattaccccgtctcaagtattctgttatagcaacacaactggactaagacagagggttacacgtatctttcacaggaattccttggggcttaatacaaatccttgagagttctagcccagatgcagcctagaaatgtgaagatgaaggaggtaggtagtagggttgttattaatcctaggggaaaccctccactatgggattctgaaatcagcagataaatgctgcagcccccagacttgtgaagaaatttttgagattcatcttctctggttcttcagcacatcaccaaggcatggacctgcagttggctccagctataactagctcaatgatgcatccttcactgtttttctttctttccccatttttctctgtatgtttccttactttagcttcctgggatcaactcccaaataagctacctgaagccaactgtttgcccaatacactttcttcaggaaacccagtctgagacataagaaaacaaatcaaatgctaattcagtggttcagttggtaaaaataacagagactcagcctagttggcactagtggagataaagaaaagaggacaactttgttatgcattttatagacagtcatgaggcatgcaaattggtgtaatgtatgcagaaaaagaaagggaaattttcagtgtgatactacagttagtccactgtatacctagaattgtctttttcagagaaagatggtggcctttggaaaaggtacagatttgggaggaagatcgttaattcaatttgggcatgttatgtccaaactacattaaatacttgagaactatttctttaataatggatgagtgaagtcagttcatttccaagcttcttatttgtcttatctgtgaaagaaaaattgtgatgtctagtacccagatatgtaaaaagtaaatgtaatctaccacattaaagctcaaaatgctcgatgtttttgcaaatataaaataatgtgacttactttaaagataataaattaaatattaaac

SEQ ID NO: 102 - DNA, 2196 bp, Homo Sapiens
ggcaacctgctggggtctccttccgcattgtggctgctttgttctttcgctctttgcagtaaatcttgctactgctcagtctttgggtccacgctgcttttatgagctgtaacactcaccgcgaagatctgcagtttcactcctgaacccagcaagaccacgagcccaccgggagaaacaaacaactccagacgtgctaccttaagagctgtaacactcaccgtgaaggtctgcagcttcactcctggagccagtgagcccacgagcccaccgggaggaacgaaagactccagacgcgctgccttaagggctgtaacactaaccgtgaaggtctgtagcttcactcctcagccagcgagaccacgaacccaccagaaggaagaaactccaaacacatctgaacatcagaaggggcagactccagacgcgccaccttaagagctgtaacactcaccgcgagggtccgtggcttcattcttgaagtcagtgagagcaagaacccaccaattccggacacacttccacatcttcaggtttgtcaggaagacctgcttgggacccctctctgcagcagagagcttttctctttctttcgcctattaaacctccgctcttggccaggcacagtggctcatgcctgtaatcccagcactttgggaggccaaggagggcagatcatgaggttaggagttcgagaccaggttggccaatatggtgagaccctgtctctactaaaaaaacaaaacttaccctggcgtgggggtgtgcgcctgtaatcccagctactcgggagcctgaggcaggagaatcactggaacctgggaggcagaggttgcagtgagccaagatcgtgccactgcactccagcccgggtgacagagcaagactctgtcaaaaagaaaaaaaaggccaagcgcagtggctcacgcctgtaatcccagcactttgggaggctgagttgggtggatcacctgaggtcaggagttcaagaccagcctggccaacatgatgcaacaccacctctactaaaaatacaaaaattagctgagcgtagtggcgtgcgcctgtagtcccagctacttgggaagctgaggcaggggaatcgcttgaacccgggaggtggaggttgcagtgagccgatcacgcctctggactccagcctgggagacagagcaagactccgtcacagaaaaaaaataaagaaaaagaaaagaaaacctcactgttaacctcaaaaaagatttgtctttcattatgtccctaaatacacacatcagttacttgtagcatgcatattcccatttcaatgctctattcacaaataaacgtcttttcctttagaaagcatgtttctgttttttatttaagttgacatatatggtgtcggaagtgagatctgaacagtatcactacaggaaggaatcagcaatctttggaactggtgtgcagtatatatttgaactctttgagatctctgcttcaatagctcaccttttctaccctggcaggatacagttggaaacattggttatattactaaggctttgactgaaatgttatatttaagaatatgcatacaatgcctagcttcaagagttcctggccctacactaagtgagtcaaacttgacatctttcagccaggtgtggtggctcatgcctgtaatcccagcactttgggaggccgaggcgggcggatcacctgaggtcgggagttcgagaccagcctggccaacatggtgaaaccccatctctactaaaaatacaaaaagtagccaggtgaggtggtgcgtgcctgtaatcctagctactcgggaggctgaagcagaagaatcactggaacctgggaggcggaggctgcagtgagccgagactgagccactgcactccagtctgggggacagagtgagactctgtctcaaaaaaaacaaaaaaacaaacaacaacaacaacaacaaaaaggacatctttcacatttgtcccttttgatcaagatctggcagatccaagaacctttaaactctctgcaggcaggaacaatccagcaggaagatcactgagccaggactgaggtgatttctcatcccaggtttaccactgacgtgtcatgggtcttgaggtaaacaacttaatttatagggtcttatccacagtccactgcagtcctgctagtccctggactgctcagtctggcatg

SEQ ID NO: 103 - DNA, 3914 bp, Homo Sapiens
aggctgtcaaaggcaattgccacaagaggtcaacgccaaggctgctctgcagatatgaccagggctcattttttccatgatcttagagaaactggataagcccggggcaaatcgggcccagagatgagatggtaggacattatggcaggccctgaaaccccagcgtgccccagcagaggcctgtggtggcctctggggaggtgggcggtggtggaggtccgtgtgagagggcagcagcagcagcagattaggccctgtggaagcccacttccttccagagacagtgccaggggaggaagggtccagactgagggcaggacgggccagggggtgtggcaggcggatgcccccctgggcaggtgacctcatccacccctcccgtgtcgcctcctctgatctgctccctctggagatggggaaatccagagtaggggcaacaggaagtatattcccaagaagactgtagacccccgcacagggaaacgatggagctcaggaggggcgctgatctcgggagcctggatccaccagttatgcaagtgatgaagtgagtacgcacggtcctcgaggccagggccggcgcagtaagaacgaacaggttgttctggaaaattgtctggcagcctccccgcggcctgcctgcaggaactggcatctgtggagtactttgccttgcttgttgatccacagcacttaccacatcctggagaaacaggtcaatacaggtggccctcaggagccatgggccccatgtttggaactctgacccacacaggggcaacctgaactcctgagccatagccaacccctcccacccggggcctctgatgagctgggcccccctgcaaataacgttcctgtctgtttccatctgtgagctcctgctcgcgatctaaggcccagctgaaagtgcttcttccttcctgggccaccttcctttcattctcagcttttctaaattatgaacatttcaaacattcccaaaggagagagagtgcacgatgcacctgaaccatatgtcgcccagaatccatggctatcaagatcttaccacagttgcttcatggatccctgcctctacttatttctttctgagttgctttaatgtttcacgccactttatatctatgtactagattttgcatctctaaaatagaggggcatttttatacgtaatgatgttatggtcgtctggcctaaaaattgccaacacttccttgctatctatcattcaatacccagtccatattgaaatttcccttctgaaaattaatttttggaatcaagtctaccatcggatttggttgaatttctgaaggaagggggtccattgctctgccgaatgtccccacatggcttctgtctccatccaccacgtatgtccagcttgcggccctgactctaggtgccctcaattatgcccactgtggaaacggcctttctgccacatctgaagcttgagccttggaggcaggcatgacgtctcatctctgtgttctttgtggttcccaaggcaatgcgtggtgtatccgaagtgctccactgagtctcgaaaacgtccctgcattggagggatcatggagtgaattttgtctttgccactccacttacaacttcaagtctggagattttgaaacaccccatgactgggagtgaccgctggctcggagaggtttgtacacagagcagagggtagactagatgacccttaagatccaccatgactctgcaattcaggcatgcggaacctggctgatgacagacatcgactttgtcctccaacctttttccgggacttatcaatattctcgtggttaaattccacaagctggcatgatctgaggagggaaattaggacatggtttcttgccattactttttacagcttggcaaggggcaggaggctgccatccccttctgtggttgctgtgtcattctgtggggttgctggagccggggcctgaggtgtcagggcggtggaagctcctgaccctgccctgctttctgacccacctctcatctcacaacctctgaccttgtttatttctagaggcataatctgtgtgccatattgtgagtaaatgagaaaatgtggcttggattatggaattcagctttatgattcatttgttcagcaagctctttttgagaatctatcttgtgccaggccctagattctgggggtttaaaaattgccaagacccaggcgtggtggctcacgccgctaatcccagcattttgggaggccgaggtgggcgaatcacaaggtcaggagttcgagaccagcctggccaacatggtgaaaacccgtctttactaaaaatacaaaaaaaattagctaggcatggtggtgggtgcctgtaatcccagctactcgggaggctgaggcaggagaatcgcttgaacccaggaggcgcaggttgcagtgaggcgagatctcaccactgcactctagcctggatgacagtgcaagactccatctgaaaaaaaaaaaaaaaaaaacaacaaaacaagaacggccaagacccaccttgctagcaagaagttcactgtctaatgacagagacagaccaaagtggcataagagagcaagcctgaatgctatgagagagacccatttcagactgctggggtataggagggcttcctggaggaggcagcttctaagttgagtcttaaagggtgaagtacagacatgaaagaagcaatgcctgggaaggtactcaagaaaaagcatgatgtggtggggaagggctgcagcccagccctgtgcctgcatcccacgcatttctacttgattccttagctccctaaaccttgcttgtctcatctgtaaggtggagataaaaataacagtcttcttttattatgtgagttgcaaatgacagagtgcatgtgaaggctcctggtgccaaaaatgttagcagaattgagtggaagcagagtgaacactcactgagggccgggagacttaggagggagctggaccccccgggatgctttgctggatgaccacagcttggggagggggctactgcctttggagaatggcaacactatcatgcagctcagaaggctggagtctaataccctgctcagcaaccaggcatagtccattccatcacagagcctgggttcaccttgaggacagtgagaactcagccctggccatgtggaagtcaaagcgtgcagcacctacgtacatggacctcacctgtcatccaagtctccaaaccacactgcaatacaaacatcgccaaagtagcaggcttctctcctctgggtgacatccacagggcagatctgagcaacacttagtgtctcctgggaccttcccagcctcggacagaatggttgttagaggaacaaggcaccaggggcgtgatgagagcttagctgaaaggagagaagactcagcaagcacatcaccttgaagctgacctgtcagccagatttcgcagcacctgcctgttccagcctgaggggctgcgattcattccttgggaaagagagctgcaaattcccgctctaggccacagtccaaatccttgctcttctctctcaggttctggaagacagaatggaggcatctacagagcaaggacatgttttctacctgaattagcttttctgacaccttcaaaccatctctaagaaattgattttttaacatacacatatacaggtaaacatttaaatctgtgccataatgtatttgcacttcgagtccccctgaagtcctaagtcacatgcttctcttcctaggggttctgtctgaagcagagacccctggattggagcagtgggaagaatcctgatgaatcaggtgttcctgcctgtttacattaactgggcaccctgcctgcccaccccacatgctgaatactgctggggagaagagaagaaacatttat

SEQ ID NO: 104 - DNA, 1948 bp, Homo Sapiens
atccattttcaaaattctctaggcaaacaacacattcagtacagtgcagcatatcagcaggccaagttaaccaatcaggttccatatcttcattagtgttatatgatccatatgacctccccttcctttcacatgggctggtctgacaatatttattggcacatgaacaagcctcagcatcacagtgacttgctgttcctggagaattgtgaagtacgctttgcttatcttcaaatacttccttctcactactcaaagtgtctgtgttctcactttccgagtcattttcagtatcttgagacccctccgacatttcctcttcagactggactccaagacatttaaatcgccacattgagactatacgtaacatggacctggaaaagcttaaaaatatgaagaggattgaactggctgccatctgtgcatcttcatttatgaaaacactcctcatagacttaaaacaaatgacagagaacaaattagtcagcttcttctaaaatacagtggtctccccttaccctcagtttcactttctgcagtcaactgcagtccgaaaatactacatacaattagatattcggagagagagacaccacatttacataaatgttatttcagtatactgttataattgttctatttttattagttgttgttgttactgtgcctaacttacacattaaactttatcacaggtatgtatgtataggaaaaaacatagactatataggatttggtactatccacggtttcaggcatccactgggggtcttggaacgcatccccctcagataaggggggactactgtaaacagaaaataacaacaattcaaattgttaaaaacaattcttgaaagttatcctttacaatagattaatatatatgatctgagctgaaagaatggcaagcaatggagacaatatttctcttctgtttctagtagatattttcaattttaagcatagttttaaaaagtacaaccctcttttaagggcttaaaccaaggtggctgtgctgattggcttagctggctagttcacagtgccaaggacagggtttcaatctcattcttctcagttgtcctgccagagattgttctttcagaccaggccagccatttgacagatgtaagccactggcctcaaggaacacaagccagacagtggtggtcaatgcaaaccttgagcatcactggaaaaattaagcaggtgtcctactgcattatttccatacatagaaaaaccacagaaatacattctatttttaaagagttgtttttcaactattaatacctataaggtttaaaaatattttcagagaaaaaaaatttagcaactagaatttataatgctaccatttactatcattatttgtccttcacttcatttgtcaccttaccagagaattccttgccactctcatctccttaatctgcttatttttcttcttactactttccactaactgatgttatattaaatatttatttatttggtgtctgcctctcccaactagaatgtgagctgcctgacagagcaaggccttagcttggtgtgtgtttctggtatatcttcagggcccagaacagggcctggcacacccacaactgaataaacttttgatgaattctgtcacatatttattacaggagcttaattcatggatatctttaacaggacatcaaaaacagtagatcatttacaagccaagaacatactgctaactattgaaccagaatgtatttgttgtctataggcagcagcctatatagcaaaagaactcaagacttttgacatagcccttccaagtttcaaaggtgtgcaacatcttcaccatttatttccatgggatcattcaatgtgggtgacatttagacactgaaagcagggcagtgggactggctattcaattcatcctcagtaataaaatctaaaattatcaaaa

SEQ ID NO: 105 - DNA, 4758 bp, Homo Sapiens
gggaatggggcctgcttgccctccaagcttcttgatcggtttcagtgtatcagcatctgggcctctctcagcaaagtccacctgtgagcctgggcactgcaggttgcaggctggagtttctaagaaagttttggcacccagtttggataatggggccactgttgagggaactgatgttcgtgagctgacaaccccccgcccgccggcctgaggatggggttccctctctaaacccccatgtcggcagccgctgaccttcatgttcactcaaggcccttgactgaaggcccccatctgccacttggttgcccaagttctatgttccgtatgcgctggcccatgcatggctccccttccctcaggcagaccctggtgctaccatcctggccttggcgagcacctgccctcctccgcatgacctgtcccacttgtaacgtcattaccaagctccgtgatagctgctgtctgcccagactgcgcctctgctcttttctcccagcctctatccaagtagccccctctgcctggaacagtgctactcaaagtgtggtccccaaaccagcagtgtcaaggttgctgggaactggggagacatacatattcccaggccccacctcacactgactgaatcagaaccgctgggggtgggggctcaaggatgtatttcaagcgctccagatgactcttctagacactaaggtttcagagccactgtccccagacagggtgcccctcctgctctgcctggtgactatctgtctgcctctctctatctctctgtttgtaggagctcagatcatgccctggagaagcaggtgacatcgcggaattttcctgttccagatgccagaagtctgaaatgaaggtgtaaagcagggtggttccttctggaggctctgagagaatcaccccaggcctctctccagcttctggtgctggtattctcaggcttgtaggcgcatcacccatgtctgcctccatcttcacatggccttctcctctgtgtctgcctgaagtctcccttcatttctcttgtaaggacatcagtcattggatttagagcccaccctaaacccagaatgatctcatctcaagattacatctgcacagacgctatttccagataaggtcacagtcaaaggtaccaggggttaggatatgaacatatctttttgaaagacacgatttaacctacagcaggtgctcagggcagttgggtgggggcctgtgctaggggcccaacagccaaggcttaaagccgcactccacacctaggcctgtgacacctcccacaagcttcttcacctctcaagcctcaacttctacttctgcaaacagggaacaataaaagtatctccctgcccccaccttgcagggtttccagttccaatgtctacacactcacctgggagttatctgaaattgttgttcacctgcttaaaccttttgagtttccagcaccccccagaagtccccaccctctagtcccttagcaagatactggccctgcgtgagcttcccaccttccttgacagctgcatctctcatcattaggacctgggcaacactgcagaatatggcaggtcttccctcatctctgtgctttgcctccattccctgacttctctcccatcctcctcctgtcacctggcctctccccatcctactggccttaaagctcagctcctgaagcctccctgatgctcctcccttcatagcccctcccagcctggccacgtgggctcgggcagcccagagcctgggcctcctggtcacactctgagcacacagcccattttctctccagtgctggcttgtgtttgacaccatgcctgacacattgggggtgctcagtagacctgtgtgagatggacagcctcccgtacagatggacggacagatgtacaggtaggtgaatgaactttcgttgcccctaaagcaggagagactctgagtttctgagacaacggccaagaactttctgataagatctctgcatttaaggttcagaaaaactcgatgaggacaatatttttctcccgattttgcagataagaaaatagaggcatagagaagtcacttgctagtaaatgttagaggcagctttctaacccaggtccatgtgaacccagaaaaagaggcagtgagcacctgttcacccaggagcagctctcagaagataagataatacgaggaggaggcagcagacccctatgccacgcgtccacctggggctgtccatcacttcctgcaagatcttgctggtagccagattctcagagacccccagtgagccccgcctcctggttttcacaccctgtgtagtttcctttccccagggatggtccaagtgaccagcagcccgtggcagaagtgatggaatagcacttccaagcttaggttatgaaagattgcagcttcaatctcctgccccacaccccgtctctctctctaaccccactccctccctccctctctcatctctgactctgggggaagcacactgcagccccgtggagatgccctgtgtaagccactgaagcctctggccaacagcagtgggaacctgagacgtgtccacaagcatgcatgggagcttggaagtggatccttcagccccagccaagccttcagacgatgcagcctcagggacagtatgactgcagcctcatgagaccctgagccagaaacacccctccaagccactcccagatgcctggccctcagaacctgggaggtaataaatatttatggctgtttgaagctgctgtatcgggggacaatttgttacacagtaatagctaactggtgcagtcctgggactcttagcagtttggagtatcagttattttgccaaggcggggaagttaacagtggtcattgcagcagctgcacttggggaccacaataaagaagctttctcagactggtttgaacaaagtggtgaattctctgcaaggacacagaggtgtctctcaaaacccaaggatgggacagcaggcctcaagaagaactggaacctctgtcccttctgtgcttctttttactcctgtgttctctgcttcttggagcacttggcagttgggaagtggccatttcaattctcgtggtcaagaaaccagctcagaaataacccaaccaacacaggtggggtcaggtgtccatcctggctccatttgtcatggcgggagatggtgatgaagagaaacatccaggaccattggtagggcacccgaatgagattccaggagaggccagttctaagagaagggtactagaaagatacccattgaagtcaataccacatgtggcacatcctcctttcaggtggcaagtgtgtagccaaagcaaggttcagggtccatatttgaaagtcagaaactgaataaactgttttctcccaccccgagcactgtggggaactctgctcacaaatccaccatccaccatcaccagccgtgctcatctgaccattcatgcaggctcacacttgacctgatgtgggttctgtctcctttgcttgagaattgaaaggcctgggagatgcaaaagctttaggctccagccatctccccatgtcaggtaggccttttgcctagtgtatccagttggtaatgctgcagagatgcatgaagctggagtcagaggccacctgtagtgctgccctgacttcagacctgagcccagcccagcagcagagagggggctgggagccagaggaggcctcacagtaacagcacagacaggtgggggcccacaacaggccacatgtgttcaaactcgagtgtgggcagaggagcatgggaagctcagagccctgagctcaccccacacccaacacgagtggggtcacccaaaatcagcctgtcagcactgtcccagcagccagtcgcatgctacattaacaaattttgcacaggccagcaagcaggatcgctcaccagccaccctcctgaactggcctatggggccccaggatgatgccatagccacaagtctggagttcctcaaagtacctggtcagcacaactcagttaaacaatgggcaaaagacctgaacagacacttcgccagagaagatgtacagatgcaagtaagcatttgaaaaggtgccccacatcgtatgtcgttagggaatggtccaatccagaacactgatggcaccaaaggctgctgagcatgtggagcagcagaactctcattcactgctggtgagaaaaatggcgcagccccaatagggaaccctaatgcagactctggacttcactggaaatgacgtgtcagtgtagctgcgtcagttgtaacaaatgcaccagtctggtgggcgtgttgataaccggggctgcgcacgtggggagagaggacctgtgggaatgctctactttccactcatttttgctgtgaacttaaaactgctcttacaaaataacattgtttgttgttgttgttgttgttgttgttgttgttgtttttaagtatctagtcagctccacacatgacccgggcagagtgggaagttgtagagtgccccaaggagagaaatggaaccaggtctcatgtggggccaagtgtgggctccctgtcctctcagctggtcccaggaactgaagggaaatttagacaacttggagaaagacactctagggctcggggcaaagggtggtgttgatgagaaccatatttttttattgctggtgtaagcacttgtatttttctgattttccactggttcgataataagggtaaaagacaataaag

SEQ ID NO: 106 - DNA, 4608 bp, Homo Sapiens
gcttgcatgtggagcccactaaggcccgaaggggctggcctgcccaagttcacggctctgccgcaagcttgctgcagatcaccatctcctccattcctggccccaactccccttgcatatggagcaaggaaagatcttttgaatgctgaacgggcctgagacaccttcctgaaggaaagctgtccttggatccaggcattgtgaccttgttacttcatttggccttcatgaccacctgtctagggccttcatcaacctcttttacagatgagccctcttggatgataagtaaatggcagcatttggatgtgaccctggtctctctgagcttagctctggactcccctccctcgtgcccctctcaaacaagcaagaagaaggcaggagagtaagttctaatcctggctgtgccactgactccctatgtggtcacaatgaagtcttttccctctcagcacctctgttgctatacctgcacaacgaggagctttgcttggccaggaagagggcacaataggtacagagtgcaggtatttctgggcccatagacaaggaagggtgggaggaggggagcaatggtggaccctcttggttgacaaatctaaacaataatatggagcctgagaaagccaaataccagctccccagcttcctctgcagccaggcatggccatctgactgagttcaaactgatgggacattttgtaaaagtcttatgagaggttctagagatgcttttgctttcttgataaagagccatttgcagctggcacttcccctgtcccctccagtcttgaacatggatgcgatgcctggagctatggcagccatcttgcagctgtgaggctcagagagtcccagagataacatttggaacagtgttgagcccctggaccaatacagcagctgcctagctccaggcttcctgttgagtgaggaaaaacaagcaccatgttttcaatgagtagttctgaatgatacaagcagggctggtagacatccccacagttataccaatttttttgccataaacaatattaccatattttgtctatttcccctggatacaggggaccaataacaacacaagaggggccaggggcccagggggaaggaaccagatggggaggggtgaggactcacgaagttagaagctggggaaggaggctctgcaatagtggaaacaagcgggagccgtaccgtccagtcttaggggtcccgagagtgggcaagggtgtagccaatggagaaggagctggagaagaccattcatggggggggcaggacaaactggtgggatggaggaaggagactgcaaagactgaggctgcaaagcctccccttcgccctcagtggacccactcccacagcccagctgacctccgatgtaggccacagagaagcccctgcgggtggtgctgcggtctgtgtgcagcagaagcagaagctggttgtggcttgaggtcacgggtggtggcaggtggtgtccacaccaattccccagcaggggtgcctcctcgctggccccatcgaaggccgccagatggtcaaagtcacaggtcttggtcaggctgttgggctcctccaggtccaggtccaggaagaacaccttgacctggtagcccgggggcaggcggatggtccagtggcagcggatgttgttggggtaggagctggggtactgtgggctggagaagttgccccgcatggccatgtatacctcctggcattctcctggatgggggatggggaggtggaaggagcaacagtgaggggagaggagaagtcactctctgcagttacagcttaggcagcaggtgccacagtggtccaaaaaccaccagcaggttgtgggcaccatggctagcacaccagacaattgatcccaactatctgaaagttgggatgcttgatcccaaagcttgttttaaactgcaactagctgaaagctgggacttgcattccagttgacagtccccttcacaggtgtaggccctgttaggaattcaataataatacacaatacctgtcctcagagttacctctgaactccctggcttgacagatgatgtggttcatgcctggcctttccccttttctcactgccccatttggtatgtactatgagcataccaaacactctctgccctccaggcctttgcacatgctgttcctcctgcttggaatgcccttcccttctgcttccgtctaactccttcagggtactgctcaattctcttctccacgaagtcatccatgattcttactgatggatagcacagatcataatggcttgcgctgtctgtttccttataatctctctaactagactgtaaagttcccacgacttcatccattcatttgtacgaaaattgagtacctactatgtgccaggtacaaagataagcccataagggactcagtcagacaggggagattgacatgcaaaccacacacagaagtgacaaatgttagatcatagtgtaaaaaacttatataaggagttgaaaaaaggattaattctggtaaaacagtaagtcttcgcagaggtgacatgcttatgtcttggcataggccaagggtatgctagagcattccaggcagagagagtgcagaaagctcaaggctgcggggggcagaaaggtgtgacccctgcaagtgtaatggggagacaggagcccagtaggcacaggaggattcagggtggagcgccagcccctcctacctgagaagtagtaggccttgaagccacggcctccgatgttgaagtcggacttgaagaccacctgcagttcgtggcccagagacacgagggtggggggcctggtgctgccacagtagtggtgcccacgggtggggccaggccccccaagcacagccacgtagtcataggtgcactcttcattgccctccacctggaagtccacgaacaccagcttgacgtgggcagggccagcggcccggatcacccagtggcactccatgctgttcgggtagttgttgggatactcaggactggtgaggacccctgacaggccagtcaggacgccgccacacacatctgcaagggagcccacttgagctgacctttctttctccttgtggctcccagtttcctcccttgggaacaagacactccaacatgctgcccccacaggtatctcattagggcctcattaccatccagcaagcacctgctacccaagtagcaagtgtagcacgtgctcaggcccagcatttggcacctatgctgcctgttcaaatcctcagagtagccgcacaaggactgtgctgcagtttctctgattttataattaagaaaagggaggcaaagacaagttcagtagcttacttgagtttgagttcacccaggcagaccttgagataaggatttgagtgcaaggagtttacttgggagatccaggggcccccaggtggggagggagggagaggacagagaaggggaggtgtgttcaagtcagctgctgaccttggggggaactctggggacggggtaaagcacatacttcagagttctgtcaatctaggagcaagggagctgcggcatttacatgccaactccccagagtgcaggcagagggctgctgtgggctgggagtgccctactgagacttcagaaaaaagccctccagcatagaactgtggaggttggcagaagcacatcgacgtggcagggcccagggaatgtggtcagggccctgagagcaggtcacccgactggtaactgggaaagtgggatttgaacccaggaagactaactatggatcctgtgcacttgacccttgtgaccttcactgtccactcctacgaggccagtggggcacagaggctgaggtgcctgagctcaggaatgtgatcaaacctccctaatggatgaggaaaccaagacttagagagaggacctgatgaagtagagcttggtttgacatctgaagacaagtagtctcccatctctgccttttattagctgtgtgactctagggaagtaacccagcctctctgagcctcattggaacattagaaatcataagactgaaccagcttgatccactgggctcagacttgagcacagtctgaaaatatgctgctggaaactctcaggaagccagcttggccagtacaactacacggcaagtgtgggtgaatgctgcgacttgctggaggtcaccagcagggaggacatacgtgggatgtgtttcctgagactccagcatctcgccctatggcacggctgtgtgaccagggctctggatggggcatctaaggacttggcgtcttttcccagtgctggcccagccatgtaactttaggaaggccctctcagggactcagattttgtgaaatgagagggcaggtttagatagcctgtgagatcccttccaacactaacaaccttcgcggagacttcccaactgtgccctggggctccccagcagccccctggagcacctgctggcacctggtgcaaatttcattcttatgctgtatttcaagctctcttttaatgtaatgaaaagatagcacccacagactttaatatctttaacaagatattaaaatttaaatattctacatttaaaaatttaa

SEQ ID NO: 107 - DNA, 2769 bp, Homo Sapiens
ctcttcctcgctccccagtccgcgcctcgctgggctcagcaccccggcccccggcgggacggaggctcgggtccaaagcagtggctgcaccgacacgaacccgtctgcgtttctccacctgtcttccctcgccacctgcatctactatggtctctaaatgcctcgctttgtactttgtggctttctggcagccctttaaagcagcggtgaaagaaaggagagagtcaagacacgggagaaaatgtttcatcccgggttcttctagtggtgcccggtaagtgactccggactgacgagcagaaaaatcccagggccatcaatagagggccttcggtgtagaatgcggtttgctcagctgtcagcaaagagggacgcaaaacctaaatttgagatatcagaaataactaaataaaatagaccttggctgattacaactaatggttctgaaacctagcaaaagggtcagattctgatcttgaatatactctcgagagaaccgtttcagtacgggggtgtagctcagtggtagagcgcgtgcttagcatgcacgaggccccgggttcaatccccggcacctccattccttttgcttttaatttttttcccattgctttactttattttccttgcttaaacagaaagtaaccctatttcacaacggttttgccattaatattagtgctgttccatttctactcctcagccttgacacgactcgggggactgcctaagcaaaaggtggaaaagatggagctggaagacaaagacggctccggattccaaaacttcaatggcgtcgccaaattgacgagctcattaacctttggagtattgttatttaaaaagtaggaaataaaagataaatgtggaaatatttaataaaagaaaaacgtaagctctcaattttctttattacttttttttttttgagacggagtctctcgctctgtcgcccagtggcacgatcttggctcactgcaagctccgcctcccgggtttacgccattcttctgcctcagcctcccgagtagccgggactacaggcgcccgtcaccacgcccggctaattttttctatttttttggtagagacagggtttcaccgtgttagccaggatggtcgcgatctcctgacctcgtgatcctcccgcctcggcctcccacagtgctgggattacaggagtaagccaccaccgctcccagccgatttcctttattttttttctggtccttgtttagccatgatccatcgcaggctgagccctgacaaacgcaaagccttccaaactgggaaattgagaaagttattttcatcaatgaatgtagaggcgtcacacttctgccgaaatagctccactgggaagcatgctctgctgaagatctcaaagttcacggactgatttccagttttattctgtcttcactcctgccggataatttgacttcccttagatgacgttacagaagtaattttacctaagacaggtgcgccctctatcgtaaggatatctttcagactcttggtccacacaagagttggtggcaccggagagcttgttagaagagcgaaatctcagcttcacctcagacgtactgaaccagaagtagcaatttaacaagatccacaagagattcttttgcacatttaagaagcaatatgacgtgctttgacgtggatggagtaagggtgtatagtataaatacgcggctgtgttttttcccccaattttctattctaacagaaaacataattgcaaaaaatatatatttctattgctgaatcatttttgtgttctaatcattgactctgttccttgcctctctggcaatattgtacttagtaatattttttgaatcactattcatgattgaatatgatgtgaagttttcattttcttttttttttttcttgagacggagtctcactctgtcgtccaggttggagtgcagtggcgcgatctcgactcactgcaacctccgcctcccgggttcaagcgattctcctgcctcagcatcccgagtaactgggacaacaagcgcgcgccaccgcgcccggctaattttttatattttttttagggacggggtttcaccatattggccaggctggtctcgaactcctgacctcatgatccgcccgcctcgcaaagtgctgggattacaggcatgagccaccactcccggcctttattttctttttcgcaagttttgcaataaaggctgtgctaacttctaatgtaaactgggaagtttgtatccttgctctgaaacattttaaatagaataagaccttgtaatcattccagaatacacagccctcttctcatcagctaccaccaaatcttcaagaacttttgtattaacaccactttgtattctaagccctgtgatagattttaaagatccaaaaccctttgctaaccctaatgaaagtgtgagctgaaggatatctcaagaattgggaaatccttggtttccgatataatatcaggccacctctgtccctgtgaagtgattaggaaattttcaatggagaaaataagttccaaaagtcattctttctcagattaagatgtcttgggtttcagtttacttctttaaagaaagattcagagttagtactgaggacccagactttcttgatgtgggaaatagataattttctgttctgttgacattttttctctctcttctctcattttcaaagtacagttccacaatgtctctttgccacttatactcactgtggcagaaaaaaattattcacagg

SEQ ID NO: 108 - DNA, 1407 bp, Homo Sapiens
cggggcctttgtctctcactgcacctggagctccaggtctcatcttcactactctgtgtcctctgctgctggaggcccagccctgtgacctgacggttttgggagatccacagctaagacgccaggacctcctggaagcctagaaatgagttttcgctctgttgccagactggagtgaggtcctacagttgtgcagccgcgcgatctgggctcactgcaacctccacctcccgggttcaagcaattatcctgcctcagcctcctgagtagctggaactacagtcatgtgccaccatgcccagctagagaggtttcaccatgttggccaggatggcctggatctcttgacctcgtgatccgcccgcctctgcgttccaaagtgctgggattacaggtgtgagccaccgtgtctggcgcctctttttcttttatttttccagagaacttaccggaatgtttttgggtcaagattaccctttggaaactttgtaggatgatgtgtcctcagccaaccttcagtttttttctggtcctgggttttagtactttctgggaataaaccaacatacccactatggctatgtctgctagagtgtctagtgactattatctcttgggtcattttctcccataggaccacctgaagcatggagtgtagactttcaagggagcaggtggcagccttggggctgaaaggcatcttctggtgcacttttttttttttgaaaagctaaccccttgagacatgaagattgtcttcactcaacctggctttcatttctaggagacacattgctggtcagtcaatcagatgctggtattgaggggaaaacaaataatttctgtcttctggattatcttgtgggaggggcagaaaaatagtgaaaaaacactccaaaagacaaaaaactgaccccagtgagatggcataaataacttacaaagtaaaatgcacctggggcactcactggggcatagtgcagtgtctcctgggagggtggttattgcgcatgtaagtgaacaggatggggtgggtgattggatctgtaccttgaaaagatttgtttacttattttgacctcagtttttttttagacagtctccctctgttgcataggctggaatgcagtggcttgatctcagctcactgcaacctctacctcctgggttcaagtgattctcctgcctcagcctcccgtgcagctgggattacaagcatgcaacaccaagcctgggtaggtttttgtatttttagtagagatggggtctcaccatgttggccagcttgatcttgacctcaggtgatccacctgcctcactcttccaaagtactgggattacaggcatgagccataaacactgtattctacaatcctatgaatattaagccacaatacttactttgaa

SEQ ID NO: 109 - DNA, 3367 bp, Homo Sapiens
agatggagacacccaggagaaagaagagggcgaattggaagaggccacccagaaaggacggtgtgtgacactagggagccaagcatggagagccgaggactaacgcttggaaggaaatgtggaccagaaggttccggatgagggaaggactggcggctacactctgccttccgagacaacgaggaataatctcacttcagtcagttcaacccttgtaaaacagctactgtgtgcaagacacggagggaaagctgaagtagagaaaccacagacgctgtcttcaaagggtttaatctaatattagtgatgagaaaaatagggtgcagagcttaaggcatcctggaaaaacgtatgtagcgccacatcgcgaaaatctctcttctgggacccctctcccaaaaacgtttcttcgccctcttctcccccttctgcctccactctttctggacttcaggtacaaatagttgaaataattatactccttggttcatgaaatgtgtaagactcctctctggttttattttccccctttatccccatccctactcccaacccctatcctcaaccccataggcattcatgctgctgtgcttccatatgtatttttgggaaatgtacaaaatttttatcagtgtattttttaaaaatgtttaaataatgctactggactttggagattatcttattttctacttttttcactcaacattctttttaaggatctgtcctcgttgcgattggcaagcatatagttcattgcttctgagtactgcacagcgtttcataaggggcatctaccacacttcacttccattccccaggtgttaggtaacaaggccgcctctaattctccaatacatcaagtaatacagccatgatcgtctttgtccgtggtcccttaaggacctctgtgcaaattcctctgaaatatatgccaaggagtaagattgttaaagttatagggatgcacagggacatttgcttatgcagctgcgtcctgcacaaacacatccagccatggggcaatggaggctgaaaaactgtctctactctctttcccgtgccatgtgccctactggagaaaggtgtgcactttttattctcacaaaatctctgtacgccagccaagtcatgaacctagaaggctgtaactatctagagggtgtgatattttcaaactcatctggccagatgaacagttttccaagagcacaacgatgcccagtagcctagtacaagccctgggtacttaccaagcactttaagattgtgtaccagagttactgccctacgctgcactccagtgtggggtttccatccaacacttccatccatcccttccagaaggtgataggtcttttttattaaacactcataaagtgtttagtaaataccagatactattctaagtgctttgcaaatattgactcatctaattagctaattttctaatttctgtcaatatgatgaaagtagtgtaagctcattttttgctttcattttcacttctctaactactagtgaattttttgaccatttctttatacattcataggctacttgagattcccttctgtgaactgccttttcagtgtctgtgtctatttttctattgatcttttttctttttcttttgatttacagatatctttgagaagcctggacatcaatctgctttagaagactagaaactctgcctttatgtctttaagggaacaatagtccttaactttgatactgtggctctttagctctttttttccctatattttttatatagttttttggtattatttagacctccttaaccccacggtcataaaggtattctcccatcatttttttctatccattagcttcatagttttacttttttacattcagttatctaatccatctggagttctccttcccatatggtgtgagatagggatctaactatatttttctccatggggtgagcaaattttccaacaacccatgtcaaacaatccattctttccaaattggtttggggaagtttccaaatagacatgagtatgttctgagctctctggtttgttcatgtgtcagtaccacaaggttttgtcactgtgggtttttagttagtcatcatgcttgaagggcaagttccccattccaaattcttctgtgttaagattgctttgtctatccacgggcctttatcctcccttataatgtttagagtaagtttgtcaagtttatgagaactgtgttgggttgatgaataaatgcaaggaaaactggcaactgtgcagtgacatctcattcatgacctgacactgtatatctggtggacaaaaagagggaaatgtggctgagtcataatgtgcatggaggttgctggagaggtggcagatgaactggagaggcaggctgaaccacactgtaagccaagctaatagaaatgagcttgaaatgggacaggcaacccagctcaggctgctttgtgtgttcacaggaaacctgattacacattgggaccatcggtttgtaggattgccatgatccagagaaactccataacatttctgaaagtatataacaaaaataaagacctagagggccctggtcacccatacgttgcactgatgtcaagtgcagggctgtgtgtcttcccatgtccaagggatctcctaaaagagctttcataagtaggtgccctgcataggtgacagcagttcaatccagtaaacaattttttaaggaacgtactgcatggtaggcacaaggctgcccacaggaagcaccaaggtgactatggcagagtcactgccctttgcattcacaatctgtattaggggaaagacagaagggaacatctacagttaattctaatgcaataagatggtatcatttagtatatgccattttaacagaaagcacaatgggagctcagagaatctagatactggtatctgagaccttacttataggaggacaaaaagacccaaatatgactgagcaatcaaagaaccacaaggaggtagaaaggcgcgtgacatgttcagctcataggaaagagatgcagggggcatcaacacagatggatgaatggatgaaaggatgggtggtcggacatatcaatttatgctgatgaaacaaaatgtttgatttccaattttctggattacagaagactagtcaccaccctgctcccctgtgttgttgtaataacaagaatcactaggtggcattatagtatcaaagtcctcacctttcagagcctctaggagaaacacacccaacaagatcgcgtcagcccctaatttagacaaatgagtgcttctattcatctcatttctcattatatccacttaatttatttcttgagcacctactatat

SEQ ID NO: 110 - DNA, 49725 bp, Homo Sapiens
agacaaactaactgaagccacagccggaagcaggctgaccacaagtgctaaggttctggttagttcttttctaggttcaaaagaagaggctgttctaagaaagactaccgagtaatcaatcacctcctcagagaaagtctgctcagggaccagctctgtgaacacggcaagtaacaacagagagaaaacgtgaggagaaaagagagaccgggattttgaaatcctgtttcctgaatgccatctcaccaggcacacgaaagaataaaattaaggaatcaagagccaagaattttcttattttctttcaaaagctaaagtcgtctggggcaactgttttcatcgctaacccccgctaatttctccagctatggtagtattgctctccctctgtgggatctaaaacatgccctgtccttttcaggttttaaaccccagacccagccgcaaacagtcttttcatgtcagatgagttgcttcgcaactctgagtcacaggcctcttgtctctcagatgagggttatgccacaggacacaggttcctcactgggaatggtgtgaggactatatccagggatatttcacggcagggcctctggatcaactgctttacattggaggctgttcattctcactggtttatgcagtaagagccatgccttgctgtgtgcctcattcctttctccagctgcagagggtcttgctaaaacacagatttcatcactcatcttccaacaacccctgaccatcctctggacgaagtttaacctcctacgcctgacatagaagatccttcatgatctagccctttgtttgtatctgtggcttcatttcttgccactctccttccttataatcattatctccccaaacttgctgtttttttctttttacctttaaagcctttagatgtactattccctctccttggaatatcaagagtctccttttatagtttggatatcactttcttgatgatacgcttagcccagtagtaggccgggtgcctaacttctgtattccatccttattcccagcattgggcaactctctagcaatcaccatttggcctgcccgcaccctccactacattactgtctcttagagtacaccacagtccctggcaaatggcgggcactcagtataaatcggctgaatcacatcagatcttttcttcaggtgtaaccttcttttcccttcatctccctcctctttctcagcctttcccctttgctatagccttactcctgagcagtaaatttaatcttcttccaacatcacctgcatcagctaagcctctggaggagtccgatattaacatggggcttacagttaggaggtcctaccttctctgggtgcaggagaggagcagttctccccactctccaccctacacacatcggagaacaggaactcgcttgccaaactctcgccggtttctgggagagagaaggaaattttatgatgaacaatctggcagcatatggttaaaatgtttgaagtccccaattcacggctgattaaacaattctttacataaataacaccctagaatcttgcatataaattcaaagcagaaatgcaatttacactttcatttggtgatctggatgggaaaaaagccaaaaatgtcaattcctgtaggcttactagaaatatcgcacttaaatagcacctctccaactttaaagacaaacagctgaaactcttagacagatactactgaacgtacagactctggcaagatttataccaagtctgcacgagaagcattagcaggcattaatagaaatccaaggtccaggccagtttagtccacaactctaagatggctggcagtaaatgtcacttagtgtcaacttgggaggctggagatacatgccaagaacacagcatttgggagggagagcacaaaggctggctggctcagtcagccacaacgattctagtctgtttcttagactcgggatgaaaaaccagtagtatttcactaagtcgggccaactattgtaactgagagaagagggcacttgggtaccattcaagtattatggtcattttttttcactctcagaattggaaatctcttctgttcttgctatgtgtaaaaataacatgagctcactgtaaaacctgcatatagtaaaaaagccccagagagagctactgctagcagtctggaggtacagtcatccatgttttaatatatgtatatgggctttttaatttttaagaaaacataagaccaggcatagtggcccacacctgtaatcccagcactttgggaagctaaagctgggggatcgcctgagcccaggagttcgagaccagcctgggcaacatggcaagaacctatctctacaaaaaatacaattagccacatgcagtggcaggcgcctgcagtttcagctactggggaggctgaggtgggaggattgcttgagctcgggaggttggaggttgcagtgaggtgaaatcataccactgcacatcagcctgggagacagagtgagatcctgtctcgaaaaaaaaaaaaaaaaagacatacatgtgatcctactatagttatccttctgccatttccaactacatcttgtgggtatttttccatggaggtttctaaagatgtacctatgtgcaaggcaccccacctcatggatgtaccatgatctgatgaaacacccccgaacatttacactgcttccaactgtacactgcagcgaacgttctcccatatatgtctgtttctacgtgcacagtcggcagcctttttttctttaagtattgatcctagaagtagatttactcagttaaagggatgcatactccaacgctctcaatatgtatggtcactgctttacaaaaaagttgcactagtttaaaagatgatgttagtgaataaataaatgtcagatctggtcacccactcttagcatttgatatgccacattgccacattcattgtgagaatgaagacctgtatttgaaattcacactctgcgtgttagggagatacaatggggagatatctgcattactaaagtcgttattttctttagttcagttataatcaggaaataatcttttagcattaaaaagatcagaagatcccaaacccacctggaacagctgtttcattgggcagcctatctacttccaagataaagtcatccttgaagaaaagatagcccactattgagaacaggtaaacgaggatcagagccagaactgctgtcaggatgatggaccgtccattgcgagtgacacttttaatgacattaagcaaagtctcttctctgtacactaaatcaaaaagctttgaaaacaaacaaaaagaattttaagaagccttgatgttagatgtacatcactatcccataatgcaaacttggtttatagagagtttgccctcttagacactcaaaagcactacatatgatcttaacactgaacatcttccctggcttcacagtgaaacggagatggtaaaaatgaggaaaaataaacacagaagaggaagcaggaaacaatagcaacttcaagtagtatccagagccatttagagggactggaaatagagaaaatacatgcttgtgccaatgagtttcagagacaaagggagaggaaagtgatgagggtcttggcatccattcatttagaaggtactgaattgagtttatgaagagccagccaccctggtccctgccctcctgcagcccagtgtctggtgggaaggcagacgtactacaagccagcgtcagtggcaagaactctggacttagatgtaaattcaaatctcagctcagctactgtccaccgtatgatctcgggctaggcactttcctcatcccctctgagtctccatttcctcatttgcagactggaggatgtagagttgttatgaagaataagtaaaccacgtacgcacagtgcttagcacactggcatccatatgctcagtaagtacagtaaatagtaattatcatcaatttcctgatcaagagactggggcagggtcacatagctggtgtatcgcagggacattagtgacgttaacattgcgagggtaagacccctgcaggtcacagtgccttcacaatccaggcttgccctctgctaaggaacctgctctttgcaagaagttggcttcctgaggaatggaggatccttgtaggtacatataggtatgggaggatgatggctagttttccaagagctacagtcacagatacttgactgggagaatggtggggagtgtggggagagagctctctgaagttactcttagacctgaggctagtttttagcatggcctctggctgctgtctaatcctgtacagaaggtttggtctccactgtggctttggggtgtgactgcaccatgaagtgagtcaggggacagggttgaatcctgactgcttttaatttgttgcaagatgtcggccaagccatctaagctctctggatctgtttcctcatctgtaaaataagtggactgagacagctgatctctgagtcccttccaatttagaatttttcatctgaggtcattttccggtcgattggcttttctgcctccttgacaccaatctgtgttctgagactagttctgtgaagggcattgggtagagtaggatacttaaagggaagcaaggaagagggattttagtcaatacaatatgacagaaggcaaagtgttgctgttaatgttggttaaatgttttccagcagctcaatataaagtggcaagtaagcgcaacttcagacaacaaacaaatggcacttgttttctgtggttaaggaccgcagagattacacaggctccaaatcatagaaatgacaagcgattttttccttttcactcatctatagtttctgattttaaaacaatcaataagtattatttatataaaagaaaagctttcttctaattggaaaattatacatgttcaatggagaaaacttggaaaacaaaaaaaagcacaaaggaaaaaaagtcactaataattcaccatctagagacattcgctcaatagcttaattccttctggccttaaaaaatgcaatttatagatatatattgtttacaaaaatattagaccataatactggcacataaccagcctttcaccaagccatcaggaacattttcctgtcaaaaatgatcacctggtatttcactatatgggaaaaacatgattaacataaccaatatgttttttaaaaacagtcaagatgtttccaattatatgtcataacaaataatgctgtgaggaacacttctatacatgcctccatacgtgctcgtctagttattccttttcggcgaatttttggaaatggagtatttgagtcaaatggtataagagaaacattttgcctgctgctttcagaaaggcaggatcagtttacattcaccactagtaaagaatcatgcccattttaccccactctcactagtactgggcaccatcaggctttttaacctttactaatgtcacaggtaaaacacaggattgcgctgttttaattagcatgtctttgtttagcaccaaggatgaacatttttccatgtttactgaccatctggatttctgcttttgttaactgcctgcttatgaactttgcacattttcatctccaggtgttaatatttttctaaggacacagctttaatgcaggctcacgaccaggtccggccagtctttgtgggggagggggggcagcagtttaattaggccaccagatcaccctccctaccttccggcctgctggcatggagggagctctcccaactctggaacacatgggtgttccctgctcaggtctctctccttttacaggcagcccgatttcttttggttgcaggctttccttattagtagaataatttgaagtgtcagtgttttctggttcttaccagacacattgagtactgctttgataccaaaaggagcacatcacttgaagacacaaacaagtcaaggtccacacagcttagaaaatccccccgcaaagcacaggagaggcagccaaccataatctggtttgatcctattgcgtttcctaaaagtgaactgaggtagcatgatcagaagctgagagttactcttatctttctgtgataggttggagacttgaaagcacagatgcaaactggaacgtgaaatgccagtttcactgatgcaaggactttttcacatgcttgaataaaaggcagtgtcaacttgggaatcaacagagttgtgaggctctcctgcctccaccagttactgacagtgtgactctgagcaagttacctaacctcaccaagcctcagtttcctcaggtgtaattggaagataccatctacctcaaaggtggtagtgagagtgtgtagagaagagtgcagggtgaccactcacaaaacggctgtccctgtaatgtgctcctgactgtgaggcctatgagggtagggactgtgttcctctcaccattatgtgccctgcgtcaggcactggcactggcctgcattgcaagtgatgaagagaagaggactcaaatgaacagaaaagaagccaagccaactggaggcagattggaggaaaggtcgaagtgtctactggggcaaggtggcgttgaccaaaggggcatctcctgtctcttgggagagagcccttggcagggatgagagagaccaccaactgaactctgccgccctcccaagggaggacaggaatttgttgtccagggacatgatggcatgagacaaaaagttccagaaacagacgtaagtctctaaaggtttctgatacaaagtgaccaaaataggcgacataatgggaatcacaaggatatcctgagacctctttgcctaaaacctcaaaatatagccagacctattttaagatgagggaaaagaatccattccctttagcctgccaaaatccacccctaatggtatgagctaatcctagtgatctgaacggtgaattccttatggtgttttggacgggggaaggaatatagaatgacaaagacaataaaatagctggcaatcattcggcagtgctattctaagaccctgacctgaacagctgcatgtaatccctgtgacggccctgtgagggagatacactgttctcattttgtagatgaggaaactgtggcacaaggcagtcaagtacgttaagcgaagggagcatctcacacagttgcattttgtactttcaaatctctaacctattgcagaaagataagagtaactcccagcttctgatgctgaactgctcctcagttcactttaagaaaacgcaataggatcaaactagatcgtggctggatgcctctcatacgcgcttcgggggggttttctaagcatctccctgaagagcttcccttgctctgccttttgtaagcccccctctctttgtaagcccccctctctttgtaagtcccccctctctttgtaagcccccctctctttgtaagcccccctctctttgtaagcccccctctctttgtaagtccccctctttgtaagccaacccttaggccttgatcatttttgtcctcacaaatattttaatattcctaggctgtttatggtgttgcttgcagataggtcagttttatgcttcctgtcattttatgtaggcacaagaaaatggtttcttatctacaacgccacaggtctagattccctccaactacaggaaagtaagtagttccttgatttgtcatttaaaaacctgctcaggaggaaggtgatggaaccagcttgtcttacagactgtcaagacattaagcacttggctcatatcggaggaaaatgagctactgaaagggtctcctagaccaataaatctactgagctcatgatcatgaatcccggggcttcaaaactagctcctactcttatggtcgctacacgtgttcacaagaaatggactccctgagagctgttggatgacagcctcaaaaacactcctcttggtgtaagtgcggctgagtctaagaagtaaagaaaaacaaaggtgcatggaaaggaaacatctcctgaacctactacaggcatgttccattactgagaagtaacagatcgggagtgcccagtacacagtgcggttgtgtgactcttgaattcctgggctgacccaattcctgtggagctttcctctcagatcccccaaaggctgccaactgtggagcttcaatcttggtggaccaggcacaccaatcaccattaaaaggaagggtctgtgatgagagagaggacataggacactctcctagtttccccacacataaaatatttccacaccaggtactcaccagcagactgtagaagaattcatggacaaagagccccatggcacagatcaccagatacaacaaatgatagaggaactcaacatccagaaccatggctcggtagcctcttgtgaatgtcccacagttgcccacaaagctcattagaaagatgattttattgcatacctgagaacaatgacaggaacagtcagatggcacggactgtgccaaactcttcatgagagcaacgagagcatctcacacaaatgtatttcagtcaccgtgcccaaacaaacgcttccttttccacccggtgcccaccaaacccgccaagacccatttgcagatctaagtcatttcattactttgcttttcaggcatattacaaattacatggtagtcaaataacttcatgcgcaacagtaatcaagtagcatttctctatggcaaaaacaaaattaacacatactgagattatgattttcaaaatgagatatgaatcatttctaacattcttgtatgagttagtcaaacacagaagtcacctcaatccacgaaccctgtgatcagcatgatcaaaagcattttctgaatttgttacattctaggcactgtaaggtggcaatttaatgagcagtgatcagttcttgcctttcaatgctcctaagttcacagggaaaacaacaattttcttgggggaaaaaaaatataagggacttcaggatgagttctattcccctgccctctcttctgggaataacttctaattttcctttggggaccattcctctctgagtagcagtctttgaggtctgggtggggctccaacctggccatcacaatattgtattcccctgggtacaatgactggtttagagatagacacaggaccaaatggagccaatgatgtccactgagctctttcttgggattgcagccaaagataattttgttctttcccactgaccttgaacctgagcagctgtgaactctggagctgccacattaccaacactgaaggcaccaccagcactggggacacagagccaaaagatggcaaggaggaactgggccctgaggacactgtgtgagcccctgtatcagctgtgcctgaagcgaggctgttggtttcttggtcaaaatgaaccaatacatattctcctttgctgaggctagcatggattaggttttctgacatctgcaactgaaggagtcctaactgaactactgtgcaatatagtctcacctttgatagaaaccccaatgcctggaagtccatctctagcaatatgttgacagaaaaacttggctcaggaggaggccagagagggacctctctggatgcacttggtaaaaccatcttctgctactctagctcccttggccacaggtgcgggggaaatactgccagttaatctggtaggtcggtgtaagtgagcttctcggcaatcagataagcgaggaagccgacacccacagatcgctgctggctttctcagacaggctaagcattcaatctgccaattttttccaaaattctcacctttgctagtggaggggatttcagagggtgggaaagtatcactgattctggatgatccatgatgatgtggtttcagggagaggcagatggtgccctgggtgacatcacacattacagcacctcaaacacaccccagatcctgccaacttaacaacagggtgatccacttcacctgagtccattctcccctctaacttctgccctagttttctccattgcttccccaggaaatagctgctatttgtggtctcagcctgcggctggactctgcttgttagtcttagatctggcttccatccccacctctcaacagagacagctcatgtgaagtctccaaggattctgcgcacccagcagtcttcccgtctgctcttagcatctttcccagctccctgcggcgtgacaagtctcccagcgcaccctgctcaccactctcccagctgggctttaggaccccaccttctcctcctccagctctcagaactccaatattctctctctgtctccgtccacaggtactttccctctcccatacattccatgtgggtgtttctctcttttaaaattcactctaggcggggcatggtggctcacgcctataatcccagcactttgggaggccgaggcgggtggattgcctgagctcaggagttcgcgaccagcctgggcaacacggtgaaacctcgtctctactaaaatacaaaaaattagccaggcatggcggcacacacctgtagtcccagctacctgggaggctgagggaggagaattgcttgaacccaggaggcggaggttgcagtgagccgagattgtaccactgtactccagcctgggtgacagatcgagactctgtctcaaaaaaaatgtaaaataaaatttactctaaataattatttattatagctgtttgccccctaccagcttatgttgttgtaaatggtaattaattatctcagttgagtctttcccccaactgatttgtgttaaagaagtgataactgtggaatgattatcagagaaggccagagaagaaaagaactagacagcccatagaagacagcctctgaaatactgaacattttttctacctagttgtttatgtaattcttttgtatttctttcttaaatggtttcctctcactgcaggcaatccctacattcccctccccacactgatctctctctgtagttctggtcatgtatttccaaatgccgcagctcacgttaacagcgtgtctttccacctgaagcccagtaggtcaacgatgtaaatgcattttcaccctgaaaaactaaatctttgcatgacttcattttagatggccacattattcttctcccaatcatttgtgactgaaaatttggagtcatatttgcctccttcattacccaatcaagacagtgataccctctttgtctgaaaaagggacccagagtggcagtatggtttggttctgtgtcccccccaaatctgttaacttgtaatctccagtgtcagaggtggggcctggggggaggtgactggatcataaatagtttagcgccacctgtcccggatacagtatagtgatagagagctggttgtttaaaagcgtgtagcgcctccccatccgcttcctcctgttccagctccaactttgctgcttttactccgccatgagtgaaagctccctgaggcctccccagaagcagatgctgccatgcttcctgtacagctgcaaaacctcaagccaattaaacctcttttcttataaattaccgagtctcaggcattttatagcaatgtgagaacgaactaatagaagcacattgctttctgggtggggtaaggctctgactctgtgcccaccatgtgttactatttcctcatctctctttctctctttctttctttctctttctttctttctttttttttttaatcagtctcattctgtcacccaggctggagtgaagtggcaccatctcagcccactgcaacctctgcctcccaggttcaagagattctcgtgcctcagcctcccaagtagctgggattacaagcatgcattactatgccaggctaatttttgtatttttttttagtagagaggggtttcacatgcatactggccaggctggtcttgaactcctggcctcaagcaattttcccgccttggcctcccaaagtgctgggattacaggcttgagccacggtgcccagcctgtttccttcccatttctgacgtccataccttccttctttcttctacactatgtccaagactcaggcttctcaaacctaatcaaagcgtcgctacagcccctaaaaagcctccttgcctctagtccctcctgatgaatccacataacaagccatactgaatgcattttctcaagaatacttctttgtatggaccatttcttggctcaaaaacaccacaggcactttccactactgggaacagagtttccaacatacattctatacaacactaatctcaagtgatacttacaaaaaactgcaggaaaataagtttgggaaacagaaagacactgttttccttggaggttcctaatccatattagtacattaaagtctgtgaggaagcctgcagtaatgaaacctttcattgtgtttacctcagcatttttcatgcggattcaatcacggaacccttttttcacctcatatttatcaacgtggaatatgctctgggaatgctgacctgggggatgaagtccagttgctttatcctaaaattcagtgctgcaagtgacttacacaggatcagttcctactgatcactactgaaccacgaatgaggtgaaactctttatttattgtctgttgataacatcccgagctttcccactgttctgctctggcctatggggcccacgaaaccaaagaactcttctcaatccccgcttcatggccagatcctctccattcccttttttttaaaaattatttatttatttgttcatttatttatttttgagatggagtctccctttgtcacccaggctggagtgcagtggtgccatcttagctcactacaacctccacctctcaggttcaagtgattctcctgcctcagtctcccgagtagctaggattataggcgcatgctaccaaacccagctaatttttgtatttttagtagagatagggttctgccatgttagccaggctggtctcaaattcctgatctcaagtgatctgctcaccctggcctcccaaagtgctgggattatagatgtgagccaccgagcctggccctccattccttaagccctaacttccatcctgcctcctccccgctgtaagcttttcagcttgacatgacctgttctctaaagtccttgctgcctgtgccatttgaatactccctttggggcttttgctgttgcactgaattactatattattttgcgatatcacttccagttttgcatgggacctcagcttccttatatactcagggcagaaacccctggaaggcatttttagatcctccagtgcctcacatgtccaaattttctccttcccttcacaaggaaacctctccaatgtatggttttatatcagtttgtcctaagaattctcccagagatgaaattggcttctatctttcaatggtagtgaaacagcatttctaaatgtcaccactgacttttaaagaattgtctctgcttctcctcttccctctccacctgccctgtctctgtatttggccaggccctcttacctatcccctcttttctatgtggccctttccagaagtgggtacggtgttaatatttgatcatttcacttattgtctaaaatcttctgtcccaacaaacctttgaccagattggcaaaactaacttaaatctcaaagcactaccactttttctgcctatctcctgacagggatagtccctaaaagtgaaagtgctgatgcccaagggatccattacaaggctcactgcaccacgcggaggtcaagagggagacgtccacctgcagccatcccctgcttctggctatttaaacagttgccccaaacaataattttctggactgaaagcacaggccaggattctagaaaccagagtgcaaggcattcctattaatctgcaaacaaaacagtggcaaggaaggtattcacacttacattgaaagcgcccagaagaaacaacgtgggttgtaacccgactgaaaatatcagtcgtagaattgtggaggcaattaaggcccggatgccatggggcttggggagggcaatgacgatggccagagagatgagcatggctgtccacaggagtcccgaccagtggggctccagggttcctgcaaggacaaaacagggttctctcacaaatctgtgccttcactgagtacaggggacagacctaaaacatgcactgttacagattcctcaataacttttttggcttaccagtcccaactctcacctcaaattctctgccccatccataaccagtcccatcagcattttttgacctccaagcctccacacatgctccttctgctgggaagttcttcccttctcattcatctcaggtcttagctttgacattacttcttccaggaagcctcccccaatccccttcctccccacaaaaacatgtcaggagttccctcctcctccgtactccctgcttccagtcatccctacaggacactatttcctaatggtcagtttacttgtctctctctcaccagattgcacattccccaggggaagtacctggtgcctggcaggtactcacgaaaagctcgttcgagaaataaaactcatgcatgtgtcacacttcactcaaagaaggcgacgtggaagcctaaacttaatttctattaaaagtatgcaaaggaaaactgcaggtcccctgcctgaatcagatttctccaagggaaggagaaaggcaacttccgtgtcatgagcatcatgctacaattagattatccctgcagtcaaagagcttataccaatttttgtcatctcttgctactgcaagttctatttagagtgtcccacgagacggcttggttatataacatgagccaacacggctaaaaatatagttctgtaaaacactcattaaaaaaaaaacacccctatttcaaatgctgtcacattttgagtctccttcagatgtaaacaagcagcactacatgattaaggccacttatataaaggagcttcacttcttcagagatgcttggattgtggcaccactggggaggagacacctttgcagggcacagctcttccaccagctgctggctgccctagttcattgagtccacgcctgcggagattcagcctcactttaacaactgttccccccagcccagccacttacctcttcccttttgaaatccttcaaaaggcaaagctgattgggaatggggacaaagaggcagaggtttctcagaaattcaagaagtgcacattgaggcacatgtgccgctttctacgcatttaacaattgttagacatcgtgtcaagcccttgatgttgatgatcatttattcatcctactgtccccggtctactctaaaggaaactgagtctcaggttacatttcttgcccaaagtgatgcagcaaatggctgcagaccatttgcctctgaagtcgatggtccttaatcaatattttaaaaaatccatgcattttaagtgtaaaatttggtgaatcttggcagtttatatagtcatgtgaccaccgcatgtaattgtcaccacagtcaagatacagaacatttttatcactctaaaagtctccttgtgcctctttgcaggtgatgccttgccccatccctacccccagctaccactgatctaatagtgtcagtccctatagctttgcactttctagaatttcataaaaatgggaaaataatcctatcaggtagtcctttgtgcttgacttctttcactgagcaagtttttaagatgcatccaggttaccatgtatgtattgatactttgtactttttattgctgactatattatagtatggatatattacaatttatttgtccagttaacaatcaatgagtttccagtttggagtgattacaaataatgctactagaaacattcatgttcaattcttggagtggacatattttcatttcacttggacaaacatagagaagtagaatgttggatcctacagatatgtttaactttaaaagacaataccaaactgttttccaaggtgaatgtatcacactgccttcccaccagccgtgtatgacagttccatctgatccacagcatcaccaatacttggcagtgcccatctttttcatttagtcattctagtaggtttgcagtggtatggtgtggtgattttaatttacatttccctgataactagtgatgctcaacatcgtttcatgtgcttactggccattcatacatcttcttctgtgaagtgtctgatcaaatgctttgcccactgttttaattgaatagtttttttattgttgagttgtaagagttctttacatattctggacataagctttttatcagatatatattttgcaactattttctcccagtctgtggcttatcattttctgaaatgcttaatgccattttaaatggactcttaagatgatctcagtatcatcaatgtgaccagtacaatgtatgtcccaaatcctgaagaggccaatgtaaaaatgctgtctcctcactataacggcagtgttaaaaaacatagtgctagattccaaaaaatcaactctagaaagacatctttgagacagttggagaaatctgaatttgggcaggctattacaggatttgctgttagttttgttagatatgataatggcatggtgattatacatattttaaaatgtcctcataagttatacactgaaatatttatggacaaaaaatccaagatgtctagacttctttaaaatgtttcagaaaatatagtatggggatagatgaaacaagataggcaaaattgttaaagctggctgatagatatatggtagctcattatactgttctttctacttgtgtgtatatttgacaatttcaataataaaaacatttaaaaagtagtactacatttgctttagccatcacggcatgctcacaaattcagtaagcaatctgaagctgcctgagttgcacgcttttgaaagactgtaacttgtcagttctaaaacaaaggtggaggggcggtgatacttttgaaaaggagcttttaaggccactggttcttggcagttgcaaaccttgtaagccacagaaccacacaaaatcagcacacataatacggccattatacacattcaagagggacattatgaaatcttgcctttaggatgcaacaaatcctaacacatattagctcaaagaaatactttcaggtcaacaaaccagatcttgtttctaggcagggttaatacaactcttctactgaggatggttagcagtgagtataggaaatgccctcaatgcatcttacaaaaggaaaaaagaatccctctgagagtgaactgatgcacttaaggcagtatcagctactagataatggaaaaggcttccttgggtcatatcagcctcaggtcaaatctcctcggagctctgaattatgctctcagtttagtccctcagcatgaagttctaaagcccatgattccaaaccatgcatccttgcctcctgcagaccagcctgagttggtggctcattcagaatgcaccattttagagttggaaggaccctcgatagtcataccatccaggggatctcaagcttggatgggcaagaaacacatgctctggagatcttgactagtttgccaactgttcttccccgggttctacaggattttctgaagccatatcaaagttttctaaccatgggcttaatgtaaacatctcttcacataaaggatgacaaggacttgctgaagtggcttgcccagagtggcttggcaaatgggcggcaggagccaggcagagaccttaagtctctggacttcctaagtctaagaaaggcactgcaggaggcttgtcaatgaagggtggggggctgttaactccctgtccccagaactggcctgaatgctgccacaaatgaccggtgaagaaaacagacgtggcgaataataaaatctgtttgaaatatttttaaggcaatggagagtaaatgaaaacacagacaaggtaagggttgaataatctgccgtgaggaacatgacaacttccctgaggcgaaaggagacctgggcctcctccgccgccgccagctgagctcctcactagccctctgccacgcactcctctgctgtctggcagcagggttaaggtggacatccccaaagagaaaaccttgcagctctgggttctagtcaaatctttttagacatagacacgggcattcatgtttcctgacatgacattaaaaaaaaaatcccccctggacttgtgtttagattgtacttttcggagcgggggcattcagatggtgccttccacgtaacttaaggtcaaacagaaaagctaactcctcaaaagggtaacttaggcatataagcattacataacatcgctttcaagttggtccttaaactgactcattacccatacatgtctgcttccgttgatgtctgcatgattaagctaaagagtggagcctgaaacttactcctgtgtggtttttgggctctttatcccattctctgtcacataaggtggttcctggcaggttgttctatgcgtatgtgaggtgatctgccaaaaagctctgatgaaaaatttagccgggaggtggacctcccaggtggctgctgtggatgtcagaaaaggggccatgaatgtatcacagaagaggagctttgaatgcttgtcgaggggccccaaatagcaaaatgcccacctccaaattgtctgccttttctcagcaaaatgtgtagcctggaaggaggtaggctggggggaacccagaaagaccataatcatcatgttttgttatgtgaataatggcaggtacctcttaatagactaaacattgtacagtctgcagtcattcaagtcctgcctcccctctgacccctggcaaaaaaaatattccagagatttcttacaaattctttagtctgaaatcaattccagaagtgcggtgtggaaacacatatactggactgagcatcaagacgtctacgttttagggttagctctgccattagttagctatgtgactttggcctgatttcttaactgctctgagacatagtttcctcatatataaaagaaggggctgattaagagactttctcacaggtttaatagtatctagctgcttctctttctttcctggttaaaaaaaatggataaaaaagttaaattattttaagttagatttaaaactaaatctatggtaacagctacaatctcctcttgtctgaatgtggataactgggatccccagtactgcaccaatacatccaggaaccacaactgagatgcaagtcctagccttcctgctgcttctaataggatttttgaagttaaagatatgggtacctcctcggactcccttaaacgggtagaaaaacgccaccagcaggttcatcaggacggccaggttaaacgaaatgctgctccagaaagacatgttgcgggcacaccagtacaacacgggctgggctgcagagacaaaggcaaagccgcgtgaggctggagaccccaagccggaacgccaggaatgcaatgtggcccttccgccagctctgccccacaagtccacttttgttcccggtttttaccacaagagtaaaaatgatcatttgtttggaacttggtacataatgacatcagattggtttatttctgtgtggagtacttactggaacagaagatgtattgggggtggagtaaggagagagcaaaaagagaaaagttggagcatctataaaccctgcataccccagccgcagccatcagttgcggaatctgggggttatccagagttcacacattgagtcctcggttccccctagggctctgggaccagatgagatgcccggagagacccaaaaattcaattagctttttagaagtgtggggcactggggaggggtgggggagatacagcattcagagtcagccccgctgggccccagactagggctggtatcatttccacattcctctctggctcaacatgctccactaacacgccagtgcctaaaagcaagacaatgattcctttcccggcattgagtcatctgccatttccctgaagttggatgatcattcttgaggacagggaagcgaggggtacaagttgctgacctcgtggtcagcagcagagttcccatctccagggctgtggcagagagaggatgtggcagcaaagccatcacaaaggggcaagagacagagacgctttggacattgctgccaccttaatccaccgctgcccacaggttatcccacgctggccgggcattctcagtcttagaacaacaaacacttggttacaggggtgcctttttccctgaactctttttcagtggtgctttacacttagggtgatgctccaaaatagacatggtaggcataatttcagtgtccatgtcacaggcaaagtttccaaaagacagtctcattccacatcatccccctccagagaaaagcatggagtacgtgagaatggatctcgatcgtatatttctttttcccaatgaagtcatcatgtaactttgcgacagcagccaatgacaaatccaacggccttataataatgcttgtagcagcagccaagcctttgggagcttccaaccaaaataaaattatggtacaattaaatagagccctgggtaatttattaatcgcccatatcatgtttgcacttggtaacaggcaatgtttccaaactgtagagttttagagccatgagcaatcatctagtttaaaatccctcattgtataaatgagggaaactgaggcccagcacagggcagaagcagtggagatcttgttatccaggttagtgatcctctggggtcagcggcagggataaaaataaatgacccatgtgacaattgaatggggggccagccaggacccagtcaaccactacgtagcaatgtactttctttggtaagttgattgctgaagcaaatttaagctgagacatttatctgctctagaaacaacagctattgtgtttcttctgggactgaagcccatttccgatctggatatgtaaactccagaagaggacagaagagatgaatggcaaagagttgataaccgctgaagctgagtgatggatatgtgggaatctgaaatatcctctccacactagtgtgtgtataaaaagctcataaaacaaagttggggggaagaaaaggatctggcaaagctcagtgatggtctgtgtaagccagcattcgtttcagagggagtgctccgtatcaaatgtgagtgcgtgtactgcaggatacgctaatatgattgtaataaatggtcttcaactatggcatatagttcatgaaatgaatcttatttttataaggctaacattctacttaagttgtaatgttgttttcaatctggacaaacattcagtccttcaaatcaactaggtatttatccaggtgcaagaagatacttagagaccaatcttgacatgcaatgtcttttatttcctgtggcacatggaactatgtccctatctacctttccagacacttctcccactccccttccccatatactctgcctttgtatcccaatctagtggtggttcccgaacacaccccgcactctccagcctctgcacactcgctttgtgtcaatttaaaaatatgttcatgaattatttgatcctcctcccttcaagtggtacatcttaatttcccttccacttgagtatgggctggacttaacaacctgttactaataaataagagtagagtgaaactgctggttcatgccttctgagactaggtgatattaataaaaacactgtggcttccttctcctcccctctctctccctctccctctgtctcatcaataatttgctctgaggaaatcatctgccatgtcatgaggatgctgaagcagacctatggagaggtccgtgtggaggggacctgaggcctcctgccgacagccacgtaagagcaccaaggagcggaccctgtaggtccacttaagccttcaaatgatggcagccctggctgacatcctggctacaaccccatgagagacctgagccagaaccatccagaggagccactcccaagttcctgaccccaagaaactaagaaaatactaagccccatcagtctcagacggatctcactacgtgtctgagtcctagctgcagatttactgaagaacagatgatcctctgcaatacattcaggaaaagagagatgccacgtgggagagcatggaagagtcagtatgccccccaccaccatgatgataaacccatggacttggtgtatggcaatggccctcaacaatgcaacctgctctccaaggtctcaggatccatccatcctgcctgtgctccctggttcgttttccctccagccactgccaaatgccaggacacaagtcaccacctcccctatgcttagccttgtcatcctccatgtcattgaggccttcacgactcccactctggaaccaagcaatcaaggcctctgaattgcactgttgcactgaccgttcacctccttactgtctgccttatgcagagtgcaagctctgtgaaggcagatgcctcgcctgagtggtttccagctgcccccagagcacctagaagaggcccagcaaatagaaggcactccatgattatttgataaaagaatgaatataacccaacactttatggctccccataactggatgcccccctccccatggtcagatcctttttatatttggtggacatgacagaaataaatctccaaaataaatgaattctagaaaattgctcaaatatgagaaagcaactttcagttgttcacttctttgagagctcttgaaccctcaggtcaataaaggagacaaaaaaatcatgggggcaaagaatgcaacctgaagccacctaattatggtgactgaatttctcaccaagacagaccatccaacatctcacccatgcgggcttacagaggactgcccgctaaagctggggtgcaccagaaggtggccgtgcagggccattcgcttcagctgctatcccagctgtgttctcatggcatggaagcagctttaaaagcattttgggacaatctggtcattcaaggaaacaaaagcccttcaagtaagtaagtaaatgaataaataaagcccgccatctgttatctgacagcagcgccacgcgacacacacagatagcctgccacggaccgcgctgtctgacggccaatcgggtgacccaatggctgtcaaccgctagggtcagggtaagggaagctcttatgagatgagacagggccaggcgctgagaacgccacattgctgtgtgtgtttccgccacggtcactaggtttgtttcgcattactgattccagtcctcagtcgctcaagggttcgaagcagctttattgatagaatgtgctcaataaaataataaaatggataataaggtctagaagacacaagtaagcacagaaaatcaaaaagagaataggttgggaactggagaatggggaatgaggattcagaggagtcccaggctgggctctgaggtcaagatgaaatgagaggtgtgctcagttacactactcttggtatcaaaaggagatatacaaccagtgcctcaacggaaggaagacatttcttttttttttattctgttcaagtaatttttagaaactttttaaatttgttaagttctggggtacctatgcaggacgtgcaggtttgtcacaaaggtaaatatatggtggtttgctgcacctgtcaacccacccatcacatacatattaagcccagcatgcattagctctttttcctaatgctctcccccaactcctgcctcccccaacaggacccagtgtgtgttgttcccctccctgtgtccatgtgttctcattgttcagctcatacttgtaaatgagaacatgtggtgtttggttttctattcttgcattagtttgctgaggataatggcttctggcttcatccatgtccctgcaaaggacacgatctcattcctttttatggctgcatagtattccacattttatggctgcatagtttatgtactataatttctttatccagtctatcattgatgggcgtttgggttgattccatgtctttgctattatgaagagtgctgcaataaacatatgcatgcatgtaactttataatagaatgatttatgttcctttgggtatgtacccagcaatgggattgctgggtcaaatggtatttctggttctaaatctttgaggaattgccacactgggaaggtgtttcttaacagaggaattagcagggcaggttttgcagtcagactgcctgggtgtgagtcccaggtccttgacccactggctctgtggacttgggcacactgcccagcctctctgaatccacatagaagggctgccatgatgcatgccaagtgcttagtacagtgcaaactgatggtgttaattttgtttttctactaccattacattagtagaatgtgaaaactccaaggtgaaggtgatcctgtgagcagctaggacaggagagcaaagtgagagctctgtttccagagtcagaaaggcctggatctcagctccaccgcttactagcgagtgtcaccttagaaagtgacaatgtctctgaaactcgaatcttctcatctgcaaaatgggcaataatcgtacttcatggatggttgtgaaggttcaatgagatcactacagtaacacgatagctaacactcactgactgctttcaagctaccaggagctcaggcaaaccttcacatgttatctcacccaaaaacccatggagctagttacaaggcctacctgggcaacatagtgagacttctgtctcaatgaaataaaaaaaattaaaaaggtacccccgaagaaagaagtggggtttctagaacagaagcagtggtatctattgcaagagtagaagtgaaacatgatggtagtgtgggtaaagaactaacatacttcttcttagaaggggcgtgcccttggagcgaagggaggcagagggccctcagggagggccttctggaattgctggctgtggctgctggaggcattcacctgccccctctgctacctggtgtgacctagacttagagagacaagagccctccacacagtcacagacctgttcattaagcctctttctgtaatgatgcgtttgcagggcttgggtggggaatggaatgttctcctcaggactgtctccctatggctggtgggagctgagagcagagaaggtgggtgcacagcctccccgccccaggctcctgaagcacggcccctctacccgctacactgcctccctctctccctcccggaacctctttcaattcatcactcttcacccagaccaagagcaaatcatcagagattttacttttccaaacttttcactccaccccacctggcaggtgtgaggtagcccttcaacataaacctggcccagactgggaaacatcaggtgatggtgagagaaatcaaaatggtggttgctaggtacccatcaacagtgggctgcgtaaagaaaacgtggtacatataaaacatggaatactacacagccataaaagagactgagatcaggtcctctgcagcaaaatggatgcagctgggggtcattttcctaagcaaattgatgcaggagcagaaaaccaaatactacattttctcacttgtcagtgagagataaacattgggtactcatggacataaagaggggaacaacagacagtggggagtgcctgggcgggggcaagggctgcaaaactcttgggtacaatgttcaccacctgggtgaacccccccaaacctcagcatcgcacaatatacccaggtaacaaacctgcacatttacctcctgaatctaaaataaaagttgaaaaaaacaccaaaatggtggttgcctctggagggtggggggttgtgagtagaaaaggactataaatgggaatgagacaactttctagaagaaaataaatgtcttgattaggttggcagtttcacaggtgtggtagacagaatggtccccgcagacatgtccatgttctagttcctggaacctgtgaaaatgctgtcttatgtggcgaaggggaattaaaggtgcagatggaacaaaagctgctaatcaccgaccttaaagtagacagatgagcttggattacccgggtgggcccaacataattacaaggagccttcgctgtggaggcaggaggcaggagaggagggtggcgagaggcaatgtgagaaggactccattcaccattgctaaacctgaagatggaggaaggagccacaagccaagggatgtgggtggcctctggaaactggaaaaggcaaggaagccttctcccctagagcctccagaaaggagcgctggcctgccaacacttgctttagtctagtctagtaagactcatgttgaacttataaaacaatacatttggttcctttaagccactcagtttgtaggaatttgttacagcagccacagaaaactggtacaatgggtatagaaacatttgtcatatcgaatcaaagtctacatttaaaatctgtgcctatgattatatgtcaattatatcacaataataataattaaaaaaagataacagaaagtctgctttgttcccagaaagctggggaactctgtagaggggccaccttctgaggctgcctctccaccagagggaacggcatctgcccccgccaggccgacctctcctcaccctccagtcgtctccaaatcacatttgattccagagccctttccatataagctgtctcaccagagtcttaggagattgccaaggcagatatcatcattcataaatctgtcacattatagatgagagagctggggttaggagaggtcagtgacttgtggcagagccacaaccaactctcctcccatctgcacgttgaaccgacacagacaaccagccccagcagtgaggccggagtcaaaggctgggaaagcagaagacacaaagctggtctgcgggcagatcctcagcaccagtcccagacatccctgatgacagatctgatcagatacgctttaaggaaaaggccagggcaggggcaggggcagggtgaggcagtgaccccggcagtggctgtttccatcctgaatccactggacagggggaaagggaagtgggcatggctgctgtcagccaaccttcaaccacaacaaaagagcaagagaacacagatcacagaactctgcagctggaagcactggaatccagcagtttccaaatgcctttttcagcagggtaacgtgctcctctccggtcccaaaacaccatcttaggataaagacgccgctagataaaagacaaaaggcaaaacagctccatatgaagcagagcaaagagggtcccctccctcttgccattgaaactccttggaacttcaggagagcagcacttgaaaaccacccatgtcgtccatccttccacatttcacagatgaggaaactgaagcccagaaagggaaagagacttgccagggccacacagaacctccctcccctgactgcccaagacagttacttttgaccacactggggtgtggctggttgaaactacaacccgagtttacattcttaccttctgataattgtcaagtagacagttttccctccttgggttgactgagctgtagaggggccaatgaatccgggtcttagattaaaagaataacaaaactaccttttcagatcagccttgaaaataatataatattgcttaattagcctggctcccccatcctcccccagccctgcaagtccttgcaaagccatggagcgtggttatgacgagcctgccttgcttcaggaacaagagccaccccgaggttaggggctagtggacagtgacggccacctcggtgacagcagggagacagagggcctggaattatcactggatgcaagttggacaccagtctttggccatttacataacacccacctcctttctggatccacctatcttacccttccctggaaaggggtattattgttagacaactgtagcactttgcatctgagtagctcttggtagtaatcaaagtgtttttgacacctaacgtttcataacaaccttgctggaccccagcttccatgtgatgctgacatggcagatggtaagaccctcatttttcagctaacgaacccagggcacaaatgaggttaagtaaattgcccacgatcacatggctggatagcaaggagccaaggccataatttaggtttcccgacttccagttctccaggcacgctctgcctagccaggtgtgttttattacctagttcaaagggggacactcctttctttaggtgcaagaggtcacagtcctaatcaaactgtgtaaacaagtggtcctggggaggagaataggagagacaaatcttctccatgacctagacatatacccatgaagccatctttcccagaattcaggaagttcaggggaaaagacaggccttgcagtccaaggatcatggtgctccctggaatgtgagccagcctacctgtccgtttctgggccaccagaccattctaggggaggagcccctttgtggcatcttagctgcaagacagggcagtggcggggagcatagatgtatgtgtcccagggtggagcctggtgggagcgggcatggcttgcgggggagcagtccagcacagagtgacggctgcaggactcagatccttcctcaaagaaaagcatttccatcagcttctaaaagttggtccacctttcagaagccctcgctctgggccttgagagaatccagagaatgggattttccacctcactgcctcataagacatggccctgacccatctagcccatgacactcaccacggctgctcacttacctgctgcagaatgatttaagttctcaggttaaggccaagaatttgaaaaatgtggctgccaaacagtgagccaaagcttgagtttccacaggctgaggaaaattctctgtgggcatctttgatttttctcttttcacatcaactctgggagtctcagggacttcagaggacatctcccaccagactaacccactcctgcccagcttgaacagatactctgtgggtgacagagcaacgccagtggctaccaagaggtggggcttaccttggctgtcttcctacacctgtggtgaactgagaactccccactccctggggaccctctctctgcaagttttattatagtgaacggcaactgaacgtttccgatttgccgggcgctaagcgctttatatgcattatctcatttcatcctcagaagcaccccatggggtaggtgccattatcatccccagtttacagatgaagaaactgaggccccaagaagtaacccgctgagtcatccacctaataagtgccctggcacccaagccccacctgtccgacgcctcagccctgttcccaaccacatgctctgttaaacacctctcccctgagcaagagtctgtcctgttctgaacaccttttggcattttataatccaccccacccctacccctacccaccaggtctttcagaggcataaacaggctcctctcacagtaaagaatagtggcagaaggtacacatgcattcgaatgcctcaactttcccatgacgtttaatacatttgttaatatgggttcccaaacaatccccttctgcaagctgaagggctgccagggctggggtaataaattattaacaaaaccattgtcacacaatgactgctgtgggtctggagtccttttttagaaaccaatgattacaatcaaaactcaaagaccaggaaccatgaactaggtaataaaacacacctgggtaggcagagagtgcctggagaactggaactcgggaaacctacattttggccttggctccttgctatccagccatgtgattgtgggcaatttacttaacttcatttgtgccctgggttctttagctaaaaaatgagggtcttaccacctgccatgtcagcatcacatggaagctggggcccacccagcaaggttgttatgaaacagtaggtgtgaaaaacactttgattactaccaagaactactcagatggaaggtgctacagttgtctaacaataatacccctttccagggaaggtgtaagataggtggatccagaaaagagctgggtgttacataaatggccaaagactagtgtccaacttgcatccagtgataattctagttggttctggtaggttgaatggcctctaaattgacagcaaaaacacaatgaatggcaattcccattaagtgtcacaatgtagaatttttttttttaagtttggacggcatgaaaaagaacgagatcatatcttttgtgggaacgtggatggagctggaggctattatcctcagcaaacgaatgcaggaacaggaaaccaaatactgcacgttctggcgtataagtgggagctagatgatgagaactcatgaacacaaagaaggaaacaatagacactgaggtctacttgagggtggagggtgggaggagggagaggagcagaaaaaataactattgggtactgggcttagtacctgggtgatgaaataatctgtacaacaaaccccagtgacatgagtttacctgtataacacaccttcacatgtaccctcaaacctaaagtaaaagttaaaaaaaaatttggctgaaatttcactagctataaaagccattcaaatttctgcacgtgcagagataaacatcgttgcttccgcttgtcaaagtttaatacacccaaaggcagaatacaagcttgtgtcagaccctcctctcaagtaatccccagcctttccacataaagcatttcccaacattttaaaccagtctcgacttcagcaaaagtctgacctatgaaaagggcctaatagtgagtacaatgggcattcagaattggaccctcccttggcataaattatcactcaccctaacaagaaacttttttgcaaggtctgatggctttcaaccagccaacatctgcagctctcagtttaccagcctctctcaggatgtttccagctttaatgagttcagaaataacatagacttccaagtagaaaggaagcgatgaagtgaagcaagtctgtattggagaggtgtcaacatttcaatttcatttgtctgaaataaggtcctccctcatccacactgtacagtcaccttttaacaagtgagagacaaaccagtttcaactaccctgccaggcaagggtggggcagacgcccttcgctatgcctgacacctgagagaaaaggtggaggacaaagaacccttccttcactcttattaatctggtcactgggctctggggaacggcctaagctccagggtcaaggccaaggcaggggatcttcatgatgattttcaaggtgaattcagtcttcttcaagcagcaaagtccaacctgttctattaaaaacacttttcagggtccagtatggtggcttacagctgtaatcacagcacttccggaggccaaggtggaaggactgcttgagcccaggatttcaagaccagcctgggcaacatagcaagaccccatgtctaaaaaaaaaaaaaaaaatgtttttaattgggggaaaaaacacctttcttctgagacagaaagctcaacagctctcctttcctgtctcccagtgcccacgggaactgggacttactgggaaagctctgccctatctggtaagcagcgtggtccccctccaccctgtgtggatcagaacgctaacagtttcacacatattcaacaacaactcaaccaacaaacagtaattcctaaaaaaaaaaaaaaaaaaaaattaaaggtattatcgtaggaagcccctgatggtgtaggcaggctactggcaaccactgtttccagcaattttcaacagtaaaaccagatttcagagaagcaggtcagccaccaccctggaggaccctgtggctctgacccaggaacaagaagttaaggagactccaaattttctctgggttcaatagtcaaacagatgccaaaggccagtatcttttgtggggatacacggcacagccgtctgtctcttccagccaagtcatgaagattggaaagcctccagacaaaacaaagatgaccagtggagtgtcaaatcaacgatacccttgaaaacagatgtaaaatagatgcaacatcaaaatttgcctgaagtggaaggggactgtggtaggaagctccttggtaatcctccaagagggcaagaaggtgttctggtggctcttcaagccaatatgaggcttattaaaaaggtactctaaagcaaaggagagtttggttagatctcaggaaggacttttgtccaaggaatcagagggctttaaaatctcagtccataaagaaggaatgaacaatgtgaactgcatgtctgggctgcaggagacacatgctagcctctgagggtggcttccagggctggttctatgattcaatgacaagtatcctctggtggctcttgtgaaactctcaggtcctgtctcagctcacccacatgatcactgtgggaactgtggccaggaggacatgaagactttctcatcagacctccaccttgtctcatgaaccctgaaaagacagatgcaagaggtgcttggaaaattctatcatcaagtcctcttcccgggaggagggtccagtgctgaggacctggcagtgacttgggtgctgttcctccatgggggtggcaatctgcatcgtggagagcgagggctgaagcaggagttgcagggtcaggggagtcgatctctggaaacaactccccaggtcttatttccattctgtgtacctgagggacaatgaatcaacaccaaccaacatttcctgtcctcaatgctccgaggttcccagggaattcaacttgaaatttatacagatgccaagaataatccttgccaccccccccccattttctgtgtttgtgcagtcacacggctcagtgaaagcgatctctatcctgcatctttagcaaggtagaaacatacgcataggggtgacttaggaactgggtgggtttggacagctcatttattaacttccatcctcagttccctcatctgcaatggagaaagaggaggagaaccacttgagattctattgcaaggagtgcaggagagaaaacaggtgagagcccgcacagtaccggcagggtgtctacaccagccacgttcccttcgctgctctccacacaaactgtgacaaggacacttggccatagaagccgaaaaaaataaatccactcaggccggatggaggcaaggacactggcttaggtggcaaagcatcaagcaaagcaagtgcctccttgatgaagactgcagtcacccccagtcaaccctagtccttcccaactcaactgactctcgggtacagccgagtctggtccccagcagaatgctctgggactcttcatgtctccccaccctgcatccccatcttgctgtgtgctggcccaccaggtaacttccacacggccacagagagcatccctggcagctgacagtaagatgtacagatggccaagcggttagagcagggcagggtgaaatcacacagcactcatctgggtaaagctgctttgtatattagggctttggcggcggcagcgcatatccaagcaggggacaggcccaagccaacttggtgccctttagaagcaccgactagggatcggcgggaaccacagagatcacctcatccagccccgacttgatgacaagcccatcaccctggtggagcagatactttccgcagctctgcccctgaccgaccaccatggggtagaccgcgttagcttccttcactcagctcctccaacatcccaagcacaagccaaccctcttctgaaatactcttgccctctgctactcttcacacagctccttctcttcgcatctgttgggtctcagcttgaacggtatctccccagagaagccctccctggccacgcttcgtggcgcctgtttgcttccccatcacacttctctgaagctctgatttagctgatgatgagctgatttcctagctctgtctcccacaagactgtaagctcctggagggcaggggctatgttggtctcatccctgactgtattgacgccaatgtgtatagcacctgacacccagggagtgctcagtaagtaaacatctgctatattaagccggctgtggtgacacaagccagtagttctagctactccggaggctgagacagaaagatctcttcagcccaggagttcaaggccagcttggtcaacacagtaaggcctcttctctctttttaaaaaatttactatattaatgaatgaacaataatcctgaaggaggtgcaattccgaaacactcaagccaagctttgcatccatggcagctgaagtataactttatggccagaagaagcctgcatgtgaaagctcaaagtcctgctaagtgggaatatgcagcacaccgcagaccagccaaaggcagctgatgtggtgttgtcacctctacgggcttatccggtttttgcacgtaactctgtgatgggctcagcctggctgaggatccttaatccatcgagttaactgttaactaccccggccccagtgacacagcagcttgcatgattaactacagcccgggagggatgatcatttgtgcaccttccgtctccaaacctggctccctccccagacttgatagctacaagctctgggctcaacagtttgtgggtttgtgttgcaaggaggctaataaaaacatatttctcaaataccatatggtgagggcaactgcaacacatcctcctcgaagagcaataaaatatatatatttttaaagtcctgaattccaggggaaaaacgaggcttgaagacttcagagggtttacaggactatccccttcagtgtcagagccatcttgatcaaaagtctaaaacccaggaataggaaattggtagaaactttgagagagcctctgacagtttcaaagaggaactcagaggacctcaggaaatgtgagcgggcatagatttctccgtgaaaaggagggtcaaggcagaagaaccagaggcaactgtgaacatcaagtcagttctcagggaagcaggggatccaagtgtgtacatgaggcgccttcactgtccctgcatcaggaatctagctgttggcaccttataatgagaaaacagtctcaaccatgaagttaactctgctggaagatttccaaagggaaagtccctcccgttactcagaggggaaaaaaaaattacctacttggtctggaatccggggatattttatgcagatgtctctaacagaagttaataaagggaagtcagcttgcctctgattattcaaacaggctactgctattaaggattgcacaacttctgggcaaggcagagggcaagaggacaaaggaggatgcatggaaatacaaacagcccttctcctccaggccataccgactgtccaactagcaacagacttcacctggttttggagcaatctgaatttggaatatgccagagaaaacttctatcaggcaagatggaagactcctaggataggtctctctcatggagggattggcacgatggtaagagtccagtggatggaaaaggcctcctccttaaagatggtgatggaaacgagcactgcacagggaaacacaaatcaggtcccctgaaatccagcccaacctggccagaccctccagtgcccatcagggcttatgaacagggtgcttcagtgtctttgttaggggtggttaaaaaggagcacgtgcttataggggatgctgctgagctccatgattttgacttcctgtctaacctgttgatgctacaaaactcttttaaaaacagttaccatgggaacttttccctagcaagcattcttcaagaaacgttacaggtgctggtgaattcaatgcccttggtgtcaataagcttttgctgagtcttagaatgtgtggcttgaactgagaggactttcaaacagataatgcgaagtttccaatgcaaatgtcttcggggttaagtgtcagtgaagtgcagtggaaggtagggggataaaatgatctcagtgtatatggaggccccacttaagcattcaaaaaattctatatacagtgttttcaatgtattatgtatcagcaaaacaaaataccccatagggctataatcagctcagggggtcacctcagcaagagatgctctggctatcactcctactacgggatttcctctctcatcagaaccagtaggtggtcaaaaccacaataatgcataaatgaaggcagggaattgggtatccaatgtgagcaactgaaaaggtgccatgtattagctatttgccattatggttctgcaagtgctcagatgactcataaaatgaccagaacaaaagtttgttcttttgtttttactttgagaagataaagaatcacgaattagtattcaaggttacctaatactaacccttgtctaccacgtgaccttgcattacagggagctgttgttgggacaggacaagagtccacatcccctgcccagtgcctggttctgggtcatgtcaccgaagcgcatcagcccatctgtcagccaaaccccactagccttgtgccttctcttctaaatccccgcggaggaaaacaacttctgccttctacagtacgaacagcgagggtctgctgggaaccaatacaacttcgcgtcccagtgcagcaatgttgccaggtaacaaatgtagaaacatactccaaaaactgtatgtgacaatatacaacctccgctctgcagctgataaccgagggagtgttaaaacaccgcgttctcttaacacttgggtttttggtgtgaaagtaaaattaaacgggatacttcctcttgtaaatataagacaggcatacaactcacacacgtatccactaatcggaaatagtagaggggtttgcaatagctatctgcagtgcatcccagccttcactcttaccctcaagatgaattccagaaaacctacagaaacgataactgaggaagagcctttcttctgtcggggacaagctctcctctaacaattgtgaggaagctacccacaagaaagacaccagcagaaattaaggaaaagctcatgcattgttattaaaaaaaaatgtgcttccattccactccattttaaaggtctacctttaaaactcattggctaaccaagcagtgactacttgcttctcagatcaaataaccagtgcagcctgttcccaccccaaacgaaaacaagatagacactgctctctagtaggcagagctccaaagtgggtacagggcactgaatagctccctcacattgtactcatgtaacttaaaggctggctagcatgggagaaagctgagagacttctgagggccttgtgttcaaatcccagctctgccaactgggtgactttgggtaagacacatggcttttttcagactcagtttcctcatctgcaattgggactattccatgtagcccagatagagtacctactggctccacgcacagtgctgggcactttataaaatgagaagaccttcctccctttcccttcgcccaaacatgaatattcttcaaccagtaaagactcagatgtggggagtatctggtgcatttagcttctctgagcaaaacgggcaaaagctgagatctaataaccatcacatgatgccaaagaacatatgcttctttagacgcaagcgaaaaacaaaaatcgctattaatccaacttttcataacggccctaattagatgagctgctgtcaatctcttccacagtgaggaagttctgtaggacagtcttcctgtcattaactttcctaagacctgggaacctggaacttgctggaagtacatgtatgtagcacacataattgtcatttggcaaatgagatgcccagtctgaaaggaaaagtctttcatgatttcctcctccagaattcatgggcagaccttataaacaaagcaaatacactgaccactcgagctgccttctgattatcaggagggcacagtgtctcccacaaagactccactaccaaagaaaacaaaatgtggaggcacaacttccaatctgcctggcaaacagacgcaaagtccttgaagcggccatgtctgtgcctggaaaattggtggagtaaggaggcggcatggtagagaggttacaaactcacgttctggcagaaaacaaaccctggaacaactaccagctggctctgtgactctgagcatataacctgacctctcggatcctctatttcctcattagcagaaagggatcaaaacagtacctactacataggcgccccaggaagatggatgagaccatgcagtgagggcgcctggctagcccgtggtacatgagcacttgttaccactactgtccatcattattacaaagaagaagaaaagaggactgctgccatcataaggctatttctccaagttgacatgtatttcccatgggctcagatcaattccctcccacacctaaagaaggtcccctttaaaatggcaataatcatcaacaacacaagttcacatttcacatcctcatgtttctattcaaaaatggtaagaaggctaaagtaacacggtggccacactgggtcagaacttctatctctacatttacagtctgagtgctggggagtcagatggagacttgaccccggaagaaagtgcacccttgggcgagttagtgggtgagggaagataaacaaccaaaaagtaagcagagttgctttggatgagctgttacgatgtgttaaaagctccatgctgagctgagtgccttccacatattatctcagtgaattcccagaatagtttatacagtaggagtatccacactgattcatcatgtacacactgaggacctttcatccagcacgtgtggaggctcctcgaggggactcggagtgaagacagacttggtctctgccccctcgggtcttacagtcaagctccagttgaagtgtggtcattactacagtaaatgaagcacaacccattatctctgcctcaggggatcaagaggaagtttctagagtaggagacatttcaatcagggcttggggagcctgccaaagggaatgagggcacgtcccacatgaagcaaaggcatctgagttcatggccccgctggggattggcaggcatgagttgcagctgcaggacaataagcgtaggggagtgagtggagaaacccaggtggggccagaccacgtgaggcactgatgggttccatcagggtggccatgggctccatactccacagaaggctgttcagatggggaagcaggtagtgagggttccatttggggggcatcactgacaaccgcgtggaagagagaaatgcccagaggcaggaggccactaaaaggctatctcagttatccaggcaaaaaggctgacaggtgcagatctcagcagccctatgctggcaggcggtcgagcctggtggtcaagaatatgaatcctgaagtaacagtgcctagtttcaaaccgctgctcctccattcccagctgggccactctgaattcacagtgccaactatctggctcattataagtcctaacaatggttaaactcccaggaggtagagtgggcacagattagttcctggagaaaagcaagagaaaaagaagtctgatgactgcaaagcttctagcttgggtatccttggctggtggtgagtccactgagaaagctatggaacacgagagggcaaatagaatggaggaagggagatgacagtgtcatggggtcctgctaacttatagctaacacaagtggagatgcccatcagggatttgagcagaaatctagaaatcggcagagaggtgggaccgagagctgtatctttgggaggtgttggcataaatggctgctggaggcctgggcagtagatgagattacccaaggggatcggtagaaaaagaaggcaaacaggctggagatggggcctcaaaacatttcagatgttttaaggtcaaccgtatatgccctgagaagtccctgtgtttaccactaggaaaacgtttgtaggaggcacagaaatagcacagcattaagccataagggagtgactaacctgaaaccatgatgctttggggtaggacggtcagagggggctcacagatccaaagtctgtaatcgcaggtgtctggactctcaggctacatatacaatttcctaaggaatgtcctgctttgtctgcgtcccgaatctgtgttgaaagatagtaaactggggtgatggagtacatcctggcagaggctatgtggggagagcagagatgactctagggaagaaaacgtcttttaaaaaacaaccctgtctgctcccaccaaaaggaagaaagaaaagaaagaaaaaaatgaaggaaaaggggaaaggaagggaaggaaagaagggagggaggaagagagggagggagggaaggagggaaagaaaaaaaaaagacagtgagaaagagagagaaagaaagaaaacacagaaagagaaaggaaaagaaagagataaagaagaaaagaaagggaaggaggaaggaaggaaagagaaggagagaaggagggaaagaggggaacgaaggaaggaaggagggagggagggaaggaaggaaggaaggaaggaaggaaggaaggaaggaaggaaggaaggagggagggagacagagagggaggaagggagggagggaggccccagcctgtttccctgaattcccatttattagctgagtaagtggccaacatatcttgggacttaggatattgctcatctggtgaatatttacttaaaaattgccataccaggggatgaggagcacagaacaaaggggaaatactgtggttctttcccttaggcagtttaacatctacatagtaaagattaaacaaaccctagggtcagcaaacatttttccaaagggccaaatggtaaacatttcacacgctgagggtcattgcagctatctgtcacaactactcaactctgcccctgaagcaggaaagcagttaggacaatcccaaaggaaaaactgcagctatgcaccaataaaactttatctacaaacacaggcagctgtctggatttttcccgtgggctaccatttactaatccctgaacctccagaggaagactgaccaatcctctgcctggcagttcccaagaggcatctcacactcggaagtcactaaagaaagttaggaagagcacagacctcttgctagaccagaaggaagagaaagaaataaggaatatctggacctgttgaggattcagtgggataaaatgaattgatgcctcactttacaaaaatttccaggtcttctctgtcatttttctctgcacttttagtaaaattttggagactgtggaaaacctgaggttctctctgaagacatctcctcttagaaacaaattcctagccagcgtggtggctcacgcctgtaatcccagcactttgggaggctgaggcgggcggatcacttgacgtctggagctcaagaccagcctggccaacatgtagaaaccccgtctctactaaaaatacaaaaaattagctgggcgtgggggtgggcacctgtagtcccagctactcaggaggctgagacaggagaattgcttgaacccatgaggcggaggttgcagtgagctgagatcgcgccactgcactccagcttgggtgacatagtgagactccgtctcaaacaaacaaacaaacagacaaacgaacaagaaacaaattcctgcttctaggtttcgcagaaaggaaggagattaacattctgcttccaaagttcttcccctcccccttccccctcaacaactgtagtcctctcatggaaggccagacaagcagatgtatgtaactgtccacttctgcccatattgttggctctgctactcaggaaataagaaaaatcacgctgggtctccagctcctctggaagcatgaaccaggatgcacattctcccctgggaccacctcaaagggattgtgcctcttatcaccaacctggagggactcacagatgaatgatgctgacaagtcttgcagtaatttcttgccccgaactgggaaactgaatgccagtaggtgcatgcattacctactgtctgccgtcactcagagagctgcgctaaggatgaccagggcagagttgtgggaactgccatcttcttctgcaggagggctcactcaagtctgatatgcctaagaatgtaacgacttttgaattttgagcttcctccttaagacctggatttagaccaataatcctcaaggactcctgttcaataacagtccagtttcctgggaatggtgaagaagggtgtgaggtgttcaggtcaaaggcagataaagtaggaggaaaggaagagaaggagggaaagaaaggaaaggaaaaaaggacagacaagacaatggcctgggccagggagcacttcaaaccacaaagaagtgactagattgctgtttttctttctgcttcatcccagaatgtctctcattactattagtggcaaaaaccgcaattacttttgcaccaacctaaataacctgtactcaaggcaatgaaatttcccaatgtcctggagttctaaaatcatttttaatatacagtcagaaggacttgggtcaattgagtgtgaaaataacataagacagagcgtcccccaggcctgctggatgataaaccactatgcaaaaatagaaaatatcagaagtaggattttagacagaaaacacatttcacaaaatacagcatgtatttaaaataaataaaaatattattaattagaaccgagcatggtggtccgcacctatagtcccagctactcaggaggctgagggaggaggaatgcttgagcccaggagttcaagtctagcctcagcaacatagcaagaccctatctcttaaaaatatatatgaacaaataaaaataagaaccacatcatcttgagatctttgtattggccagatgccacgtgaggtgctttctataaatagtctgtgaaaacatctcaggagttctctgaggtgggaaccgtcaccatcctattctccaagtcaggaaccagtgggatgagtgaggtggacttcgccaggagtcctgaggtgggcatataggaggcagggcttgagcccaggctgtacccacaccacagaatcagcagccctggcagcagctccacttgtctaccggaccacacactttaccctcatgttcttcgtaactccataaggaagggactaggcttttccaaccctcattttgcagatgaggaaactgagtttcaaagtggccctgacaaaccccaaggtcactgaaggctggcaggggcagagctggaattccagcacaaatattgtggtctggaggcccgcagttgataggctctctccttccagggggtcctccctgagtccctaacctttacgccaccatttctcaaaggagccaagctggtccttgagccaacctggggtggctttgctgacccctcacagcttccgcagaagggcagtgtctctggggacgcctgctggggacaagtcactgcctccctctttctttaatgccaacagctctcgaacccccacgtgcaggaggagagctgccctgactccactgctggcttcactcctttcccacatggataaaacctgaggttagaaaacaccgctcagaagtgactcattcctgacttccctgccaaaaacaacacccatttacgtaacttgctcacacaccaatcttttcctcctcctcagggtgactgccctgtcaaaccaaggctgatcttcctcacaaactggccttccatttccagcagaggcaaatcaaattgccctttccgccctcatctctttgctaactggggtcagagatagcccaaccaacgtgtccctcccacactgtgttggtgacttccggaagggatgtgagatttcctatctaacacttgttcttgggctgatttcttaagccaacctcaaaaaaaaaaaaagagtgtggtgtaggaaaggcctcatgaaccagggatcactctctctgctgaatttgcaggccagtttcctgacggagcacttctcacattttccatctctagctgcttacgtgcagaaaagaaaacccttttcgggtgtgtctgtagactagactttggcataggaatagacgtgggcagccatttgatacatgaaattcccagtgcttctgaaaccagaagcaattagtccaaaaaaatgtttaactatctatccccataatgtgctaggaggttctctatggtcatgtcagcatatatatcccaaaacatctgtattggcttaaaaaaaacaaaaataaaaaacgaggtatgtccaaagatagcctgtcctcctcttcattccaggtaaggacagcccctgtccttctgtaaggaagaggaagcgaagggaacttcccccaggcgctggtgggaacatcttaggaggaaggaacatagaaattggcaaggactcgaaggacggatatgaaagtgccgtgagccctgctgagccccatgtgtgccaaaaattaattcataagcaaatgcttattttatagtttcccacttgctacaaaacatcaagccacaaggaaatatttcttctgggggctgacaggaagcgggtggcaccagagtggggagaaagaaagccggaagttctcttcaagacaagcgtgatcctatcacctgacaacgtgtcacccgtttctggaaaatccacgggctgtggtactgtctccttgttcccataagcggagggttcaatgtgaagcctgctctgatggcagccaggtaggagaagtctgggagtcacgatctaccctcagatgttatcaccattgcaggagccggggcaggaagaaaagatgctgggagacctggggacaccacccctgggagtccattatgccagactgggaagtaacctgtatttggcttccaggcatttcagggctttaggtgatgatgtgatggatgacagggtttcataataagggagcaaaccctccatgagagtgcctagcaagcactgtatgtcattatttgtggattcccataaattgaatcctctagggtctggacaatgaaatctagaatttctggagtgctgtgattcccagtgagcttatcctaaggcaggactgaattttcttacaacatccaaaaggagaaagacaagagtcaacacttttgcaaagaagggatttagtatccagggagatccaaactcctcaactgcagagacaatggtgtctccctttcctgcagctgtagcatccagcttgggggcctggctgacccatggtaggtgctcaatcgattataatgggggtggtggtgaggaagccagtccccaaaggtggtccccaacaattctctctttttatacatgtaccctcctcacaataagaggtggagtttttctccccgcctttgaaatggggctggcctcatgtctggctttgaccaatagaatgtgatagaagtgatattctaggaattctaaacccaggctttgaaaaggctagtagcttccacttcctgcttcttgaaacactgtttctcagaacccagtcaccatgttctaagaagcccaaaccacacagagaaccaaggcactccaggcagtacccccagctgagctctcagcaaaggaccagcaccaatggccacagtcatatgagtgaccacgtaagctgttctaagaccagtcaaccccctgatggttgcagacccagccaagatcacacagagcaaaagaaccacccagctgagcccaagctcacagaatcatgctaggcaccaaaatggccattgctttaggctattaaatttttaggtggttattcagtgacagataactacaggtggaggtgggacggacaagaggtacaggatattttatcatgggttttgtccagctctggaactctgagtaagtcataacctccttgagtttctgtttccttgagccactgtgcccagcgttccctaaatattttaaatctgcagttggttgaatccacagatgcagaaccgacaaacacagagggcagactgtatacatttctggaactgtgtaggcctgcctgcttccctgcaactcccctttctaccacctgtcatcaggaaacatggatctcaagaaggccagctgaccacagacccatttcccttcctgagaccctccatggtgcaccgaacaggaagtgaccgtgctccaccagctccggcaagaacccaccatgtcttcagtggagcaaagcatctcagcaatcattaattgccacactgtggtcttagcccaagtcaggctcacttcccagctggccacttactactctgaaccaacttctcaacagcaagacgaaactctgaatcactccccctggggcttcaaggttcctgtccttaactggccccagacacaaccctagttccacatcattttctccagagaaagagaagcttggggccaaggggctctgacaagtcaagtctaggctagaaggcattttcctggaaccatcggcctcctgtgagacactgggttagactgggccccccaggggtcacagaagcggggaggagaaaacagcatgtgcgtgcggccacacccgcacccttccatcctggcatggatccacaggcccccacaccacccctgcgttcccccaagagaaaacatccctgctccacacgtggctgaactgcggtaactccatcatggcatttcatctacagcctgggtgtatgagtaataaatgtgtgaaaccatgaaactaatattcataatgaccttacaagataaagaacttgaaggaaaaacagcttctgtgtgcctggccgtcaccatcagggtgctccgtgaaaaacatggcatctcaccagagccacagacatcgtctccccaggagcctcagtgctggcggccctcagccccaccagccactatacttcattgttagtccttaattaatggtgcctttgtgcacctggtcatcccgatgccaagcccagaaccgaatggggcctctgacttctcttccacgtctaatcagacgccatttcagccaacatttaccaagtatcagcaggtccaggcctgggcctggtgcaaggagtgacagggtctctgtttgtgacatcctgtccctcacccccacccctttagtcccagcaaggttcagagtctcattccctgccctcatttcttttatttgttgattgacatataacataggtacagtaaagcacactaattttaagcatatggcttactgagttgttgttttttttcttttttaaacttttattttaaattcagggttgcaattgcaggttacataggtaagcttgtgtcactggggtttatcacatagattgcttcaccactctggtattaaacctagtacccattagttatttttccatcctctccctccttccgacctccaccttccgaaaagccccagtgggcgtcgttccccctataagtgtccatgtgttcctgtcacttagctcccacttataactgagaacatgcggtatttgattttctgttcctgtgttattttgctaaggataatggtctccagctccatccgtgtcccagcaaaggatacgatcacggagttttaaacatgtgcacagtcatgtaaccaccacccaaacaaagaggtcgaatatgtttccagcacccagagagctctcttgtgccattatgagaaaatatcctctcccaagatatgaactcttttatcagagatttaagttcaggttctcatcagctcttccacaaattactgcccattaactttttaattcttagactgcctccttgggaccctgctttcctcagtttacctgtcctctactgccaggtgtatagtcctccgttacagctccaaagccccttggagggctgcactgctcctatatatgaaccccaacccccatccaaggcccttcacttctacatagcactcctcggtctgaaagacccaaccgctgttctggaaacccaactgctgctctcacacctctgggccctctctaccatggaatatgacaaagattccttatgccccaggtccatgcccaatttccccctttcagtcccatgtccatccttgaaagcccatttcatccacagaccgtctgcaggctccccagagagatgctggtccttcttccttggtggttccccggcatcacttctacttcttggagggcactaaatgtcatccttgagacatagcatcgtatgtgcacatccacgtatccttgttagaggttcaatttcttgaggactgagattctgggatttctcaaactggtaaagctttgaaatttggggaagggaaggaataacaacctagggtttccaacttctaatttggccaacagaaaaaaaaaatctatcatccataatcaacaccatttcattaaagaagacactgtggctaaggataaagattggagagatataatctcagaaaaaaatggccaggtcttcaacctgaatccattggtttatgaaaagttcaccacattgtcctcattttccacacttgactatgcctggagaaaatcctcacagacgaactggctcccatgtctggaaaccactgccccatcatcgcccctggtatagcagcacatacgcagaaagggctcaatgactattcagttcaactgctctaatcacaggaaatcatgtggttctaagacaaggagcatttcagctctgcttcctcccaacacaggagcccagaacacagcagtggctgggcaacattccattgatgagaaggactgcaggacccacccacacacacatgacaaaataaaaagcaatcccaacgtgtacgactcgtgcccacgtgacaacttagacaagcagtgggccttgccactggcccaggtgcctcactcattgtcccaaatcccaacctggtgcaacacgtgacaatgaacttcaaaagtgtacgttgggggaagcggggattggaaggcgaaagaaaagggccaccgcagttggctgcacaggttgtgccaaggcacaagggtgctggctggaggagcaggcagggactgaaatctcacctgtgctgcacctgccaagccaggcaccctggccgggggcacactgactcacaggaagaaacgccctttacaaagttgcacaaagaaccaagacttcattaaccgagactccgaatttcagttcaaggccaagaatatgtcaggtcaaatatatacatcagggtgaattttacagtatgtggattatatctcaataaagcttttatcaaaacatatgtgtgtgtgtatgtgtacacgagtctgtacatagatacacgtccaaaaaaaaaactcttattcagagagctaacaaagaaggaagagtgcataaaggaggtattaaaaatatttaaagggatcatatataaaagttatgttatttatgtattattaaaattcatgttctaagatgactgttgtggaagaaaaaatcatgaaaattgttttttaag

SEQ ID NO: 111 - DNA, 21509 bp, Homo Sapiens
acacaacctggtgcaaacaaccttgaagcgggacgcagccaaagaacacgagatgccatttctcagcccaattggaaagaggccgggagcaccagttccctgaccccctcagccccaccgcctgccgccccctggtactgaccagctccttcttcctcttctcctctttcacgtcggtcttcttgatctctgccttgaaggcctccgcctcgccattctggtcgtccttggccagcaggtccatgagaaggcacagatcattcatggggatgtataaccgaaaccagtcctctccaccgcctggggatcttcactttcgcagtctacgactgcctgtgactccagaaagacaaactgcagattggccaagctgcctgaagacccagcccgacagcgatgcctgtcagcccgcgtcgcccaccagggcagctgctctcccaactcgcatggggggcaccaccccgcctcggtgccctagagctgagcgcagccgcggctccacggggatcgccagggcctcagccctcgcggccggcggcgcgggagtgttgcggggcagggaccagagcgcgatcagagcggccacccccgatttaggtcgccagctttccagtcactgcgatggccactggggcgccccttccatcctggttaaattctcattgtgatccccagccctcttctcggttccccacacccaggaggccggttctccgccgctcaggctgggagaggtcaccgctccgggcagggtggacccccagctccgtctcggaggacctttcgccggaggcgagcaggaaggggttaaccatgagcctcccaccctcacctcccagaccctggtgccgggctaaggcctccgcttccctcctgaggtctcattaggaaaccctcaccgctattttcaacatttcctcaatcaagtgcctttaaatagagctgcacaaacagattggcggcaaaagcgtagatcttgtcacgattgagaccaatccagtatttcagccttgtttgctttgcaattacgggttggcttgtggctacggtgccaccggggcaaatctgcagccgctcgctttctcctctgcgctccgggcgggtggaggaagcgacccgcggagtcactgcagggaggagagggggacgcgcgcggggggaggcggcggagggcggaggagactcgcttgcaccccagggccgcgggcacgcagagctgtgttgaaggacatacttttcaggttcctgacagtcactgagctatacgcaataataaagtgcgtgattcgcgtgtggaaaccagtgtcgtgtccttaccagcttccttttctgtccaccttccctctctcttctacctccgtttcgcttttcttcagtgcatgttagcggtttgctggatttcccttctccctcgctgttcaactgctagcatgatttgttacattttccacagctgtttattcttgtttgactttttgtacaaagtcactttaaatctgctgcagaaagaataaagcacctagccctttggatggactcctgcaggcgtgtggctgtccctggcccacttttaattctttggagatggctcttctgtgtaaatcagctgctgggtgcgttcggtcacctcgtaggccagcctagtttgtatcagcagaacagtagtggactcgactcaggtcgtaagccttatatttcacagacaattaaatcttggctgctgttgaacaaaactgtaatatttactttgttctataccgagaagcacttttaaagtaaaaaagaaaaaaaaaccaaatactacacttcaaaaagaaaatatgacaatgaatctctttttatggattctctctgcataagtggaaacaatatgatttaaatccccaacaccccatcccccttttcagacacagctgaagtgatacagatactgtcttctaacacataatctccctctctcgggagaggcacctgcctgtgctacattcgatttagtttgtaaggtttcaggcccctccccgacccatgtaatatgtaacaaggattatcaaataataaggtcttggatgtgaagtctgctttacacaagaattcaagaaagataggcaggacttgagtaattatgttacaacttcatattactttccaaatgaatacccattttcttctcatgtcaacttctagagatgggatgctgaggcagagaaatatttttatgagactctggagtacatactaaaatgtgcttccttattatttaagaatgtgtaaggtatggacctacatttgtttgctggtggtcataaaataaattcatagccattgtggccaataagcaatctccttcacgctttaaaagtttttggtttataatcccacctggattgtattttcactattctgtatcaccctcctattgcaatattttggttctcaatcttatgtaaagcaaacctcagaaatgatcgtttccataaaattgtgcaatggcaaagccacagaataatattttgagtccatatagccgtgcatgctcatctatatagctcttatacagttttctagctgattgctttggtatttcaagaaataggaagcagtagctacctattttaatgaaagggtaccatttcataagaattctattttcactgaaaaaattggtctggcacattattcaatgcaaaagattataatattactttcacgtgtgttaatctgtttagtataaaactgctagggtgtcttaaccattaacgcgttttgccacactactttcaaatggtgatctgagataattacgaagattttgatgttaatcccacgttaaatgaacaactatgaaaataatcttaaagcattattactcccatatacatgccagcaaacccaattgtggagagaacatgattactttttatctgacattatcctataaggatatggctacatttatttcttttaaaattggagcagttttcaattactttttaacagaattgttttcaacacagcattttgcagtgcccataaaccatagcaactttgtcctgatcgatacatatttttctgcattattattcattagcctctttgcaaactcactaaaatagaatagtattaaagtatgaatatatagagaacaattattaggttctacatatttatttaggtaaaccaatgttattaaaattaaaaacatgtgcctggcatataagtgcttcttcaggaattcttttttggatgcatagttattattttttaaacaaactcagattttcaaacactgattttcttctctgaacgggcattgcattgttttaaacagtagctcctggaataatgccacctttagtattttagactttcaaacaacaattggaattggataaatgctttcagctgggagcactttcctaatacctttgtaggtaatgggattctctatttgtgctgggtgacaaacggacagtgccctggacagactgcctaccctctgcagaatctaccaaaaagtagagttttcccatgagactgcttgtggtccatctaaaaatgaaaaaataatcagagaaaatgcgcaaagccttttctaactacagttatgaaatgatggcttaaagaggtatttagaaaataagagtggagtaatacagaaacaaaatctgaagaagaaagtttgcttaggagctgatgctctttgtctacaaacaagagggtaaggagctggatccaattgaattgaattgtttttgtttgcttgtttgttttcttccattcagtgcctttcaaactgttttttactggatgaagaaactcaaccaagaaaatatatgtcgattcttgtatatgggacaatattagctgctgtgatttttaatactagcataaaatataagaatctttttattactgtgatattgttttttcctaaatgaatgcatagtgtaacaattggtgtcaaaaagcattgaatttttttcagatggattaagctggaataataaagtatatctatgagatgatttctgtaaactctgacttgctgagaaaaaagtgaaaaagctttttctggaagaaacatggcaacttaaccgttattaatctggactaaataaaacaggaaactgcttctttacatttctagtaattttttctgcttttccaaacattgttaagttctatgcaacttgtgctattcaagtaaagatgatgtcagtaataaaattacagaatctaatcaagtgactatttttgctttattacaaaatttatgtatttaattgggatgtttaattgcttagtttttagaacactgaatttttctttttccagacaacagagtgatatttaatgaagtgcttataaagataaatacgatggttcatcaaagataaaatagtcataataacaagatggcatttgagtcaatgtggagtggactctgctttgtaaattatactgctttttaaaagcatgacctaggtatttacaatggggacatctgagaagagaaactcaagagtcctcaacttacacagccaagaatacacaatcatgtaggagaacttgccctcagaagcatttctctattgacattgccatttcttttcctccatctagtacttccatttgctctatttcactaaaaagtcacagaattaagagtggctgctgcaactcactgggctttctctgcttaaaaaaccttaatatcacatggtattaatacagctacattaataattgaaagattcactcagctgaccctatgatttttctaattattgttaactatctgaatatttggaaataattgtatttttccactgactttttctcattgccttgggtactagaaggttttttttttttttttttttttttttttagatggagtttcactcttgctgcccaggctggagtgcaatggcgcgatcttggctcgctgtaacctctgcctcccagttcaagtgattctcctgcttcagcctcccgagtagctgggattacaggtgcatgccaccatgcccggctaattttgtatttttagtagagacagggtttctccacgttggtcaggctggtcttgaactcctgacctcaggtgatccgcctgcctcggcctcccaaagtgctgggattacaggcataagccactgtgcccagccgggtgctagaagttttaacatataacttcagacacaactgagtaaatagttagctgtatatattttattgtattgttatttatattatgtcggctttgtgtcagaaaggatttaaagcacttgtttcaagaattggtatgctatatttttcaaaatctgtgtataaaaataattcccataagtaccactgtaatttacttttcatgtgtattacaaaatcagttatgtgttctggtaaacattttgatcccaagaggaagcaggattacatttagaatgtgacaaattttaaaaattaattttgttgtaaagaaatctttataatgatatgccataaagttattactatgcatgtaaggccgcataccatagtgattaagagcaggtccttggagttagaggcacagtctgaacttgactacaaaagttatcagctgtgtgatcttgggaaagtaaccattctcagctttagttaccacagctgtaaaaggtggataataattatagactctgtcctgttgttgtggtgaacatttagtgagacgactcacatgaggggctggcatagggtaagtacttactcaatatcagctgttctctttggcatagctctgttagagtggcatgccacagttaccttcttgagagccactaagcgtgggaacggtaacagtccacagaatttttggagattggtatgaggaggctgcattggctcccagccctcagggttgacagggtgaaggtaatggcttctggctgtctttagagctcccaaaagatatgagaagatggttctagtgatgacaacccactgttctgtcagtggaaatctagttttatgccatcttcatcattcgtggtgtagtctatcggtgcctgacacaaacgtctagagtggggaaaataacaccttaaagaaatagaatatcttaggtccatgatttgcctgctgtgtttattatgtaccccagcagtaaaatattttaagtatatttatttgcaaatcatacatctgtacatctttactgatatgtacatgataaacctgtgcaaaaaataacctaaaaaggggtaagattaaaatgaagaattagacaaaaggtttaaatgttttaaggtaagattcagcatcatcaacagtgggtataaatccatacttcaaatagccttggtggtttaaaaatcctctggttgatttacctttggattcatatcatcagtgtttccgtcttgttttgtggctgagaagaggaggagcagtgtcagttctgccattttcctgtcaatggtttatgtctgccttcttggaatcatatttaatgaaaggttctttgcaggaatatttttaaaccccttgttcatttggtgaagattagtttagttaaaactggattatataatatatttcaatctaactgagccagacaaattgtaacacatttcaggccatgtgtgcttctaagagggccactgttaacccctctgtggtcaagagctcccccttccctgaggttaccttgtgtgctcaaggcagctgagtaacataagaagaagcaagggtgttgatgccaatggttaccctattagtgaactcatttctgattgtttgtatgaaaacaaatatgatttctgttataatcttctgacaccccattccttggggcaccactgtcctagactctgaaatcactgtggttcctgccatttcttgaccttgacattctgtgacagaatgaaggagaccttaggttcagtggacttcattttctataactagctttactctattgatcacatagtggtatagctcttcagtgtttgcaaatcaatgttcacatatttctgtcatttgaactcagcatctttatagggcaggtagagaaggtctgattctgtccattgtaaagatggaagagatgaaaccaccagtgttgctgactgcagatggaagataattgcgtaagttcacacagcggtagacctgggtttgaatttgtttttgaaagcaatatcatcctgattcttttctatcatgttaacacaatttttaaatgatattcatattcatctgaatggagtagagacagacagttatatagtagttgcaagtttagcttttaaagaaactgccaaactgtcttccagaggctgtactattttacattcccattagcagtataggagtgatcctttttctccacatacttgccaacatttcttgttgttcttattaaaaccaaacaagtggtgctgggaatgcattaagagaaaacatatatattattaatagaataaataataatcaatagataatgtgcaggaaggggatttgcatttacgaaacatctattgtatcctatgttctttacacatattatccctttaatatagttctatacttgcagggacaggttttgcatgtaaagaaattgaggttcagagatgttaaataatttgtctaaagtacacagcatttaaattgtagagtttaaaccaaagggatctggtattaaaaaattccaggtaatgttaaaataaaacaatgcattaaatttgaaagtctttctgttactttttgttccaaattggatctctgtctttggctaaaaatcaaccatgacaacaagaaatgttggcaagtatgtggagaaacaggatcactcctatactgctaatgggaatgtaaaatagtacagcctctggaagacagtttggcagtttctttaaaagctaaacttgcaactactatataactcagttattgtactcgtcagcatttatctcagataaatgaagacttaagttcacacagaaatatgtgcatgaatgcttacagcagctttaataacagtgaaaaactggaaacatctcaaatatccttcaatggaaagacaaacttaaccattctgttaacagttaagcatgtatggttaatcgtggcacatggaatactacttggcaataaaaaggaacacattgttgataagtgcaacagcctgaatggatctccagggaattatgctgggtgaaaaaatccaaacccaaaaggtaacacactgtatggctccatttatatagaattcttgaaatgacaaaattatagaaatggagaaaagaaaagtgcttatcaggggttaaggagcagtggggtggaagagaggtgagtgtggccataaaaaggcaacaaaatggatgcttatgataatggaaattttctgtatcaatgtcagtatccttgttgtgatattgtactgtgtttttgtaagatgttactattgggagagactgggtaaagcgtgcatgggatctctattatttcttacaactgcatgaggatctacaattttctcaaaataaaaagcttaataaaaatgcctactgatcttcaggaagttcagttccctgttttccataactgatctgaaaataggggaaggacaattgagaatttaggagttgtaaactctgaggctgattttcagcgaactactcaaattattctgatttttccccttgattcttattatggattgtaggacattcttcctactattttggagaagaaaaaatgccacctctctatcataggacttctgttttacatatgatttaaaaatctattagctgactaatttacacactagaagatgaaacttggttacattagattccattgccacaatttattttaaaaatcagagttctcatctttcttgtttcttcttcctgccttactttattttcttttttccttattctatttgaacccatattttcctatattgtactgtttagtctaaaaactagtaagcatgcatattgttgattaaattagcaattgacgctcttaaaatgagaactataaagactcttgagcttccacacattatgctatgcttgccatatgcttgggtgttcttattttcggagagaagtaatggagattataaatgttatttttaaaatttactggtgatttgttgagaagataaagtaacaacactattacagagggttgctcttgatctcccaggccaccagtgcagtcaccgagccctctgcaaacacctgataatgctgaagagtgtgttagtcattgtagaggagctgctgtcatgacaaataggggttaaattgtgagaatttcaggatatattttggggaaggattaaataaatcaggggacttgctgacagcaaatagtatctttgatttgaaacacagaatcagagaattgagatgaatcccaggtggtggttgggagtttgaaaaagtcccagtgagttggctgactaagtgtagacttcatttcaacatcattaaatagtctttaagtggtgacttaataattgttgccccaagaaaagattttgctaaatacagaggtggaattaagtatattaatccaagaaacattttatttaaatgattttcctaacagtaaggttggaaggccctagaactgcttctaggagcttgaagtgcatttaatagttaactgtcagaatgaaaaatgaaattttaaatttcaacaatgcaattaagttcttattttcttatgatagtgaataataaatttcattcaaggacgccattggcagatgttgaaaagaaccattttcactccactagcttgcagtggactaagaggtagcaggaagggagattggtactacagatcctgaaaaaacaaaacaacacaaaacaaaatccacaccacaaatggacacttccagatgcttaccaacaggaagtgccttggaggacaagggctgtgagacaggtgaactctagggaacaagaattcctagttccatgtctgtttacaagaatttgtcatgactggttcacctcactttatagtttcctcagaccaaagagacaaagaaaaagcaaaaaacaaaaacaacaaaaattctgaaacgaatggacaatacaaccaaaactttaatatgaaccaaaacaaaaattgggctgattttatgaggttgacttaaagtcaggaaaagaatgataaacttttgagaggaagaaagaaatcatcaaagccacgaggagctcaaagtggtgtttaatagcagctatcacattgcgcccgagccttgaccacttctgacgcagctgtttcgttttaagatgttcccattcctgttccactcacacagtcctccacagtgacctgagtgcacgcacccaagccggcaggccactctagaaaaccgtaaacccctcagagagtcactgcaggaataggggaaatggaagtgatgaaattcaatatagcatttagctgaatcatcatctgaggttaagcccagtgaacaattagcagtatcgggagtctcctcgtacctgtcaaaatcgcaccgacgggattttgtgcaaagtatgtatgtgtgtggaagttgttttttatgtttaatagcaatggacctggggtagtaatttagatacaactttttaaaaaaaatactaaagggcaagtgtggtgagaagcttcttactcaggaggatcttttcaaacattgcaaaacatcaggccttgaaataattcattttattaagtagcgcactcttgtcttttcattcacaaaaggaggatgatttattatacagataaatgcttgcataggatgatgaacacctgtaggaatgcatgatattctggaagttgatcaaggtccactgtacaccagtaattagaggtcatgatgatgataataataataataataattaataatggcacatactatgtgtcagctcctgttctaacttcgtttctcatattaacttatttatttttcatgattagccactaagatacaattattatccctgttttgtagacaaggaactgagtgaagctcaaagaagtaactaggatcacactgtcacacaggcaggaatgaaacccatgcagattggctccttagtgtgctctctgatctattatcattcatcacatatttactgagcatctagtatatgaaaggtattaggctttatgcaggcaatactttagcgaagccagggagatgtctctgccttctttgagcttatagcttggtgggcaaaaagctaatggtttaactgtataaaaaacttgatgttgtgaaatgatatatgccaatgtttgcatggtatgatgattttgattaagcaccataataaaaatagggagcctgggtctcacacagccttgattgtcttcttccttctgctccccagtggagtgcgtaggaaggtcacaccctcaatgtcaggctccttcactgttctcagtgagtgtctcaggttgtaggctacatgagcaggtttgcacctggatatgattgtggcagtaacaatagatgtgactatacacagtggcagtggcagtaggggtgggagttgggtgatgggatgatcttagaatgcagtgttggtattaactcagttttgttttgttttgatgtacagccagccatacgactctggaatatgactctgggtttaccaacttggggatggcccggggatttaggagatggccccaatggctctcctcttttttagaaaggactgttcaagttccttttttttttctttttaaacaggatctcgttttgtcacccagatcgggggcagtggtgtaatctcagctcacttgaacctttgcctccctggctcaagtgatcctcctgcctcaggtgtgagccaccatgccaggctaatttttgtattttttgcagagacggggtttcaccatgttgcccaggctggtcttaagctcctgagctcaagtgatccatgtttctgcctcccaaagtgctgagattacggtttgagccaccacatctggtttaagctatttcttctaaagatatagtcacatctattatctttgacccctgcctaagcaattctgttcagatcttaagactatttcttcccgggattcaaactcagagttaagtagagtcaactatatgaggtatatgtgaggttaatttttgaaacttttatttttaatttcatctgggatctcctctagggaagaccactttatgattatgggttgcattcccaagttcagttgattgaatttattcatacattatttaataaatgtttattgagactgaaaataaacttgaaatcctagaattcattggttgtcttaaaaattctaaatatgaaatgctaactttagcttcatgagtatttagaatagaaaataaataattcaaaaattgttcaggaaaaaaatccatgatttattctactctggaggagcatattcaatttaaaacataccgattcgtataaacttattggtaatgaggcgatatactttttatgagaacatatcaaaccatagacattgagatccagcatctcctgagtgagtaaaatgtcagggttttattgatactaatgataatgggagtgacatatgtgcatagagtaagtccatggttgaaagcctggctgattaggcgctgcgttctgtggtttttgccacttgtgtgtgattaaaccctgcagaatagagtctgttgccatgtatttggttcgtgaagaaaactagtaaagtgatattgaatgaatgattcagtttctcaaaagggtagactattggcctaacaccttcctaacttggagctgtcaacgtgtttagtttggttctaatgggagctaggctggagaagagaaaagttttgtgagaaaggttatgtgatattaataagaaccacattccgtttgatgttttctcaaatgattttttttatcttcctaagaaattgaatgattcaaaaataataaatcttccttttctatggcccacaaatgatcaacattttggatgatcaaaacaattttgtctttaagatatcacaacttctagtgcctctttatttgccagtgctgatttacagcagaaagtatcacttcatattttttccaagcatcaaagtcatgtgttttacaaatattcacaagtgcttaaaatccatgaacctctctctgtattcctatttttttattcttctataagtatgtatttaaattggttaaacagatggctttctacttttgaaaaaaaaaaacccactaagaatattcacctcaagatggagaactcataggttaaatttcattctggaatgcacgtttacaaccaggtaattaacctttgaaaatgagggtactcgaaggaaacaaggaaaatcttaacaagatgatctcactaacgctggtgtgttagacttctcagaagtagagatgccccagaagtttaacaatgaaaaactttaaaatatttttaaaaacatagttaatctttgtagctttccagttttcgtcctttattacgataaccttaggaggtaaacgcttcaaggggtgtatccttataatcataggaattggtacacagattttggtggaaagatggaggtgtcaacattaaccagtcaacatatatttgttgactgcctaccacatgcacaagtctcttccatgcttgcgaagagatacagtgatgtgcaatgtgtagaatctgcccttcatgagcttttgatttagttagtctgagaaggaatagatcagtgaaaagttaaaaggaataatagatggagtgttgaggcagtccatgattgttatctgagacattgagtttacaatgctaagttaaaagaatgagagatcactatgggatagaatggacaggaagagttcctctccttgaagcttgcattaagccataaaagacaaagcaattttggaaatgcagaatttggagatatgaagaaagaataattcccagaaagggagaagagttttggagccagacagatctgggttcaaatcttggttctcttgttctctagctgtgtaatcttgggaagttacttagcttttatggacatcttctataaaaaggatatgatagcgactattttgttaattttttaggattaattgagataatatatataaagtgttttaagcacttgataaaaggtaatcctctcagttggagagaacatcctaaacaagtctggaggaaggagacagccagccatgttcatgggacaaaaagaagactattatgagtggagggaaagattaagagaagtagagtgagatcacatggaaagataaattaggattagcttcagccattcacttgtttcttcatttaatactttattgcactctttatgtgggaagctctctcatgtgggaaaccctctgctcggcatggatatgcagagacaaagaaaacttagccttggatttctcttgaatgtcaggttaaggagttggaacttcatgctgaggagaattatatctttcaaaagtggaggagcttgaaagtagcatttttggatagttaacatggaatgtgattcttgtgacccaagatatgcattaagttaccatctcctagtggttgatggttaatgttgtgcctggagatgtgacccagattctcttgtaggtcattcctgacagagggtccattccaatgagtgaggaggaggagcttctgggctgaacttaatctcatctcctgaaataaagcaatgacattgaaatttttcatattgcacttgtgtttacatttctcatctaatctgagatattccacgtttggtgagtcttgctttgggcctgcagtcttggtgacccttattagttgcactggaatagctgtctattcagggagaagtagaatcctgggaatctggtcttcagtgactttctccatgatcatgaatttcatgagaggaggtccccttcctgttagtagatctctatagcaagaggttctgaggcacacaagcacactggatactcacctacagttctagtttaactgatggaacataggtatttctttcatgaaactttgcctggataaacagcttctgtatcttctagtgacaaaattttgcctcctgttttcccctctagctctagtcttaatctctacttccttgttcagtccaaggctcaggagaacccagatcatataagatatggaacctattgcttcctaggatgtccttgtacacagtgactaactgctaatttcaaggatcaatttctttctggagttagaatcatattatattatgtttcagaactgaaataaaattcttttaaggtgattatattttggctctcagcttggaagatgccactggggcatggcatacaagacacataacttataggaggacctcctttaatgcccaagtgccagcttcatgcttgttgttatatatcattttattcctggctttgatgcccacacacagacatatatccacacaaagttcaatctatatattttttgtagctgtttagctcaggtgattagggcattgagctaatgagaacaaggtcacagtttcagtctttgtgtgggccagcaaggtttgctttgttcagaggccacagacctggtccagccagctgtccagcacatgtctgccccaagtcatgagaggacggggcaggagtgtgtggatggacaagagcaaatccatcaccacccttagaaaaagtcaagtcaagcacgtgtcctactaatgggggtcaataatgtctcatttaaatggggctgacattttattacctcttgctgagagggtcttttgagcaccaaatttaaacattgtcgcttttttgtgtgaatttatttctaataaatggaaggttgtacaagaccttagatgattacaggtttccaaatacagattaatgacttcaatatttaagaagttgatgtgatattaaaaaagaaagttcagtatggctattcagttatcttcccttattaaaatctgttttggctaatgaaataaaaagttcataagttcttccgagagtaagtgagaatcattgccttcattcaagaatgaaaacattattattaaactcattgataatgagaccattaaaagttagcatgaagcaggtacaatacaattctttattattgaagtcttcagatattacccagcctacacatcccacctttcatttttaggcaaacaaattccccaaactatattttttttaaatttagcattaggtcttgttaggcttcaaatgggatcaaaaccaatcctttccaaagtgttctaccccagctgtttccctcacctgggtggtagtgagtataaaggcatttgatacagaagggggtggtggggcagagaacagaaaggaaacttggtgagagaatgatgaagaatgatatattagagattcttttaaaattcattcattaaacaaatgtagcataatggaaatgtctattaaattttttggcataggtaatgcacttgcaagggtaaaaacagaaatatgagatggtattttatgaaaagttttgctcaccccgcatccatcatgaacccaattctactgcccttgtatagccatttttattagtttcttgtgtactctttcagaatttctttatgccaatatatcttaaactctttcctttttttcatacaaaaattaacaccctatcaattttgttcctggcagggtgaggtggctcacacctgtaatcctagcactttgggaggcccatgcgggagaattacttgagcccaggagtttgagaccagcctgggcagcttagggaaaccctgtctttataaaaaaataaaaaattagccaagcatggttggtgtgtgcctgtagtctcagataactcaggaggctgaggcaggaggatcacttgcaccagaaggttgaggctgcagtgagccatgattgcaccattgcactgcagtctgggtgacagagaaaaactctgtctcaaaaaaaaggtcttgagcttgctttttctacttaacaatatgttttgtaaatctttctgtatacgcaaagtagcctcatttttcatagttgtatatcattctattgatgtgccacactttatttatctacccccctattgatggaccttcatatagtttctaatattttctattacagacaacaatgtattgaattactttggaatgcattaggtagaaagcattcttctttctttaaacatttgcgtagcattccactgaatggctatatcataacttatttctctagccccctattgatcgtcattgagtttccaatcttttatttttaaagacaatgtcataatgaataactttatacatgtattatcttatatatgtggaattaaatttaccatgtctagataattttatttgaatgcaattaagtatgatatcaaaaattataaaatcaaaactgcagtgagaattcatcttaccccatgtaaaatgactcttatccaaaagagaggtgatcatgaatgctgatgagaatgtggagaaaggggaaccttcatacactgttggtgggaatgtaaattagtacagcactatggagaacagtagagattcctcaaaaaactaaaaatagaactaccatacaatctatcaatcccactgctgggtatatatccaaaagaaaagaaatcagtatattgaagagatatctgcactctcatgtttattacaacactattcacagtagccaagacatggaagcaacctaactgtccatcaacagatgagtgggtaaggaaaatatggtacatatacacagtagaatattattcagtcataaaaaagaataaaatattagttgggcatggtagcatgcacctgtagtcccagcaaccagggaggcctaggtgggaggattgcttcagtccagggaagtcgaggctgcagtgagccctgatcacaccactgcactccagcctgggcaatatagcgagaccctgtctccaaaagaaaaaaaaaaagaatacagaatgaaattctgtcatttgcaacaacatggataaaactggaggacattatgttaggtgaaataagccaggtaccgaacgacatatttcacatgttcccactcatatgtgggagctaaaaattaaaacaattgaactcatggggagagtagcatgatcattaccagaggctgggaagggtagtgggaggaaggaataaagtagggatggtcagtggatacaaaaacacagttagaaggaataagatctagtgttctgtagcacaacagggtgactatagttaacaataacttattgtatattttaaaataacgaaaagagtggaattggaatgtccctggcacaaagaaatgataaatgcttgaggcagtgaacaccctaattatcctaatttgatcgttacacattgtatgccttcatgaaaacatcacatgtgccccataaatgtatactgttatcatgtacccatcataattttaaaaaatagaaaagaattatcacaattattttaaatgaagaagcactaagtaggaaataaggtacaatttaattcagaatagctttccttagtagtgttcaacctactgtacacatcaacaacacgcccttgcagttaacattgttgctggatgtttactgttatgtgtgaccagctgacatgtccctctaaagaaagaggatttaaataagtcatgtatgaaagactgggtaaaggtgagacactgtaagacctagattattttggggctgtagcaatcagattagctattgagtattcattcataaattcattcacttcactgagtcatccacttcttgtcagattctgtatttattcatctcctagtaagctactcattgtgctaaaatgctggtaaacagaagtacaaagcaccagttataactcacagtcttgtagaggaattaagaaatggacaggaaacagtaagggtgcattgtaggtatctcaagaatgatataaagtgttatggcagatctaaggaggaagacatgactttccatagataatggatggtggcatctgttctggagtaccagaaaattagagtaacaaaaacacagcaggatagattttcttacaatgcagtgattcatacaaaggctaccttgactgttagtttgtgactggaaactctcagtcagggctgacggagggagtcctgcccctgccagctgttcacctttccctggtgctggggttgacacttcacatgctcacatagtctggttctgtgctgtctactagggttgagtgtgctgctgggcagagaattttggcatttctccagatgcacatgaggggcagaccgcctcagcagttgctaatgacccaaagaagccttctttcatgacttattttgtcccctcattttattttttgatgtattttggtgagctgagctactaccttctcaggcagtcccaacctcagaaaattaaccatgtagctttctcatatctgacattgcaaattgaggcaaggtcgcatgctttctgactacctgactgcctgggcatttctttcatgcaacttgtttaagccgcccatcctgatccctgttgctaagccaccatggctgcatttggacgcagttcttcccagctttgccgcagcataactgtggaaaggatcttgatgaatttggacctggggagggacgtgggaggaaagagaaatggtctaatggaagaaagtgaacaaacaaagacatgctcacagaaaactgccaagtgtgaggggtgggaaaacagagttcagcctggctgaacgtaggaatctggatgggaatggtagatcttaggctcctgtttttcagcttgccgctctagtgatgattcttgtagatatatttttccaagtaaaaggagcatttccaagtgactgttgtttaaaataaagtacatgttgcatttgtaatgtatgaattatgagtattaaaactgacaatgaaatgagagtaatatacttaattaaaattaattagatctgttggcacaccactagaaggacaaatatgatatttaatatatcactctactccagacctgtccaattaaacttttggccatgatagaaacgttccatatctgttgtccaaaaacagtaacccctagtcacatgtggctattgagaacttgaaatgaggctagtgcaactgaaaactgaattttaactttgtttaatttcagtgaaatttaatttgaatttaaatggccccctgtgagctagtagctaccgtattggacagggaagctctaaacagggttctaaacatgtggaattaacagcacttaagagctggagtagaccttaacctttaccaggtctcaaactttgatttacaaatggggaaatggcagccaagaaggtgaaacaccttgtccagaggcacactagtaggaattagcagaactggaacctggtgtttggatgtcctggctcccggcctgggggactcttgattccaacacgctctctcccagttatgacagagggctgtggctggacccaggtaaggatgctgggttggtagattgagaaaataaggccacgcgtagtctttcaaatcaaccaagcaagagatatttgctgtacatggtggcagacactgagatcaacagagaggttgttgtggtgtgggggagggcctgtaaaatggcataaggagtctactgggaaaaacaggatagtgatagattatatatctctatatttatctttctatataatctaccctgttttcccaaatggatttcccaaatgtgtgtcacttgtatatctggctgtcactggtacaaggtagtccaaatggacagggtacgcaaaccccagacagggctatggaaatttagggagatctgtgtgggtgagtggtcggggagagcttcagggataggacaggcttgacttatattagatagtgtaacacagaaggtaaaatacaactttaggatcattcaaatttaacagtggttgatatgaaacaaacttcttatccagagttggttttgtattcttgctttctgtattaattatatgtgtttactgattcaccacaatcagctatactgtccctagaattttaaaatgtgaaaagaatgtggtttgtttcaggactatttttctgtagaatggtgattgtatagaattaattaatattacagttgcattattagaccacagtaaggtaaatggtcacaaaagaccatacatttaaatcaggagaaaagtaatggctattgttatcctgtaggcatagctgggaaatcatatccttacttggcttgctaaagtcttaacctagtactacatgacagtatctccagagatttttttttcccattcgtaggcacaacaaatgagacccaagtgctcatagaacattccaaagagtcaacagagagaagtggaaagtattagaaacatgattgtgtttgcaaagggagacataaac

SEQ ID NO: 112 - DNA, 5132 bp, Homo Sapiens
aaaagagaattttagaccaatatccttgatgaacattgatgcaaaaatcctcaataaaatactggcaaaacgaatccagcagcacatcaaaaagcttatccaccaagatcaagtgggcttcatccctgggatgcaaggctggttcaatatacgcaaatcaataaatgtaatccagcatataaacagagccaaagacaaaaaccacatgattatctcaatagatgcagaaaaggcctttgacaaaattcaacaacccttcatgctaaaaactctcaataaattaggtattgatgggacgtatttcaaaataataagagctatctatgacaaacccacagccaataaaacccttctagacattggcttaggcaaagacttcacaatcaagaacccaaaagcaaacacaacaaagataaatagatgggacttaattaaactgaaagccttctgcacatcaaaataaataatcagcagagtaaacagacaacccacagagtgggagaaaatcttcacaaactatgcatgggatattgctctgtgaatgcttttgtgcataattgtacatttttaattaagttaatcttttacactctcaaagtgtgatattaagcaagcaaagataagttattacaagactctaaaaccgaatgcaatgagaaacaagtgaatccaaatatatttcaaatgaatgaatgacataatcaaacttaaggggaaaataataattaatctgattaatttttgactgttctcttatttcaaattgacttttgaacatactttgactacatactattgcttgaaaaaataaaatatctgcaaaaaattattaaatcttcatgataggattttttctttttatattagtataaatataacaattctgaaacaaatgtatgtgcattgtaagattaagccaatgagtaaatattaatatatttgtattgctagaaccccagattctcactgtgaaaggacagagatacagatatggaataagacaaggaaagaagcagcccactgagttacattagaatcagtattatcaacataaatatgcaatgtgctctctcacatgctctttccttctcttaaaaaaatataatatgtacatattatatattatatgcatagacacacgtgtgtctatacatatcctatctatacatattgaggattaacaggtgctagtagaaaatattaactttctttgtattaacaggtgttagtagaaagtagtagtaggtgctaagataaaagccataattaaacctcctggtgaatgaacacaccatcaccaacaatcttaccaaaaatagaaccaagcacgtgtcctagtcaaacctctggattcaactgtcatttggataaaacgcaaaggatagtgaaaatgtcgatcttcactgagagtctcaccagcaaatttcacagtgtggacatcaagtgacaaaaatcccacatttttcaacaaatatattgtatgggaaagaaaactttgaaaagaaacctgtatgttagaagggattttaaaaacacgacaaatgaaaacaaatgcgcaagactaaatcatagtgtcttggaatgcatgcatgaaggacacagccgtgaaaatgcaaggacgcctctactggaacagtcacgtttatcgtcacttttcaggagaaaggtggctgcaactgaggagagtcacatgcaggacttcagggctggcaaagtcctatatcttgacttatgtgatgattacagggatgtttacaaaaatcaaactataagtttgttttgtgccatgttttgtattgtgtgtgtgtgttttgtttttcaacttaaaaatacataaaatcaaaaccaaggcttcattatcaagtagcacaaagtctccaatctataacctcctttgtctggatatctgcatttaactaccattgccagagctaatcctgacaatgcattcatatttttaacactgaaacacagtaaacagggaaaattttgctcctctaaaacagggcatcttcaggcaatcagaacaactcagaaagtttctgtctgttgcataaaactcccctgtgcaaagagttacacaaaatgctgtcatagtaaaggtagttaactaacggcactaattgttcttgggcagtggccaagtggaacttcagagacctggcattgccagccagaaatcacttgtcatgggaattgtctcctggaatcactttggttgtcccagggtaacgcagggaaagtggttaatgggtcacttgggggtggcatcttcatcagtaaatcacatttactttctcctactaagaattttatttttggccatgaagccaaaagtcagctcttaaataacaagggaagcaaataatcattgaataaaaatagcagaaagaaaaagctgtgcaaagaaatttatgtttttaatttgttatatatgtatatttttatcatactttaagttctagggtacatgtgcacaatgtgcaggaataaaatttatgtttttaaaatttattctacattatgaattctacattagaaaaataaaccatagcctcatcacagggtgcttgactggaggagggctggcagcagaagtgcagctgaccgggttgcgttttcgtacggctgactaaagcggataccggtggcgactcatttctcgttttatttttcaacgatttggcggagaagctcctcttgtgaatggactttggatttcttggagctgcgctgcgggtcccacagtgtggctttcggcccgtgctgtgctggcgcctgcacttcctctggcggggcacggggtggcgctccctggtaaagcagcggccagggggagccgtgagtgaggcgctgcctctcccgctgaagcgggttccaaggccaccgtgagggggaccatccatccaggagagtactgggcaggctgcaaatgtctgtgttaaaacagctctgctgggctaagacaggacagaagcagacagcaggtggatgagacacaatttcctatccagcagaacctgcagcaagctccacagcaccctccatgggctcagtcttgctcccgggaagatggttaattccatcagctccttctggccggcagcaggaagagtggccctgtgtgtgccaggccctgcagtctctcctctcagctggtgtctccagtgagggacctgagtcatcgcacacatgagcctgtgctcagcctgcacatctcccgcctcccaccagctgctcctcaactgccagggccagactgtggcaaaatctcactcctctgccgatgctggggtttccctcgtgtctgggaggtggtgtgcttggtggcctgagcactgcagtgaatccatgtttccctcccagcaccctgttctgtcctccaacttggccgacagctctggccagggacgcagcccagctggtgcccaccccgcactctgtccatttcataagagcccttggtttcctcacttccctcagattttgccaagagaatggtcctggtgtggcccagaaaggccagcggggtgcagcctgggactgaaagcagaggcggctctggtggggaaaaagtagctctcccagcctagccctactggtgggcggcacctcctggctccaggccatcttttgtcccagtcctaggtaagaaaaacacaaacaaaagccagtcccatggcactcgagaagcaggaggccgttccctgacagcaacatgctgtgtgcacagacacacgggtggacaggaggcagagctcggggttgctgcggagcgggcaggacactggagcggcaggcagtgcggacccgccgggcagccgtgcacggttgtcgtcctcagcggcaggagccagtttgttgctcagggccttgtctttttacaaagagccccaggccccgggggcttctctgggtgcctctttgctgccatgtctgcacgcgggcggagagcagaccaggctaccgaccctctcgctttgctgtcttcacgtggaaaagccagtgtcgtagccccaaaggaggggaaactgtattgatttggggagcctctatgttgatttcaaaacagattgtctcctgtgttctcaaagactggaagcgaaccccacaaccgccttaggccacaaaagctttatcctttctaattagcatccctgtgacctgctctgcgccctgcagatattttgctcagccagccagaaggagggaggccagacaccagcccccacagacctgcggctgcgaccccctgcctggggacgatggggtcggggtccagtagctgccccagaaacaagtggggctgcaggaggctgatggtgagcttggaggttggcagaattctaaatctgggcactgcagggtccccacaggtcacgaccctactctgctccacccaggctccggaggacctgagcaggaacctctgcagggggggcccggggctccctgtcctctcagcagccggcagtgctccctgacagcccgggcctctccctccagtagttcggtagtttgctgtcaccaacatggctgggcctgggacaggctcctcctctccctccagaagccaggcagtccctcctgcctcagtttctcagactaggccgcctctcccatcgcgagacactgaagaccctcagctgtttccatctgcccagtctgactgctggatcgccctctgtgtgcgttggtttgctgtgttcttgctactcgcccttggataagatttcttctctactcatgaagctgcgtgtcctggagggcagggccgcacctcacatgcatgttgcccacatagctcagcaacagatgctctcacgcttgttaaaagtaaaaccgggccaggcgcagtggctcacgcctgtaatcccagcactttgggaggccgaggtgggtggatcacctgaagtcaggagtttgagactagcctgaccaacatggagaaatcccgtctctactaaaaatacaaaaaattagctgggcgtggtggcacatgcctgtaatcccagctactcggaggcaggagaattgcttgaacccaggaggcggaggttgcggtgagccaagatcacgccatagcaattgcactccggcctgggcaacaagagcaaaactctgtcaaaaag

SEQ ID NO: 113 - DNA, 8445 bp, Homo Sapiens
accctgctccaggcagcgtggtctgtatggctccgccctgggcaggaggagaaagaagagggccaggcaccacgtgcctgcactctccctggatgctggaggctgctccgccgtgggcaggaggagaaggaagagaactgggtgccgcctgcctgcactctctccggatgctggaggctggaggcagtgaggcagcaacagcgcgagggcgaggcgactttggagctgcctcatgcagcgacctcgccttccgctgcgcctcctcccagaacccaagaagcctggaacctgtggcgtccagccctgaaaggaggagacggcaacccagccgcgcgtgagtccgggagtctgggataccggcggcagaggaaggacaggcaggagtctcggcctctcggggagcgacgtgccgggaaaggcaggagggccccagcggtgggggcgggggttgcgcgccggggagggcggcctcaggctgggagcctggcagatcgtctgactctccccgagccccatcccaggccgagccaggacccctctgatgcacaggcgtctcaggagcccgtttctttcttgaatccggggcccagtgcggcttgaacctagcccccgacctcctcctcgccctctcagagtccgctggggtgggcgctgaaggagcccgggtcggagaggagccctccccttctctcctgcgtggaagccctgcagcctccgtttcttttgggactggggtccggggccttctgcctgacccggggtgagaaagggagccctgatcaggacccggtgagagggcgctggagcccgggagcggcaggagccttgagcggcagcccgggaagaggatggggtcaccttctgccccaggtcccccactgccaggatctctgtcaccttctgggggtcctgtcccctggggtcccaccccccgggctgcctgtgggtatctctcatctggaactggaaataaccctcttcatagtacggcttagcaaatatttattcgcccatgcaccccccttttttttccttcatagtgttctttttgtcttggatcatttgtgtttttcctacattgatgtgaagcatttttaaagacactttagagattagtcctttattggttcatttctattgtaggttgttgtttcctactctggtctttgttgtttaatttcagttttaatttcttgcttggtttagttcatgtaacaatatttttcttagaatatttgtatctgtgtttgtgaaacagaacatctattatttctgggttttttattgtctgatcagattgtgtattaatgtaatgctggcttctcgaaacaaattgaaaaaccatccctttcgtctttctctttgagagagagtgagcagtgtcaatatttttttcttccttaaatatttggaacattttcaaagtctgatcctggtgttttccttgtggagcattattgttgatttgttggatttttaaaattagttagttaattttgtttaatatatataggagtgttcttattttatgctatttttgtgccagttttagtaagttgggttcagcatctgttgcgatctctgttgtcagacttttgatcatatgtatttcacaaaattctctgattatcttgttataatactgttatgtagagttgttgttttgattctgatactggtcacttgtgttctttcatcttttttccttaatcagttttgcctgcactctccctggatgctggaggctggaggcagtgacgcagcaacagcgcgaggcgactttggagcggcctcatatagcgacctcgccttccgctgcgcgtcctcccagagcccaagaagcccggaacctgtggcatccatctctgaaaggagaagacggcaacccagccgagggtgagtccgggagtctggggtgccggcagcggaggaaggacaagcaggagtctcggcctcccggggagaatttcacaaaattctctgattatcttgttataatactgttacgtaggctgttgttttgattctgatactggtctcttgtgttctttaatcttttttccttaatcagttttgctagtggtttattaactatgttgtttataaaaacaacttttagccttggtttatttgtgttatgtttttttttccatttcattgatgtttgttatctttattattgccttcatcctgtattctttgcacttgatttttctttcttgattcttgagaaaaaagttgaggtgccgggcacgttggcttacgcctgtaatcccaacactttgggatgccaaggtgggtggtcaggagttccagaccagcctggccaacatagtgaaacccccatctatactaaaaatacaaaaattagcagggcgtggtggcagacacctgtaatcccagctactcgggaggctgaggcatgagaatcgcttgaacctgggaggtagaggttgcagtgagccgagatcgccccattgcactccagcctgggcaaccgaacaaaacttcttctcaagaaaaaaaaaagaagttgaggtgattgattttcagtgtttctggactcctgccctgcagagatcctcttgctgtaacctgtttcatgtgaggtagagtttagaaaatatttattggcctctgtgccttacttttcttcatatactcttcttattttgttgatttatctttagggatttttttccttatgttaaattgaaggacttattgttaaaatctgtaagttagccctttattggcttatttttgtcataggttcttgttctctagtttgatttttgttgtttcatttctttgtgttcatagttgtatatagtaatctggttgataatgatcttgtatgcagtagctttgcttaatttatttattaattgtaacactttatgtcatgttaggctgtgctgagtgcttctgggagcagccaggtttccatgaactcccagtttactctaaatactctagcagcccacatgtgcacacactggataatggtcatgcatgtagagcaatgatgctggggaggcaccgactctgtcattctgtgaatccaccgcacaatcacaaacattagcattaaaataaaatggactgttaggcaactgcaaaggactaatgcacctatgtggcacaaatgtgtctttccgtattcaaagtacttgtaagagcttcaagttcctcatactcagccactgacctcagggttcttggtacacaggcatacatgtgcagacacacatacaggcacacatatacacatgaatgcacatatgtgcacacatatttacaggcacatgcagatgtgcacacacagacctgggtgagaaagtcagatgtacatggaacagcccctgctttgtaagctgtctggctttgtagggagaaagaggtgaaacaacacacttgttatcttggaagaggagatgaagggagctgagctggatatgtccagtggggagaaagccaggagccactccaccgaaaatcgaggtctccacatggatgatacccacaaaacattggcaggaaggacacagccagcaccacatcagtggtgactttcatgagtgtcaactgtggccatccaaattaaaggcctggcaatgggataagttagcaactgaactttctgtatgttaccttattaactttctgtatattagcttattaactttctgcaatcaaatgctgattaagcattttctgagccaaaagctttgtgtaatttgaatctagtgaaaaaatgttatgcgtttaacactataacttgagatctaaaaacaaaaaaacaattgcataagaattggtcagataccttgtctttgaaacatactgaagtcttcaaaattaatctgatagctctgcagttggtatgtggcataagaaaatatttggcatgaaggggagtaacacaccacatgaattcattcattatgaagaaattcattatgaatatatgtgggcaaattattaacaaccctcccaaaagcagaaagctcagactcaggaagatccatttaaatggagtgatttgggagatgatttcaagcgcaactctgcattgactcagcatttattaagtcatacagcaggctactggaggcctcactgcagcctgggctggtattcagtgtcctcctccttccttctcagtagacttccttggccttgataataatacgtgttaacaaacacaaatctcaaaatacacataatgtttcttcccccacaagccagggtatcagctctgcaaatcagatgaccccaaggtcagtggggttgaccagggacaccattctgcattcctcctcagcttccagatcctgaggagctctggggccttccttctggacagggaacatgtctgcctggcttcctcagccaggtacgggaggctttggggacctgtgtctgtctctgggaaggaggaaggagcctgtggcatcttccttaagcaaaagcacatccagcccatggccaaacttcagagtggggcgaggggcccagcacagctcctccgttcctgcagcagagcccagaaaacacatctgatgttgtggctgcctcaaacctacaaacaccatgggtttgaagtgtcctgttgacatggccatggccactttccccgtggaccgtggcaagtttttgtttttggtttttgttgtttgtttgagacaaggtctcactttgtggcccaggctagagtgcagtggtgcaaactcggctcattacagcctccacctcctgggctcaagcaatccttccacctcagcctcccaaagtgctagaattccgggcttgagccaccgtgccaggccttgtgtagaagtattatacattatctttaaaatgtagtttagtgctaataatctaaaattgtgttgccatttactattaatatgccctttgtggtgcatctaataaaatgctttgcttcataacctgaaacaaaaaaactttcactatatttacttgatcagatcaacaactatagaagtcttagaataatgatattcttactcaaaagaaaagcaacaactcatctttaatgaaactgtttctgtgttttattagtggttgagaaataacacattccttcagcagtggcagcagtcagataccatatgaattttttatttttttttactttgataaatcctgaggctctgttgaggaagaagcttccacagtaggccctaggagagctgcagccaccatgtccacactgtgttatgcacaaatgggaatgtagtttcccagagaaaacaacttctgtgggtagatttgtgatcgaagtttgtgaatagctttaaaaaatccttatgaaggccaggcacagtggctcacgcctgtaatctcagcactttgggaggctgaggcaggcagatcacctgaggtcagttcgagaccagcttgaccaacatggagaaaccccatctctactaaaaatacaaaaattaaccaggcatagtggcacatgcctggaatcccagctacttgggaggcagaggcaggagaattgcttgaacctgggaggcagaggttgcagtgagctgagatcgcaccattgcacacaagcctgggcaacaacagcgaaactctatcttaaaaaaaaaaaagaaaagaaaagaaaaaaaaaggctgggcatgatgactcatgcctgtaatcccagcactttgggaggctgaagcgagcagatcacctgaggttgggagttcaagaccagcctgatcaatgtggagaaaccccgtctccactaaaaatacaaacaattagttgggcgtcgtggcacatgcctgtaatcccagctactcaggaggctgaggcatgagaatcgcttgaatctggcaggcggaagttgcggtgagccaagatcgcgttactgcgctccagcctgggcaacaaaagtgaaactccatctcaaaaaaaaaaaaaaaaaatcctcaggaagattatttacttataatctcctccttccttaattagcagtctcagcatttctgcaataaccaagtctcagcatccagtgaagcagcctgcaacatgcgggagctcagggcattgccactgcacatggggcacctggtgggactttggcaaggattttgtcattaacactgagcaaaactctacgaagacagaggcattcttttagattaaaaactaacaacataaggcgggacatggtggctcacacttgtaatcccaacacttcgggaggtcaagggggacagatcacttgagctgaggagctcaacaccatcctggacaacatggcgaaacccgtctctactaaaaatacaaaaattagctgagcgtcatggtgcacacctataatcccagctattcaggaggctgaggtgggagaatcgcttgaacccaagagcagaggtagcagtgagctgagattgtgccaccacactccagcctgggcaacagagtgagacgcttacagaaaatctttaatttctatagaaaatcttcagtcttctatagaagaaaattaaatattacaaaattgaagattagaaaattacatagagagccgggcatggtggctcacacctgtattcccagcactttgggaggccagggtgggtggatcacccaaggtcaggcgttcgtgaccagcctggccaacatggtgaagccccgtctctattaaaaatacaaaaaattagccaggtgtagtggcgggtgcctgtaatcccagctactcaggagactgaggcaggagaatcacttgaacccaggatgcggaggttgcagagagcagagattgcgccactgcactccaggctgggtgacaagagctaaactctatctcaaaattagagagaaagagagagagagacagagagaaagaaaagaaaagaaaaagagagaaagaaaagaaaaaagaaaagaatgattgattccatagagaaacaggtatttatcaatcttcttgattctggtgctcatcacaaggctgcaagttactcagttccaccgtcttttgcatctgtggttgtggttgaaaggaatggcctgaatcatgcacctcataactcacagagtggccccatgccttccagttttctttttttttcactgaggttctgaattacccatgtagtttaaggagttttgttgttcttcacaattctgtctgtggctaatcttatgtccatgggattcatttgagtctggaacatgtcccagatggcaagatgcagcatgccatgatattttcaaaatccatgaacatggttgtttggcagttccacagtaaatatgtatttggagccttaagctatttctttcatgatatatgctcaggtactgatagcgacactgttgaattctacttgagccctgaggcactgggaaactgtgatggttaaagaaatccccaccttgtgttcctgccttaccgcaaagaattccccttccccgttgacttagctaagactcacggatccccctcaaaggatgtcccacctatgacaaggtcagacacagacccccccaaatgctgtccttgtttcatgaaagtttagctgaactgcttgtccccacagattcatcaggatataatgctaattaactcagctttgatatgggctttaccatgtccttcaggacctgcttattagttagagaccccttggactgcataacttcttcaaagacattttattttatgcttaatcatatagaaatataatgatttgatagattaaccaatgtggttttcctcccttgttctccagtttcccactatttctctcccatttagtctaaaccttggcatctcctctttcaaaggggaagttttaacaaaaggacaaagagaaagaaaagagtagacactcacattttgaattttaataaacttggaagaatgatgacacaagagtgagtttgtcccatcccagagcagatgaggagcttctgaatgagagtgggggaagggattgtgctgttgacactcgatggcaattacactgatgcagacagggaccttgagtggtggggggctgagagtgctgagtgcacctccccgggcagacaagaagaaacttgcaagtgcaggcacaagatgaggaatcacagtgaaacttaccacaacattcagcctctattcaggagatacttcacaacacttgccaggtacttttctaggcactggacataccgcaaataataaagccataaaaaaaaatatgtccctgtggaacttgcaattttgtgcagaagagcaaatagttcactaaagaactaagcacaactggccatgcatggtggctcacacctgtaatcccagcacttagggaggctgaattgggtgaatcatgaggtcagtagatcaagaccatcctggctaccatggtgaaaccccgtctctactaaaaaatacaaaaaaattagctgggcgtggtggcggg

SEQ ID NO: 114 - DNA, 9184 bp, Homo Sapiens
ctctctctttgcctactgccatccaggaagacgtgacttgcttcttcttgccttccactatgattgtgggaaggcctccccagtcatgtggaactgtaagtccattaaacctctttttcttcccagtctcaggtatgtctttatcagcagcatgaaaatggactaatacagtaaattggtaccagtagaggggggtgctgctggaaagatacctgaaaatgtggaagcaactttggaactgggtaacaggcagagattggaacagtttggagggttcagaagaagacaggaatatgtggaaaagtttggaacttcctagaggcttgttgaatggctttgctcaaaatgctgatagtgatatggacaataaagtccagactgaggtggtttcagatggaaatgaggaacttgttggaaactggagcaaaggtgactctcattatgttttagcaaagagactggtggcattttgcccctgctctagagacttgtggaactttgaacttgagagagatgatttagggaatctggtggaagaaatttctaagcagtaaagcattcaaaaggtgacttgggtgctgttaaaggcattcaggtttataagggaagcagagcataaaagtttggaaaatttgcagcctgacaatgtgatagaaaacaaaatcccatttttctgagaagaaattcaagctggttgcagaaatttgcataagtaatgagaagtcgaatgttaatcctcaagacaatggggaaaatgtcctcagggcatgtcagagttcttcacagcagcccctcccatcacaggcccagaggcctaggaggaaaaagtggttttgttggctgggtccagggtccccatgctgtgtgcagcctagggacttggtgccctgcatcccagctgcttcagccatggctgaaaggggcgaatgtagaacgtgggttgtggcttcagagggtgcaagccttggcagcttccacatggtattaagcctgccagtccacagaagtcaggaattagagtttggaaacctctgcctagatttcaaaggatgtatggaaatgcctggatgtccaggcaaaagtttgcagcaggggcagggatctcatggagaccctctgctagagcagtgcagaagggaaatctggggtcagagctcccacacagagtccctgctggcgcactgcctagtggagtgggcactgtgagcagagggccactatcttccagaccccagaatggtagatccactgacagcttgcaccatgtgactggaaaagccacagactatcaacgccagcctgtgaaagcagctgggagagaggctgtaccctgcaaaaccacaggggcggagctacccaagaccatgggaacccatctcttgcatcagtgtgacctggaaatgagacacagactcaaaggagatcattttggagaattaagatttgagtgaccagctggatttcaggtttgcatggggcctgtagcccctttgtttgggccaatttctcccagttggaatatctgtatttaaccaatacctgtaccctcattgtatctaggaagtaactaagttgcttttggttctacaggctcataggtggaagggacttgccttgtcttgagtgagacattggactgtcgactcttaagttaatgctgacatgagttaagactttgggagactgttgggaaggcatgattggttttgaaatgtgaggacatgagatttggaggggacaggggtggaattatatggtttggctgtgtcctcacccaaatctcatcttgaattcccacatgttgtgggagtgacccagtgggaggtaattgaatcatgggactgggtctttcccgtgctgttcttgtgatagtgaataagtctcatgagatctgacagttttaaaaatgggagtttcccctgcacaagctctctcttctctttgcctgctgccatccatgtaagatgggacttgctcttccttgccttccaccatgattgtgagtcctgcccagccatgtggatccatgaatccatcaaacctctttttcttcccagtcttgggtatgtctttatcagcagcatgaaaactactattatttacctatttttcagactcaaagtctaaaatgtaaagatattcttgaaaatttgccatccattattgcaagacttttaatttctttcctgccactacttaactgtagaaacttgagaaaattacatgacatttctataggtctcagtctctcaactgtgccatgaaagagttggcttagattacctctaggcctccttgagattaaagatggttttgcattattaaaaacattatataaatcaaatgattttttttttttttgaaatgaagtctctctcttgtcgcccagtctggaatgcagtggcacgatcttggtttaatgccagctccatttcctgggttcaagcaattctcctgcctcagcctcccgagtagctgggattacaggagcctgtgttgtaaactctttatttaagtagaattgccccctctatttttaaatcaaattgtcatttttaaaaaatctatgtggtttgctttaaacatgatatacgttttcttacatagataaaggtagatttcagatgttgggaaaaatgtgtgtggcagacactattagctgctctccttctgtctgtccatttcctctcaatctcattaatagaaactaatttagttcagcatggccatgtgcccagctgaaaattatagcttcatcatcacacatcagaaagatgagcatgtggcacagtcctggccagtgaaatataaagtgacagcttctgggaagtgattgctttcctgatttcaataccaccccttcctccctgcccactgttccttcttcctccctggacaaatggtttaggggaccggctgccatcttgtaacaaagcagacaaaagctacacgcaaaggatggcagagcagaaagaagaccttgatggtatcactgacagtctggagagtctacttctagatttttctgtcatgattgaataaactgccatattttctgtcaccagtaggggttttgttaccaatatgttcataactgattcagcaggtattgattttagtccacaacagtagagtgagataaaagcacatttccctttttgttctcaatcaaatttaatcttcctgactgtccacatatttggttggtgggacattcatcctctgtcattcctgtgcttttctgtcttctcaagatttctagatttgggggtgggggaggttgcttaaaaacacaataatggagaaaatgccagatatttggttcacagtggctgcactcactcaacatttatttatgaattttccaggggcagtataaagaatgggaatacacaatgaaaatacctttagctccaagtgtgtggtcaaggcttgttcctctggctttggttgggctgcagacaaactcagacacgacccaccagggccatcagctccatcaactacaaacctacccctggaattctaggcccccgggttcctaaccagagtcccaggttcaggcaccctgtagtctcccatctgggtaccacttggtctctcctactggtggaaacctgcaaaatcccatccctactcttggtcttaggactcttaactttccctggggtccaggagcgcctgctttatctactttgaacagtccctgcaactcctccctttacgaagggatctgtcttacttttcaagatcacagccagtacttttattctatctcagttatacagatgagaaaactgaggcacagagaccaagggtaaagtcacccagctagtaagtagcagagacaggatttgggtgcagatgtcttggctccagacccagttgctaaccactgtattgtgctactctcttcctgcaacacaaaagctccttactttctgcttgggtatgggtaaacacatcgcaacttataaaaatacagtgctgacctttttctgggtgagacgtgggaaggggtgttaactcccagttggtactttccttgataactcactctgttttgtatccaattaagaaaaatacgttgcttttaaacaatgcactaacttaagcttcctatgtctcagttttctcatattaaattgggaatagacatttctatgatgacttttcctctgtattttacctcatcaagattcagtgataggaaaaatagggtattaactaagaaggtttttgaaatcttcaggtaaaaaaaatgtggtattttaacaagaaaattgatacaacagcagatactacaactggtaaaatgaattttaactttggtgtccctagatgctccctattcagttcttagtaaatatatttcaatctagaagaaaattgggaccctgccaactagtattaatgcttgcttgcctattaattgaagcacacttttggaaaatgttgtatgtatctggggaaatataatgcattcagcataagaataaatcttttttttgagagagctagacctagagattttcctcacttttcagtcatgccacaatctttctggtttatcagcaactttttctctgctaagcagtgatggtaatgcatacatttgcctttttcagtaaatcatccttttataatttggctttctttcaatcttagattcccatcagaagggttttacctcaaggcatattgcaaccaatttcccccataattaatgccatatctgcctcagagtccatttcaattcccaaatgaaaattgatgaggcagccaaccacaaataaggatcacatagcactgattaaactatcagactagtttccaggctatcatgttacagtgctgaatcataagcagagggtgagttttctggtcttttgcaatgtatattgctcatagtaagtgtccataaatggctcttagcagatgaagagaagcattttatatggcccctatcaaattctaccagaaagactaatgattaaagaggtttgtgttacaggaaccaagacttcatagcacatgaaagaaaattgtatctagacttgataaaaatgagccacaaactgctacaaaaatcaccaggacaagaaaaactcacttaggtgtttttatcccatccacatggagtgtgaatggttaagtcaggtgctgtgtgaagaatggaaacatgcaacaataaagacaccagtcctggtggacctgatggcctatgtctggtgtggcgggggacagataagtaaacagatcgtcctatacggggtagccaacgctatcatctgatagaagtaagcatgaggtaccagtcaagtatgcaagtatctgtgcatgagatgctagtcaagtatttgtgtgtgcatgtttgaaggcttcctggaagagatcactgaaactctaagagtaggtagccaggttaagaatgggggcagagcaggatatctgaggcagtggaagcaatttgagcaatgtgtggagtggagagagaacctgacttgtttgataagcttggaaggttaagcatagctagaacagggtattggaagagttttatagaggaaaagatgactagaggtaggctgccagatgttctctcccaaaatatttgaccatcagtgtagcagggcagatattagtgtgattatgaaaacatatatgtgtgtgtgtatatacatatgtatgtatatttaaatgcattacatatttcaatcagtgatatgtgtttttctaggtatctttttggcatatttttaagaaacacatttcgaaaattaaatgtaggtgtgaacccttcgccacacccaaagaaccattcttgacactcatgcagaacattttatgccccagtttgaatatctgactttggtttatctcactgatacctgtagcccctccaaagtagtggtagacagagctgagacaagaaatttcacagctttttcctattgtggaacaaacaatctgagtttaaaacatattgacttactgaattaaagtaagtcactccacctcttaaagactcagtcacacatccaattttccaggggcctgtggccactgagtgtcacagagtgtggaaggctgtaggggccagtccagaggagagaccacatggcctgattgcccagtagaaattgatattcacaaaagaatgctggctcaaaaaaataaattgaaaaaaaaaaaaaaaccccagcaacacagtgaacaggtggcttagtatggctggccgtgcttgcactttttaatgacctgatttgtttccaaaatttgttttaggtaatgtattagtctgttctcatgctgctgtaaagaactacccaagactgggtaatttataaagaaaagaggtttgattgactcacagttccacaggctgtacaggaggcatggcttgggaagcctcgagaaatttacaatcatggcggaaggcaaaggggaagccagcatgtctcacatggcaggagcaggaggaatagagagcaggaggaggtgctacacatttcaaaaagccagatctcatgagaactcactcactatcatgagaacagcaagggggaagtccgcccccatgatccagtcacctcccaccagacccctcctccaacactgggattacaatttgacatgtgatttgggtggggacacagggtcaaaccatatcaggtaacaaaactccagtctcaaaaatggtaagtcaattttattgctattataattcttaaaactggtgttgatgatgatgatgatagcagttatttgtacagtaacatgcccaagacaaatcccaagagaggaacataaacaaaatcaagtggggagatttgactttgcccaagttcttctcaactagaaatttctaaaggtgttttgtgtggagtgctgcgctatgtgcagttttcagctattcaacctcaaggatgtcaaattgttggaagagattcaaagaaggataatcaaacttggatggagctgacttaaagaaatgggctaacctccagaaagaatgccattgaatccagagagaggtgccgttgaatcagcccttgctgatgaagcctcttcactgtactgctcagacctctccatcctggtggcaagggcttagaccattattcatggtctgactggcctcgaggtggctgtctcgcctttgaaaaagggcagacacagagcatgttcagagcacggagccatactgtgcgatttcttcaaagagagcttaaccacagaatttggattaatgaatgacgtaactgcttcagggcaacacaccctcactgcagctgcttagcccaggaagcagcaaggtcaatacaaggagagccacaggcctggggagatgcatgccttccttcctggccacgtggatctcactacttagcccagatggcctgcgagaaggacaaagccaagcacttcacaacactgtcagttgctgtcctgaagaaggtggccaggagctctagaaggattcaaagccccagggatttttggtttttatgtatacacttctctttacatacttgttcctcaacatccaatcagccttgcaggtttgtccccgctcctagcattcagaaacactcaagagcagggtgggtcagagctctccaccacatacgcagcagagtgaaagaagctgccctgcaggacagctccaggctcatggccacccctcctcacatgcatacctcctcctcttccaccaaacaacaacaaactccttcatgtagcattcacgccctcctcttgtggcctctacctgccatcccacaccaatccctttttatgtccccacaggtacccaggagtctcccctaactaaattccccactgcttctccaaatcaccccaatcctacttcccactgaaactaacaagaagggaaggaaggtgttaacaaatgaagtcttcgaaggaagtcaccccaagaatctgggcctactagtcattccctaaggctcagctcttggcatttgcttcgttccctgggccattattttcatactgtgaagaaatttcaccctagtcccattttggagagcaagtgttggtacagtgctgggtaaagaccctgacaccaggtcctggtccctggcccagagcaggggatatgaagggaagccccactcactgtgtgctccctcactgactcctcaaaggaattccaggaagggtgctttagtgaccctttggctcacagagttagagtgacctgcccaaggccacccagagaatgaatggtgggactgagatcacacctgggcctgcctggctgccaagccttttgctattttcattattccacatttctttccaaggatacagaaagcagggataggaagtgctgtggaaacaagcaaaaagccttatccatagtcagcatccaaaaagtactataccttctctgacccctgctttatttatttgtttattttcagggatgatgtaatagccagaaaaataagtgaacagaagattccgggttctactttatgccaatttttcttaaatatctcagtcactagaaaaagatctatttgaaaatcttgctctgagcagtttctgtcttgggcccagttgtttgaggagcctgttgaatttttaaatttattagtgttcccatgcttcattcattggcatatatgtatattctctatactttataattacaagtaagctcttgataataaaaagtaactgtcattctgtgaagctctttaatgcagccaaagataatttcagggggcaattggcagtctaagtccttgctttctctcattttaaaggagaaccaaatcaacttagagtgaatttgttcaaatgtgggtaagatttaacaggcacttcagctgcccagggtacttttccatgtctctccaaccaaccccacccaaatagcttaggattggcattttctgatgagcacagggatagagaatgagaacggagtcaggtcctcaggtattcaaggttagaattccttcttaaccttgcccactatgccctatgtggggacatgctacagcagagatcacttgagaattatcctgtggctcacactgccataattagttatctgttcggcacctctcaactaatcagaacaatggcacatccaaaagtaaaaggagaagaaaggagacaagaatacagcgactgaataataaaa

SEQ ID NO: 115 - DNA, 2012 bp, Homo Sapiens
gtacacaagaagaaatgaaaagaagtctgctaggaatccttgcagactaaaaggagatacatgagagagactttctttctgtctctggacattgtcatctgtctggagtacctagaactgcagcagtcttcatagaatcatgagagtaagcttttgtgttttagataaagtggcagatctgatttgttgatagcaattccctggagtgttgcattgagaagattctgaggccttggtctactatctgtgactgccatggaatcctgagtggagcgaaattaagttcccagacttgttataccctcctgacttgttctccccttccttgggaagggcatctgttccaggcaggtaacacctgtcatcctggctggtctagctgtgttctcgtcacccatgccggcacagtaccttacacgtaagaagagctcagaaattctttgctgaattcattcattttgaggcataaaatccaatcttcctgaagataagtcctttccactgaactggtggggtgtggggaaaggggttgctggtacttcatctggggaccccgaagggaccaggatatgagttggctagaaaaggggcaggtaagtatggggctttcccacccacagtagtcctgcttcatgttcttctttcacaattatttgacagggcaccccatgaaatcaagtggctaagtcagatttaggaagtggttttgaaattgatgggtgcagggaagtacccttgagtcaaaatcagaagaaatgggggaatgccgaagaaacactcagagttaatgagatgaatccccctacatgagcattgtgggatgtctgcccaacccacacagccaagatatgctccttcaggtgtgtcctgcccaccgaccacagctgactgaaccacagaatttccttttaccccgggctgctcccctttttgtgttcagcccagcagtctgccttcattccctcaaggaagagctgacataaaagaaagcaaaggggtggcaaaaaaaagaagttaatgattaaccttgagcttcaagagcttaagcataggcaaataggaaggcttcgtgcacatacaacatatttgagagaatatgagtggagtaaagatctctgccaaatgtaaacatgagcatcgccgctctgtgtaagactcttcagtgactcccccttgccttccagataaagtccatgtttcttaacatggttccaaggccttgcttgatccagtgactatgcatccattacaggctgaattgtgtcccataaaattcatacattgaagccccagcctccagtaattcagaacatgactgtatttgtagatagagtctttaacgaggtaattaagttaaaatgaggtcatgtgtgggggcccttaattcaatatgcctgacgtctttatacaaaaaggagataaggacacagacacgaacagagggaagcccatgtgaaggcaaagaggaaaatggccattaccacccaaggagagaggcctcaggagaaaccaacccagctaacacctggatctcaaacttcctgcctccagaatgatgagaacatacatttctgttgttttaaccacccagtcggtgatactttgctctggcagccctagcatctctctccttcacctccctaaaccgccctccccaggttatgacactctagctgtgtgctcaatgccctctccactccaggctggccccactctcacctgggcatctacattgctcccaccactcttcatccagctaactccttcctccatgaagccatccctgacctttaagtatctcctaagatacccgcttccttcccctctcagagccccatgttacgactacccatttactctgtgtcaataccacactgtgtgctacattagaacaggggccatatgtatcttgctcacatctgtgcctagaacagtgtctggtacctacaagtgctcaataaattcttttggatgactggcaattaatgaaaataaatcaaataattcaaagc

SEQ ID NO: 116 - DNA, 7000 bp, Homo Sapiens
agtctctctccgttccttcttctccttccctttcctgacacatcccagcgtccagccagcaaacccttgagtccaggctcggggctcaccgggtgcgggagggagtgggagtgagacccgctgcctcctggggtgctcctctaggggcgtagggggactgggtgggagaggatcactttcagtggaaggaggagaccagtgattgcatcccaactctcccaagtgctccctgcctagaccacctctctccgggtctgggatgcaagaaggtctggagctggccgttactaactttctgttgtcaagacccaggggtacgtgcgaaggatagagaagagcccccgattaaccgctgtgtggccaggaagagggactgggagtgggggtgggtgcccagagcttgcacagatccccatgtcaagcggacacccgcctggctcttcagtaaaagagtgaagaaaggccgagcacagcgcgaaggaaacctgaggtctccggcaaggcaggagaggagaccaagtgactccccgaaacccaccctccagcccttcgagaggcccagagtccagccggagcaagcgtaacgctacagtccctggcgcgcatccctgcagaccccagctcgccccggggtcccgccgccgccgccgccaccgcctgcgactgcgagggtcctggcccgagggtgcaccagcacctccttccactaccggccctttatctgacaaaagagccggagcccatgactctccgactgtgagcagtgtggcctttccaagcctccagaactttctcattacaacttttccggggtcgcactactccctgggccgcgcgggctcgggcacgaggacctggccagggcgcagcgccggcacgaaggcgcgcgccgcagaactgtttcctcagccgcgtgccggggaactaactgtttcctcagccgcgtccagcctcgcagcactgctcttctgcttgctactccagcgaagggacatgcctgctggccaggacgcttagtgggcctcgtaacctggcgagtgtgtgcccgcgcgtgtccaccctgcccccggccggtgcgccccgcgcgcccaaacccggccggcgaccactgcgcgccgggcgcttccaaactgctcctgtccagaggcatccctctttcggctttctccatcccgcgtccgcttccgcacccgagagcgacaagcaaaaaagattcagtgcaactcaaggactggccatttgcagccccacctgcgagagcgaattcggggaactgcgcctgggcaacctctttccctttctgctgggtgccctcccctcccccatctccccgtctggctggagttggccggactcggggagcctcggtgcccgcagactcgcttacctcgcatggtgtggccgctctcccgctccgcgtagtcatgaagctgctcccagcccgaaccccggagagcccaaaaatcccgctcagcacgagtgaagaaggtggtcggcgaagagctgctctgccgagaaaaccatccctttaggcggacgccgtggctgcagggtgacgtttgccgccgccgccgctatgttaacagttttgatgttggtggtgactgttttgatgattgtttgtttgtttgtttgttttcaggaagggtgaaaaaaaaatgttctggctgtctggtgcctgggttttgttttggttttgtttttctttttctttctctccaatgtgcttgctttttaaaaaatgccaccgcctccggctcagaagatttcttttgtgatcacttggactgaggaggaggaggaagggcagcagcaggaggaggagttggtggtggttttgttagttacaaagaagagggagaaggaacaagggggaaaaaaggaaacagaaagaaaagaaagaaaggcggtgtggatggcagagcatgtgcgttttcacatgacatctgtgcctgttagcggatccacaatgtgaattttcactgttcagttacagggaggaagggagcagcgagagagaaagagaggggagagatggagagagagcgctgagaggggcttatacgcgagggcgggcttggccgcgacttccaggccccgcctgctgtcagcgcagccgccaatcagagcccagcagcgcctggagaggctgggaccgcggggaggggacgtggtggaggcggggggtggggcgggggctggggaccagggagtccgaggtggccggggctgcgacggggaattcgagactgtccgaactgggcagagaagaagggccgaccgggagagtcgggcagatccgcaggtgacaggcacttccgactccagcagagaaggggacactgatcacggaaaaccttcggaggcaagagacgcggggctccccgggtttcacgttcggtccctgtctcgcaacccccgcgggcccggcagagttagttttgaatttatggcagcgctttgccgagcgctatttgggtaaacttcggtctccggcgggggtttccgtgggcaggtggtttgggtgttggtggtagaataatgcaaacccactttcatcacttttagcacaactaaaatgcagtcccatggaagtagctgtccccttcctttaaaaacgtccgtcagatgctccctgaccctcttctaaaaaaaaaaaaaaaagaaagaaagaaagaaaaaaacgtgtatatgttcttttgtctgggaaattgatttttattagcatttggagactcccctggcgatggactacaggactgaaggagaacagctcaaattggcggtgtagccaccttactaattcaagagaaatggctgttgctagaaggtgtgattgcagggtgctctttagaaaggttttagaaggaagacattgttaactttagttagaggcgattggtaactgaacatagataaacttacttgtattccttaggtgaaaattgtcatctatgaccatttatttgtattttgataaaaatctaatacatatatccaaactgttcctttgcaagtttttccaactcagttgacaaaataagcatatagatgattacatctacttccttcccaatagtagggaacttcttaaatacttgagttaattgaacaccctaaaagattgggaggtgaaaatatttgcctcattcactcagtcttgaggctgggagatgtctactcattagcatacctgttggcacagcaggcctcatcatcatttaagtatccaaataatttgatttttgactggtatttattcatgatatgtcatgtaacacaaagtacaatgtagaattggcagttatttagttaattaggtcgctctacactgccaagtagttttttccttcctgattaaatgaaaaatgaattatctgctgaattttcaccagtattaaattgacgtagccctgctatatgccatcccatttgcaaaccaatgtgtaatttaggaaaattttagtattaagagtgaaagttgattgagtcattaattaaatgaaatgaacaaaaggaagttactgtttagaatagttattcctttataaatatctttctcctagatttgtaattgacacagtagttaatcttttaagataatatttaaggctccctggttttatcatttttaatcaagtaaaatatattcatcataactatgttaaagctgtacaaagttatgcctaatttagttgcttcattaaaaattactgaatataaaatagtcaagaaacaaattgtgactatatcattttaattttgttgcttcaagcagagacacaagaatattgaaaattccaaaggctttgtaaacattgtctaattattattgttgttgttatcattttagatttctatttctctttagagtgaacaggaatttcaaaatccaaaaatttaaacatttatgtaattttaactttctaaacatttattgaattctgaatttttttttaatgctgcaatatctgtaatccttgaaaaaggtagtcaacacgtgtataaaaagtatttacccccccatacatttttatattctctttattttgtggtttcagcaaggcataattttgcttagaacatatttcttaattccttctgagtatttttggagaaattattaattagaagactatattatttcatttttcaaaactatgtatataatctctatatatggtgatacaaaagtatgtattttctctttaaatgctaatcattggttataatgtggcggcctgggacattttggatctttctaaaaatttaaaaactggtttgttgaatatttctaataattttcacatttatttcactgaatggagcccatttatttaaaataaatattaagaatttgaatgaaagaagtcagtattttctaagaactcacaaagcacatatatataatctgatggttttgtaacctatctgccagcaaataatcatatttcaagtggcataataataatacattactgtaatgtcctagctcatatgaagtacggtatcagtaattttatttgaatgattatgtctggtttcctataagcttgaaactctgcttttcactctgggcctgaaggattttctaagttgacagttgcatgttgattaatttaaatgacaatcagtcacatagcactgtcctcaatctcaagaattgacatcagattccacttaggcttgcctgcttacctgtttttctgacacattagcacccctcaggttgagctgtaccacagaataggaatgacaacaaatatcctgaaagaggcaaagttttaatataagccaaccaggtagggtgaccatggcatttaggattatttcaatcctaaaaggcttaaacaggaagtcatagttcatgttattctgagctgataagtcagaatattcactggtcagggaatattttaaataattaagactcttgaatggacattagcaatactgataacaatgttacttttaggaatgactgaaagattggttatgtttaactctatttagggagctgtgtggctgtgaaaattgggaaagagatataaagctgctattaaatattagaaaagccagaaaaatgtaagaacttttaacattcaaaccttttacaagtgggaagggaagtactgagttccctgttgctgaaggcatccaaaaaagggttgaatgaaaggttctgttagagatgctctagtatacagatttctatactagggtagaaattgtctagattacctccaagatcctctgtagctctaagtgtacagttggcctttatgtccatgggttccacaactgtggattcaaccaagagcagagcaaaaataaattgtgtctgtactgaacatgtacagatatttttcttgtcattgttccctaaacaatacagtataataattatttatatagtgttgacattggcattataagtaatctagagatgatgcaaagtatataggaagatgtgcataggttacatgcaaatactacacaccattttatagcagaaacttgaatatctgtgggttttggtatcggtgggaggtcctggaaccaatcccccgtgcataccaagggatgcctgcattcacatggactaaaggttgctaccactgccccagcaggcatcagagccacatttcctacctgagaatgcaaaattcatgacaacaggagccaggatttccctagagtttgtaagagctcctggtactttatgggtgcttgatcattattggtggagtgaatgctttctaacctttcagccactgaatatgaatcacaaatggagtgaagacctgaataagatccttctttctcagtttctattgaatgggaagaggagagtggggagaatctgcattttaaactctcctaatttggggaagcaaaaaataatggttgagattggttatatagtcataaaaggaagctaaaatttagttattttcatatttattactattcttaattaatttatttattctttgaaaggaagtctcgctggaggctggagtgcagtggcacagtctcagctcactgcagcctctacctcttgggttcaagtgattctcctgcctcagcctcctgagtagctgggattacaggtgaccaccaccatgcttggctaatttttgtattttagtagagacggggtttcaccatgttggccacactgttctcaaactcctgacctcaagtgatctgcctgcctcagcctccgaaagtgctgagatgacagacgtgagccaccacacccagccctattctcaattttattcccaggtactgagtcttcttcataatctttgagttctttaagttctgcttcattttaaagtgtagatgcaagttcaataagttttcaaaataaaaaaaagaaagcaaatattaaaatagagcatgtaattttgaaataaattggaaaaggtgataagggccaaagcatgaattaaccccagtatgtgggagaggtaaggctagctttggaacaaagacaaaacatacaggtcagaaaaaacaagagccaacatttattggatgaatcacatgatttctcaacctatctaatttctatttcttacaagagtctacatgttatacattatatctcttcctcctccccatcttttaaaaaattattttatggctaaaagaacagaggcttaaaaaagttaactcacctaagatcacaaatcgtaaaatgctggatccaagattcaaacccaggtgtagccactaaaacgtgtttcgtgagtgcaggaactttcttcattttattttattttttcagtgctcaatccacagaatctagagtctcttgcctgataaatagtagatgtttaaaatacacttgtgaataaataaatggacatttaaaccctcgtccaccacacagtattacatatgtacattctcatcactaaatgacattaaataaagaagagtgaattttgactttaaaaataaaaggacattgtgaaaaatttatgaa

SEQ ID NO: 117 - DNA, 1254 bp, Homo Sapiens
gccttcgccagtgtgggagcctcgtctcactggagagtccgttcaggctctgtcactatttcccattggccaaacgctactggaagtggaaggctaagaagcccgatggtgcaatccatacacgtcagcctctggggccagagtgggatgaaaaaaggctcatgatggagcccgagttatatggcaggagatgatttccacggtctgtgaacactgaagatgagactggcttggggccacgtgccaaactgcacagccagtaagacctgcttccatcgacccacagcagctctgactttttttttttaacaatagagaagaaactaccacagggaagagagagaacaatggcattttgacaaatggaacaaagatagagtgtgactgacaattcaggtcagaaggaaaattaaagcacaggaagactgatgttggtcggcctccttgccaagaagcaaaaactcagggggaggcatccagccacatgcgaactggctcaacactggccattttgtttgagcaattttgttggatgttttctacaaaagagcactttttctcggacttcaaacattcttatatgcaggatcgacaccacacactgccatcatcccctggagtagtatccttgagacctgaggaggggaaaactggagggacgttgtgggactccattgagaaatgtggtcctttgtctccctggagatctttgaggacggttcagataaagttgctgccagtggaagcagctaggctcagaaacctccagttgccctttctagacttgtaatcctctgaaaaatggaaattaggaagcgttcatttatgaccttgaaaaaaatcgtttacaaaagtatattatatcactaaaatgagctggaaaaagggtttatgtgaaagttcatgtgagaaacacagctattagcacgcatgccattccccaccttgacctcagcaggaatgtgtaaattgtaacatatggaatgtaagccctgtcgagatgtttcataaatctgcctggcaatgagcatcacaaggccctgcatgagaacaggccccagaaatggagagacaaataaagaaacatcagaaatattaaaatgaggaccaaaaggagtcccagagatggggtttcaccgtgttagccaggatagtctcaatctcctgacctcatgatccgcctgccttggcctcccaaagtgctgggattacaggtgtgagccaccatgcccagccaaattttcaaataaataa

SEQ ID NO: 118 - DNA, 5435 bp, Homo Sapiens
atcaaaatctacttaaattctatagttaacagttacataagaatatatgcagagggaaaatgtcaatagttcttgtgaatgaaggaattatggatgtttttattttaattctactttgctgttttttttttcttttcagtgagcaatctgttatttttaaaatcacggtggggggaaacccataaagtttaaagagttaaagttaactgaatcgtaagcacttatataataactttttaaaagtcatttttattaccagagctcagaacattgtttggagtcctttgatctaccggttctcttaagtacgtgatttcgtgaagatagcaatggttatggcttttttgttctgttatttttattgtgtaacgtagtgtagtggttaagagcttggattttgcagtaacttggattctaatcctttaaaatggggctgatatacctgcctcatattcaatgaaatattgtgtgtacagcacttagtaattaatgaaactggtaattattagcttagttactgtaatgataatttgggaccataaacacatatcaccctacattttctttgcaactacaatttgtgaaggaaaatctcccactaactattggttatgttaatattcttcatagagttgggttcaagaagagaaatgttttataatgaagcatataactattttataaacaacattgtagttataaagaagcatgcctatagtgttattaaaaattttttgtacgactttctggagctacaagtaatgaacttgctttgagagggtccagacatactcatcctgaaccacattcctacaacatatgcccaacaacctgcaccagagtacttatatcttaaccaaaaagtttcacttcaatggtggtgcttcacaaaatcttcaaagtgctttcatgtgtattgcctcatttgagcttcaaataaccttataaatcgggcaggtagatgttagtttacagaggaggagacagctttggaatagtggtgacgtatctgaagaatagaaaaccggaatagtgctcgatgcctgaagtggtgcctggcgccagcagatgttcacttctgtcaaacaaggggaagtagtggtggagcctttattcaggcacgggtctcctcattcctaactccaagatgcagagggaaaacgaactgctcaattaagagttcttccatggacactttcttaagccttcacataaaataacaagaataatagatatttattgagtagatatttattgagttctttctattttccagcactcatctattaagtgcttttatgtattaactcatttaatccacacaacaaccttatgtgagaaataccatttttccttatttgattggtgaagaagcacacagagagggtaagcataatcaaatacaccagcataaccaaaatcacacatttagcgagtggcagggcctggatgggagtctgttcaactctctgctgtattgcctcttaaagtaggttttcttaaaacataaatctttcataactttatatatttatagtaacttaatccaaagaaccccaaaagtactagcaatgattgtttctgcaatttaaataaatccatttaattatacaactttgcattatatactgttattcagaccttggaacagtctataattgtttgtcaaaagattttatgtactactttttcttaatttcagatattatccagagtttttcttggcagatggatgtattaaaaaaatagctttccagtgttagttctcaacagtgctgtttcaaaagttgttttaaaagttctaacggttggtcttcaaaacgtaattaagaccttatcataaagagccttttgcacaggactatctcaaaccctaagaagctattcatatttaagaaaattttgttgtattaaatattagtccaagtgagctctggaaatacagtcttctgctttcttgtttcataaataacactggtatgcagacccctccccatgactcaaatattaatatatgcaattctgttacagtaaagttttcaccatggtcaacctattccagcattaggtactttttgttgttgttgttttgttttttttttttttttttgagatggagtctcactctgtcacccaggctggagtgcaagggtacaatctcagctcactgcaggctccacctaccgggttcaagtgatcctcctgcctcagcctcccaagtagctggcgctcaccactactggtgcccaccacaatgcccggctaatttttgtacttttagtagaaacagggtttctgttggccaggttggtctcgaactcctgacctcatgtgatgcgcctgccttggcctcccaaagtgctgggattacaggcgtgagccaccgtacccagcctagcattaggtactttgttttgttttgttttgtttttgttttttttgagatggagttttgctcttgttgcccaggctggagtgccatggcaacacagcctccacttcctgtgttcaagcaattctcctgcctcagcctcctgagtagctgggattacaggcgtctgccaccacgcttagctgattttttgtatttttagtggagatggggtttcgccatgcttgccaggctggtctcgaactcctgacctcaggtgatctgcctgccttggccttccaaagtgctgggattacaggcgtgagccgctgcgcccagcgcactaaatactattaaaaggaattaagcaaaatgctacgtaccaatgattatgattcatgatcacctaaacacagaatgcagacttaacttttcattcttagtgtgctaattaagtagtagtatggtgcagtaaggaattttgttaattttgttataaactccctctcctgaaatccgtaaggaaatgtgataataagaaagtgataatagtgtcatattttaaaagtagaatccactgttaagcaccaagattaccttttcttccccctgtggcacagtttatttaaatgaagtattagcaataatcatgtcactattttgtcctgaataattaagagtttgcttttttcccatgtctttgcaataggataatataaagaatagtattaaaagtcagaggctttactaatctacctatatgtattccatggctaacaaaccctggcccctttacatatgagctctggaggttcgcctggctgcctcaggcttgcagaaggctgccccaatcacagagcctgggtaaggtggaacaggaggcagccccactcggcttttctgattgcatcccacctgtttctgagtgtgttggtttggtttaattcttttcaagggttggagttggaaagtgaaaaccctagacacttgctgtggaatgtttgcctggttgtattggtgtgtccctcttcttcactggcatgtcgctttcaagtgtaccaaaggacattttgttctgttgaaagccacaggaccaaaaggaaaatattgcaactatttgcaaacatacttccctacctgtacaagcagccatatactaaaaagcactaaacaagcacaaatgaacactaaatagccttataccaaaaagcattcttgtaactgtcagggcatggtatgaattccttcctctttaagcagcaacttaccacaggcttggtggctttaagtaatatagcattaagcaaatggtcagttattttttaatgttgaaaacttccaagtgtgaataatacggacatagtttactaccttttgcttttaatatacctggttatctatttccatttgaaataaaatgaaaggagacctcaaactgatgctgagaagtagacaaaatcagctctcagacttaactctccccaattaaaatagtttttttttcccttcccatttttttgtttttaagagatagggtcttgctgtgttgcccaggctagagtgcagcagtgacatgatcatagctcactgcagcctggaactcctgggctcaggatccttctgcttcggcctcctgagtagctaagaccacaggtgtgtgccaccacacctggctaatttttttaaaattttttgtagagatggggacttgctatgttgcccagactggtctcgaactcctggcctcaagccaccaacctctcaaattgctagaattacaagcatgagccaccacacctggcctgttattccttctttatctaatgtgtgctaagcttgtgaaaaatatatgttgaggtaaatagggcaaaacattagttgataaattatgctaattaatgggaaaaatagacatgttcctctctgaacatttagaaggactctgccctacaactatcttctgtttttagaatttgtagtcactgttcttagtgccactggaaatatattcattctttgagcatgtacagggtgggctccctgttgtatttattacacttttcaaaatgccagcaagtttttgtttgtatagagttggaatgtattgttcgtgcatgcctgtgatattcatcatcaaaatatacctgtaaaaaataaactactgcttcctctccacagcttaggcctccctcttactaaaaacaatagtagtttctgtagaagtttcagtgagaaattatggttatataaataacagatatggcagaacaattttgttgtagtatttttttccgtagcatttcttaataatagctcagtttttaaaggaggggaacaataccccatgagttcaaattaattttctctactttgaggtataccttcctaattatattttacataggctgttttttttaagtttaaattctcactgttaagttgcattgagagacaattagaaatgttgtaattgtcatatctttacatgtggattatgaacaaatgaaagtttgctgtgtgattgcagttttaaattataacatttcataaatatgtcaattttagaaactcaaactctttcccatcttttgtatggataaagtttatggtttcatttctgagaatagagttggtctgctgtgctaacttcatgtttcttattccaaaggcttgattatatttttttctccagtgattaaaaatgcagcgaaaatccaatctacaagttcatatattggtatttctagacatagtctagttctaaaagaatgtacttggtgtgcatttttaagtgtttcatgtagacagattaatatatttttgtacaacattgtatttctacatttatttcaagactgtacttttcagtgactttttcaagtgcatgtgttaacagaagattgtttggaacgagagtgcagtggcttctttactagcaaagagaagtgtaatacaagtgatcatagaaggtgagaatgtgtttatactgtatatggaaacctaatgcctcttttctaaagctttgtacatttttttcgtgaaatagattaaatattttctctct

SEQ ID NO: 119 - DNA, 11132 bp, Homo Sapiens
cccctcaccgtggccttggccgtgagcaccaacgcctcctggttgatgctggacacctcgggggagctcttcatgatgacccggatgcgggatagaggcagcgagatgagccgctgctccccgcccttgtctttacccacgaccacgtccgccatcttcccgcccgtcgcgcgggtgcccgcagccggcgggcccgaccgcgaagtggctgccctgcccggccagctggtgggtacggggagccgcgcccgctgccccgtgggagttgtagtgtggggaggcgaggccgcgaggccgggagcggcccgtccgggaaactacgagctccgtgaggcctcgcgcccccgatctgcgcatgcgccgacgctcggacaccgcccccgagtgcgaggcccggcgcggaaccggcagccgagagcctggcgggggcggggcgcaccgcgccgctcccgggagtctccgggctgcggtcgcggaatacgactttgatccgcgggtgagggctctgtgaatgggcaagcaaagccctctgactccgggcctcgtggctgggtgctgtgtgttaagcgcctgcgctgtactaggaccgggcgtgccgccgtcggcaaaaagtgacgctttcttgaagcacaaagtccaggggggacgaccaagcggacagcggatgcgtcctgcgccggtagccaggcgaccggtggaagagcagagtccagcgcgggcgatgcggcggggccaggcttgctgcgccgcggggtgattgggagaagagccttcctgcggggtggaggacgaagagctgccctgaggaggtcccggagtctggtgggaacggcctcttcgggactgctccgagagacggtgtgcagagcctggcgtgctcgccgaggtctgacaggcagcccggggctaggtcctgttggatttttttttctaaggaaaatgggaagtggtggtagggtttgagcagtggagtcccgggcagttttaaaaggatccctgcagctgccggctgggagggcgtgggtgcgcgtaaggccggaatcacagagaccaggtagaagatgattacgagaacccaggaacgtggccctcaggaggccggcagtaccaaggggacagcagctgggaggagagaggcaggagatggtcaggggccagaccagggaaggccgcggagaccgcagaattcgctctgaatgagtggggaggcccttggaagagtaaggggtccaacttaacttttttttttttttttttttttgacacagagtctcgctctgtcgccaggctggagtgcagtgcgatctcggctcactgcaacctccaacaccccgattcaagcaattctcctgcctcagcctcctgagtagctgggattataggcacgcgccacccagctaattttttgtatttttagtagagacgggttttcaccatgttggccaggatggtctcgatctcctgacctcgtgatccgcccgcctcggcctaccagagtgctgcgattacaggcgtaagccaccgcgcctggccaccaacttaacttctgccaggatcatgggaagtggtagggtttggggtctgatttcaagagggagctgctgtggagtatcagcacagcttactgagatatcagaaaggccttggtaaagagccctttactgagacagggagcacattttggcagaggtttgaattggagcgtgttaagtgtagtgtcttcttcaccactgtgacgtgaggtcctggcgcaaataattgagcacagaaatacatgtcaggcattgctaggcacaagggtacagccagtgagcagggctgccatggtccctgccctcttagagctgaccttcaggtctgagggagactgaaaaataagtaagaatacctccagccgggcgctttggctcacgcctgtaatcccagcactttgggaggccaaggtgggtggatcacctgaggtcaagagttcgagaccagcccaaccaatatagtcaaaccccatctctactgaaattattaaaattagctgggcgtggtggtgggcacctgtaatgccagctactcgggaggctgaggcaggagaatcgctggaacccaggaggcagaggttacagtgatccgggatcgcgccactgcactccagcagcctgggcgacagagggagactccatctcaaaaaaaaaaaaaaaaaaaaaatacacctccaatgctgaaagctacgaaggaaacaaaaccatgtgcgagtgatagggcagcccctctgggaagtgacatttgtgcccagatctgaagaaagaaaaggagccactcatacagaaagactgagacaagatgagctttcgggacaagtcaggctctagggagaacacctgacgaggaaaatgcctgggcagtttgaggaactgaaaagccagtgtgtctggagcttagtgagggaggcagagagcacgggaggtgtggttaccaaggtaggtgggaccggctctggccctgggtaaaaagtttgactttcattccaagagtaatggaaaataatgaagaattttgaactcgaggtggtgcatgcctgtaatcccagcactttgggaggccgagggggggcagatctcctgaggtcaggagttcgagaccagcctgaccaacatggcgaaaccccgtctctactaaaaatacaaaaaattagccgggcatggtggcacgcgcctgtaatcccagctacttaggaggctgaggcaggagaatcgcttgaacccgggaggcggaggttgcagtgagccaagatcacgccacttgcactccagcctgggcaacaagagagaaactccatctcaaaaacaaacaaatccagaccagcctggctaacatggcaaaaccccctctctactaaaaatagaaaaattggctgggcatggtggtaagcacctgtaatctcagctgcattggcggctgaggcaggagaatcacttgaactcagaaggtggaggttgcagtgagcacagatcacaccactgcactccagcctgggcaacagagcaagactctcaaaaaaaaaaagttttgaagggagcagatccactttaaaagctcacactggttcttgagtgatgaccaaatggcactgtgccttatgcagagccgactcctggcagtttgcacaggctggaggtggagctgcagactccctctccctctcggccttgcctctgtaaatgggaaagccgttgacattcacaaaagaggggcagggaactgctacacaagagcagctacacaagagggtcctttggtccacacaggaaacaagccatagtgatgacatattttgaagctgttagatgttttgtttccctagctggctattatttttgtatggcttgtctttctcttttgagtatgtgtgagaacaggatggggatgagaagctcagcttgtagaattggcaggtgatgtttgcagtcattaatcatttgagaagtagagagagaagccaagcaggaaatcttcatactggaaaagaagtgctcaccattaaaaaaaaaaaaaaaaaaaatccagtgtggttcacagctgtaatcccatcacttggaggctgaggcaggagaaatacgtgaagccaggagtttgagaccagcctgggcaatataacaagacccacatctctacaaagagaaaaaaaatgtaaaaaaaagaagctttaaacctaagacggcagaattcaagactgttgtccttgagaacttcctggctctggaaaaagctcagtgagttagtctcatcctgtcgttagctctgttttttaggggctcactttgtcttcacgacagtaccttgcaccattctcatgggtatcccagggtggtgcaaggcagttttctgcacttcccagaatgccctgtcagctggcttctgggtaggttctgcaaattggaggcccctgtgaaagatcgctgtggggtgggaggaagaagctttatctgcctgctggctgcagggtagaggactgcagtggggttatagggatcaccacctgcacatgtggagctttgagcggcttcactctaagtttctgctcaacagtggcagccctggagtccttcgggggcgagtgtgggctcctgggctccaggccaggggcagtcccagcttcctgatctcgaggtagcgtctcctcccttttgctccatagcacctcgcccttctcagtgacgtgcctccttctcagtcatgcgcctccagctctaacaatgtccttgaaaacaattcttgaccatgcgccgtggctcacgcctgtaatcccaacactttgggagtctgaggcaggcggatcacttgaggtcaggagtttgagaccagcctggccaacatgtaatcccagctactccctccacttgatttgtgttccttgaagaaatttgcataatccctgtatctggttggcagatagcagagatgtagcctcagtctttcctttaaaaattttgctttaggcagggcgcggtggctcacacctataatcccagcacgttgggaggccaaggtgggcagatcatgagagcaggaatttgagatcggcctagccaatatggtgaaaccccgtctctactaaaaatataaaaattagctgggcgtggtggcacaagcctgtaatcccagctatttgggaggctgaggcaggagaatcgcttgaatccaggaggcagaggttgagatgagccgagatcacgctattgcactccagcctgggcaacagagggatactccatctcaaaaaaaattttttgctttagggccaatcgtggtgacacacgcttgtaattctggcactttgagaggccgaggcaggtggataatttgaggtcaggggttcgagagcagactggccatgatggtgaaatcccatctctactaaaaatacaaaaaaagccaggtatggtggcatacgcctgtaatcccagctactcgggaggctgaagcaggagaatcacttgaacccgggaggtttaggtggcattgagccgagattgcaccactgcactccagcctgggtgacagagcgagactccatctcaaaaaaaaaaaaaagggccggacgcggtggctcacgcctttaatcccagcactttggaaggccgaggcgggtggatcacctgaggtcaggagttcaagaccagcctggtcaacatggtgaaaccccgtctctactaaaaacattaaaaaattagccgggcatggtagtgggcgcctgtaataccagctactgaggaggctgaggcaggagaattgcttgaacccaggagacagaggttgcagtgacctgagattgtgccactacactccagcctgggcaacaaagcaagactctgtcttaaacaaacaaaaagcccagtgtggtggtgtatatttgtggtcctagctactttgaaggctgaggtgggaggattgcttgagtacaacatgtagaggctgcagtgagctgtgattgtgccactgcaccccagtgtgggtgacagagcaagaccctgtctcaaaataataaaattaacattcattaacaataatgttaatatatatgttaatgtatatgttaatcgtaatgtttatattttaccatgataaaaacattttaaaatcatatatcaactcttgccgttctcctgttgaaaactctccaatgacttcccactccatcatcctgtgggatgggtccaccatgctggaccacaaggctctgcacaatgcggctcccaccagcctctccccttggcccagattgcttcctcctacccctttctctagctgccaggccccccaacccccgcatggagcccttcagcagctctgtgagctccctgcctgttggcagccatcacagcaacgggctctggtgtgccccttgttatccctgtattcaggccattatctgtaatgacagcctggcataattttattttcacaatttgtataattatattctattgagctaaatgatcattataatcattattaaatatttattaagcacttctagctgtgcaaacataataagatgtggcctcagctcttaaaatctttcttcctaattccaacccaaattcatttcaacttaaccaatcttccttcttggagaaggagggaacttcggcgttttgtctgggtttccatgcccgagcttataggagcttcttagcaatgctgtggagcagatgctattgacttcagtttacagataaggaaacaatcagactgaggaagctagtattaataagtagcagagattaagatttgcctgtggttcttttttacacaaagcctctcccactcctttcatgcactgttagccaagtttactagaataggcaacttcctttttaaaaaatcctgtttacattttaggtgccaaacactgtgctaatccagtgggggaaacatatgctcaaaaagatcactctgagaccaggcatggtggctcatgcctgtaatcccaagcctttgggaggatgaggtctgaggactgcttgaggccaggagtttgagatgagcctgggcaacatagtaaggccccttctgtacaaaaaatttaaaaactagccaggcctggtggcatgtgactacaggctgcagtaagctatgatcgtgccactgcactccagcctgggtgacagaatgagaccctgtctctaaaaacaaaacaaaactcaagcagtatcctaagtcagggtccaagcagtaatggaaatgggtgaagctgacaggcgagtgatagagaatggaggggtctgtagcaaacgtgacgactctggcttacctaagagggcagccaattttgccatgaggcaatgtgggatcagtgagtgctgttccagtcttcaatttcgatttataagtaaaatctccaatattttatatgttggcaactttggcattcctttccttaaacctcactgccaccccgcaccccaattcatttcagtagggatcagatagccaacatccttataaaatcaaaagtatacaggccgggtgcagtggctcacacctataatcccagcactttgggaggccgaggcaggcggatcacgaggtcaggagatcgagaccatcctggctaacatggtgaaaccccgtctctactaaaaatacaaaaaaaaaattagccgggcgtggtggcaggcgcctgtagtcttagctacttgggaggctgaggcaggagaatgttgtgaacccgggaggcggagcttgcagtgagctgagatcacgccactgcactccagcctgggtgacagagcgagactccatatcccaaaagaaaaaaaaaaaaaagatacaaatcttaattggcataaaccagtcctagtaatatcatgccctttggccagtcgttggtcacagggtgagctaatgacccaactctgacaaattacatgtaagaggaatactgctaaaaagatattttcggccaggcgtgggggctcacacctgtaatcccagtactttgggaggccgaggcgggcagatcacttgaggtcaggagtttgagaccagccttggcaacatggtgaaaccccatttctactaaaaatacaaaaattagccgggcatgctggtgggtacctgtaatctcagctactcgggaggctgaggcacaagagtcacttgaacccaagaggcacaggttgcagtgaaccaagatcatgccacggcactccagcctgggcgatacagtgagactcagtctcaaaaaaaaaaaaaaaaaaaagagtatcttttcttcagtaaaaagacaaagctgtttgggtgcagtggctcacacctgtaaggagaattgcttgaacccaggaggtagaggttgtagtgagctgaaatcataccactgcactccagcctgggcgacagagcaagacactgtctcaaaaaaaaaaaaaaaaaaaaaagacaaagccttgagggctgaggaagaaatgtggaaactgccctttccctttgttcttgtctaatgcagtcacaaagtctggagcagtagcagccatttttcaaccatgaggcagtaagcatgaagcctaaaaccagcatgccaagaaggacaaagcagaaagactgaaatctctaaggcccttgcagacacccttactgcatcagttccagacttggctcccatagctccagatgtggccatggccactgtatatgtaagcttgatggaataagcactaatgcggcaccttagagctgctggaaaagagaccaatggacatgtacgaatgggggatcctgccatttgccgagtaaaggcctcctgtgtagaaggtgtcctttgataagcattcacatggaatacaaatctccactcatctctccccaatccaaaaggttcatccacaccccctctccagaccttcttgtctttctgtctccaaacatgttctttccaagtttctgaaccttcaaagtgttagtgactgtccgtgaactggagtagacccaacccttctggctttcttgcttgctttttttttttttttttttttgagatggagttttgttcttgttgctcaggctggagtgcaatggcgcgatctcggctcaccacaacctccgcctcccgagttcaagcaattctcctgcctcagcctcctgaatagctgggatcacaggcgtgcgccaccacgcccggctaattttgtatttttagtagagacggggtttctccatgttggtcaggctggtctcaaactcctgacctcaggtgatccacctgcctcggcctcccaaagtgctgggattacaggtgtgagccaccgcacccagcccacttccctgttgattctgtctctctggaagaaccctcactaataaactttacttgaccttcaaaataataatgctcaaaagacaccctcatttggggtgccagagtctggcatttgttctctaccagtgcctggtagcaaatctgaagctgtgtaatgcttaaatggagaatagtcattttcagaggagggtatatctttgctctaaaccccttggagtctgtgctgtgacttttattttttatttttttttttgagacagagtcttgctcttgttgcccaggctggagtgcaatggcgtgatctcggctcactgcaacctccgcctcttgggttcaagtggttctcctgccccagcctcctgagtagctgggattataggcacccaccaccacacgcagctaattttttgtattttttagtaaagactttaaagacatttcaatttcaccatgctggccaggctggtcttcaactcctgaccttaggtgatccaccgcaccttggcctcccaaagtgctgggattacaggagtgagccactgcacccagcctgtgctgtgactcttatactggtccctgccagaacttacaggagcatgacctgtcacggacaacctgagcaccactggatctgcagggttatctgtcaaatgggtcggagcagcatactcaaatgtggtcgctattatctctaaaagtcaaggaaagccagcagtgcaggacactcaaatccagacgtcattccactagctaagctaagcaaacagttggagctatcccagctgtcgaagctaacacgctgcatttagactctcttgcaagtcagctgtgttggtaactagaggctctggattgacacattagaatccactcccatacattccccaggttttggctggtaaaaattgattgatatcccataattccttcagcatgtgaacttctcccaaatcaggtgttttgttttgttttgttttgttttgttttgttttgttttgttttgttttgtttggagacagagtctcactcagtagcccaggctggaatcgcaccattgcacttcagcctgggtgacaagagcaaaactccatctcaaaaacaaaaaaagaatgacgccttagtttggggttagagcaaatggtgctgcctatttctgggatggggaagacaagaaggaatagagttggggacagaggtatcaagagttatttgagggcacagaagtccaagatggctataagacagtcaggtgggaaggtcagtggaggctcaggggggacatgcaggctgggatagaaatgtgagcatccccagataggtggcctgtagggccatgagcctggtagggtgactgagcgaggagaatagccggagaaggggaggtccaaggacccagacccacctggttatttcacatttggggccagactggctttgtttaccattgatctgagcatgaaaatcaagtgaaaatcaaaaggaagccaggagccacgcctcctccgtgactgcggatcctgggccaatgtttcgctgctgcagtgagacccctgactttgtgtgggcagtgggaccaactgggcatgtgcagtgatcagttgctaaatattggcactctcattagccttgggatctggaaacctccatccaccagacacagcccatttccagctcacccgctctccacactaggactctgaacaccctttcttcatgcctcttctccttcctaactgcctgcctgctccagcaggcctcaggccacttcttttttgtgtgccaccacacccagtggtgtatttaaaataacaaaagctggaggaacatggtggcacctacctataatcccaacactttgggagtctgaggcaggaggatcacttaagcccagaagttcaagaccagcctgggaaacatgttgagacctcaactctaaaaagtttttaaaattagccagatgtggccagcatcatcctgataccaaagccgggcagagacacaaccaaacaagagaactttagaccaatatccttgatgaacattgatgcaaaaatcctcaataaaatactggcaaacagaatccagcagcacatcaaaagcttatccactatgatcaagtgggcttcatccctgggatgcaaggctggttcaatatatgcaaatcaataaatgtaatccagaatataaacagaaccaaagacaaaaaccacatgattatctcaatagatgcagaaaaggcctttgacaaaattcaacaacccttcatgctaaaaactctcaataaattaggtattgatgggacgtatctcaaaataataag

SEQ ID NO: 120 - DNA, 5134 bp, Homo Sapiens
attattacttcgctaaaggatgcatgatcacaaatatttgtaatgaagatagtgactccttttttctcaaaataattttaaattaacttaaacatgcctgattttcagaaagaaagtattaaaagtaaaaccatacctttaatttaggactgacttctgcatttcaactgtagattattctagtatgaagagtgctatttgcatgttggaatgaatatcttttaattcttaatttgtaagttacaaagaaataggagactgaaatactttttatcttacaaaattccaaacaccttttcaagcaatttatatcttatttctgtaatagttttatcaccagccaatgggtatgcactgtatgtcataatatggaaagaaattctttattatttcagatattaaggatttcagattttaaaagagttatcagtgaaaccatgttacaagaatatttccttcctgagacatctcagtattataggtggcttcagactcacaggcacagaatacgatagtgggaagcatctgattcgctttactctacttggtacctttaggacgttcagccagaggtgattggagggatttgcacgtctaccactcgtgtgtgtatctgtgaaccatatctcctttagtgcctgcttttgaacgttatataaacagaatgatgctgcctgtttatttctataattttcttcttttccttagcatgtgctgttcttggcagcttgcttctccatgtgaattttggaaaagcttctgaagttccctttagtaaacaccaagagaactattgctgggtcgtatcgtagttgcatgttcagttctctaaggcactaccaatctgttttcttttcttttttgtttttttttgagacagggtctcactctgtcacctaggctgaagtgcagtggtgtgatcatggctcactgcagctttgaccttcctgggatcaggtgatcctctcagctcagcctcccgagtagctaggactataggcatgcaccaccacgcccatctaatttattgtatttttagtagagaccatggatttcgccatgcttcccaggctagtcttgaactcctggggtcaagtgatcctccctcctcggcctccaagtgctgggattacaggtatgagccactgcatccagcccaacctgttttctagagtgactgttttatagttttaaagtccctcatccattttgagctatgtttttggtgtaatttatgtggtttaggtcaatgtccagttgctccagcaccatttgttgtaattgtgtaaaaaatcagatgagcatttttttgttgctctatttctgggttctctattctgctccaatcatctttgcatccatgcctctgccaatataatatggtctaatgactacagctattattgtaagccttaaggaaaaaataaaacagtccctattttcagatggcaagatggtttacacagaaaaccccaaggtatctccaaaaaagagctcctagaactggtaagtgagttcagcaaggttgctggattcaagagtaatacacaaatgtcaatcacattttgcatattaacgatgaacatatggaaagcaaaatttaaaacacaatgtcatttataattaattgctccaaataaaatgaaatgcctagaatatacacttaataaaacatgaatagaatttgtatgttgaaaattacaaaatgctgatgaaagaaatcaaagaagaactaaataaatggagagacatactgtacttatgaattggaagattcagtatagtaaagatgtcatttctccccaacttgataatagttgtaatgaaattgaattaatgaatcaaatagagtgatttctcccactttcttcttcttcatccagattgttttagctattcttgggcctgcgcttttttcatataaattttacaataaacttacctttgtctataaaaaaaccttgttgggattttgataggaatttcattacatctgtagatcaatttgggaagaaatgacatgcttactatactgaatcttccaattcatgaattagtatgtctctccatttatataggtcatttcttataggttgattataggtatataggttgatttcttttgtcagcatttttttattttgttgtgttatgtccatgggttttagttgtaaaggagaggacctgggggaaaaggagctacttcatcttggtggaattggaagtcctattacagttgtctcctcttatccatgcttttgcttggaaagttagtttcagttacttgtggtcaacagtggtctgaaaatattaaatggaaaattccataaataaagaattcataagttttaaattttgcactgttctgagtagcatgatgaaatcttgcccctttctgctccatcccacccaggacgtgaatcatttctttatccagcatatctactcagcatatgctgcctgaccactagttacttggtagtcctcttggttatcagaccaaaaaactagtatatatagcgtttggtactatgtgtggtttcaggcatcctctgggggtcttggaatgtatctcttgcaggtaaggaggactctctattggcttttgaactcttcaaggtcagagattttgtctgctttttttctgcaacatgaagtctagcatgctgtctgtcacagtagatggtttaatacatgtcggattaataaacaagtaattgatatttgttgagaaaataattttgtgttggatgcagagaatatgtatgaggtattttttctacccttagagaacaaactatatgactgtgaaaacttaatgtgaaacttacacgtttagttttgtgtaatgtggttttgtttagtgggtattagaatgaaatttgaaatccagtggtcctggatatgaatctggcctccattaatttactagctatatgaccttgggaaagttccttaacttctctgacactaggattttctcatttaaaaaattgggtgctggctgtagtcacctgtcagggtttttataaggttaaatggtataatacatgaaaagtacttgactctgtgcttgacatgtaggaagccctcaaaactggtagtgactaaagaaaatgataagcagcattacagcacaggtaagtgataactgggttacacaaagtataacaggaacgcctatggaaacctaaagttgtagggaaagactttatggaggaagcaggacttgatctagcccttaaaaaagaacaacgctagctgggcacagtggctcatgcctgtaatcccagcactctgggaggccgaggtgggcggatcacctgaggtcgggcgttcgagaccagcctgaccaacatggagaaaccctgtctctactaaaaatacaaaatcagccgggtacagtggcacatgcctgtaatcccagctactcgggaggctgaggcaggagaatcgcttgaaaccaggaggtggaggttgtggtgagtcgagatcgtgccattgcactccaacctgggcaacaagagtgaaactccatctcaaaaaaaacaaaacaaaacaacaatgcttagacaagcttcgaggtgagagtgagtgaacatggttatggcattccaaagagacaagacataatgagctatggttaggaagctgcaatgtgtatggcaggctcgcaaaacaaaaagattacttggatgatccaagaaatcttgtacagaagtaatagcaataaggtagactagatgtcctgaaaatcattcctctacaaaatccctaaaaatgcttattttttaaagactttatagttacattttcaaaaagtaagggaaatcctcaaattccaaaaaagtacttaaaagcatgaattcaagcatcagagttaaactacatagcagaccaaataggcctaagcgacatttacagaccatttcacccaaatgctgcagaatacacgttattttcatcaggacatggaacattctccagaacagatcatatcttaggccatgtgacaagtctcaacagattttttaaaaatataaatcatatcaagtgtcttttctaacaaaaatggaataaaactagaaatcagtagcaagaagaaccttgaaaaccacaaaacacatggaaactaaacaacatgctcttgaacaacctatgggtgagaaaagaaataaagaagaaaattaaaaaatttattgaactacatcacaaaggaaatacaacataccaaatctattgaatatagcaaaagcagtactaagagggaagtttatagcaataaatatctatatcaaaaaagtagaaagactttaaataaacaacctaaaatgtgccataaggaactagaaaaaaagaaaaaaccaaaccctaaattagtagaaggaaataaataataaagatcagagcagaaatatatgaaactgagacttaaaaatacagatcaataaaatgaaaagttggttttttgaaaaaataaacaaaatcaacaaacccttagctagattaagaaaaaaagagagaagacccaaataaaattagaaacaaagaaggagacacaactgagaccacagaaatagaatcattagagactgttatgaacaactacatgccaacaaatttttaaaaattctagggaacttagaaaaatggataaattcctggacacatacaacttaccaaaattgaacaatgaagaaatagaaaacatccacaaaccaataatgaatcaggagatcaaagccgtaataaaatgtctctcatcaaagaaaagcccaggacctgatgactttagtgctgaattctaaaccaaactctaaccaaactcctaaaaaaaaaaaaaaaaaaaaaaaaaaaaaaaaaaaattggacaggagggaataactgcaaactcactctgtaaggtcaacattaccctgataccaaaaccagaccaaaaaagaaaactacaagccaatatcactgatgaacatggttgggaaatcctcaacaaaccaaagcaatcctgggcaaaaagaacaaaggaagcatcacactacctccgttaaaatggcttttatcaaaagggcagggaataacagatgctggtgaggatgcagagaaaggtgaacctttgtaccctgttggtgggaat

SEQ ID NO: 121 - DNA, 1835 bp, Homo Sapiens
gtgtatgctgcgaattaatacgtgaatgaacaaatgactacaggcattatccgaatgatatgatcttccttccccatctttctgggtgtcggccttcattcaccatgaagttgtaaacacaacattgattttggagtcagacaacctaagttcaaatctagcctttgctaattactggctgaaatcattgagaaatctacttaacctgcctgagacctcagtttccttatttgtaaatggaatagtagtgcctcaagtgagataaggaagaaggatgcctggagtgggataaagaaaatatagaaaaggaagggagtgtcttcacatcccagcagggcacatggaggaggaggaggaggtgctgactatggacagcaagaagcaacatcaccatcacaaaacacccacccagggcaggggccctttcaacaaggagcataagagactgtttctgcctctgatggaagcccagcattttgtttttctccacatattttaatcaatatttaccaagccataacaatctggctttcactgtcaccctagggttgagtttcatgagtaactaccttttccactggctgcagaaataatgactccatgtatgattggcagaaggtcattcatttgagcataggaaaacaagcagtttcaagaaaagagctggcatctctgcatgagtgaatcagtgcacatctaaaatgcagttactgaaattatagaagcctctcctcggccaattggcctcctttggaagatatggcctcacaccattccatgtgcatgtgaaatgtctagacgtgattatagagttttcttgagagctgatgcatccaaggaacatttaaagtaagaagcaaagtaatgaaaaacgtttctcagaaaataaaaattgttaatatggtcttaccacattttctaatgaaagcatgttgtgaatgctcaggaagaagaaggtacagtaatgggactagaaatctgcagcttggatgggagcccagtcaccaattaccaagtgctacaagcctgaggctacttctcattgaaagggcctcccaggcattgagggtgtccacagttcagtgagacctcagaagcctgcacgtagttcatgctcagttcttaggataatcctgtctctccacaattccttcaggcttgcaacactctcttaccccaaatcagctcttcccctacatttcccctttctatcaatggcactagaattctcccaaattgatcaatgtcaacatctcattgtttactcacccttcatgtactcacctcccattataatgtctagattacagatagcctttattttacctcacggcatgtccagaaagaatctgtcttaactacctacttacaccaaggcatcagcaattcatttatttattcattcatctgttattgtatgaagtattggctaagagatctatagtgaagtggggagagatagtcatttaaagtaactgtcatataagaatgagtaagcattcacaccgttgcttccaccagaactcacactttcttccttatatttttccatctttaaacacaagttaggagacactacctcctggaagcctcccctgaatccaccctcagctgactaaaatgtctctccaatgggcttttacaagtgcatatctagttcattgcactgaaatttcactgattagctattcatgtgcctgcctgctccccccaattagactgtcctattcaaaaacagggactgtgtcatattcatctctgtattcctgatacttaacatagagcccagctcattgtgtgcattgcatatttttaaatgaacacatgaatgaatg

SEQ ID NO: 122 - DNA, 1919 bp, Homo Sapiens
tggcgtatggaccaccttggtgtctccagcacccacctcaggctttcatgcatagtaggcacccggggtagggttgtagcctatatttgctcacattaaaaaattagagaccagcaagatatatgcaagttgccgcctctaacctcgccaccccatggagtttctttttagcagttgttgaccaagtgtcagcagaggttgcattggggtgttggtgttcaggagcccgagccagtcggggctcaccatggtggcagcaggctttatgacttggtcttttcctctttccttttcctctcaggtcatggtcaccccgctgctggctaactgcagctacttctgccagccagtggactacagatggagaaagcatggaatgagggtatggcagggagcaggaagcaagcctggagagggttaggaggaacaacttcataacaatcggaggtcaaggaggtatcacctgagccttttgatgagaggcaggggactagctagttttggagtcagataacatcaatttggatctcagctctgccagttacttgctgtgtgactctgggtggcacacctaactcttctgggactcaattttcttatctataagattgagataataatacctattttataaagcgaaatgattgaaggaagacggaatcagataatatatgatagataatatatgaaagtgtttagcacaggggccggcacacactgagcggtagctaggtggtagtgatttcatcactgttagctgttctctgtttcaactggaagcagaacaaaagactctagctgaagcctgtctccaggtagctaaggcttctcaccagctgatatggatgttgagtcactggatgttggtgatgggctcatgtcctgtgactcaaagtatgatccttgggccagcagcatcatttgggagcttgttggaaatgcagaatctgtgctccaccccaggcacactgattaagaatcttcttttcaacgaacaagatgcccacatgctcattagattccaaggttctgggctggggcacatttggagagtccttctgtggtcactccagtagcttctccccttctttcctgtgcgaacaggcatcttcctggagacaggaaggtaggcactgtggaatcagcggtgcgtagaacagtgaggatttggggctgaacccagcccaggtgggccaagccgtggcaccagccggactgcagtctgatggaacttccccttcctgcccagcagatggcgagcgtgtgctgctggtgcctctttccaaaggacgttgaattgcttgacaggtgttctttactttatgaatgaagccagagcagcccaccttcctgcatctctaccaccatggcaccatgccctgtgatgggtgggctggagtcaaatatgtagcaggcagccagggtcagtttgtggccactgctgccccctcttcctacagtctcctcactgagtgccccttccctgttgggttcaacacatctgtgctcctgtaagccctcagcctcctcgttctcttcctcaacttctaccaccagacacatctgagaagcaagcaagagaggctgaactaggagcaggacccagggactgaaaccagcacagcatccccacagagaattgggtggaaggcagcatggcttccagcttactggtgctgagcagattgctctgggtctccattgtatcctctgaaggaaggaggaggattgccttctgtccagatctcaggatcaaacaaataggtccaatttcctgtgctcacttcagttagagcacttctcatgtgactttgtagctttgtgtgcatctccttcctctactagacctaagcccctcacgggagggactctcttattcttgatgttccccacacctggaatttcaataaacatctcaa

SEQ ID NO: 123 - DNA, 2338 bp, Homo Sapiens
tgacttcctgagtgtctgcttccacccctataaccacaacctggattttgtgtataccattctcatgaatcaattttgctatgcatgtgtcccttagaacctgtgagtgtagtgaatttcataaataattttagaacattgccagtcatgcatccctgggataaaactaacttgatcatattgtattttataggagtctcatgtatatgttcactgaatcaagtttatcatactattcaaatatggttaaaaacatgtgttgacttgagctactaactactgagagagggatgtcaaaaatttcccagtgtgttgtgtctttgtcaatttatccttgttggtctgtcaaatttcactttatatattttgagactatattattaggtatattaatgtttataatgattatctctttctagtaaattgaagattttaccattatatcttgattattttcatctttaaaaaacataaatattaatgtagctataccagcttggttatggttattttacctggcaaatatctttttccattcttttattttttaccttttcatgtcctttgacttcaatgtagctcttgcaggcagaatatgtattgatttttccttgtttaattgaggtataatgagttttaaaatttaatgtgataattctatcttgtaactagaacttggtaattttatgttgtgattgtagatatttacatagaataatttctccagtgatatttatattataaagcacatttaccatgtgctttatagttaccttgcttttactattttcatttttttaagtttatagtttttttaaagaaactgatttgttatgaaaaaacatttatctagagttgtttttctatcaattgcactttagtattttcttctatcagatccaaataacattaaatgttttgataaatacttgtgtgtacatatatgtatccacactatttatatctttttttcttacaatgaacatattttacttctgtattctaaaaattgtttggagatagtttaatatatagatgaacaaataaataatacttacatggaaattatgttattgttacaaccaggtggacttaccaacagccatacagtggaagtggtctgaaggcatggcagaatatccccaacctgcctcgcctaaatatttttacctatgatgagcaaatagctgccaagcaagaatggatgctggcaagactgtctgagctgagcctctatggtagggttgccagatttagcaaataaaattatcatatgggatatacttaaaaattttgcattgtttatccaagttatatatagttaaatataactgggtgtactgcattttatttgaccctaccctatgggtaagaccccattcatttcactggagagtgccaggaagcaaggtggctcttccttgcaagtccctgacctctcttgctgaatgtgcctgagaagggttagaaatgcgtgctctccttttagacacccagctcatcattccttttttgcaagcactttctcagggcctctttcagcatttaatctagggaatgagggcactgttgccatgtggttttcaaactaatagagctgacatcctagaactcccacctggtcccttgccaacattgtcacacaacccgccctgccccttcagtacagctctgactgggaaaagcatgggctctgaccctaactggcttttggcgttgaggtctagaactatcatttacctgctgtgtaacattaaccaattcactgagtttctctgaaacttctatgcctcatttataaaatgggactattaaaagtaattcctttgaaccagaccttattctataagaaaccattcaaactaatggggggaaaaatgcaaacttcatatttgaaccagatcttacccttttagagccataaagattaaaggacaaaaactgtgtctgctcaagctacaaacttcttttgcagcagaactagggactaataagccagattacaacactcgcatgcagtggaatgctatgcaggcattaaaaatgagcatgtttcttaatcctcgtgattataagagctagactttattttagtgagaaaagaaagatgggaaacagtatgtataacatgctaccttttgtataagaaagggagaatataaaagtatttttaattgcttattttacataaacaatacacaagaacttaataaaagggattacccctggtgtgaggatgggagttgttgctagcaaaatgtagtggtttagggcaggtctggaaattagatttttcactatataccattttgtatcgttttgattttagaaccatgtg

SEQ ID NO: 124 - DNA, 4313 bp, Homo Sapiens
gttaaagaagttgtcttatatacatagaaatggtataataagctactttaaacaaccctggatatgtttcttttcccttcctgtcactgtcctctttcttcccttttcccttttgattaagaagttccatcagaaaagtcataaaatctaactcctgtttattctcgagctatcagctaaaatgtcactttctcaggaaatcctgcctgacccccctttcccctttgttctggcacccattcccctggcctttaaatgctttcatagcagtgtgtacctatctatcattttttacagtttgtaattacggctttttttttttttttttttttgagatggagtctcgctttgtcgcccaggctggagtgcgtggtgcgatcttggcttactacaacctctgcctcccaggttcaagcaattttcctgcctcagcccccccaagtagctgggactacaggtgcgcaccaccacgcctggctaatttttgtatttttagtagaggcggagtttcatcatgttggccaggctggtctcaaactcctgacctcaggtgacccacctgccttggcctcccaaagtgctgggattacaggcgtgagccaccgtgcccggcttcctgtaattatgtattaaaatgtataattacttgattaatagctatcttcccaactagaccaaaaactccatagaatgtatggaattttcctccatcatccttgtagtccaagcataatatttattaaatgagtaaatgagtgaattaactagccattttgattaattttctctttttagtgcagttttggtttaggactgtaaggagtcatactggccatattcagaatgtcacattagtgttttaagtccattctgtatttttttcaatgagtttcagcaaaatctgagagtgtcttaagtgaaattggttatatctagggtggaggtattatatttggaaagacttgtaacagtagaaagctttttatttaaatctttgagttttaaaatatttttattatgaagttatttatgattttataggtaatatttttaatgagaccttgaaaaatttatagagtgcagtttattacagaatctgagttgcctaatagtttttaatagtttttgagtatcagtattttgattaattttaagttagggatcatttcctctaattctttgaacataattatttgttggttgatttttttttttaatgtaacagtgtttttgagatgtaatttatgtaccatacggttcttctactttagggtattagattcatggattttttgtacattcacagatgtgaccgtcattgcagtcaattttagaacattttcataatctcaaaaggaaaactgtagcctttggctattatccacttattcttccatccctgagcaaccactaaactacttttggtgtgtatagatttgcctatttaagacattttctataaatggaatcatataatttatggccttttgtgattggcttccatttaggatgttgttttcaaagtttatattgtatcatgtatcagtactacatccttcttattgctggtaagtattctgttgtatcgatataccacattatgtttagccgtttattagtacagtggtccccaacctttttggcaccaaggactgactttgtgcaaggcagtttttccatggatggggtgtgatgggggaggatggtttcagaatgaaattgttccatttcagatcatcaggcattagattcttataaggaacaaaaccaaaacagcaacaacaacagtgattctcataaggagcacccaacctagatcccttgcatgtgcagttcatagtaggttggtgctcctatgagagtctaatgcctatgctgatctgacaggaggcagagctcaggcagtaatgcttgctaacccaccgccactcacctcctgctgtgcatctcagttccttacaggaaccagtactggtctgtggcctgggggtttgggatccctgcattagttgatagacatttggattatatccacttattggctattatgaataatgctgctataataaacattcatacaagttttttgtggacatggtttcatttcttgggtatatgtccagcagtggaatttctgggtcatttgctaactatgatttcgttattggagaaactgccagattttttgttgatttttttttttttctgttattatgtagtgtcaagaaaccgtttaatgcatatgaattgaagccctgtaaggaaagtgatcatttgggattagatcgcaaattgcttgacttcaaatgtattactttgagaattttctgtgacagtttagctagtcctttatcttccttatttttcttgagaatacatgaattagctccctgccttcatatttgaagatacatacctatcagtgtacagacatgtacacacataggtacacatataatactttgctaagcagtttgtgctggggacaatagttgaaactcggtgttttttcctaaaatttatatcgtttgtttatatatgaaatatcaaatgggagatatttttggaagcagtgaaacttgtttatgaattctttccttacacaaaagaagacaggttttttaaaaacaaattaatctttttctctttgtttctttcagcattgatgactgggaagtgagagacatagatttttgaaaagctgaaaataacttctagtttaacaaaatagtttcttccagagcttagaatttcagatgattggaaaattcatacatctaggtctgaaagtttaagtctttcgcatctatggagatctctattttctacaacctaaaatgctatgatgggtgacaggttaaagacaaacctttttaaaaaatgtatatttttattgctatatagtggtattatggcttttgaaattcctatttttaccataaacagattattaggtgcttactgattccagataatagcctaatctattagaaggtagaagagagaatctctggtgatacactgtccatacatggttcaataggaggtagcaaaggctaagtatgagtaagtgacaaaagcagtaaatgctgcagaactgaaattcagagaattgcgcttccactgttgggtaaggcttaaggggagactttgaaagaggaagatgagctatgccttcctttgggtactgatttaatttcttttgccatttttttgcatttcttgaatgtaggaatttatccttacccatgtgcatattcatcagctccaatttaggagattgactagtgtagcacgtcataaccagaaagatacttggaggtagacttttccctaaagtttatacaagacacttaatgggctgggtccttgatcatgtacttctttcttagactttgtgtatatgaagtggtgttcttatccttatttctttccacattcaccctttttaatgcttttagtaagtcttttcagtttttgttaagatttattttatagttacactattgtatttattgaaggtagcttggctgatactgttccaaagtcacttgccactttcctctctgcataattaacatttattctcctcattatttgtcaatgaattcccttctgtttatttatagtttctttatgattctgcatatcagaagataacaagcacttatcacaaatgcatttaggggatgtactactctgtaaaaaatttaaatatattgaaaatagaactctttgaattttattttactcttttgaggaaatgaagatatcttgattttttttatggtattctaacctgcttttccggggcatacagggcagcacttatttttatataaatctgagaatgtgtgaattgcaaattaatcttctggcagatatctaatgctgttgatagagatgtgttgccctaagatttattggatttaatgagacagtcttttgatatatccttgaattatgatgggatattgggttgccacatgtaagttttagaatattttttaatgatatagagaaaatgcttcagatacaatggcatgtaaaagagaaaacagcaaaaaaaccctgattttaaaacggtttgattcaatttatattttaaaaacacagacacatgatttgtatgcctgtgtatatagaaaagattgcaaggatatttaccaaaatattaagtgattatctctgggttgtagtaattggggtgatttttattttttaagtgccttttctttgggtattgcctgaaatgttaaatattatctcattttagcaaataataaatactacttttaactaagaaaaaatag

SEQ ID NO: 125 - DNA, 10342 bp, Homo Sapiens
gttctccagccgaggctcgggactgctgcagggtggaaaatgaaagttctgagagcaccttccgcccctccgcttctgcacagccggggctgcggtgcgaggagcttggccgcggggcccgaacgaggcgaaggggccggggcccttggggaacccccttctctcttccactctcccttaggtaaaacccgtgttcctctcacgctcgacccagcgcctttccagctgcggtcgatttgcttctccgcgtgtaagtacagccaccctcaaggtcattgaaaaagtttgctttaaatgagcgtctgcggaactcgtcctgaggctctcactgttacagattagagatgggggcgctttctagtggaggattttgcttttgctcttctacttttgcaagaagctttttgtcctgaaaagtggacagtcatctccatttatagcttggaatgaaaatttgactatggaagttgcagtcgctacttgagaaatatttcctccttctttttttttttttttttttatttttgacacggagttttgctgttgttgcccaagctggagagcagtgcgcgatctcggctcactgcaacctccgccttccggtttcaagcgattctcctgcctcagcctcccgagtaggcgggattacaggtatgtgccaccatgcccggctaatttttgtatttttagtagacacggggtttcaccatgttggccaggctggtctcgaactcctgacctcgtgatccacccgcttcggcctcccaggtcctccttccgttttaaaggataaaccttgaaatgcttttaaaatatgcagcgtgtagaatttggttagttggttggttggggttttttagagaaaatgagaggtagaatggactctaagttaaaccctgggggacagtgtcactctggccgctggcctggctgggaaaggcgatgagaccctgagcaggttaaaacccgtgtcctgaaggtgtcctgtaaagggaaataggcccgttgcctccttcgtaggtgccctgagactccgacaaggcaggaatgccaaggtatttcgtacctgctcagccctggcatgtcaggttgctgagaccgagcagtgtggggctgaggtggaagcggaccttctggggcgtggaaagcgcaccaggagaccccggctccttctcagccagcactgcctcatcctcagaacaaatttaagtcaattcagcatttattcaatgcctgttgcatgcaagtgacaacctaaataacagagaggatctctaaaagaaacagatatttattttgcaatagagctttgcagtagaaatatgcatgccatggtaaacttgtgcatattcagagaggcaaggaaagcaaaggctttaaaaaaaatgaggcggattgcacaattgtttgaaaataattatctgtggctacaaagatccataacgaaggcgatgccagttcaaagtaggacagccagtggctgggccatgtccttgcaggactagttttttgtgggagattgcagtggcctttgtgcaaggttgcggtttttccagagagtcctttttgttatcaggcatgcacgcgcaagaaccctctcttcatggccttccccggctctgtttgtcagggttttcttaacattagcggctccatttcgattctgacaattttcacacaagctacagtgcctggcctgggacgacacaaacatgagtcaggtttggtgcctgttggccaggcgcagtggcacacacctgtaatcccaccactctgagaggccgaggcagatggatcctttgagcccaggagttcaagattagcctggcaacatagggagacccccgtctctatgaaaattacagaaaaaatttgccatgcatggtggtgtgcacctaccccagtgactggcacctggaattcaccgagcaagttggttgaaaaagttaaaggaattttccagcactttgaaaactaaaccaagagaatgtctccatatcaaatttcagccactccttataaaaatgtcttaaaggctgtaaatcaccgtattcacctgcaggaagcagtgttgaggaaggaggtagtatagggttaagggtctatttaaaccagctgcttagggccaagttagatgtttattctgtctagtttaaaccactggcttaacagggtacttaattttccagtttcatcaaagaaatgtgctgtgaggccaagaaaattatgtagttcatttttttaaaagagatgcaaactgagaaattctgtgaccattaacagtctcattaaagaaataagaaaatatgattgtttctcttagattttgcaaaatggctaaggagcatttttagacactttgttgtagaacaactctcttttaagctactttcctcctttcttaaaaacaaaatataggccgggtgtggtggctcacacttgcaatcccagcactttgggaggctgaggcagatggatcacctgaggtcaggagttcgagaccagcctggccaacatggtgaaaccccatctctactaaaagtacaaaaattagctgggcgtgatggtaggcacctgtaatcccagctacttgggaggctgaggcacgagaatcgcttgaatccaggaggcagaggttacagtgagccgaggtcatgccactgcactccagcctggtggtcagagcgagactttggctcaaaaaaaaaaaaaatgtattatccatttattatgtactcattcagcagataggagcaaaagcgcccattctactcttaagtcccaacccagaaatagagcagtgagggaaactgacagcatcctgggcctcagcacctgctgggagaaagagccaacaaaatacacagcaacacacaggatatagcacccttggtgttgattaaacgctagatgaagaaaagggaggaggagacgggaggaatgcaggctgaggcggtggcagggggctccattttaaacaggatgtcgacaaagatagaatttcagcgagtgctagaatgaggtaaggacttacatcaacaatctgcccgcaccatttcttcttagatttcagaaactgttttcgtttgattcaatactggtgccttccttcggttcattttctgtttatcataaaaattatcctaggtcttcaaaactaatttaatggaattgtatagaaatggaaataaaagtgactacaagcttcaaaaaggtagattttgggtataaagacaatcttatatatttttttctttttcaagacaaagtctcacgttgtcatccaggttagagtgtagtggcacgatctaggctcactgcaacttctgcctccccgattcaagcgattcttgtgtgtcagcctcctgagtagctgggaccacgagcgtgcaccaccacgcctggctaatttttgtatttttagtagagatggggttttgccatgttggccaagctggtctcaaactcctggccccaagtgatacacctgtcttggcctcccaaagtgctgggattacaggcgtgagccaccatgcctggccaaagtggtgaattttatattagtgtggttttgcagtggctaggtctgtgcaaacctatccccaaaggccaaggaaactgacaggctgaataaagaggctgacatacccagtttcctagaaagaaacatttagggccaggcgggaagactcacgcctgtatcccagcactttgggaggctgaggtgggtggatcacctgaagtcaggagttcgagaccagcctggccaacatggtgaaaccccatctctactaaaaatacaaaaattagctgggcctggtggtgcacacctgtaatcccagctactcaggaggctgaggcaggagaatcgcttgaacctgggaggtggaggttgcagtgagcccagattgcaccattgcacttcagcctgggcaacaagagtgaaactccatctcaaaaaaaaaacaaacaagaaagaaaagaaaagaaacatttaataaagattggcgaacagaagccgtgtctgtgtcttgggcacccttacctgccagacgcaggccttctgtactacagcaaaagggtgactcagaggggatgtgcaagggaattgaaggacgataacatcaaggttgtttcaacctaaggacaggatttacaatgaggacctgctcttactcaaggaacaataaactggaaatcctagaggccttcccagaactggggttagtcagaagtgaacccggcagatcgcgtcccaggtggagctgctttagcctccgtatgtatatttcacccccaagaaaggttaaaccgaactgacaacagagacattcctctctgtacctctattcaataatgaggcacagcaaactgtagaacgcatgacaaccacagataaggaaagcactcgcacggtcctgacgccattgcccaccctgacattcgttcatggaggtcgcctgcacattccatcttattcaaaggggtggtggaatggggtggggggagagcatctgctattatctccggtcgagtgctagaggcttgagcccacatctggggtctgagagaggatcctgcactaggaactgggacttgataatggcctcgaggacagcttggagcgtagaaaatatttttgggttcactgacattttaactataattttatataagaacttaaatcatcaaaatgggggatccaggactctgtcctctttatggggctgctgggcaaactgactcgcagagagatgatgagccataaacatccactcacaagcgggagaaagtcaatggagaccgtgtggaaaccacttcccctgcttaaaaatcaccaaagccgtaatgatggacagtgagacagcagtgaccctcagtatttcaatgggacgtgaataatgtttaattgtatgttcatatattgcttaacagttttagaaaatctgttcttctgcagcactagcctgctctgcccatcccaaaagtgagtggtgcctgaaggaattctgagcccctctgtgagaggaagcgcgtctgtcttttctttacgaccccggcactgagcacagggcttggaatactataagaaataaacacatcttttaaaaatagtgaaaaacggagagaacataatcaaatgcccatgttattattcacggcacgagtgtcttagagaatacaggtgtttagggctgaagtgagtccccctgagattcatgctgaatctctaaccctcagcaccacacactgagcctgagcttgaagagggggccttgaaagggtgattaagttaaaattaggtcactggagagagtcctaatctaatgtgactggtgtctttataagaagtaattaggacacagacacatggaccaaggggcagccatgtgaggcctcacatgggtgggaaggtgaacccagcccggccgacaccttgatcttggacttccagcctccagaacggtgagaaaacaaacatctgttgttgaagctgatataagagttaagaagaaatcacttaggcagatagtaagggtgtgagtgtcctcaataaggcttttatttttcatgaaaagcagccccagatcattttctaacaaagagcatcctgtaaagtggagctgcagacatggacaagcaggctgggagcttgcacgggtgaatgccagcgggaactagggtctagaaacgttcaagatggcggctgcatcttcccttctctgccagccacgtgtaatgtaaggagcagaaaaaatggcaccgatggcccatcaactcaaaagcccatttgcataataagattagggtggggtgaccagccttcctggtatgctatgtaaacgccatacgtgatcaaaccaatttgtgagtcctatgtaaatcagacactgcctcctcaaactggactataaaaccgggcgcattcaccaccagccagtcttttccgattggagacccctttctctatggagagagctgtttctctttctcttctcttctgcctattaaacctcccctcctaaactcctcgtgtgcgtccgtgtcctaaactttcctggtgcgcgacaacgaaccccagggtatataccccgacaacgtagctgcttcaaagccaccaggtctggatgctttgttgtggcagcacaggaggactagggggaaaagaggcctctgttcttgttcccaaggaacaagaatggatggaatggccatccgtttgtggggaatcaaacataaagacccacatgcatcatgagacagatgtgtggacaagcctcgagacataataggcattgcgtgtggtccacactgccaagggctggagtcagggaaaagggagagggggtggacaacgttctcagcacccagttatgctcaataaatatctgtagcctgaatgagtctgaaaacttgagctggagtcagtgaggaatacaaaatcaagagatgtaaagaggaagaagtgttcgagcaccttggctcacgcctgtaatcccagtacttgggaaggccgaggctggtggatcatctgatgtcaggagatcaagaccagcctggccaacatggtgaaaccctctctctactaaaagtacaaaaattagctgggcatggttgtgggtgcctgtagtcccagctactcaggaggctgagacaggagaatcgcttgaaccagggaggcggagactgagtaagctgagatcgcgctactgcattccagcctgggtgaggcagagttagactccgtctcaaaaaaaaaagtaagaagtgaaatatttcaaggcgggcacatccacaaaacaccagaaaaggcaatgctttcacagagaagacaaaccatcttcttttctctcctcggtcagagaccatctgatgctctagacagtggctgcagtactggcaagacaggcaagtcaaggaggtaacatggacgaatttgcacaacttagaaaagacctgtaggtataatgttaaaaacattcagcccggcgtggcggcctgagctactctggaggctgaggtgaaaggattgcttgagcccaggagttcagctgcagtgagttatgatcatgccaatgaatagccactgcactccagcctgggcaacatagtgagactgcagctctaaatagttttttttaaacttttttttttttttttttggagacaaggtctggctctattgcccaggctggagtgcagaggcatgatctctgctcactgaaacctctgcctcccaggctgaaaccatcccccacctcagcctcacaagtagtgtggactacaggtgtacaccacacctggctaatttttgttttttgttttttggtttttgttttgtagagacgggatttcttcatgttgcccaggctggtcttgaactcctgggctcgagagatcttcctgcctccgtctcccaaagtgctgggattacaggtttgcaccactgtgtccggccagcaagtactttggaatagttccttattccgtctgcaaaggacggttcctagggcttagcaaggggaatttgaactgttaaaggaaaaacctaagcctaaagtattaaactatggggaagggccaggtgcagtggctcacacctgtaatcctagaactttgggaggccgaggcgggcggattaccaaggtgtgcctataatcccagctactctgcaggctgcggcaggagaatcgcttggatccgggaggcagaggttgcagttagcaggccgttaggaaaggtatttgagtcctgtgactttccactatccagcaaatcacatctggtagctgttattctccttattaaacacagatatccatgtagataagcataatcttcccttcatgcttttcctttccttcattcatttccttcattcagagccgagatcgtgccactgcactccaggctgggtggcagagcaagactccgactaaaaaaaaaatgaaaataataataaactatggggaagaataaagaaggaattgcctacatttagagggaggtagaagaacaaaaagaggaaaatatataactattttaaaacctttttaacataagtctttcaaatcctagaaacttgggacttgtgtgaggggaggacccttctctcactctgttatactttctgaatgttttcaaaagcactgtagacacggtgatgcttagaactgggggaggccaggcctcctggaagaagtttgctgagggcctgtggatagagaagcagaaacaggaacacagcctggggcaaacatcgtgcggatgatgggcatctcaaacactggaaataaatgaggctgcgggagcaaaattgctggttcccctgctgagcacacctgccctgcttggaacaagagcaaagatgtctggtgggggagccgatgtgagatggatggatagacagggcccccagcctgggggatgggaccagggaccatttgtgagataaacccaggtattagcccagggcagaggctcccagctgaccttaaaacagaggcagcccagctccacccagcacttcttcagcaggcctgggctgggggtcagagaactcgcatttctaagatgttctcagactgagggacccagtggaaaagcgtcctgattactgggttataaacacctgaagagttctgaaagaaatgggccacaccctcaggatccaaagtcttaaaggaaagctgaagaggtgtcctgtgagttcaggggcaccccggtgaagcctggggcttagaaagaaaagaagtgtttataccaggagagcagagagcaaggagcagggaggggccagggcagcccccaaaccggagcccgaggccggaccctgcctctgacgaggagcatgcccggccaccatgctgacccctgcatccttctttctttgtcccttgaagcccctcaaagtccttcctgagacacatcccctcccaaggcacaccctggagggtctcaagacttgaaaatcagtcaagaagcaggcaaggagtgagctgatcactgtagttaaagagacggcaccaaagacattgtacaaaagagggcaggaagatgtccatgtgtctgcaccagaccttctgcgccagtgagggatgctgcaggcaaaggcagggcagatggcaagagggtccctacccagccgcagcacccggcaatgcccaccagagccgaccccctgcccgtgttctgtgagtccacgtcgtctgcatcagggtgctgatggcaaagcctccgggtgtccctccgttgcagggtctactcctgcagtgtggacagcagagacggaggaagttctcccaagtgcggggaggtaggctctgtgggaagcccttcactcaaaggcacactcatggttttgttaccagagcagctgaagaattcaaagtagcttctgagaactctaactgtctggaccatgctatagtaagggctaagctaacttaagagccatccaaaaaaaaaaaaaaaagaagaagtgaaaaggtgattgatgtcagatgtaaacccaagagggtaacacagcaatgctgagacatccgaaacaacttcctattagctgtccaggaccttaacccaggtcttaagggatcctgtcttttttagtctaaggcagttgaatactaaattattaaaacaggtcttattttatgaccctaatcatcgacaagaggcgccttttgttgttgttgacacagagtctggctctgtagcccaggctggagtgcaggggcgcatctcggctcactgcaacctccacctcccaggttcaagtgattctcctgcctcagcctccagagtagctggggttacaggcacacgccaccatgcccagctaatttttgtatttttagtagagacggggctccatcacattggccaggctggtctcgaaccctgaccttaagtaatccatccacctcggtctcccaaagttctgggattacaggtgtgagccaccgtgcctggccgacgaggcacttttccctcaagttaacaaaaggaaaagagaaaagagaaaccttctgaagacaaacaatagataattgggtgaaagatggatgaattctccccacgtctgtaactcctaagaaacagaggccctatgttctgcatgaggacatatccgttgttcacaatccccacactcagctgaaaaccacaaacccacccagagggattgcctttcttcttctccatttgggtacttgctctccagctgaattccactttaatttcatcagtgaaggtcagttcaattggatagactgcaagctcttttcagaatgtaagggaggattactctgtgagagatctaatcatttatttttaaaataca

SEQ ID NO: 126 - DNA, 2679 bp, Homo Sapiens
gtaagtcgtggtgttccgtattgctttggatgtgtagcccaggaataagatggcagcactgcaggattccggagccacccacagcaccgactgctgctggagatacacaatcatgggcactcgtgaagctgcagaaactcacggggaccctgacaccagctgctccttggacagagggaggcccgtcatctgggtctgaaggaggctcccaagactctgacacagaacactaaactccagggtgttctaggacagtgacaggcaaggctgttctcaatcatctcctgtctgacacggacatcgagctaagctatgagcaagggcgaacaatgcctctcagcagctcctcctccttgaccaggctcccgaccacggagcatttcagtcaaggtctagggatttgagggtggaaggagagaatttcatcactggggaggaactcccctcacagaccccccagggccactcagcttcaatcagctgtaacccagccccaacatctgcaggccactgcgcagggagtccacggtcagcagccacctcagcacacctcctcctgtggccacatcttcactggtttctggaatccaacctggggccttcctgaagccaagtgagaaactcaggacaaggcttctcttctttgaaagccacatcaagtagcacaaaggactgaggtttgcagctattttatttacaagtatacatttaacacaatgaaataaacactgatatactgaagcctagttaatagtagtgtaacaatatgcatcattttgatgattacattattttaaacaacaaactacactgaaaaattaatgccgataaaattcttggtcataatattaagaaatacaatatataaattgaaaatatgattgcttaaaatttgaaaatggaagtgaactcatttggacagactcagagttaacataatctgaagggaggggagctctgacccaaatgatatctttcaggttaacagaagaaaaaagaagcatagtttatcttcaaggagaacgggcagtttgcttcttcaggtagaatatattcccagtgtcctcaggctttgcagcagaatcacatcaccgagcatgaagacttgccttgtgaagctgccccgtccattttttctgcctccaaaattatccttcgaaaaacatccacagcagtctgaaaagagaaagaaacccaatcacagtgttagtgtgaagccgaactccgagagtattttacggactgaggagggcgtgccgcctgccctgccctcctactggtggaggaggaggggttctggtgagccccagaacttcagggccccccgacgcccagtaaggccactgtccacccctcctgacccagaccataaccagcctccgattgtgcttttgaccctgtttccttcaggcaccaggagacgcccgaagagtcctcactcccagactcaccaccatctcctgtcccactccaccccatgacccccaccccagtgtcctctgacctcagggtccctcttcacttctggcactatctttcctcctttcctacgggacatactctcccagcagcccttgcctctcacatccttgacactaagaggcctgaagtggggaaggcaccctccgtgctcctgagatgccacgatgccagcctccaacacctctgtggcgtaattctcggtcatttcaatccacaaactgccctccctatctcctggcctctcctctcctgcccgtcttcctgccctcagcctcagcccagggtcaaccccaccagtccttcaccacagacaggaatcatggccacttggagcaggaactcttcctacactgagtggggaggagaactgtcagaccctgtcctttatttttccttttttgttatacagattggaggtttctatgttgcccaggctggcctcgaaagcctagcctcgcctccttatgcaccaggacaacaggcctgagccaccgtgactcccagaccctgtccttgaaatgcagtcctgtggtcatgaaaaactgcccctgttctcagaagccccacaggaagtaccctgttctcctaatcaccaagaatccccctcccccatcactccagtgacttccactatcccacgaaaccagaacacaccaactgccagcgtcccaccacaccaccttcccagctctttctctagctatcctgaagcaacaattctcagccccacaaggggcctgatttgttgaccctattattacatctcccctgtcccttaaccacttcttgctgctcctttccctctcggtcagctcagactcagcaggccaccatggcgccactgtacttcaactcccttccctaccaactgtcgctggcacggtgcccgcggccacaccgtaaacgctgcccagggaaaacacacaccgctcactgctgacctcacacccatgaccaggaacctggcgcagacacttggtgctgcctagccacccgcctgcatccctggatctgggcactccccagagaaagcatccacgccttgtcccttctcctcaaatgttccccgtgcttacgctcagctgaaaaccttgttttacacacttcactggaaaacagaagccacattcatgaaagaactccacatcctccatccaccaagctgacccacccacttgaatgtgggctcccatcctc

SEQ ID NO: 127 - DNA, 7063 bp, Homo Sapiens
caggagcgggagccgagcctcgcggcccggggcacggcgccgcctgcccctccccggcagtgcctcccgaccccctgccctccgctgggacatggcctgaggccccgcccgccgcccgggacccctcccccacgctgcccccggaccctcgccccaggaccgcggggtctcttcccggccccgccgcccgccccggcgagaacaggcccggcgggcaaggcggcggcggaccgagggaggcctggcccggcagcggggagaagggtgcggcgcagcccgagtttcccaccttttatcctggcccagacgcggctggggcggacgggacctctcgcgctctgcctcctcctcttgcttcatggagccatgcgcctgggtgggggctcccgagagaagctggcctgcgggcgggccggacgcgctgcgcggacgggacggggcgaaggaggccggcaggcggaggaggaagcggcggggcggcggcggcggcggcggccgggaagaactagaggtattccccgggcggctggaggactgagtcgagccgggacccgagtcctccggtatcccagcagccaccggaggcagtgaggtaatggaggaagaatgtagggagtcctccggtggaccacactccttctagcgagccgcggaaaccatagagatcagggctcagccggagggccggcccactgctgtcacgtggcctccatccgtgcgctttattggctggtgctggctttacggggttgaattttggacgctgcctgccattcgtgggaccgagtttcaggcagctggaataaagagagatatcgggggaaagccgcgagaaggccagcgtccctcgctgggagcagagctagccgagtagggcgcccggctgtcaaactggccggcgcagtgcacgctgggccgccccggagcgatcgcagagcccgtcgggagtcgtagtcccggacgggcccgcggcatcgtccgcgacgcagctcgggatccgggtcggggtgtcggccgggttgctgccgggcaccgtcgagcgttagccacccagcattgagctgccagcggctgttctccctaagcaccctcgctcacgtcgcctcgcctcgcctgaccggccgcagccttggataccagccttaaatcgagccgactacggcccagccccgcccgcggcgaggtgcgcggggttcggtgcgagcccctcgcccctggccgggccagcctcttgatgcaccggggacgggcgcgcccatccgactcttcgaggggcggcagggccccatctgtgtctttcgctctcgagcccccagctagagttggcttcagcggaatacctactgtgcgggattattcaacaagccgattgatcacattcttcagctctagcagtgcaaaggcttcactgaaaaagaacattacaacttttttgaaagaaatttgggggtaaatttaattttaaatactgatttttgataacatttgatcttatgacagcatttgtatttttaattacagataggattacactaaaagtcatttctgacctgctcccttacccttatggctaaaataaactgctaggccctgaagcaaaggcgagccatgttctagagcaatgtctttcttgtattaaaatacagccccatgctcacaaaaaaaaaaaaaaaaaattttggagtgtaaacatatacatcatcttaatttgagtccttatgtgttgacggtgtgcagggaagaatgggaaagtaactgtaagtggagcccagaaagaactaacaaattcatgaaaaagtgacattattgctggtctattttttttttaattttctgcttcctcacactctcccatactaaatgaattatttagtggttttttttttgtttttttttttttgtttttttttgtgatacggagttttgctattgttgcccaggctggcacgatcttggctcaccgcaacctccgcctcccaagttcaagtgattctcctacctcagcctcccaagtagctgggattacaggcatgcaccaccgcgcccggctaattttttgtgtttttattagagacggggtttctccatggtggtcaggctggtcgcaaactcccgaccttaggtgatacgcccacctcggcctcccaaagtgctgggattacaggcgtgagccaccgtgcccggccgacaggtgttttttatgagttacagactatgtgctttcagaatgaggcaactgatttaaggatgtaagcataatttaaggatattgaaaatgatataggaataaatttgtttagtcattcatggatttattcattttcagatgactatgtgtgtgaatatttaagaattctaaaaccgcatgggattacttataactgtataggagcctaacacgataatggaatcagaatatactttgctgaaggtatgaggcttttaactgaaagtcttctctctacgtttttatgtctgtaacaagaatccactgaagacctacatttcccggaaggttaacagcccccttctcagttttcctggtaaagtgtttttatattggtagaataccttctgtcacactctatatttttcttatctcaagtagaaaaaatttttgcccttttgcttgggactgttaacagccctggtagtggaaaagtagaaggaaatgattctgtgaattttctgttatataaattttagccagtttaggacttttgaatgaggggccatacagccaaggatttaggatttcagctcaggaaagaaaactacataggtgtttaatcgtgtcctagccacttattagctgggtaactttgagcaagttttatacatatccttcccatgagtttttcatttctaatactggctgtgtaatacagtatgtttcataggcttgctgtaataatcgatgggatgtatctaatagtgtttattttactgtaactgggccacagttaggaagttctcaattaaaattagctgtcattattcctagtattaatatggtgatgaacagctaaagagcatttaaataattatcattaatatggataaattttgaccatacctgaataaatatttataatataactgttgagagtatacaagtttaatattttagggaaatacaatgtcaaattctatcaagctctattctcaaactaaaacaatagcagtttgctttcagatattttgaatattattgtgacatttcccccttctacctttctgggaccttggacacaggaaccatgtaagggtaaatagtctaggtcttcgttgtgggacaggggtgatatactacagttccacaggggctgagccaggtttcaagggtgagatagagagctgatggtaaaaataacaatgagagcaaaggccaaaatgtatggagtatttattatgtgtcagacatttttcactaagcattctagtacaatatttcttcagatctatgaagatcttaatcttaagtagtaaatggttttattataaccactatacaaaatagaaacactaacataaaaaggttaaataatctgtttaaattatcttggattatcaacccaatcagctgtgtcctcagaacagaagctggtagcactacactgaactataccacacttgcaagccttcagaggaaaattccctaagagaaaatggtatctatgactcaatatttcttcccataccctcagtgacttacggtatttatttactaaatgccaaagcagatagtccaataggaaatacgtagctaaatggcctgcgaagagaagggaatgtcaaataacaggcaaaatagaatctgacaccctaggtctcagcaagtgttttgaatggacaataaagaaagtgactagaatgtaacctctgaaaaaatgttgtgaagcaccaatggccttgaaaaaatctagggagctgatgtaaaggacatccacttcataatgacaattattgaacaaattacttgttggagatggagttgcagacaaaacaaatatttaccactgctttaaaatacatttattgtactcaggagaagagtctggaactgtggtttcagaatgagcttatccaaaagtaagaagaggactggggcataccttttaaaataataatgatatatttataatcatcctagtatgatttatttaccttttagtaaatcaagttctcagaaaactaaagtaaaaaaatcttaacattacatatgcaggacttaatctgaataatcataaattttcataaacttaatttacataccacaccatagtagctgtgatatagtaaattaataagttttttgtactatggtgtagctctttcatcctaagaataaaaaagattctattatgtcaaaagacatgcatctggatggttaaaaaaatccaatcatacataactgaagaaaatgtaggtattttagtggaataagaatgtgatatatgaaaacagaaaaataaatatcttcaatgttacttaaagaaacagaattaacaaagatgtatcatggaagagaggatagttctgtaaaaacacgtaaaataactttcaaagatgaaaattttacatatgtaaaaacatttgtcaatgaaagtaataataattccattcatgcatttgttcatgtataaccaataacttacttgtgatgccatagaaaaaattcaagcatcaaactgaaaagcaaattttaataggtaagaaactagtggcctttaagctgacaatatatttgtttgaataaaaaatattattattttaaaataatcaaattagcaaaatacaaaaaaaagaacatttcacatgaacatcttaatttttggtatgtgtttaaatatcaggacatttactcatattcttcataaacagagttcataagtcttagtagatgctgccatgtgtaggcgggttgtcttctctaattatcctcagtccccaccattccatagtgcccccagtagagatattactgacatttttcatttattgccataatttagctgttgtttttcacagtcagcttgccttctttattttaatatttatataccacgtaggcatctcagtgtttcactcttgctatgagacagccatagatctcttttgacctagagttttttattctctttgtttttcaaaattattttccctaaaagcatggaacctatgagcctccaaatagtgcatttaaactcaatcacctctagaaaacaatgctaaactattcagaaagaatgaagagaataagtgaattctccaaacccagagctaatgagtgccagctctgaaaatgaggtccttgattcttgacatctggcctagtgtgcctaggaagtataatcagttactctgactcagtcattttaataattgaagtaaactacttaacagttaaacattatatacttaaaatacttaaattagcttagatataatcgaagaatttcactttttaactccaaataatgaagtgtttggttgtagggtattagatctttcatggaagaaagtagtcccgtaagtctaagtacaaatttcaaatgtaaaataaaactgatcaagccagagaccaggtttggcaaaaagtatcatttgatatgacttgtaaaatgtcaattattgtgaacaattttaaaaagacctcatcagaccatattgcatgttctcgtaaaggggaaaagaagtatataacagcatgtactgaatactttatacccattatacatcgggctttttagattcattctaccatttaatttttatggacatgctggggatacagtattgttatcatccttattctttagtgagaactgagatttacaaaagaataagtaaattttccaaaattaattactgataatgtgtacacagaccatttccaaattcatgagataattgctgttttagttactttgggctgttaaaacaaattaccgtagactgggtgacttaatcacaaaacgcgtgttctcacagttctggaggctggaaaatttaagataaaggtgcttgcacatccagtgactgatgagggcctgtttctttgtttgcacatggccattttctcattgtatactgacatggcagagactgagagagagaaagagattatctctttgatgtctcttcctataagagtattaatctcattcaccaactaattacttcccaagggcccaccactgaatactatcacactggggactagggtttcaccatacgaattttgaaggcacatagacattcagttttagcaactgctaacaatattactcttacacaaccatttttctcacttaaatattttcaattatttaataaatggaagcagtgggattaccttggtatggccataagaatttatctgggagatgtctatgtgtgtgtgcatgtgtgtgtgtatgtttatcgtggggaagaagtttgtgagtagaagcagcggattgagaatctggataataagaaaatattctattgatcctggtgatttgaatgtacgataggagctggttgtcaactgatttaatcagtgggtatttcagtatgaggcatagttggtgactgagctttcatgtggtaatctgaggtgaatattgacatagaattagaattataactcacataaattcacacaaaaacatttttacattgcctactgatttttatacatataaccaagaaataaagtatatgggggccacctttctccagggatttatagggtaattagatgaactctaccaataattataaaaataagaactgaaataacaaatgcatattctgaattacaaaaatcattcaaagtaacaaaaagcctatatctttgatcccaataacctattttaattttctttttaaaataaaagtgttagaggcaaaaaacagccataactaaaccaagtacagataaaggaaataagaatgagaaacagtgtatgtgtgtgtgtatgtgtgtgtgtgtatatgtgggcatgcctataggtatagttgtgtgtgaatttaagtgaacacacttactaattgaataaaatacagtaagtgt

SEQ ID NO: 128 - DNA, 2850 bp, Homo Sapiens
aaaggtaacatctacctccagaggtaagcataatttggcaaatatggaattgcctatacaactgctatgaataattcttagatgatggccaggaaagtttcctaaaaatagtttctggatgggagtcagcctcccaaagtcctaggattacaggtgtgagccactgagcctggcccaaaatgttttttaaaaaacaatgtatgattaaggatcagccatttgtttttaatgccttttaagtttctaaatctataataaatagtgcctccttgagtgtgtgtatgtgtgtgtgcctgcatgcacatatatgacactaatttttcaaataaattgggctatgtccagatgtggaatctcactcatataatcccagtattttgggagtctgaagcaggaggattacttcaggccaggaattcaagaccagcctcagcaacacagccagacctcatctctacaaaaaataaaagaaatattagctgggtatggtgatatgcacctatagccctagctactcgggagcctgaggcaggaggaatgcttgagcccaggagttcaaggctgcattgagcttagaaggcatcactgcaccccagcctgggcgacctcatctctttaaaagagcaagatcttatctcttaaaaaaaaaaaaagaaaaaagaaaacaaattgtgctagtagtcttgtagaacgtctcaattctgttttctttctttttcctttactctctgtatttccaataaattagaaattagagctaaagggtgattaggtccaggttgaacatttttggcaagaaaacttcctagatgatactgggcctgatcacttggctaaggtgacaacagccagacccctccaatggaagggaatgctccctctgccacagtgaatagtctatggacataccctctgaagcagcggaaaacctagtttcccatcaacctttcacctaatggttttagtatttactggagatccttgtctgaatcaatgatttcattagggactgcaaaatgatgatttttgaatcccatcattccttttgcatacatcagctgacatactctgtaaagagctttctctcatcaaatggggttatttggttatcttgagctcctattaaaaaaggcagaataatacttctctcattttaaaattctgatattcagaataaggagtattacaataggagattttattttgctttgcctttttatatttcctcattatcacccaatgacagtttctataaaaaaattgcaaactcattaagctaggcatctgaaagttagtcatttacccaccagcttctaacacgaaaacacattccttataatgttctcatgatggctggaagaaacagtgggaaggagagacccccaaaattgtttatattggctatagccacactgagtttccatggctaacaaaagctcaagataaagtgcttgaaataaccttgacacaattggtactgatagccatgttgaaccctttaaatgtaaaacaattctatttatataataggggtttatgtcaatttataaaaacagtgcttactttgcaggcttaatgcgggatcagaaatgttattttgagaaaagaaaaacagatgataagtttgcttaagtggctttgtttaaaaaggggatgaaaacagttctgtatacttgattttaaaaacagaaaaccattttaacagaaacccacaacaaaactggctataaagatagattccaatataattatggaaattcatttgaagagattgtttctaaaagcagcccatactgtcctcatttgtagcaaacagaagaacatcaatttcaaaagacaagtaaaattaatgaaaggaaaccagataagaaaaattgactgattcttatatttctgggaaaacggtgttataatttttttttgaggaaaatgtatgactagaaattaatctcaattggagagctttaaaaaggcttttcttctccgttctagaagaccaaatttgcatgtttctctataattctgggacacagatttgaaggcagtgcaaagccccagaatgtaaataagaattctgtcctccgatcagttttgcaggagggcagaggctggggagatttggtctgatgagaagcaacccctgcatgagggttaaagcctggaatctgtgccaggcccacagacggtggagttgctagattttagtttctctgacatttgaaaaataatactgaagctcttgaaatattattgtacttttaaactattttctatatagaagtgagctatcttttgagtgaaagagacaaacaaaagatctatttttccaagccaatgtgaacaagtcaacaggagcaaagaaattgcactctggcaactaaacaaactgagtcacagtccatgtgggagaagaaagagagtcagcattgtttgtgcatcagtatcactagttttcagctaaatatactagctggacattaacaagtatattcttacactttttggaaatatctaacaataaccgttagactcagctacttgctaatgaaatggctcattgatgtagctaagagaagctttagatcatctgactgagtataagaccagctgactggctgggcgcggtggctcacgcctgtaatcccagcactttgggaggctgaggtaggcagatcatctgaagtcaggagtttgagactagcctggccaacatggtgaaccctcatctctactaaaaatataaaaattagccaggcctggtggcgggtgtctgtaatcccagctactcaggaggctgaggcaggagaatcgcttgaacccgggaggaggttgcggtcagccgagatcgcg

SEQ ID NO: 129 - DNA, 2296 bp, Homo Sapiens
gacaggatccagagacactctcagtcttggaaatcctaccaacaaggattcaggaaggattcgccctcaggctgattctggaccaaaacaaacagaacattccacctggcagcagccaagtccccagcactattgtgccaaggagactctttgatttgcctcaagcccagagaataaactacgattccaggggacagctgactccagcccatctaccatgctccagtagagaccttcaggtgacccaggtcaacaccaagccaccctctggaggatctgatgctgcctcagaaacaacacctcatgcctcatcagatactaatggaaatgttgaaaggcttttataaaactccagggaagtggtttgaggaacattgagaaagaacatattgttccagcaggaaactgagtgcaaggcagacactatggcaaaattccagttacaccagaattatcctcacagtactttacaaaatcctgtctgggaatctccactctttcctcactgtcgcccatgcaactataccatcatctagatgacttagggagattctccacgtggtagagactaatctggaggcaagaagtccaggatcaaggttctggccaattcggtgtctgggagggctctcctcctggctttcagaaggctgtcttcccactgtgtccttacacggcagagaaagtgtgagctctctggtatctcttcttttaaagacactaattgtatcacatcaaggacccacctttaagatctcatttagccttaataacttccttaaaggccccatctgtaaattctgctgcattggtgactggggcttcaacctaagagttttggtgggacataaaatctcagtccataacacctggcaaactctcttaatcttctaagatataattcaaaccttgtttcctttggaaagcctccctagcccctaaactataattagatgttttctcctcaatcttcatattagttcctatcatgcagtattaattacattgaacaataattaagtacatgtttgttcccctcattagactacaggacatttgcattactctgttttcacattgctgataaagacatacctgacactgggtaatttataaagaaaaataggtttaatggactcacaattccacgttattggggaggcctcaatcatggcagaagatgaaaggcacgttcttacatggcagcaggcaagagagagaatgagaaccaagtgaaaggggtttctccttgtaaaaccatcagatctcttgagacttattcactaccatgagaacagtatagaggaaaccgcccccatgattcaattatctcccaccaggtccctcccccaacacataggaattatggaagctacaattcaagatgagatttggatggggacacagccaaaccataacaacattgaaaatcagggacagtagtttgtttgctttttatccctaacacctaggacagtgcctggcacaaagttggtgtttaacaaatacttaaggaaagaggaaaagaaacattacacctctagaagaaagtgtaaattttccaaacaattgaattacaaatgaatgccagaatatccatcatccactgaatttgtgtcaatgatatataaattcaacttccagatgtagtggttaagagtgtctgggttaatagaatactatgcagtcataaaaataatgaactcatgttgtatgcagcaacaaggatgcagttggaggctgttttcctaagtgaataaacacataaacagaaaaccaaataccacgtgttctcactaataagtgggagctaaacattggatacacatgaacataaagatgagaataatagacactgggaatggcaaaaaagggaagggggagtccaagggttgaaaaactacctattgggtagtatgttcactatctgggtgacaggatcaatagaagcccaaacctcagcatcatgcaacatacccttgtaataaacctgcacatgtacctcttgaatctaaaataaaataaactgggggggaaggggaagaggagaggtggggatggttaatgggtacaaaaaaatagaaagaatgaataagacctactatttgatagcacaatggggtgactgtagtcaataataacttaattgtacatttaaaaataactaaaacagtataattggattgttcataatacaaaggataagtgcttgagggaatggataacccattcattctccatgatgtgattattatgcattgcatgcctgtatcaaaacatcacatgtacgtcataa

SEQ ID NO: 130 - DNA, 1963 bp, Homo Sapiens
tacaattttgagtaataagaacagaaatcaaaagtaactgttgtatgttatattttagtagaggaacactgaagaagaatgaaaacaagaaataatattaaatatgaacatatggagaacagaataatatttctaaaatttttagtttctaagcttatctgaaattttaattttgttttcttatgtaataccagagttattaggaaggtattatctactaacactattttcagtgatattttaagtagttgtcctagttaaatttctattttttaaaaatgtatatttaaaaatacattaaatgtgtatatacatcaatcatatgtatcgatttctgtttttcttgaattgcaaatgaaatttgtatttttgtgttcctggaataaaataaacttgaatggattgtaatattttattcatgctgtaattcaatgtatttgaattctttaagaatgttacatttacagttaacagatactgacctataaattttctgtcatataatgatgctgtgagacaatctaagaagaattaaaatttaaattcatgtattcttacttttttctctgttctctaactgtaatatattttaattacagatggaggaacagacagatgttagataaatagatatataatatatagatcatccaaaattcttattcttatggttttatgtagtcagtatttacctctatttttctacatgtttatccttccaatttagttcattatttcctgcacctttgatttcatatatataaacaggaaataacacatggtggccgttatgtagagagagccacaggacttgtgaataaaatccacaggcaaggacgtggcgattcgttttgcaatattggagggaatgccaaaccctatgtttgctgtggaaaagagtatggtagttcctcaaaacatcaaaatggtattgccttacgattcagcagccccacatctcaagacagcaaaagaattgaaagcagagtcttgaaaaaatatttgcacatccatgtttgcagcagcattattggcaatagctaaaacgtagaagcaattgaagtgtccaacaacagatgaatggatatgcaaaacatgatatatacatacaatggtaaatcattcagccttaaacatgagggaaatattcagacatatgttgcatcttggatgaaacttgaggatattatgccaagtgaaataagttagtcagtgaaggacaaatacagtacaattccatttgtataagagacttaaactggacagaatcatagagatagtacaatgatgaatgccagaagctggggggaggaagacatgggaaagtactgtttaatgggtatagagtttcagtttcacaagatgaaacgagttatggagatggatggtagggacggctgcacaatgttatgactatatttagtaccactgaactgtacatttaaaatggttaacagagtacattttatgttatgtgtattttaccacaataaaaaaataaaataccttaggaacattttcctgaaagagtccacataaaattcattttaatgcatgtgtttatgcatagctttctatttttctcttttctatttatattccaaattagaatataatgctaatcaagcatagtggctgtgtttcttgcttcctctagtctgcaggtagcatacaaatgtaagaaactactaattaatgtcacatctatttattttctgctttataccaagcttgtgggattctcttaaatacaacatttttatacttacacctatgaaatacccattaacatcgccttcctaaatcagtggaaattgagtctctgtaaggtgcagtaacttactaagatacaaaactcagcatttaagtctgtatacttcaatatcctgccctcttctcatttgtctttactgccttttatgtatgtgttagatgttcaataaattctcttttttaaactgaa

SEQ ID NO: 131 - DNA, 3928 bp, Homo Sapiens
atttattttatttatttatttttattttttatttttttagataaggtcttgctcttgcccaggctggaatgtaatggcatggtcgcagctcactgcagcctccgtcttctgggctcaagcaatcctccttcctcagcctcctgagtagctgggactacaggtgtgtgccaccactcccagctaatttttaaattttgtgtagagatggggtctccctgcattgcccaggttggtctctcaaactcctgggttcaagcagtcctcccaccttggcctcccaaagtgttgggattataggcgtaagccactgtgcccggctgttttttgttttgttttgttttgtgttttaattgaacggactgaagtttactttctaactaggttagccctccattcatacaaaattatgagcccaaatgtcttggggagagtacaggagaggccagatcttaaaagccaggagtggaattaggtttgagcatatgtagcaatatggaaacaaagagtgagtcaatttataagcataccaatcttcttggagacaaaagtttgaattgctcacgtgtccattttttttctggaatccctgaagaaattttgagatactgagtactagaaaaccctctttgatgagggttgtatactttatttttaaacagtatcaacaccgttgaggcccttcaagtctttgcagtcaaaagccatacactttttctttgagtgagcctttactttaaggtatgtagtagaataatataggtatctgaaaaagaacttggttcatgacatccactcattcatttatgcacttagcaaatattcattgattgccaaatacgcatcagacactgagctaggtgctaggtactaggtaaacaaaattccctgccttcatggagcttagcttgtggtggtggaaagaagccctcagcctgaatactcaacttatgtctgccgtttattccttaacacattaaactataggtaatagcatatgttagtctaatctttgtttagcaaagctatttcttgttctggaatataagtacagttacagcagaataagtaccaaggcaagattggagaatgaccggttgtgaacagggacttaggaatatgtgtagcataggattttattttagagttgttaaaatcagatcaacagagcatgtttttatgggccatctgacaagactagaggtagctttggaacctcttattccctggaatgcaaacatgtatttgcatttcatccactgtcagtatgaggagacaaaaacgaagtcaggattttggagctggaatggatcttaaatactatgtagtccaaacgtttggttttacagatgcactttttccagagtgctgtcatctcatatacttttttcttcatacaggtttttaatgtaactcactcagatcgttggtgatagactctctcttaaaacttatttatcctaatcttttttttttttttttttttaagagacagggttttgctctgctgtccaggcacacaatagctcactgtaacctccaactcctggagtcaagtgatcctcctgcctcagcctctcaggtagctgggactgcactactagtgcactaagctaatttttaaattttttttgtagagacagggtcttgctgtgttgcccgggctgctctcttaactcctggcctcaagtaatcctcttgccttggcttcccaaagtgctgggattacaggcgtgagccaccatgcttagctgatttgccctaatcctctgctgacattctgatatcggacaactaaaattataacattgggcagctattttgtatgatatatagggtagtggttcttaagcttattggtgagtaaccttcacttgggaagcttatttttaaaaatgtagaccttcattactttcctcctgagattttgaatcagtacctttgagagagggtccagtaaatctttgttttgaatgaactgatggttttgaagcaggtgacctggaggactgcatgtagaacacagtgatgtcaaggagtaaaggagagaacagaagtgagattagcactaatcacctctaatgccttatttccagtaaagtttagagaagaggaaaagctacttggcttgctcctttgaaggttttgtttccctcttaacacagaaattaaaaggtagaggagagatgctgaatgatgctttttttcttcttaatcttggggggtcattatgattaagttattgaatccatatcaccgtatgacagcacatgatgaaagaaaatcaaatgtttgtttcaatcaaagtgaaacaaaatgagaataactatttgggcaaaacacttttatcactgctaagatattactagaactgagcagagaaatactcagagagagccatggcatagtactaattaataatggggtaccatttagcaactggaatattctccgatgatgcctgtttaattacccataggtgctaagtgaatgttaaaaattacggtgctggttgagtaggccgagtagaatttgtgttagggcacatcccatggagatcttttttactgcttaattttttggagttacctcagtaacttaacaggcaggaatatggttttaatggaaaggaaaccatttgcctttaacagcattagtcccgctaagagaaagtttttgcttgtctagtttattacaggtctttgactttgtcagtatatggcaaatttagtataaaagatgattaattatcaaggctgatgaaatataggcagctgaaaagaaaattcttagcaattcataccttagaaggaaccctgaaggacaggacgccatagaaatcctgtttttttaaaaaagtaatttcaagtaagtttgcaaatgcaatgctagtaaaaagtatatagaggtatgtctttcacactatcttgttactattagaatttttgtagccatgtgcagaggagagaaaaggtgttggattttctgcagttctgattcagttctaagaatttggtgtgaaaagaatgtttgcaaaggagcaggcacaaaggtgagaacaggaatacgaaacacaacatctgtaaatgactaaattcagagggaatttagtggggcatatctcttaaatggttttgaataatttggtgttttaaccaatgacttaatttaacttagtgggtatactgttcccagtcccattactgatttttattcctctgtgataacatacacccaaataaagactgctatgtatttgactttaaaactataaagatgtaaaaaaggttcactaagccaaacaccttagaaaatagcctcagctatttgctatgtttatattatacctgcataaaagtatttatgtatagatgtacttaccttacacagtaagtacctaaaatttgtaaattgaatacttttgaatgtaagcagttgaagtaaaacctgtagtgagttcttcagtcagtcaacactaaacctgttttgtaaatttgatgctagtattatactggactttctcaaaatgaagtacacctatatatgcatatagtatatgagcatgtgtatttgtacaaaagcccttcaaaaggagttcagcttttataaacaccaaaacactctctgcctgtaaaatgtttttgctgaaatttgtatcattaactctcaaatttacatcttcatgtttgagatacgcttttaggactgtctatgcatgtagactttggtcaactctctcctcctccctcaataaatcagttaacttaaaaaatatattgtgaccatttttataaaatacatgttcataaaacagatcaacatatttagcttatacagaaataaaattaagtcaatccactcacaaagaatttctattttgtaaaaatgtagcttgtatttcagtataataaaatctgatgtaagaaactgt

SEQ ID NO: 132 - DNA, 1590 bp, Homo Sapiens
ttaacattttgattacaattccacatgagtttctgtagggatacacaaccaaatcttattattctctccctgcctccccaaatctcatgtccttctcactttgcaaaatacagtgatgccttacctgccatttccccaagccactatgctttttttacagcctgcagaaccatgagccaattaaactcctttttgttatgatcatacagaaaattagtactgtgaagtgaagctatgaaatgccttcagtgacttttccccatcgtcttggctaagacccccaaggtcttaactcattccagcatttactcaaatgtctgaagcccaaagtctcatctgagacaaagctgcagtctcttctgcccctgagcctctgaaatacaaagtaagttaactacttccaaggtacaactgtccaggcattgagtaagaatccccagccaaaaggaagattttcaccagatagaagaataaaatacaagtgggacttacaggtcccatgaaaatccaaaacccagcaggccagtttttcaaacctacagctccaaagtcatcctttttaaatccttgtcccacatccagggcacaagggtgtgagggctgggctcccaaggccttgggcagctctgcacctgtggctttgcagtgttcagcccccgcagctgccctcatgggctgtgctggtgttgagtgcctggagtttttaacccatggagggtatgaaacttttgttgggtctatgaatctgggatctgcacgatggtggcctccagtgtgggggctccaacctcatattttctttctgcactgccctagtagaggtttcccatgagactctgcctcttgggcagccttctgtctggacacccaggcattttcatacatcttccgaaatctatatggaggctcccaagtctctggactagtgctccgtgcacccactggcttaacactatatagaagtcaccaaggcctatagcttgcaccctctgaagcagtgacccaagctgtacctgtacatctttcagccaaggtcagagcaggagctggggctgctgggatgcaggcagcagtgtcctgaggctgcacacagcagcagggccatggggctggcccaggaaaccattcttctctcctaagtcccagggcttgtgacagcaagggctgctgcaaacatctctgaaatgcctccaaggcttttccccacattgtcttggctattagcactggcctccattttatgcaaatttctggaggcttcatgaattttccccctgaaaatcagcttttctctttgaccacttggccaggctgcaaatgttccaaacttttgagctctgcttgccatttaaatagaaattccaacttgaggtcatttcctcagtcacacataagagcacaggctgtttgatgcagacaggatccctcttgtgctatggtgcctagaagttcattccaccagatatgcactaaattatcaccctcaagttcaaagtttcacagatcttaagggcaagatcgccctgcagccacgttctttgctacagcaaaacaaaagtaaccttggctcctgttcccagtaagttcctc

SEQ ID NO: 133 - DNA, 2047 bp, Homo Sapiens
cagagtttcactcttgtcatccaggctggagtgcaatcttggctcactgcaacctccgcctcccgggttcaaacaattctcctgcctcagcctcccaagtagctgggattacaggcgctcgccaccatgcctggctaatttttgtatttttagtagagatggagtttcaccatgttggccaggctggtctcgaactcctgacctcaggtgatccgccctcctcagcctcccaaagtgctgggattataggtgtgagccactgcgtccggccaagacctaacttttaatttcattgattttctgtgtcatttttatattctctatttcattaatttccactctaatccttctttgggtttactttgctcttcttttttcaatgtcttaaggtagaaatttaggttattgatttgagatcattcttcttttcctttatttatttatttagagacagggtcttgctctgtcacccaggctggagtgcagtggtgtgattgtagctcactgcagtcttgaactcctgggctctggcaaccctcctgccttggcctcccaagtagctgggactacaggtacacgccactgtgcctggttaattttttaatttttattttgtagtgacgggatctcactatgttccccaagctggtcaggaactcctgggctcaagtgatcctccagccttggcctcccaaagtgctgggattacaggcgtcagccactgtgcctggcctcattcttctttttaaatgtagacatttacaactttaaatttccctctaagcattgttttacttgcataccgtaagttttcatatgttatatcttcattttcgttcatctaaaaatattctgatttcccctctgatttcatctttgacccattggttatttaggagtgtttgtttttcacatatttgtgactttcccagattagttattaacttttactctagtgtgatcagagaacgtactttgtacgatttcaattcttttaaatttatggaagctatttttttttaattgaggcttttttttttaaagatggagtcttgctctgttgctcaggctggagtgcagtggcaccatctcggctcactgcaacctccgccgcccgacttcaagtgattctcctgcctcaacctcctgagtagctgggacctggtaccggtgtgcattaccacatctggctaatttataaattttttggtagagacagggtttcaccatgtttgtgaggctggtcttgaactcctgacctcaagtgatccacctgcctcagcctcccaagtgctaggattataggcatgaaccactgtgcccagccctaattaaggcttttttatttttatttatttttaattcatttattattattactttttgagatggagtctcactctgttgccgaggctggagtgcagtggcgtgatctccactcattgcaacttctgcctcccaggttcaagtgattctcctgcctcagcctcccaggtaactgggattacaggtgtgtgccaccatgcctggctaaattttgtatttttggtagagacagggtttctccatgtttgccaggctggtcttgaactcctgacctcaggtgatccacctgcctcagcctcccaaagtgctgggattacaggtgtgaatatatatatgtatatatgatggtatactactcaaccataaaaaggaatgtattaacagcatttgcagtgacctggatgaaactggagactattattctaagggaagtaactcaggaatggaaaactaaacattgtatgttctcactgatatgtgggagctaagctatgaggacgcaaaggcgtaagaatgatacaatggactttggggacttggaaggaagagtgggaggggggtgagggataaaagactccaaatatggtgcaatgtacactgcttgggtgatgggtgcaccaaagtctcccaaatcaccactaaaaaatgtactcatgtaaccaaacaccacctgttccccaataacttatggaaaaataaagtaataaaaattaaaaacaaa

SEQ ID NO: 134 - DNA, 2918 bp, Homo Sapiens
ttacaagtgagtggataaatggtgagaatttatcacccctttgaatatcaggaagaagacaacgatgcccactctgttaccacctctaatcagcactgcactaggggttccgaccagtgtagaaaagcaaaaaacaaaacaaaaataaaaacataaagtaaaaatccagaacaacaggaatgggaaagaaaacccattactcatagaaaacatgactgtgtgcctaaaaatgaggaaacagctacaggcaaatgattaaaattactagactgccggatacaaattaatacacaaaaatgaatttccatgaaatggcaacacataattaggaaaatgaaatccaagcacatttttaaaaacagcatcgcaaaataacaaggacctaggattaaatgtaacaaaagacatacaagaccactgtgaaaagtatcaggctgtatgaacacccgctgaaggagccctaacatttggagagacagataccatgttcagagcttgtaaaacccagtactgcaagtacgtcaatgattcccaagttgatctacaggttcaacacaatcccaaacaaaatcccaactcgaccggctagttctaaaatgtatgaaacacaaagggtcaaaaacagccaagacatcctaacataagatggaggtacgcgccccagagtgtgtggtattggcagagacagacaaggagatgcagaaacggacacagagatcatcctgacaaaggaatcttcagcagccgggactgggaaaactgggcttatgtctgcaacacaatgaaactggatccttaagcttcacaacaggcgcaaaaatcaattctgggtagaatctatatctaaaatccaaaatatacaaaactataaaatcctttggaaggtaacagagtatctttatgatcaaggcaaagtaaagattattaaaaattaggatccaaaatgctttaatcataaaagaaaatattgatacattgggccatattaaagtttaaaatttctcttaaaagacaccattgaagtaaaaagacaagaaaagctatttgcaaatgtaattcacaaagcactactacccagaatcataaataacacctgcaaataaatgagacagaccatccaatagaaaagtagggaaaatacttgaataggtactttacaaacaggaaatcccaatgagccgcagacacatgagaaggtgctgaacaaggagaagccaatgaaaccagaaagaggtctaccccacacgttccaccaccccgcgccctccgccaccccgcgccctccaccaccccactccctccactaccccacacccaccggagtgaaggtgctaacacttcaggcaatgggtgctgaaaacatggaccggcagacgtggtcatacacaactagcagtcgggcctgcgggtaccaccactttggaacagttgggaatttctagtaaacctgttaaaaacatggttaagcagttaatggaaacgtgaacataatgggatataaaactaatgaaaaaaatcaaatggagtttttttgttttttttttgagacggagtcttgctctgtcgtctaggctggagtgcagtgctgcaatcttggctcactgcaacctccgcctcccaggttcaaacgattctcctgcctcagccccccaagaagctgggactacaggtgcccaccaccatgcccagctaattttcatttttagcagagatggagtttcgccatgttggccaggctggtctcaaactcctggcctcaagtgatcctcctgcctcagcctcccaaagtgctgggattacggtgtgagccaccccgcctagcctcaaatggaattttagaacaaaaatatacctaatttctgatataaaaaattcactatacaagcttaacatcaaattaggcaagtggaagaaaagattagtaagcctcgcaacaggacaataaaaccacctaaaggaaaggatgagagaacaaggatgaaaaagcatcacgtttagtgacctgagagacagtatcacagtctaacagaaagctaactagagtcccagatggggacagggaggaagaagtgagagacggggtcagacaagaaatatgagtagtggctgcaactttgccaaatctggtgaaaaatatgaactcacaggtccaagaagctcaatgaaacccaaacgaggtaagcatctataagcttaaagtggattaatattaacatcttctaatactcttacatacataaattacgtgatgacaaattaaccccatcccaaccctacagaaaataaatttggtatgacacattttcctgttaggaccacaactggacagagaggtgacacaagagggcagcctgaagcctagcaagtcctcttcggggaagagacagcagagtcccacctctgatttccccagggatacaatccacacgcacacacacacacacacagaagcacacacacacacagctagcagacacacacagctagcacacaagcacacacatagcaagtgcacacacacagcaagggcacacacacacacagagctagcacagagcattttcttcttaggcctgctcattcttcccaaatcagttgaacgtcatttaaaaaatgaccttgtcttaccaatcacagcaagtatgacataagatatgaagtttccaaactaaaaatctagttttgtgtcctattatgacataattttcagaactacactgcaaacaagagagcgagccagggcttgggtagatgtttccgctgtgatatgttaatatcataagacaatatttttaaggttttttcccccacatctataagtgtcacttgtgttaagtctttgaacttaattattcccactcacctatcatggtgcacagcttgttctataaaaaactcaatgacaaactcagttataa

SEQ ID NO: 135 - DNA, 1836 bp, Homo Sapiens
gactgatcaggaaacttcctgacttgccaaaacaattgaatctgactctgctgcccgacacgatggctgtgcaaacataagtcatttcccctccccatttatccaaaggtcaatcgaccatgaaaaatacactggaagataactaagaagaatttaatcagaaaactgtgaatttggaactgaatgtagtaactgaaaacatcttgaagttgtctgtctttgaggaaggagtgggtacattttcatttatatatgggatagttctctttcttaagaaagtaatatttctggaatttatgaaaataagggttcaggaatgcacagggcagccaaggggtggaatgtagtggtgagagcacatctattttctttgggtctactaattcccctccccatttctatgtgttcacactgggattgtccatcatgatggaccatcatgatgatggaccatcccaatgtgattgtccgccctcattagttacaaggtgtttcagttatccattgctgtgtaacagatgacaccaaaacttagtggcttaaaacaaccataacgcattatatcccatgatttgtgggttggctggattagcttggccctgctgctgttctgtgtgattgttgtggtacattctgcaggtaactcatctgctgggatatatccaggatggccccgaaagactaaaaatgaaagctgcaaggtctctgacgacataatcccaaaagttatacagtgccacttccaccacattctattggtcaaaatgaatcaaaaggccagctcagattcaagaggagaaacatagactgtgcctccctcttaaggagaggagcagtacgcatagacaaggatgagagaatgttggtagatctctttgctgatgatgtattacacttcaccctggctacaaatatttatgtctctcatgtgtacaaaatactctcagacccttgcaagatccctgaagtctcatccaatcatggcataaggctgctccaagtccaaaatctcatcatgtaatgaggtctaggtgcagattaaacttcttaggtgtgatttcttgaatgtaatgccttgggtgcaacaccacttgatccagtggcctgggcactaaaaaaaaaaaatgatcctctgcataaacactcaatatgcaatgataagacaggaccaaagagctgcatttgatacttgtgtttatgaatgggaaaggaggaagaatgggaagcacaaagccatcattagccactctgaaatttagccaggcatatgtaacttgtaccctaaacttagttgcttaaaagagaaaactataacaatttattctttgttgatgattctatacattggctgggttttgctggatggttctgctccatgagccgttggctggtgtcactcagatagctgcaggactagcttcatgagcatgtgaccagggcattttaagggccctgtacttaaagggcctcaagattgaggtttaaagctttgtggtcactatcttaaaatagtgatcacatttatctttgaatttgtgtttcgtaaataataggacaactgaatattcacagagggcttggaacatgtggccctgcttcccactgtatcactcctgtctccccaccacatccccagacaggatttttagccaccttctccatgtaccttgatgtcctgggctccacctagcattcctctcttggcttctgccccatgaccactgttgccctccacctgggatggtgaccaggttgggtcagcaaggggaaagtctgttttctgccaccaccctctactctctagtgttggagggacccaggcacagggtgttggga

SEQ ID NO: 136 - DNA, 10782 bp, Homo Sapiens
gatgggtcttgggggagaccaagggtgccctgctcaatgtcagccctgactctgtgccacgtgcactcagctctgccacggaggtgcatggctctgtagacgtggacggtgagctggggaggaaggtggtcttggagagaaatgccccatggggagctgagacctgtgtgtcatgggatcatcctggatttggcttaaaatccacgtggctgtggaaatcccagggtgcaccgaggatctgtgggggagcaggggtctcttaaattaccacggtgccagctacatggcccgggtgggtggttccccacactgcctaccccttcatacctcgccccattacaccctcctggaatcattctcactggaggctgcaccgtttcctgctgcccacgatgaacaaagcaggaaactgtcttttccagacttccccacgaagtgaggttttgacgacctcattctccaagagcaaacccagcccctggagtccgttctttccctgcgcgcgtggacacccctgcagcagtggctccttttggtggccgctcttcagacacgtgctagagagcaatcattgatgacaacgttttctttcaaaaggcccagaaaacaaaattaaatcttgggactcgaagcttcctgggcctgtgccacgaaggcccatgcttagccggtctggtgccaggctctgtgacgtgtggaaaccaggcccaccgaccacacagcagtggctgaggatggctccctcctcggctactctctgaaatggtagaggccactctcatggctgagtggtctccgccgttctgcagaggtgtggataagaacaggagttcctgcttgtctcctaggggtccgtattgaacgttggcaatcagtggaaatcctgtctcaggccctctcggggccccacactgatcattgtatttaaatcctcccagtgtcctgcagacacctacctcccagaccaaagagggaccttgctggtggccaggaaacaagctgaagcacagagaggagagaaagagacagagttgggtcctcgggtcaccttaaaaggctgtgagactttttgccagggcagggcctggcgggtggtggagatgcaggatgaaggacttaaggagggatcttttactttcagtgtgaaagtgacctgtgtttttatgagggggctagagaaatactcagaatctgagagcaggcagttggagtgggatctcagcaaacttccgtgtctgcatggtcctgcaaccatcgccctggacagaggtctcagctgggtagagatggacggttgtcagggcacagcctgtccttagggggtgctaggaatggggattggggtgaagaggagttcaggaaagaggggtgaggcatggggaacctgctggcttagaggatgcaaaggggcaggttttatggacgctttatgcaggtccctttcataaagatacttgcccagcctgagcagaaacccacaccctagagtttgtttcttccctgtgggcaccccccgcccccgcagcagcggcttctttcagtggcagaggctgactctttttgcagcttctccagcacttgcaaatgcaacttccttgcacccacttcagacactttacagctggaaccccttccttcaaggttaggggcccaggcccacagcccctacctccaagtttccacgtttgaagaatcccaaccttttccctttgcctcctcagcctcaggggtgacacctcagagctcctgtttacctctttagccaccaggttagtaattttacacccatgcaagtgtgtacaggaatcttccggatccaagtggctggtgtgggcgttgtcttctgtctgaaccctggcccttgtctgtgcagattcctcccctcctgtccgggagagaagagacagtttcgatgtcatgtggagacaggaggctgtggtcaacgaggggaggctgtggtcaacgaggggaggctgtggtggggggtggcgttctgagtcacttggctggcttgggaatgtgagctgggccaggtgcaccttagagagcctgggtggtgctggggaccttcaggctctggagtcctgggtgaccctgacaggtgcatgtacccacatctccttggcccctgtctctgttgctaatgtccctgcacagaccccccccagccgtcatttacagattcccagcagtgaagcacacgggcttaggttaaaatcactgagccccttgcacagcggccttctggtcccctctgctgtaaggcaggaccacctgtcagcccctgtcttctggggaccccactaggcctaagagatgaggctgtggggttctgtcttctggaggccccactaggcctaagagatgaggccggcggcggaggtctggcctggaagagaaatgtggtgagtcaccccaggcctgacagattcactcagacctggtccttctgctcctaggctgagccatctctcagggaccctcctgccctccttcacctctcacctggcctgccccaaccagttctccaggcaagcccaaaccagttccacctggtttgtgactgtgtttggaaagagggtctttgccgaggtaattaagttaaaatgaggtcatgtgagtgggccctgagccagtctgatgggtgtccttacaggaagacattaggactcccagagggtgactccaggggcaggtggcttggaggactggccgtgcaaggaggcagcaaaggggcggccatctgcaagctgagggcagaggccttggaggaagcagccctgccagtgctggtaactgggctggagagacttcttcatgaaggaatacagggacagtcacaggagacaggagcaccaagggattcggacatgtggctgacacagtcttctggagagccccggatggcatcagggggaaacctggcctgagacagtgccctgatggacaaggacaggaatacggtcatacctcctgcccacttgaccaacgaccaggatgagaagccaacagatgatgaatatgaattaaagttggacaactagcaagtttaaaacttggactgggacctagatcttccgattcctacagctagcctccctttccatcttctctgtggtcatcactaatgcagtttttgaccgtcttgtccagaagctgcaaaacagacaacagaagccaggactggccctgccttagatggctttcagtgcaggaaagtatcaagacagtcttgttcgtagcgtatatctctctccaccttttctgctaagcacctcatgtatgcagctgccaatgtaacacctccatttgcgtgtttaatcaccatctcaagctaatgtaaccaagcagacttcttggccttcatccctgcctcctctagtcttctcatctctctctctctctctctctttttgagacagaatttggctctgttgcccaggctggagtgcagtggcaccatcttggctcactgcaacctctgcctcctgggctcaagccatcctcccaactcagcctcctgagtagctgggtcttcccatctctttaaaaaacaattcaattgttcagaacaaaaccctggagtcatatttaattcctcccttcctcttgcacttctaaaccaatcattcatctctactttgaaaatgtttctttattcatccagtgcaccaagccaccatcacctcgaggcaggaatattcaacggcctcataagtggtctccctatttgtgttatattcaatgcatgtcttttcttactcaaaatcctataaaggcttctcttcaccatccacgactgtttcctgccttcctcactatgatcccatcactgacccctcaagactatgttccagcctactttctgctccttgaccaacacccttactctgattcccacttttgtgacttcacatgagtcccctgtctgcctggacactctgcccccaaccttgaagtgctcacccttccctgtcactcagttgaaagtcaaattccatttcctcatgagggcttccctgaatacccacttttaattaactctctgcctcctcccatcacttctgttttaccccctcttttagttccttcctatcttagtttcataagagccagggccgtttccgacttctttccccgtcaagcctccttagataggacaggtcctctgcctcaccgactttaatcagtatttgctaagtaaacagagcacaggaggatcctgttgtcatcaaagagcagctctgcctccaatggcgaaaggattgttggaacctcatccttccttcaagttctggttcaaaaaattccatgctatgcctcacatggccttgcccaggtgcctgtttgatttgcctgggttgtctgttctttcttccccactgtcctcatttgccatgtggctcggtggtggctggagacctccatgctggcccctgggagcagctgctaaggctcggcgcctcaggacaccttggcacctgtggatatcgaccaccaggcttctcttctgttcatgtctctgcaagaatgagaacctgcccccataccatttgtgctgtgtaggcctcaggaggcatggactcacgcatccagcttcctgcaagccctctggtacatcgcagtgttcacccccagctttctattacagccaccacccagggactctggtgcaggctccttagagagaggccaggaaactgccgaggtgataagtgacagcaggtctcaggggaagagaggacttctctccttagtaaagaacctgtcgaggtcggaaagacactccaggctcaaagccaaatttgaaagttaggctgacagcccaactagggcagattggaggagccaggtggagagaggatgtgggggagtcaggaaagaggtggaaggagaagcctggaagagtggctccgctcctggagtatggccagcggcacttcgtcaggacctcgaccttcacccactagtgggagggtgttcctcgcatgacttgtaggatcacctgggaaacacacaaatggaagaatttaaaaatatctgctaggacaccccgtgtcccccacaactcatcacagagcaaacccatcacagagcaaactccttggctacttcttgtcttgggccgtcttttcatctggcctgtttgcctgactggactttggggtctttgttcccagcatcaaaatttcctaccagcgactttccatcacagctcccttccagtcttctggaaattgtcagatgtgcctggatttgcagggcctgcacaagatatgctgtcgatctgggatttttggggatttttgcagttcacactccaatgtgcaacagcaaccaaacggagatggaggacgtgaacatgaactactggagatgctgatgaaacgtgtgtaaggaccgcaatggtatctgtgtcctgctcgtgaaattgaccagatacagcggcttccttttgcttccgaaggcccggattgacctgacaattgatatgctttgctctatactccaactcccattgaccatggggtgaaagcaccctttctcggtcagcctcactgcttccccgcagatggagggattttctgcaggagcatgggccctgggccttcctttcccactgtctcttgaaagcctcctccagatgtgctgcctggctcagctctttgggtgacttttgttctgtctcatgtgacccatcaagattcacacagggctgtgtcccgggcagggctggagtcgacattcagggaggagatcactgttctggaacagagcagtgattggtttaattgaaatctgatagatcatcatgtaaaaagctggcatgtaagcatgctcccggagcctgcagggccctgcgcggcctcttgcctggccatcacgtagaggcggtcctcttgcatggttgggggcctcacctgcaccacgggcccccaagccaaacagtgagattgtacggagaccatcctggtcaggtcttgcagtttgcaccaggtagccccaggctatcctgccgtgcaagagctgccttctcagcacagtggagttctacggctgcctcggctgcagaggtcagctctggagccttgctgagcacctccatggatgcattttgcaaagggccgagtaagaggcattaacgtggcctgtgcttagttcctgacagcaagcgggattaaacccggattaaaggatcagccctaaaccaaagcagaccagtaataggtctcatgataaaagcagccaaataataatagtaaaaatctattcttggacttattactttcctgggaaaagggctatttcttgtgaaatatgcagcgattggaactttccccgacagcccaccgtgagctcactcactgcccctgcctgtgctggggggtggtgggtggtgagaggtgcaagtgaagggtctggacagaggcagagggaggagagggggcagggggatggggaggaagaatggggggttcgctctgggatagcttcatgatccactgaacctttcaaacttgatgcttgacgttttgaaaaaaatgacagaaaatatgggctgggcactgtggctcacgcctgtaatcctagcactttgggaggctgaggtgggcagatcacctgaggtcaggagttcaagaccagcctggccaacatggttaaaccccgtctctactaaaaataagccaggtgtggtggcacatgcctgtaatcccagctgcttgggaggctgaggcagaaaaattgtttgaatctaggagacagagattgcagtcagccgagatgctgcctctaaactccaggctgggtgaccaagtggggctctgtctcgaaaaaaaaaaaaaaagtgtactagggggatgtcgttgaggggcttagccacatgctacagatctttttataccaagatgcattcaatgattagctaagttggacagtttgttactttaagcctccacaaccaaaggggcaagataattatctcccagagaacaagttgatcttctttgaaggataaggagttccccaagcagcaggaagagcttctgttcccaattccagcctttgaagtttaagcttcagaagaaaaccttagcatttaatacaggaaggcatgcacgtgtgtgtgcatgtgtttgtacccacacatgtggctcaagcttccctgtgacaatgggttgcctgcgggtaagcgtgggatgtgtggagaaggcaggagggtttagggcgtgggctcagtaccctgatgagagatttaaagcaggcaaagggattcggcaaagtgcagctcccatttcatcatttcttcagaccctgccttagttatttactgctgtggttttaaactctgctcttcgaaacccttggtttctgcagaagtccttcgagaggttcgtgggggcaaaggaaggtgaggggcaggagcccaggccacccggcctccttcctttccccacgtctgctttcaactgtttcatatgcatcatgcaaatcgcagctgtcatggctcaggtcctcatgtgtacaatgggcgccatggcagcgtccaggtcagagggtgaccagagtgacatgaattaagacacgagaggactccaaagagtggtcaggcctctcacgtcataagatctccataaatggtcactattattttgtgttattaggggtacgcttttcatttgtaagatgacttccatggggccccacgcctcatgaccccgtctcaccccctgcaaataccatcccatggagaggcaggacttgagcctatgaatttgaggggtacacggttcagtccaaaccttttggtgtttctgtgtatccatttctgcatgtgtaaaatgaggagaacagacagcttccgacctcatctccaaaggcgcacggaggaggtggaaaggccctcgccggagactgagcactgcagccagcgcaaggccggatttgctgcttccgcgcggggacgccctcggaaaggtggcaggtgcccacggcgaggaaggggcgggagtgaggggtgcgtggcccgagagaactcagtgaagaaggccattagggaggaaataagggaaacggggtgtgcgaagctctgagctttttctgcccggtttggctgaggacacgccacgggtgagcatctgcgcgaggggagcttggtgggtgaggaaggaagaagacacgatagagaactggaagcaagaagggaggaaaccaaaaggaacggggaggagaaagggcttctctggagctgcttgcttttcccagattctcctgccattcctggctccagggagtcctgaaggaacgatggttagggcggagaatcctgcagaggaaaggagagaaaggactagaggtcacacacggcttcttggaggggagcggggagcaggggctccgaggctgcgggtcgcaggctccagggcaggaagctctccatgggaaccgtagtatgaattccaccgaggtgcgtcccggcacagacccgaaggcagccacatttgtggaaataagatttgacgtgcatttcggatccgcagagaaggtggactctgttttgcagaatggaccagcggtggggggtggggtggggggcaggaaaagactttaaacgctggcagaactttgtattccactcattcgtgcatgcattcattcagccatcctttcgctatcattcatcaaactagcgcgcactgaggccactttgtgtcagcgcagcgcctggcctgaggacctcagggtggtgtcggcaaagttccgctgccaaggagttcacgggccgtgtttcctgccaggccgcagacactctctgcgtggagcccgaggaggttctgtgtgagatctcaccctgcgggaagaaagaggcggaggctcggggttggtccaatcacacccctgatggtgagagacgggcgggcggggcctgacgcccactcccagctggatgcctgtctcccaccccgcgtgtcctttcccagaccccaaagcttcctgcctggtctcagttcttcggagaagagggattagaagctggaacaggtatttctgctaatggggcgtggcagatcggcatttgcgggggctctgtcaccccgtaagatgtcccagcaggaagcgtggcgggtctccactgagagctccacggagcagctttggctccctgagaagtcgaggtgtgagcagtagcggccttccctttgcagagagaaggcttggggagagaagaccctggtgccatcttcataggaggtggaaaggaaactgtatgacaggagaatgaatcaggtttggggctcaaggtgccggccactgggaaaaacagctgccccgagttgcaaaactctgggtcctatatgtataaactatgccctgaggaaggaatctcaggcgtatcttaggagaaaatgttctagcttgggaaacaaacacaacaggaccgtgaatccaaatatttcaagtgggtttagaggactggagttctaaacgctgcttttactgtaagtgatcacgccccggaatgtgctgaagaaaggaaaatgagccagtatcggcgaggactatgggcaaggaaaacgagagtgtgcgatgtgtcaaagcaagacatctgtgtatagtaatataatcaagtaatagatagtcatagaatcaagctgatgtatttggcaggggccgcgggaggatgaggcaactcccatcagattagaaagatgttaacactgtaacaaaagtggggctcgaggaaggggaaaagcgcagctctctttttaagacgccagaaagtagtcagacatgctaagaacaaaacaaacacaaacgaaaaccagcaaagaaagctcttcgagaagagtaaggctactgatctttaggaatcaaatcattatttccacacatgtcatgaagaacacagacattaaagcacaaaggagaaacttaaatgaaagtaggagggagaagtcaaagctcaagtaaagagatttttaacctagagaggctgagttatcaaggaagaaagaaggccaagccagcttgttgcagaatgttccagaagataagataatgatagacttaaataaatagggactgatcaaggtgatagcgagttcttggtgaaattgcttccaaggattttatagaagtgtatttcatggaaatgtacagtaaccggatgactgtattaaaattttaaaactgctgggtgtggtggctcatgcatataattccaacactttgggaggccaaggcgggtggatcacatgaggccaggagttcgagaccagcctgaccaacatggtaaaaccctgtctctattaaaaatacaaaaattagcagggtgtggtggtgtgtgcctgtaatcccagctacctgggaggctgaggcaggagaatcacctgaacctgagaggttgcagtgagccaagattgcgccactgcactccagtctgactccgtctcaaataaaacaaaataaaataaaaatctaaaactgacttaggcagttaagtgtgtttccaaagaacgtaattggtgggaggcagagcgggcccgaattgccacctcttcccggcacggccagtgctcttcctcccactcccggccacctccgcaggcccctgcccgtgccaggactgggtgaagctgtgaatgtgcttctccacttgggggtgcgggacaatgctggggccctgggctgggtttctgccctaggaagcctcactgttgagtcaggggctgctggagctgagttttgtcttcagtggcttatgaaggaaagatgaagcta

SEQ ID NO: 137 - DNA, 2593 bp, Homo Sapiens
gctggctgacattttcctgcccggaaggatgcatggcccggggtctcctgcacctgaggggaagaattggaggcgagtcacagagcgcagtgaaggaagcaagtttattggaatctactccgttagagagtgcaagtcctcagactgcaggaggaggaactcccgtccttcggtagtgtcactacttagaggcagctgtgaggagctgtgattaatcgtggaatgtgctgatgtgcccactaaagagctttgcccttggagtccaggctggagtgcaatgatgaaatctcagctgactgcaacttctgcctcccgggttcaagtgattctcctgcctcagcctcccaagtaactgagattacaggtgcccacacccgggtaatttttgtatttttagtagagacagggtttctccatgtcggtcaggctggtctcgaactcctgacctcaggtgatccacctacctcagcctcccaaagtgctggggttacaggcatgagccaccgtgcccggccaccattctaatttcttaatcttgtcttctttctctggcttcagtggtagatatttattaaccagtttaaacatgagtcattatttatatcaaatgtttggatgtataacgtaaaatgaaccttaatctctgtcaaaaaagatactactgggagcatcgtttggctgggagtcaagatgagattgagctactttatgggtgtggaatgccaagtcagagagatttgaataagtaacacttcagcaatatgagatctggacagcatccaggagccaaggtccaagatgctaataggagtgatgtagctgtccctgaacaaaggtttgccacagtttacgagcctcagaggttaagatgcaaaccagaacaatgctattggatgtgcaatccatgatgtttcatggggaggtgggtagatttgggcaaccttgccttcagtttactcctactagcatcaggctctgtccacctgatcagcagaggctatatggttctattttgtgaaaagatcaagttggaaatggaggagtagaggagaaggttggaaatcagaatcctcccacatgtattcttccctccattgagacattttatttgtatatatttattcctgaaaaaaaaaaaaaaaaaagagtcccaggattttttctcctgtgtttttgtcttgtttcttctcggtccatgatgccagttgaggtcatcagtacagcgaaaccaaactggtgagatgggaacaaattattctgtcacttttctagatctttttatttatttttttatttattttttgagatggagtctcgctcttgttgcccagtctggagtgcaatggcgagcctgggttcaagaccagcctgggtaacatggcgaaaccccttctctaccaaaaaaatacagtatttagctgggcctggtgcatgcctgtagtcccagctacctgagaggctgaggtgggaagatcgcttgagcccaggaggtcaaggctgcaatgggctgagatcacgccactccagcctaggcaacagagtgaggccttgtcaaaaaaaaaaaagagagagagagagatacaagccttcagagaccctcatattaacttcatggtaaatctgcctctgctcacccctcccacctgtagcaactaatatcttcatttccagatttactctgaaaaaactgtgcaactgcttcacatgtttcctcttgattcactaatttgtaactcacttactgaaactctgatgaaagaattgagtcaaaaaataaatagacctccttcccagccctggcttgttcagagcatctactacagaggagtcttaagggttttgtatgcttagagttgagagaccaaatagctcctgaaaactgtagctagaggaaatgccatatggagacaggccacaaggagaactcaagcccctgtaaaccaaaaatgaaatattctaagcccccaatttactaaacagattcaacctcccacttcagcctcccaaatagctgggattacaggcgcatgcaaccatgcccggcaaatttttgtgttttttgtagagatggggtttcgccatgttggccaggctggtcttgaactcctgacttcaagtgatctgtccacctcaccctcccaaagtgctgggattagtgagccactgcaacagccctctaacacttatttctgaagttttttttcttccctccttctcggaagccccttcctccctctcttgttgccttaaggtaccttcaccctggctaggccctattgttcttttatcggttttttgtttgtttctttagcctacatatgctcttccacctgggttatacaaatgcaaagtacaccctagttccatgctgggccttattattaacaagaactttctgaatctcttaagatgtagtgaaagcagatatacataaactatgttgaactaaactgtattttcttttttttatttcactttaaaaatttattttcataccaaaaaaatcattcaaagacagtattaaaaaggatgacaaaatacataaaattggcagatgtcttacactaaaataaagttggttttcccagatctg

SEQ ID NO: 138 - DNA, 4821 bp, Homo Sapiens
tcatattataggttttttaatttttttgaaaagtaactggcttcacaaacaccaagtacaacatgatttagacaactgagaaacaggcaagtatattttgaagtgctaaaataaaacatatttatacaagtacaaagcaaaacaatgctgataaaaatgttaaactttatgaaaaaaaatcatttgcagttcacatcaaaataatttaacattctctattattttaatagtacaagctgccacaacagagaaagaacagatacacgcacacaattttaaaaccaaatcagttataagtgcagaaaaaagtaagtacaagcacttttagcccacacaaatcttttaggattggcaccatctttctaaaacatctataatctatatagatttctaattacaacaccatcagcagctgccattgatttctagaaatacacacaatatacatagtatatttgttcacattgggaagatcagtgaaattcaaccaactattttatacatgcctcattcttcaatagacagtagagactctcccaggcctcagaccctcttcaaagtgaattctgacttgtctttatgctttcactgatctgtattttttcacagtataaaattgtaaatggtaactatagagattctgacagcttgagggttattaataagctgttgctaaatgtgaactcacataatacctttgaagtctccaaaacatgtacattttactgggagactagcataggaaatgcttttgttttttgttattcttaaaaagagcatttaattcctggcttggaagtcacagaactgcagcagagctattatacaattcatttacagtcagaaatagctcctagtcttcctgatcacttgctggtaacagcagtagtttgggaaagatagttactttcaaggattagcacgtttggggatttgctttttttccttgcttcagtcaaatctcttataatttttctttccatactccctttctgttccccatccctagcccagaaagacggttcttcccaatccagatatgttcttcttaggctgcccccactcctttcccaaaatggaaggatgagtggactgcttagattagtcagtataacttggttaaaccacgtcttcttctttccatcctgggacatatctctcatttagggtcactttgctgagccttagcatatccccttccttttagtcatgctggtcccgactgaattatcactgggcaccaggaacagattgttttgaaggaaattcaatgagaatgtacccaaatgaattgtgaagttcatatcctatagccctagaatgaatattcagttctctttgtactgtagagttattacttggaacctggtattagaattggcaaagagacagagttagcatcattccaaaataaaagatctcaagaatgcattactaataatcttatgtccaacatacaatgtattcaatggagtggcaaaagttatagaaatacagagaaaaatatatcttgtccttttctaattggataaatcatttttattattacagttgattatgatagcatgtggaagtatcagatggcaatttacttgcattaaatttaatttctgatgaagttttttataaggtagtgtgctttttaagagatatgttactaaaaaaatagaaaatgaatttgaccatgaacaaagtttaaacatgttcttcaactggtctagagtgaaacgtattgtacttgagaataaaatgaaaatcaacataaggattttataaaacaaattttaaaatgtagagcatatcaagaaaggtttttaatacctaagaagtcaagataggaatcctcaggtgaatgccatccttttgatgaggatccaaagggtattaacacctcaaaagatttccatttgtttttcagatagaggcagacatttgcttttaatgaaaccatgaaacttagctagatttcacttacattttaaaagcctcggtgtaatatttgggatcagggtgctgtgatgatgttattttcaaatctagcatgggaggttcgatttcttttaaattaatactttagtacattaatgttagcttttaatgttttgtattgggaggtttgacttaaagttgcaagtaagaacaaatagcagaaaagaaaactcaagcagaatatttattagaattttttaaagtgaagaatgataaattatgccaatggactgacttctatttctcagtttattttctgttaagtagatgtgaaataaaaaaaaatacttaccaaagtaaggatattgagctaaaagaaaaagttttatttattattctctctgccaaaatatacttctgcctcacagcacatatttttcataaggctatcttaagtataaggctgggtcaactgaactttaaatttataggacacctcctccatttattactatccttatttaaaaatcaaaacatttggtacctgaggatagctgcaatgggaggaagaaagagatgacagtggattcaggtcttgaactatgaattctacctatttgagactatcaaagcacacttgtttctgttatactctaaatctcttttctgtagttttaaaaagtgacagtatgaagtgcacaaaatcatattaatcattattttaaaaaagaaaataagaattgctttgcctctttttggaatggctaagaaagactgtgtggttaatattcattaaggttcctcttttttagtattttgtattgctttgaaaaatctacatttgtcatagttcatagctgccctgtttaagcagccaagaatagttaaaatcactgctcactggcatagctaaatctccactaagctgacttgacacagttaaaattttcagtgtattaagattgtgttaatcctttcaacaacagtctctcaaatcatgacaatgtcttcatggggtctatggaccactcttccagtggtgggactcgaaaagaacaaaggagctctttgtgcatcaggttctcaaaataaaggaatgaagaagccccaatgcatattttaatattttagttggcaatgcaaacgcaacagcattcctaaagagtggccatgtttcttgaaagagatagccaggctggagctcaagaatgatttttataaagagaatttccagctacaatgcaccccagtgagggaattacaaaacagtattccagaaaatattttttttgctactccagtattgattggcaacatggtgaaatagtcaagaaatcttccactggttttcttggttaatggaggtgaatctgaaataagtaggtggaatccccgatgcaggcttttggaagagtatttcacaacccaattggagaggaaaatctctggtagaagccctacgtagtacattagcgcagcactcactatccagtagtgtgttatgcatgggacacattcacaacgcctccgtaaatactggacccaagttactgcttttcaaggtctttacaggaaagaaaaaacaaaaagaaagaaaaaagaaagaaaaaagttgatgttttggtcccagattttgagtttgttagaaaatgtacattcatgtttggtgaatcaaagactcttctgggaaaagaattaaagtaaacaaataaaactttttacagttgcttattaactatgctcttcaccctccgttacgctgtttcacacgcactgcttccctagagcaaagcacttggtatggaactgtttgaagagacgccttgtcagccctcaaagatatcagccgtgtttcttaaaagcccatgttttctaaggccactagaagaaaatctgccaaaagatttgtcgtcggtttcttcgtcggttgtcatgagatagcactactgatctcgtgtttccattaaggggtgcccttggcatcttccccctgggccgtaaccaggcgactatgcttgccattgtgtgtgtgtgaacacggggggctccgctccgcacgcgcaggccggcgtgctttccagggacattcacaacgacgaggagctctgagtgtaatctcttatgataagagtgtcatatttgggagacgacgggatacagagggccgactcggacactggcgagttgggggttgtgctccccgagtccaccgagtctctgaagggggacggcggggtgagagccaccagctcctccaggtctggcttggcggccgcagcctcgggaccggccgcggggctctcccgggccgcgtccccagccgcctgcgcccctgccgcgggctgcgcgcctcccgtgacttcgatggccggcagaggctggatttcggcaaaggtcgtcatggtcgtgggcaactggatctctttggggatcaggtgtccactagcttctggaacatggcagagaagaaatgggccagtttatttacgagatttgattgggaggatggttgccaactacaccctttctcctatcagaaggataagaaacaggtgtttcgaaagttgaacatgatggaacataactttggatgttagcagtaacagtctttggaatcacctgtagccatgccccaaaacatgatagcatgttgcaaaacctctagtgcccatggccataagggagaaagagcaccagaccatctgaataacgtgaaagtggacacaggaaacaccagacacccagagaaatggagtccaaatagaaactcagaccattcttgctggagatacatcaagtgaatacctttgtagatctggacctgacccaaggaagcctggatgatttgcaaaagttttccttccatacctctacaccacagatggattgaga

SEQ ID NO: 139 - DNA, 59461 bp, Homo Sapiens
atccaaaaggctgatgagcatgtggaaaggtgttgcgcctgactagcaatcagggaaatgtaaataaactcaggagctcatggcccgtgggggcgagtggcagacttccagcaggaaaccacacagacattacttagtcacagccaggagaagggctcagagtgaaagggctctgtgcccatgacatccttagagagaccagggaaggacctgtaaggcttgaagaatgtgcagatttggagacccacaggtctgggacctggcagaagcatgttactgcccccattttagagatttggggctgagattcaagtaccctaggttatataatgcagttgtcaagtgacagagctaaaacttcatccaggattcaattttttttaaaggaaggaagaaagaaaaaacatattttgatgtttgcatcacttgtatgtagaaggaacgatggagcacaggctagaacgtagagttgctttccaaacacccatgatgacaagtgcccatctccaaagcctgagggccaagggtgagccacctgacccctgaggaaggttctgtcctggtgttttaggaaattaaaatgtgcacatcagttggctgcccagagtgggtgggacctgcacctgccagagaggaatgtgtgctttttggtttaatcctgggaacggcatatggggcccctataacaaggggcagagaaggcctccacagatttgtttttccaattcaagaggagaggttattgtctgctggcttgtgtgttggagactgtggggcgtgctttctccaccacagggaggcagtgaccagagctgccacctcttccctgttttcacctgtggtcgtagccaggtcaggcatctaggagagcatggaggggagctgggggtgggtgggtggggattcagctctttccagacacactggtgctgcctctttcaggccagggcttgagggcaagtgctgtgccctaacaggtcttgcttgtcacccccacctctgaagtgggtatttcacagcctgaactcacagctgcagagaaggttgagcccatggtgtacttgaaagggcagttcatctggatatccaggctctgcaggaggtaccggagcaatgccaggtgccctttgctgaactgcctagagtggctggccctggggacaaagagcacagcatcctggtgacaatgaagtcacactttcctaagacagtcctggtttttgatgctttaattctttggctgcctttgctttgtcaaggccaggatctgggcctaaattttcagggcagaacaaaacaattttgttttctaggaaagtgggaggtctgggatggcaaaggcagcctcgggcgtggcgactaccccagctggggacgctggctgccaagtctcaccctctcaagagaacaggaatcaaactcagcacagcatcctcctttctagtcagtggtcctgctcgatagggggatttgaattttatttttttaaaaatacaggcacagaaaaaagactagaaggaaacagatccaaatgttaactttgtctttgggtgattttcatttccttccttattgtgtctgtgttttctattttgcatgatacttttccaagtcaagaaacaataatttgtggaagtctcctgtatctgtgccttgctctctggcccacgaccttgcacatcttatcctagagttgccagaatatgtccctccacctggcctggagctgcccatgaggctacatagagctctcctatcatgaaagtctttgaggctttctgttcccaagaaattctggtctcacttcctctgccttctcatcgagccccagacccctccctgcccagattaggtcagcattcaagccccaagtccagcctatgacaaagctcaaagctccagcccatctctgctgccctctgccctcaagagactctcgccagtgtctgggcccttcctagtaacttcacccaaccactcaccccctgcccttcccctcctgattgattaaaatccggcctaatctcccaggtgtaacccaagccctcttccacaagctttccagggctccggagattgccccctcccctgtacggctgcagggcttatgtgtgcctggcgctcagcacgggaaccttgccttctgcctcacccatgtctccccagggtttggcacaggcgagttccctgagccagcctacttcacaaggatgaacagaagctctccctatcctttgcaagtagaagccccctccctggccccctcaagaaatctccccctctcagtggattcaccaaagccctgcggatcctgcactgtgaaggagaagccctccccaggggcatccggacagctgcagccaggccctgcgtgacattgctgagccgcagccccacagcctgtgccagctgcccatgcccggctcatagaccctgagccagagtggccccgccaccacctgtgtctccactcagaggcgagaagtaagggacatggatggaaagtgtaaaagccattcccacaacagctgccaggaacaaggcgaggaatggagtgaaaatgtatattcacagctggcacccagttccgcttaggaaaataccttgcttgagtggacacctgttgtttttgcctgccagcagccaggcctggcttctgggaacagcttctcaaatcttccttagggggctcttcctttcccactcctagtgtgcagtgtttaggtaccctctggccatccccaaaggggtccctgtggaccttgcctcagccatcggaggtacagctgcaggtccaaggatggcttgtaccccagctgaggccaataagaacctggccttagattctggcaggaatcctggaagagatgacctcgttctgctgggcttcctgagctgttgaatgcaagctggtggccattttgccccttttagaaagtagctgcctaaggatacagccatcccatggggccaatggatagagagcaagggaaagggagaacaaaagagggaacgggaagggagaaggggagtgcaagaggggagagtgagagcaagtgagcaagatcatctcagctctggggtccagctgtgtctgaaacagctgggtccagctgtgtgagccaaaaaatgtcccttttgtgcttaagcttgtttgagttggggttccatcatttgttaccaagagagtcttcaggaatgtgcatgacaaagttgggggtgaggtgtgagcctacggacatgggcctgggggcagtcaaggttacaaaatagctaaactggtctgcactgcccccactagttttcagggcagagggcagggagaaggcttgtgggaaagaagctggcctgaggccaaggccctggccctagccctgcaacagcacagggaactcttggaaagggatttcctaaggtgggacattggctttctactgctgtgatgcaagtcctcatctccccaaaccttcagtgagcctctctccacaccctgctgtatgaggatgtttgatgcaaattatggaacatgttggatctcacattggatcaaaggtgtgcagaatagatttgcctcaagcatgacagtgatgtgacacagtcaaagatgacttccggaatcctgagaagtcccagggaggatgctgggctttccaaaacctaagtttaggatactgaggaccacaccccacaccccaaacacttctccttagaataagtatagcaagcctcagcatacacaaatctcagagtgaacggaaatgtctctgcaggcccaagggtggggtctgagtagcgggggcgctgaggaagacaggcagtgacagagccaggacagggtcaaccctgagcgtgagtgagcccaggaaacggaaagagagcaacacagccacccacacaactaaaatcgacccacccgggtctccatgctgcaggaagtcactgtctaggtctcccaagacacattttcaggggaaggttccaggcagcaagagcagccctaggaaactttaatatacaatggaatctgggttaagcactatcttctccaagagttgagctcacaggacattccccagaaacctctggagaggtggggaggaaagtttctggaggtctttggatggagaaaacaaaaaagtggccttgattttcaagacaaaattacacaggaagaaaaaaatgtttttaatctaattaagagcgatcttttcaccttcatcacaacatcgcggaaatgtgccagttcttaacttcacacaataatcaaagcaattagtgagggagaagccttggaaaccggtgcagatgttctcagaatgtttaatggggaaatgagttgcaggcctcattctcagcatccggctccaggccctggctaccaaatccagacatctgctggggccccacccccaggccccgagggcgcgggcttgagaaacacaggtcccttcccaggccacctcccagccaggccagaactggggccgagaggctccccatagcttctcaaattggagcctggacacagtcagagccaccccagaactggggggaggctcaacatcaaaattatgttaacaactgatgtcaaaagtaatcaactcagcttggctcccccactgctgctggctgcaggagggctgtgagtaggaggagagcaagcggccccagagggaccctcggctatgaccccctcagcctgaacactacttcaagaaaagatgtggtggcatctgtctggtatggtcctgtgggctccattccaatgctaatggactcttaaggggcccaggaatcaaaatggtcaacacttgaggaatttccagtaatcagagaaaacgtatagaaatgaggatgatgcttacttaggaaatggcctattacaggaaacagagggccacgtggctaatgtcagtgagctgtgggagagacagagaccccaggtggggcaggcagatcagcaaatcttggaggacctgctatgtggcaggcactggagacatggaggtaaagaacacaatatccatgttctcagggacacactcatatgcccttagcattcacgttcttcacactgacagcttcttaatgcaagcccaccagatactttcataagcactacctctgacttcaggcacttgctgagctgcacacagggcaggccaaaaggaatggaaagtgagccaccaccggggcagcactcactagtgaaagataaataccccagctctctcagccgcttgtagaactctgaggagtgttctgtgcagcttcccagctgcccaccatgaagctctttctcaataagtgaccagcacagcttaattcctgaattaagctgtgtgtgctgtgagactgacacaagacagggtgacaggaagctgtcggaacatttgagtagggaagcagcaagatccactgtacatttaaagaactcccttgagctgttatgtgaagaatggagtacaggaagcaagagtggaaatcaagagaccagtaatgaggtatggacaacaatgtaggcagagaaatggtggtggttttaaccagggagatagctggagagactaggtgtgggcaaatccagagagttgataagacatactgatagattagaaaggggtactaagaaaaaaggataatttaaaaaagactttcagccaggcttggagaaaaatagcatgctgctcctcatcccctctgactataaatcatctcactcatcctcccctaaaagcataaaatcagtaagtgcaaataaaaccacatgacccatgctgttagcagtattaggagaaagaataccttcaaattgcctgtgggtagcaaagtgagccaaattccaatagcattctagtcccctgcccagcactgcaaaactgcatacagaatcagagaagaggcttaaaatgctttgtcaaaaagtttgaaggtagttagcaacatcagcaaaaatagaggagtaagtacctctaaggagccttcttgccttcacagacatcctaagcaccaagcagcctaagccactgatgaacttgcagataccactgatgtggattatagtctaattaattgtagagacaccacacttctgcactgaaccagaaccaaagccaaagcaccctacccaaatgatactacagacgcgtgtacaggaaaagtccttactaaggctactccataaaattggaagtctctgttattccagatatgcagatatcaacttggggacacaaaaaacttggggggaaaaaaacaagaaaacatgacttgccaaaagaacacaataattctccaataatagactccaaagtaaaggaaatcttaaggaaacccaatgagatacaagagaacacaaatagacaatacaaacatatcaggaaaacaattcattatctaaatgggaaatccagcagagttagatatgaaaaagaaccaaacaaaaatcctggaggtgataaattaaatgaatgaaataaaaaatacaattgaaagcttcaaaagccggctaagtcaagcagaagaaataatttctaaatttgaagacaggtgttttgcaataaaccagacagatttaaaaaataacaataaaaaagaatgaagaatgcctgcgtgacatatgagacactattaagctaacaatatttcacattttgggagttccagaagaagtgttgggataaggaccagaaaatctatttaagaagataatacctgaaaactgccaaagtttgggagagaaagagactaacagataaaggaagctcacaaatccctaaatagattcaaccctaaaagggcctctctgaggcacattttcatcaaactgtcaaaaatcaaagagagaatttaaaaaacaagagagaagcatgaagtcacatataagggaatcaacagcagattaacagatttttcagcagaaaccttctaggccaggaaagaattgaatgccatattaaaagtgctgcaaggtggggaaaagctcacaaaattgctagccacaaatactatacccagcaaagctatccttcagaaatgaagcagaatgagggaagaaattttgcctccctcagacaagcaaaaactgagggaattcattactactaaatcagccccacaagaaatgcttaagggagtactacatctggaagtaggaggatgatatctaccatcatgaaactacaaaagcataaaacactagtagagcagatacacaaatgagaaaggaaaaggaataaaagattatcactacagaaaaccaaaaaattgcaaagaaaaacaatgagaggaaacaaaagtatacaaatcagtcagaaaacaataaaatgacaggagtaagtcctcacctattgataacaatcttgaatgtaggtaatttaaatttcccaaatgaaagatagatactggctaaatgaattaaaaaaataaaacccaattacatgctgcctataagaaactgacttcacctgtaaagacacccatagactgtaagggaatggatagaaaaagatattccacacaaacagacaccaaaagcatgcaggagtagacagacaaaaaatactgagtcaaaaaaaaaaaaaaaaaaaaaaagaaaaagaaaaaagagacaaaggaggtcattatataattataaatggatcaattcagcaagaagatataacaattatatatgcaaccaacaacactggagtacccaggtatattaaacaaatattattagtgctaaagagatagaccccaatacaataatagttagggatggcaacatttcatactcagcattggacaattcatttggatggaaaaatatcaacaaggaaatattagatttgaactgctgcttcgttagcacacagcacattctccaggatataccatatgttaggacacaaaacgggtctcaataaatttttaaaagtcaaaatcttatcaagtatcttctcagaccacaatggaataaaactggaaatcaataacaagaggaacttctgaaattgaacagatacacggaaatcaaactacatgttcctgaatgaccactgtgtctatgaagaaattgattttaaaaatttaaaaattctttgaaacaaatgaaaatagaaacacagcatacaaaaatgtatagggtacaacaaaagaagtgctatgagggacatttatttcaataaacacccacatcaataaggtagaaagtttttaaacaaataacctaataaacgcatctcaaggaactagaaaagcaagaacaaatcaaacctaaaattagaaggaaataaatagtaaagatcagagcagatctaaatgaaatagagataaaaggtaaaaaagacaaaagatcaatgaaatgaggcctcccccccaccccccgagacacggtctcactctgtcacccaggctagagcgcagtggtgtgatcttggctcactgtaacctctgcttcctgggctcaagcaatcctcctgcctcagcttctgagtagatgtgcagcaccacacctcgctaatttttttttttttttttggtagagatgggggtttgccatgttgctcaggctggtctcaaactcctggactcaagcgatcggcctgccttggccttccaaagtactgggtttacaggtgtgagccaacaaacccagccaaaaaactgattttttgaaaagagaaaatcaataaaccattagctagactaaccaagaagacccaataaataaaatcagaaatgaaaaaggagacttacaatggacaccacagaaatacaaaagattattagagaccattatgaacaactatatgtcaacaattagaaaacctagaggaaagagataaattcctggacatatataacctcccaagattgaaccaggaagaaaaaaaatctgaacagagcaataacaaggaatgagattgtatcagtaataaagtctcccagtaaagaaaacctcaggattgcacgggttttctactgaattctaccaaacctttaaagaactaacatgaattcttctcagacaattccaaaagactgaagagaaaggaattctccctaactcattctgtgaggcaagcagtatcttgataccaaaaccagataaggacacaataacagcaaaaaagaaaactacaggccaatctccctgatgaacatagatgcagaatcctcagaaacaaaacacacacacagacacacaaactagcaatctgaatccaatcgcacatcaaaaagataatacaccataatcaagtgggatttatcccagggattcaaggatggttcaacatatacaaatcaataaatgtgatacatcacattaacagaaggaaggacaaaaaaatacatgatcatctcaatagatgcagaaaaagcatctgataaaattcaaaatctcttcatgataaaaaaaaaagctcatcacataatgtctagaaggaacataactcaatgaaggtcatatatgacaaacccacagccacctggggaaaagctaaacaccttctctcttagaactagaacaagacaaggatgcccactttcactattcttattcagcagagtaagaaaagtcctcaccagaacaattaggcaagtaaaagaaaaagggtatccaaattggaaaagagaatgtcatattgtcctttgcagatggcataatcttatacatagaaaaacctaaagattccaccaaaatcttttagaactggtaaaggaattcaataaagttgcaggataaaaaaatcaacaaacaaaaattagtaggtgtggacatgatggctcatgcttgtaatttcagcactttgaaaggatgaggcgggtggattgcttgagcccaggagtttgagactgtcctgggcaacatggcaaaacctcatcagtacaaaaatgagctgggcgtggtggcctgcacctgaagttcagctactcaggaggctgagatgggaggatcacttgaacctcggaggtgaaggttgcagtgagcagaaattgcaccattgcaccccagcctgggcaacagagtgagaccctgtctgcactcccctgcctcccccaaaaaatcagtagcatttctgtgaaacagcaaattagccaaaagagaaatgaagaaagcaatcccatttgcaatagctacaaaaaaaagcaaagcttaaccaaggaggtgaaagatttccacaatgaaaactataaaatactgataacagtaattgaagaggctacaaaattttttgagacatcccatgctcatggattgaaagaaaaatgttaaaatgatcatatttacctatagcaatatacagatgctatgaaatccctatccagatatcagcaggggcttcaagatggctgactagaggcatctggcactcacctcctccacaaaatatagcaagtaggtaaccacagtttatatagatcgcctctgagagaatgctggaattcaactgagaagtaataagaaaaacccaatgcaagggataagaggggagtcaggcagtctgcttctatgggactggctgggatcatgaagagactcctcgatgtgcagaaaggtaagtaagtgagcccctagtggtccacattcccacagcagactcctgaaatcctagtcagagaaccccctgacccatagatgccttgagactaacaagaggctacctacagactgtgaaatggcaatgaacagctcccagagagggagatcaccctgaatcctcaggcaattcacacatcccctgaatcctcaggcaacttcaggaaagtcccattttgatagcccaacccccaccagactgcatctgctgtgggccccacatccctctatctcatccctggagccccatggacatcccttacacaaagctggttgccactcctgactgctccctccaggccaaagcatgagccattggcaatactctgctacctccgaagcaaggctgccatgaggaaaggtgaccctgcccatagtcaccacctggggccgaagcatgcattgcccaactgcctgtttatagctgctgccactgaaagcaatcccactcaacttccccaggagtagggctgcaatagagttgctgctgccccaacatgagcattcagcagggtatacagggatcttcctgtgcctgcctaccacagtcagtacattcttgcattactggagggcctcaggacaggcccacctggcctggtcccaccctcttttctcccagtgccagcgcataccatctctgggcctagggatcaccctgccctatccagtattgttggcacctgagcactcctgggggcttgaggactgccctacccaactgaccattaccaccacaactggcattcacttgaatttgccacctgtgggccttgggacaagctcatccagcttatcccagccatcccaataccagcatggacaccttgggaggcagaagattgttctgccactgctactgccattgcccaagccatatctgctgctcagagctcaaggacctacccaccctgtggcccagctctgtcatcattggcacctgagcaagttgcctggaggcccaaaattggtttccctggacttgctaacactggtaccagcatacactaccattgggcccaaggataagcattcggggccagccactgctgccactggggcctgaggactggcccagctggtgtccctatccccagccagactttaccacagcctccaccaacaactgcatcctaaactacagaggaactcccagacactactggtgctgtttacagctgaaaaaaattccatggagatcacactactgcaggcacccagaatcaaaaccaaagtgccctgcccaaagaacaccatagatatatcttcaggaacaagactctcttaggaaagacagatcaaaaaattggaagaaactactgttacaccagatgtgcagataccagtgtaagcacacaagaaacatgaaaaggcaaaacatgacaactcctaaggaatgcaataattctccaacagattccagtgaaaaagaaattgatgaaaccttgaaaaattcaatataatattaaagaagatctgatagactatacaaagaaatcagaaaaaacaattcggggtatgaatgagaaatttgcccaagagatagatataaaaagaaccaaacagatattctggaattgaataatagattgaatgaaataaaaaacatatttgaaagcttcaataacagaccacaacaagcagaagaaagaatttcacaccttgaagataagtcttttgaaatgactcagacaaaaatatagaaaaaatagaaaagaatgaacaaaggctatgtgactataggatgccataaggtgacaccttcagtgtcccagaaggtgaagagcaaaccaaaagattataaaacctatttaatgaaataatacctgaacacttcccaatctcccaagagatttagatccaaatataggaatctcagaaccctaaatagatacaattcagaaaggtcttttccacagcacattatagcaaattgcccatcccaagacaaagagagaatcataaaaccagcgataaaagaggttgtagacacttacaagggaacaacctgcagactaacagatttttcagcagaaactttacaggccaggaggatgggattatatacgcagagtgctgaaagaaaaaacaaaaccaaaaacctgccagccaggaatactgtacttagcaaagttatattcgtcagaaatgaaggagaaataaagtatttcccttaaaagtaaaagctcagggaattaattgccactacactggcactacaaaaaatgcttaagggagtcttacaggaagaagtgaaaggacaacttcatgaaagcacacaaaataatcagaaatcaattaatgacaggaataagccctcacatatcaacaataaccttgcatataaatagattaaactttctacttaaaagacagactggctgaatggacttaaaaacatgacccatctaaatgctatctacaagaaacgcatctcacctgtaaagacacatagttgaaagaaaggaatgggaaaagatattacatgcaaaaggaaacaaaaaccaaacaggagtagctatactttcatcagataaaacaaaggttaagctaaaaacactaaaaagagacgaagtcattatatagtgacagagggatcaattgaccaagaggatataacaattctaaacatatatgcacccaacaccaaagcacccagatatataaggcaaacatcaaatctgaagggaaaggtagacttcaacacaataatcttgggaacttcaattctccatttccagtattagacagatcatctagacaaaaaattaacaaagaaacattggatttaaactgcactttataccaaatggacctaacagacatttacagaccagttcataaaacagctgcagaatatacactcttctcatcagtacatggaacactctccaggatacattatatgttaggacactaagtatgattttaaatatatatatattttaaattggattcatatcacatatcttctcagaccacaatagcataaaactataaataaataagaggagcattcaaaactgtataaataaatggaaattaacatgttcctgaatgaccaatgggtcaaagaagaaattaaggcagaaataaaaaatttactgaaacaagtgaaaatagaagcacaacattctgaaacttaagggatactgcaaaagcaatgctaagaggaaagtttattgtaataaatgcctccattaaaaaaggtagaaaagatcttaaataatctaatgatacacctgaaggaaccagaaaagcaagaacaaaccatactaaacataaaattagtagaaggaaagaaataacgaagatcagagcagaactaaacaagaaactaaataaatataaaggatcaatgaaatgcaaaatcggtttttgaaaagaaacaaaataaccagtggctaaactatccaagaagaaaagagagaagacctacatgaataaaatcaaaaatgaaaaaggggatattacaactcataccatgaaatacaaaaatcaaaactcttcagtctgatcaataaattgattacagttacaggatttaaaaatcaggcttatttctatataccaataaagaaccagctgagaaagaaatcaagaaggcattatcttttacaaccactacaaaaaatctaggaatgagtttaaccaaagaggtgagaaacctctaacaaggaaaactacaaaagtctgatgaaagaaattgaaaagaacacacaaaaaacatcccattctcatggattgggagaattaacaaaattaaaatgaccatactacccaaagcaatctacagattcaatgcagtctctctcaaaataccaatgccatttttcatggaaatagaaaaaatcctaaaattcagatggaaccaaaaaagagctggaatagccacagcaattctgagcaaaaataacaaagttggatgcatcacactgcctgatttaaaaatataaggctatagcattaaaagcagcatggtattggaataaaaactgatagaccaatggaacagagtagaacctggaagtaaatccatgtatttacagccaactgatttttgacaaagatgccaagaacatacactgggaaaagagcaccctcttcacttaatggagctgggaaaataagatatccatgtgaaaaatgaaaccgtttctatctcttgctatactaaaatcaactcaagatgggttaaagacttaaacatgaggcatgaaactataacatcactattaatgaaggagacattggggaaacactttaggacattggtctagggaaagattttatggataagacctcaaaaacacagacaaaaacaaaaatagacaaatgggactatattaaatgataaagcttgtacacaacaagggaaacaatcaccagagtgaagagacagcctgttgaatgggagaaaatatttgcaaactactcatctgacaaggtactaataccagaatatactaggaactccaataactcaatagtaaacaacaaattaattccaataaaaagtgagcaaaagacatggatagatatttctcaaaagaaaacatacaagtagccaacaggtatatttaaaaaaaaaagcccaacatcagtaattataagggaaatgcaagccaaaaccatagtgagaatggctattttaaaaagacaaaaattaaccaatgctggagaggatgtggagggaactcttatacactgttggtgggaatgtaaattaatactatagaaaacagtttgatttctgaaaaacctaaaaagagaaatatgacataatccagcaatctcactactggatatttatctaaaggaaaagatatcagtatactaaaaatgtacctgcatccccgtgtttattgcagcactattcacaacagcaaagatatggactcaggaacctaagtgtacatcagtggataaatggaaaaagaaaatgaggtaaatatatacaatggaatactaattgaccaaagaagaatgaaatcatgtcctttgcagcaacatgaatggagctggaggtcattattttaagccaggcacagaaagataattatcttatgttattatcatatgtgggagctataaaagttgatctcatggaggtagagagtagaaggatagataccaaaggctgtgaaaggtatgtctggagggtgaagagaggttggttagtgggtaaaaatacacagctagttagaataaataatttataatgtttgataagagttggttgactatatttaacaatataatgtatatttcaaaataaaaaagaggacttgaaatgttcctaactatagagatgataaattgagggtgatggataccctgacttgatcattacacattcgatgcatgtaacaatagcacatgtaccccataagtattatgtatcggtcaaaaaaaaaaaaaaaaggaaatcccagtgctttggggggccaaggcagaaggatcgcttgagcccaggaattcaagaccagcctgggcaacaatgcacgaccctgtctctacaaaaaattaagaagttatccaggcatggtggtgcatgcctgtagtcccagctacttgaggggtcaaggatggagaatgacttgagcctgggagttaaagattgcagtaagtggggtggttccaagatggccgaataggaggagctccagtctatagctcccagcgtgagtgacgcagaagatgggtgatttctgcatttccaactgaggtagtgggttcatctcactggggctcgtcaagacagtgggtacaggacagtgggtgcagcccactgagtgtgagacgaagtagggcgaggcatcgcctcacctgggaagcacaaggggtcagggaattccctttcctagccaacggaaggggtgacagacggcacctggaaaactggatcactcccaccctaatactgtgcttttccaatggtcttagcaaacggcacaccaggagattatatcccgcgcctggctcggagggtcccacgcccatggagcctcgctcattgctagcacagcagtctgagatcgaactgcaaggcggcagcgaggctgggggagcctgccattgctgaggcttgagtaggtaaacaaagtggccaggaagctcgaactgggtggagtccaccacagctcaaggaggcctgcctgcctctgtagactccacctctggggacagagcatagccgaacaaaaggcagcagaaacctctgcagacttaaatgtccctgtctcacagctttgaaaagagtagtggttctcccagcacggagtttgagatctaagaatggatagactgcctcctcaagtgggtccctgacccccgagtagcctaactgggaggcactccccagtaggggcagactgacacctcacacggctgggtactcctctgagacgaagcttccagaggaacaatcaggcagcaacatttggtgttcagcagtattcgctgttctgcagcctctgctgctgatacccaggcaaacagggtctggagtggacctccagcaaactccaacagacctgcagctgagggtcctgactgttagaaggaaaactaacaaacagaaaggacatccacaccaaaactccatctatacgtcaccatcatcaaagaccaaaggtagataaaaccacaaagatggggaaaaaacagcagaaaagcagaaaattctaaaactcagagcacctctccccatccaaaggaacgcagccactcgccagcaatggaacaaagctggacggagaatgactttgacaagttgagagaggaaggcttcagacaatcaaacttctccgagctaaaggaggaagttcgaacccaaagcaaagaagctaaaaaccttgaaaaaagattagacgaatggctaactagaataaccagtgtagagaagtccttaaatgacatgatggagcagaaaaccatggcacaagaactacgtgacaaatgcacaagcttcagtagccgatttgatcaactggaagaaaggatatcggtgattgaagatcaaatgaatgaaatgaagtgagaagagaagttcagagaaaaaagagtaaaaacaaacgaacaaagcctccaagaaatatgggactatgtgaaaagaccaaatctacatctgactggtgtacatgaaaatgacagggagaatggaaccaagttggaaaacactcttcaggatattatccaggagaacttccccaacctagcaaggcaggatattatccaggagaacttccccaacctagcaaggcaggccaacattcaaattcaggaaatacagagaatgccacaaagatactcctcaagaagagcaactccaagacacataattgtcagattcaccaaagttgaaatgaaggaaaaaatgttaagggcagccagagagaaaggttgggttacccacaaagggaaacccatcagactaacggcggatctctcagcagaaactctacaagccagaagagagtgggggccaatattcaacattcttaaagaaaagaattttcaacccagaatttcatatccagccaaactaagcttcataagtgaaggagaaataaaatcctttatagacaagcaaatgctgagagatgttataaccaccaggcctgccctacaagagctcctgaaggaagcactaaacatggaaaggaacaattggtaccagccactgcaaaaacatgacaaattgtaaagaccatagatgctaggaagaaactgcatcaactaacgagcaaaataaccagctaacatcataatggatcaaattcacacataacaatattaaccttaaatgtaaataggctaaaggctccaattaaaagacacagactggcaaattggataaagagtcaagacccatcagtgtgctgtattcaggagacccatctcacgtgcagagacacacataggctcaaaataaagggatggaggaagatctaccaagcaaatggaaaataaaaaaaggcaggggttgcaatcctagtctctgataaaacagactttaaaccaataaagatcaaaagagacaaggtcattacataatggtaaagggatcaattcaacaagaagagctaactatcttaaatatatatgcacccaatacaggagcacccagattcataaagcaagtccttagagatctacaaagagacagactcccacacaataataatgggagactttaacaccccactgttaacattagacaaatcaacaagaccggaagttaacaaggatatccaggaattgaactcagctctgcaccaagtggacctaatagacatctacagaacattccaacccaaatcaacagaatatacattcttctcagcatcacatcgcacttattccaaaattgaccacataattggaagtaaagcactcctcagcaaatgtaaaagaacagaaactataacaaactgtctctcagaccacagtgcaatcaaactagaactcaggattaagaaactcactcaaaaccgctcaacgacatggaaactgaaccacctgctcctgaatgactactgggtacataacgaaatgaaggcagagaaataaagatgttctttgaaaccaatgagaacaaagacacaacataccagaatctctgggacacatttaaagcagtgtgtagagggaaatttatagcactaaatgcccacaagagaaagcaggaaaaatctaaaattgatgccctaacatcacaattaaaagaactagagaagcaagagcaaacacattcaaaagctagcagaaggcaagaaataactaagatcagagaagaattgaaggagatagagacacaaaaaacccttcaaaaaatcaatgaatccaggaggtggtttttttgaaaagatcaacaaaattgataggcctctagcaagactaataaagaagagagaagaatcaaatagatgcaataaaaaatgataaaggggatatcaccaccgatcccacagaaatacaaactaccatcagagaatactataaacacctctatgcaaataaactagaaaatctagaagaaatggataaattcctggagacatacacccttccaagactaaaccaggaagaagttgaatccctgaaaagaccaataacaggctctgaaatttaggcaataattaatagtctaccaaccaaaaaaagtccaggaccagacggattcacagccgaattctaccagaggtacaaggaggagctggtactatgccttctgaaactattccaaacaatagaaaaagagggaatcctccctaactcattttatgaggccagcatcatcctgataccaaagcctggcagagacacaacaaaaaaagagaattttagaccaatatccctgatgaacattgatgcaaaaatcctcaataaaatactggcaaaccgaatccagcagcacatcaaaaagcttatccaccatgatcaagtgggcttcatccctgggatgcaaggctggttcaacatatgcaaatcaataaacattatccagcatataaacagaaccaaagacaaaaaccacatgattatctcaatagatgcagaaaaggcctttgacaaaattcaacagcccttcatgctaaaaactctcaataaattaggtattgatgggatgtatctcaaaataataagagctatttatgacaaacccacagccaatatcatactgaatgagcaaaaactggaagcattccctttgaaaactggcacaagacagggatgccctctctcaccactcctattcaacatagtgttggaagttctggccaaggcaatcaggcgggagaaagaaagaaaggatattcaattaggaaaagaggaagtcaaattgtccctgtttgcagatgacatgattgtatatttagaaaaccccatcatctcagcccaaaatctccttaagctgataagcaacttcaacaaagtctcaggatacaaaatcaatgtgcaaaacatcacaagcattcttatacaccaataacagacaaacagagagccaaatcatgagtgaactcccattcacaattgcttcaaagagaataaaatacctaggaatccaacttacaagggatgtgaaggacctcttcaaggagaagtacaaaccactgctgaacaaaataaaagaggatacaaacaaatggaagaacattccatgctcatggatagggagaatcagtatcatgaaaatggccatactgcccaaggtaatttataaattcaatgccatccccatcaagctaccaatgactttcttcacagaattggaaaaaaactactttaaagttcatatggaaccaaaaaagagcccgcattgccaagacaatcctaagccaaaagaacaaagctggaggcatcacgctacctgacttcaaactatactacaaggctacagtcaccaaaacagcatggtactggtaccaaaacagagatatagaccaatggaacagaacagagccctcagaaataataccacacatctacaatcatctgatctttgacaaagctgacagaaacaagaaatggggaaaggattccctatttaataaatggtgctgggaaaactggctagccatatgtagaaagctgaaactggatcccttccttacaccttatacaaaaattaattcaagatggattaaagacttacatgttagacctaaaaccgtaaaaaccctagaagaaaacctaggcaataccattcaggacataggcatgggcaaggacttcatgtctaaaacaccaaaagcaatggcaacaaaagccaaaattgacaaatgggatctaattaaactaaagagcttctgcacagcaaaagaaactaccgtcagagtgaataggcaacctacagaatgggagaaattttttgcaatctactcatctgataaaaggctaatatccagaatctacaaagaactcaaacaaatttacaagaaaaaacaaacaaccctatcaaaaagtgggcaaaggttatgaacagacacttctcaaaagaagacatttatgcagccaaaagacacatgaaaaaatgctcatcatcactggccatcagagaaaggcaaatcaaaaaaccacaatgagataccatctcacaccagttagaatggcaatcattaaaaattcaggaaacaacaggtgctggagaagatgtggagaaataggaacgcttttacactgttggtgggactgtaaactagttcaaccattgtagaagacagtgtggtgattcctcaaggatctagaactagaaataccatttgatccagccatccccttactgggtatatacccaaaggactataagtcatgctgctataaagacacatgcacacgtatgtttattgcagcactattcacgatagcaaagacttggaaccaacccaaatgtccatcaatgatagactggattaagaaaatgtggcacatacacaccatggaatactatgcagccataaaaaaaggatgagttcacgtcctttgtagggacatggatgaagctggaaaccatcattctcagcaaactatagcaagaatgaaaaaccaaacaccgcatgttctcactcgtaggtgggaactgaacaatgagaacacttggacgtaggaaggggaacatcacccaccagggcctgttgtggggtggggggggaggggggaggggggagggaaagcattaggagatatacctaaggtaaatgacaaggtaatcagtgcagcacaccaacatggcacatgtatacatatgtaacaaacctgcacgttgtgcacatgtaccctagaacttaaagtataataaaaaaaagggagagagagagaaaagagaaatctaaaaaaaaaaaaataccaaagacaatcttcaccgaaatagcaaaaacacaatccttaaacttgcatggaaccacaaaagaccacaaataggacaaacaatactgagcaggcagaatgaagctggaggcactacactgcctgacatcaaaatacagtcgactcttcaacaacatagatttgaactgtataggttcatttatacgtggattttccccataatctaacaaggatagaatgcaatattcacaaaagtgaaaactatgtatacagatgactgacattttgtatatgcgcattacacagggctgactctgggacttgaatatacatggcttttggtatatacagggggtctcggaagcaatcccccttgtatacaaaacaatggtaaccaaattagcatgcaatgggcataaaacagacatatagaccaatggaacagaatagagaacccagaagtaaataaatttatttacagacaactggtttttgacaaaggtgccaagaacacactctggggaaaggacaccatgttgaacacatcatgttgggaaaacaggatatcatatgcagaagaatgaaactatactatctctcagcatataaaaaaatcaactcaaaattgattagagacttaaacatgagacctgaagcaaacagtactagaagaaaacagaagggaaacccttcaggatatgggtctagcgaagattttatgggtaagactttataagcacaggcaacaaaaacaaaaatagacaaatgggactgtatcaaactaaaaacctacacataaaaggaaataataaactattaagagatatcctgtagaatgggagaaaatattcatctgacaagggattaatatccggaatatacaaggaattcaaacaattcaacagcaaaaaacaccagattatctgatttagaaatgtgcaaaatagaacaactggccaacaggtatgtgaaaaaatgctcaacatctctcatcacagaaatgcaagtcaaagccacagtgagacattatttcacctcagttagaatggctgttttcaaaaagacaaaacataacaaatgctggcaaggatgcagagaaaagggaaataatacactatttgtgggactataaattagtgagtcattatggaaaatactgtggtgttttgtcaaaaaaactaaaagtagactatcatacagtttgacaatccactaccgggtattgactcaaaggaaaggaaatcagtatataaaaaagatatttgcattctcatgtttattgcagtactgttcacaacagttaagatatggaatcaacttaaatctccatcagcagatgcagagaaagaatgtggtatgtatacacaatggaatattattcagtcataataaagcattaagtcctgtcattcacagcaacatggatgaacttggataatatgttaaatgaaattaggcacagaaagatggaggattttgactgctcacaaaacagagaaatgatatttgagttgatgaatatgctaattaccctgatttgattatgacacattatatacatgtatcacaatatcactgtgtatatcccataaatatctacaattattacatgttgactaaaaataaaaggacaaagaaaaagactcctagaagaaaaacccacaaggagcatcataatggtgaaaagactaagagcttttcctctaagatcaggaataaagcaagatgcgcattttagccattatattaaacatagtagtggctttctagccaaagaatatggaaaagaaataaaggcatcatttagaaaggaagaattaaaattatgtttgttcatagatatgatcatatttgtagaaatccctgaaaactcaccacaaaaactgaataaattaattcagcaaagtagcaggatagtaagtcagtacacaaaattcagttgcatttctttttttttttttttttttttgaggcagagtcttggtctgtcgcccaggctagagtgtagtggcgcgatctcggctcactgcaagctctgcctcccgagttcacgccattctcctgcttcagcctcccaagtagctgggactacaggcacacgctgctatgcctggctaatgtttttgtatttttagtagagatggggtttcaccatgttagccaggatggtctcgatctcctgaccttgtgatctgccctcctcagcctcccaaagtgctgggattacaggcgtgagccactgcgcccagctttcagttgcatttctatacattaatcacaaacaatctgaaagggatattattaacacaactctatttacacgacagcatcaggacactcagccttggccaccaaggacctttgtaatgtttgccactgctgacctcagctgatggagctgcaagaagagtattccattatatcctcatctgggctacagctgctgcaccctacctacttaacactccatcaagtgagcagatttcaattcattgtaacaagaaacagaaaaaccaaggaaacatagcacccacctgagaaatacaataattttcagggactgactcccaagaaattgggatacattaattgccttacagaaaattaaaaacgactgatttaaggaagttcagtgtgctaccagagaacagagagacaacctaatgaaatcattaatacacaaaaggagacattcaataaagaaatagaaatcctaaaaaaaaaacaaacattttggaggtgaagaatatagtgcatgaaatgaaaagtgaaatagaaagcatcagcagcagacttgatcaaatagaaggaggaattcatcaactggaggataaattatttgaaaataaccagtagaggagaaaaataaagaatgaaaaggtaacaagggaagtttacaggatttatgggacaccatcaggagagttaatgttcacacaggatttatagaaggaaagtagagaggtaaagggtagaaagttaattcagagaaataatggctgaaaacttcccatatctggggctcttcccagattgatggacatctaggtacatgaagctcaaagaattacaattagtttccatctaaaagaggtttcacctagatatattgccatcaaaatgtaaaaaatggaagacaagataattttgaaagcggcaagataaataaagttcttacatctgcaggaacctccataaggctatcagtggatttctgagcaaaaactttccaggccaggaaacaataggattatatattcaaagttctgaaagataaaaaactgccatctaagaatactttacacagcaaagctgtccttcagatatgaaacagatacaagacttcctcaggtaaacaaaagttgaaggagtttatcagcaactactcttgccttacaagatatgccagagggagttattcaggcttaaatggaaggatgataattagtaacatgaaaacatatgaaagtacaaaattcactgataaataaatatacgggcaacttaagaatactctaatagtgtaatggtagtatataaatcacataactctagtataaaggttaaaagaaaaataattaaaaattactattgttttcataatttctcaatggatatgcaatattaaaaggtgtaccttggggcatcaaaaataaaatgtagcgggggaagtataagatcaaaatattccccccaaacaaagagggaacaatcccaacttattttacaaggctagcattgccctcatactaaggccagacaaggacaatataagaaaagaaaataactggctgatatttttttatgactatacatttaaaaattttcaacaaaatatgatcaaactgaatttaacagcacattaaaaaaatcatatatcacaaacatgggatttatccttagtacataaggacagttaagtgtacatatacaagaaatgggatactttaataaaatcaaagataaaaatcatacaatcattttgataagtgcaaataatgcagttcacataattcaacatccttccatgataaaaactatgaacaaattaggtatagaaggaatgtactgcaacacaataaaggccatatatgaatagcccacagctaacatcatactcaatgctgaaaagctgaatgcctctcctctaagatgaggaacaagaaaaagatattctcaccacttctattcaacacagtactggaagtcctagccagaggaattgggcaagaaaaataaataaatacactcaaatcagaaagaaggaagtaaaattgtctctgtttgcagatgacatcatatatgtagaaaatgctacagactccacaaaaaaaacctgttagaagtaataatctaactcagtaaagtggcaggatacaaaatcagcattcagaagtcatttgcgtatctatacactaataataaacaacctgaaaaacaaattaagaaaacaatttcatttaaaatagcatcaaaaagaatagagagctcccaaataaatcctttcatatatgaacgcatgatttctgacaagcatgccatgtccattcaatggcaaatggattctcttttcaacaaatggtgccaggaaaactggatatcctcacgtgagagaatgaagtcgagacctttacctaactccatatacaaaaattaactcaaagtggaccacagacctaaatgtaagacctaaaactataaaactcttagaagaaaacatggggcaaaaactgcatgacattggatttggtattgacttcatttggatataatatgaaaggcacagataaaataaaaaatagagaaattggactgcataacatttaggcatacatttaaccaaggagataaaagacctagacactgaaaactatgaaacattgaacaaattctaagatgatacaaataaatggaaagatatctggtgttcatagatcaatagaataaatattgccgaaatagctatactactcaaagtgatctacagattcaaggcaatgcctatcaaatttccagtgactttttttcacagatatagacaaaaaaaatcctaaaatttgaaagaaactacaaaagaccttaaagatctaaagcatacttgagcaataagaacaaagtgaaagatattacacatgcttattttgaattatatttcaaagttatggtactggtatagaaataaaccaatggaacagaatagaaagcatagaaataaacccacacatttatggtcaactaatctttgacaaagacaccaagagtacacaatggggaaagggtactctcttgaataaatggcactgtgaaaccaggatatccacatgcaaaaaaattaaattggaaccttaccctacactgtagagaaaagtgaataagatttaaacatatgacctgaaaccataaaacctataaaacagggaaaagctccttgccattggtttttgtgacaattttttagatgtgacatcaaaagcacaaggaataaaacgcaaaaataaattagaactacatcaaacaaaaaagtgtctgcacaacaaaggaaacaacaaaatgaaaaggcagcacatgtagcgggagaaaatatttccaaccatatatctgataagctattaatatccaatatatataaggaactcatataactagcaaaaaaacttaataacccaattaataacctgttaagatggacaagggactgaatagacatttattcaaagaagacatacagatggtcaacaggtatataaaaaggtgcttaacatcacttatcatcagggaaatgcaaatgaaaaccacactgagatatcacctcataactgttagaatcgctattatcaaaaagtcaaaagatagcaagtgttggtgaggatgtggagaaaaggtgtcccttatacatttttgttaggaatgtaaattgatacagtcattatggaaaacacgatagattttctttaaaaaattaaaattggaactgctatatgatccagcagtctcagttccgggtatatctaaggaaaacaaagtcagtatcttgaagaggtatctgcactcccatgttcattgtagtgttacagtagtcaagaaatgagcaacatagtattcataggcatggtggcttgtacctgtaatcccagtacttgggggtggccaaggtgaaggatagcttgaacacaggagtttgagaccagcctaggaaacatagtgataccctatctctacataaaattttaaaaattagctgggcatgggggtgcatgactgtggtcccagctactcaggaggctgaggcaggaggatcacttgagcccatgaggttgaggctacagtgaactgtgattgtgccactgtactcctgcctggatgacagatggagaccctgtctcaaaaagaaaggaagaaaatagtgtgtgtgtgtgtatcaccaaattcccaaataaacacatcacatacatatacatacagacacacacacacacatatatacacacacacaatgaaatattcatcctttaaaaagcaggaaatcatgcaatttatgacaacatagatgaacctggaggatattatgctaagtgaaatagccagacacagaaagacaaatactgcactatcccagttacatatggaattctaaaaagcttgaactcagagaaacggagagtagaagggtggttactaggggtcagggagtaggggaaataggaaatgttgaagggtacaaacatagagttatcagatgaataagttcttgacataacgtccagattggtgactatagttaatatattctatacttggaatttgctaagagagtatagcttaggtattctgaccacacacacgcacacacatggcaactatgtaaggtatatgttaattggcttgattgtagtaatcatttcacagtaggtcaaatatgttcttaaatatatgcacttttaatttgtcaattatacctcaataaaagctgaaaaaagcatcaagaataacaaacttaggaaccaactttaccaaggaggtgaaagtcttgtacaatgaaaattacaaaacaatgctgaaagaaattaaagtagacataaagggaaaacacctcctatgttcatggattggaaggccaatattgttaaggtgtcagtaccacacaaaacaatctacaaatccaaggtaatcccaataaaaatcctaatgatgttatttgcagaaagaagaaaccccatcctaaaattcacatggaatctcaagggaccttgaatagctaaaacattcttgaaaatgatgaacaacattggaggactcacactttctgatttgaaaacttactacaggccaggtacaatggcctacacctgtaatctcagcacttttgaaggctgaggtgggaggacttctgagtccaggagtttgagaccagcctggggaacacagggagacctcatctctacaaaaaataaaataattggccaggtgtaatggtacacacttctattcccagctactcaagaagccgaggtgggaggattgcttgagcctgggagattgaggtggcagtaagcagtgataatgccactgtactccagcgtgggcaacagagtaagaatgtctgaaaaacaaacaaaaaccccaacttattacgaagctacagtaatcaaaactatgtggtattgacataaagatgtagagaccaatggaattgaatagagagcccaaaaataaacccttgtatacatgatcaaatgattcctgagaagagtgccaagaccattcaatagggaaagtgctgtattttcaacaaatggtgccaggataactgaagttgagacccttacctaataccatacacaaaaattaactcaagagaatgaagttgagatccttacctaaccatgtataaaagagaatgaagttgagacccttacctaacactgtgtacaaaaacttactcaaaatgggtcaaagtcctaaaactatgaagtcttataaggaaacataggggaaaaactttacatcattggcagtgcttcttgtatgcgacaccaaaggcacaggcaataaaagtaaaaatagataaattgtacttgcacaggcaataaaagtaaaactagataaattttaaaaatttacattgtgtgcattaaaataatatcaactaagcaataagacaacctacagaatgggagaaaaatttgcaaatcacatacctgataagggattaatgtccagattatacagagaacttctaaaagtcatcaccaaaaaacaatgcacctgaaaaatgggcaaaagggccaggcacggtggctcacgcctgtaatcccagtactttgggaggctgaggcgggaggatcatgaagtcaggagattgagaccatcctggctaacagggtgaaaccccgtctctactaaaaatacaaaaaattagccaggcgtggtggtgggcgcctgtagtcccagctactcgggaggcaggagaatgatgtgaacccaggaggcagaggttgcagtaagccgagatggcaccactgcactcagcttgggcaacagagtgagactccatctcaaaaaaaaaaaaaaaagggcaaaggacttggacagacgtatctccaaagaagatatacaaatggataatagtacgtgaaaagttgtttaacatctctagtcattaggaaatacaagtcaaaaccacaaccttacatacactcagatgactactattaaaaaaataaacacagcctaggcaacatagtgagacccatctctagtatcagctacgtgggaggttaaggtgggaggatagcctaagcccagaggtctaggttgaggctgcagtgtgccatgatcatgccactgcattccagcctaagtgacagagccagatcttgtctcaaaaaaatcccacataaacagaaaataaccactgctggaagggacatggagaaattggaatccttgtgcactgttagtgggaatgcaaaatggtacagcctctgtgttaaacagtttggtgttccttcaaaaattaaaaacagaattatctgatccatcaactccacctctgtgtatacacccagaaggattaaaagcagtctcaaagatatatttgtatacccacgattgtagtggcattatttacaacagttaaaacatcaatgcaacccaaatgtccatggaagaatggataagcaaaatgtggtatatacatacaatgtaatattattcagctttaaaaaaaatagaaattttgacacatgccacaacatggatgaacctcgaggccattatgttaaatgaaatacagcagtcacaagaagagaagtactgtatgtttccacttatatgaggtatgtagaatagtcaaatcagagacatagaaagtacaaggtggtttccaagagatggcggtggtgggggggttggggaattattgtttaatggatatagagtttcataattacaaatgacaagtgttatggagatggatgatagtgatgattgcacagcattgtgaacgtatctaatacattcactgaattgtacactaaaattggttaggatggtaatttttatgttaagtgtattttgccacaataaaagatttggaaatcaacaacaaatagaaatcccagaagataacataggaagaaatctagatgatctttagtttggtgatggctttttagatatgacaccaaaggcatgattcatgaaagaaataattgataagctagactttgttaaaaataaaagtttctgctctgtaaaacatactgtcaagaggatgaaaggacaggccacagaagggagacaatacttgtaaaagatatacctgataaaggactcatccaaaatatataaagaaccttaaaaacataacaattagaaaacaaacaatctgattacaaaatggactgaagaccttaacagacatctcaccaatgaagatatacagatggcaactaagtatatgaaaagatgccccacatcttacgtcattagggaaatggaaattaaaacaagaaatgtgatatatctacacgcttattagaatggccaaaattcaaaacactgacaataccaaatacttgccaatatgtggggcaacaggaacactcatccattgctggtgggaatgcaaaatggtacagccactttgacatataccattaatgggaatgtaaagtggtgcagccctggtggagaagagtttggtggttcttcaaagaattaaaaatggaattatcataggatccatcaattccacttctgaatgtgtatacatatcccccgaagaatccagagtatatcgaaatcagtggtttcttataaaattaaacatattcttaccatgcagttcagcaatcacatccttggtatttactcaaaggaggtgaagacttatattcacataaaaatctgcacagagatgtttacagaagctttatttgtgattgttgaaattggaagcaaccgagatgtccttccataggtgagtagacagataaactgtagtacatccaggcaatgaaatattattcatcactaaatagaaatgagctatcaagccatgaaaagatatggaggtaattaaaaaacatattactatgtgaaataaggcaatctgaagaaactacatactgtatgattccaatcatattgcattttagaaaaggcaatgctatggaggcagtaaaaagttcagtggttgccaagggttgttggggaagaagggttgaataggcagtgcacagagtacttttagggcagtgaaaatgtacaaatatatgtaaatatacgtatctgtatgatactataatggtagatacatgcatattagtccgttctcacagtgctataaagaactacctgagactgggtaatttgtgagaaaagaggtttaattgactcacagttttgtaggctgtacagtaagcatggctggcaggcctcagaaacttaaaatcatggcggaaggcaaaggagaagcaggcacatctttaccatggcagaacaggagagggaaagaaagtgagatgggaagtgccacacacgtttaaacaaccagatctcatgagaactcactatcatgagaacagcaagggggaagtttgccccccaccaggcccctcccctgacacatggggattacagttcaagatgagatttgggtgggaacacagagccaaaccatatcaacatgttacacatttgtagaaacccacagaatgtacaccccaacagtgagccctaatgttaactagggactttgataataatgtgtaaatgcagattcataagttgtaacaaacgtgccactctggtgggagagttggtaatgggaaaagctctgtatgtatgggtgcagtgggtatacgggaaatctctgtacttacctctcaattttgctggaaccctaaaactgctctaaaaatataaagtctttaaaatacacatacacacatacagacaatcgaatagagaatcataatggtacactatcagaaaatcatcaaacacaaaaaaaggcagtaagggaggaaatgttgtatttaaaaaatgtaaggcaaaagaaaaggcacaaaatgtcagaacttcttttttataagtaagtactttaaatgtaagtcgattaaattctccaaaaagcagaggttggcagaatggatttaaaagaaaaccatcaacctatgctgtatataacaaactcacttttggtctaaagacacaagtagattgaaagtgaaagaatgaaaaatgatatttcatacaaatagtaacctaaagaaagctggaggtaattatactaataaaagaaataaacttgaatttaaaaattgttataggagacaaaggaggacattacatactgagaaaatggaaaattactcaagacttcgcaattggaaacgtatacacaccaaaatatagagccccagaatataagaaaatatactgacagaattggagtgagaaagacagttctacaataatacttagggacttcaataacgtactttcagtaatgggtagagtcaaagaagaaatgaaaacagaaacttaaaaatatcttcagacaaatgacagtgggaacacaacataccaaaagcaaaacatgcagcaaaagcagttctaagagggaagtttacagcaataaatgccttgcctacattaaaaaagaagagatatttcaaatagcccaaaattgtacctcaaggaattagaaaaagaagaacaaactaaagccaaagttaacagaaggaaataataaagatcagaacagagacaagttagaaagaaaaaccataggggaaaaaagtcagtaaaactaagacttcaatttttgaaacaaagaattgatttttgaaaaataaaatcaacaaactcttggactaagaaagaggacaaaatcagaaatgaaaatggagaatatattacaacaggtacttcagaaataaaaaggatcataagggacttttatgaacaattatatcccaacaaattggataacctagaggaaatggacaaattcctagaaaaaaaccaacctgctaagattaaatcaggaatagaaagcctgaacagaccaatagcaaagagatcacagtggtaaactaaagagcttctgcatagcaaaagaaattatcaacagagtaaacagacaacatatagaatgggagaaaaaatatttgcaaactattcatctggcaaaggtcctatgtccagaatccataaggaacttaaaccaatcaacaagcaaaaaacgaataatccaattgaattggcaaaggacaggaacatacatttcttaaaagaaaatacagaagtagccaaacaaaaaaacattctcatgatcactaataatcagaaatgcaaataatgaggccaggcacggtggctcatgcctgtagtcctagcactttgggaggctgaggtgcgtggatcatctggggtcaggtattcgagaccatcctggccaacatggtgaaaccccgtctctactaaaaacacaaaaattagccaggtatggtggcggtcacctgtaatcccagctactcaggagtctgagacaggagaattgcttgaacccaggaggtggaggttgcagtgagccgagattgcgccactgcactccagcctgggagacagagcaagactctttctcaaaaaacaaacaaacaaacaaaaaagcaaaaaacagacaaaaaaaaacaaaacaaaacaacaacaacaaaaaaacaccaaaccataatgggatgccatctcacaccagtcagaatggcaattattaaaaagtcaaaaaaataaaagttgctgggaaggctgcagagaaaagggaacgcttatacactgttggcaggaatacaaattagttcagccactgtgctaagcagtttggagttttctcaaataactgaaaacagaactaccatctgacccagcaatcccattactggatatatattcaaaggaaaataaattgttctatcaaaaagacacatgcatttgtatgttcatcacagcactattcacaacagcaaagacatggaatccacttagatgcccatcagtggtggattggataaagaaaatgtggtacatgtacaccatggaatactatgcagccataaaaatgaatgaattcggccaggtgcggtagctctcacctgtaatcccagcactttgggaggccaaggcgggtggatcacctgaggtcaggagttcgagaccagcctgaccaacatggaaaaaccctgtctctactaaaactacaaaattagctggacgtggtggcgcatgcctctaatcccagctactcaggaggctgaggcaggagaatcacttgaacccggtaggcggaggctgcagtgagccgagatcatgccattgccctccagcctgggcaacaagagcgaaactccgtctaaaaaaaaaataaaaaaaaaaaatatatatatatacatgaatgaacttacgtcctttgcagcaacatggatgcagctagaggccactatcttaagcaaattaatgcaggaacagaaaaccaaatactgcatgttaccacttgcaagtgggacctaaacactgagtaaacatggacataaagatgatcagtagacactggggactacttgggggaggaatggagaggtgggctgaaaacctacctattgggtactatgctcactacctgggtgataggcttatccacactccaaacctcatcatcatgcagtatactccatataccatgcaacatatagacctgtacatataccctctaaatcaaaaataaaagttaaaaaaaccccaaaacctcaaacaaagaaaagcccaggaccagatagcttcatgactgaatactacccaatattcaaagaataccaatacttcttaaactcttccaaaaaaatgcagctatagggaatacttccaaaaaaaaaaaaatgcagctaaagggaatacttcctaacacattttatgaggccagcatcaccttgatacccaggtgagccaaaggcatcacaagaaaaggaaactacaggccaacataacccaagaataccgatgcaaaaatccttaataaaatattggcagactaaatttaacaatacatcaaaaagattatatatcatgtctatgtggaattaatttctggcatgcaaatcttatttaatatacatgtagcaatcaatgtgatactaacagactgaaagatgaaaaccacatgatcatctcaattgacacacaaaaagtatttgatgaagttgaacatcctttgttgataaattctaacagttcaggtatagaaggaacactcctcaatataacgaatgccatttatgaaaagcccacagctaacgttataatcaatgagggaaaacagaagcccttctactatgaaccagtacaaggcaaggatgcccactctagctactactactcaacatagtactggaagtactagtacaaccaaacagacaagaaaaagaaatgaaagacattcaaatcaggaagtaagaagtaatattatctttatatgaagatgacatgatcctacatatagaaaaccccgaagactctgacaaagcaacctgttagaactaataaatgagttcagtaaagttgtaggatataaaatcaatataaaacagtagttgcatttctatacacaaataatgacctggccaaaaaagaaatcaagaaaacaatcccatttatgatagcatcaaaaaaattgcttaggaataaatttagccaaaaagatgaaagacctgtacactgaaaactatgaatcattgatgaaagaaattaaacaagatacaaataaatggaaagatatcccatgctcatgaatctgaataatattgttaaaatgtcaataatatccaaatcaatatacagattgaataaaatccctatcaaaatcccatggaaaatttttttaaattctaaagttcatttggaatagcaagaaccttaagtagccaacgaaattctgaaaattctgttctgaaaaacaaagggagacttcatactttctggtttattttacaaaactattgatcaaacagtatggtcctggcataaaaaacaaacatgtagaccagtggaacagaatagagagcccagaaagaaattcaaagatatatgatcaaccaattttccacaagaacacgaagaaaacaatgcagaaagatagtctctctcataaatgacgttaggaaacccagttctgtggcttgtccaacccatggcccacagaccacatgtaagcccaggatggctttaatgaggcccaacacaaatttgtaaactttgttaaaacattgaatttttttgcatttttttagcccatcagctgttgttattgttagtgtattttatgtgtggcctaagacaattgttcttacagtgtggccccgggaagccaaaagatttgatatcgctgccttacaccatacatagaaataaactcaaaatggataaaagacctaaacataagaccaaaacccacaaccagaagaaaacataggggaaaagctcgacatggctctggcagtgattttttggagatcacaccaaaagctcaggctacaaaaacaaataattggtataccatcaaactaaaaaacttctgcacaggaacggaaacagtcaacaaaaggaaaaggcaacctatggactagaagaaaatatttgccaaccatatatcttataagaggataatatccaaaatttataaggaatgcatacaactcaataacaagaaaatagataacccaattaaaaaatgggcagtggaactgagtagacatttttgcaaagaagttataaaaatggcaaacacatatatgaaaagacatttaacatcactaatcgtcagggaaatgcaaatcaaaattactatgcgatatcacctcacactcatgagaatagctattaagtgttggctagggttagggaactcttgtacagtgttggtgggactgtagattggtgcagtcataatgaaaaacagaatggtggctcctaaagaaattgaaaatatactatcatctgacccactaatccctcttctaggtatattcccaaagaaaatgaaatctccacctcataaagatatctgcgctcctatattcattgtggcattatatgcatgagtcacgatatgaaaacttacgtgtccattgatggatgactaaactgtggtgtgtatgtctacaatggaatattattccgcattaaaaaaggagatcctgccacttgccacatggatgaaactggaagacattgtgctaagttaaataagccatatacaaatgaaaagttttaaataatctcacctatatgtagaatcttaaaaagaaaaaagtcaaatatacagagatagaataaactagtggttaccatgggcaaggtgtgggggaagaaaatggaaagatgtaggtcaaaggataccaagtagcagatatataggatgaacaagtctagagatctcatgtagaacatgagaatagttagtatattgcatttggaatttttgccaattgagtagatcatagcttttctcactcatacacacaaaagaataactgtgagatgatggacatattaatttgcatcactatgttaacgatttaactgtatgttttatacactaaatatgcatatttttaaaattaaaaaaaaaaaacacaacaagataatgtacagccagacagaagcccaataagaaaagagaggacttgaacaataccataaaccaactagacctacaaacatatatggacactccacccaactacacattcttctcaagtgcacatggaacattccctaggagggatgatatgttaggccacaaaagagtctcaataaattttaaaatatagaaatcatacaaaatatcttctctaactacaatatagtgaggccagaaatctgtaacagaagaaaaacctaaaaattaacaaattcagggaaataaaactacacactctttaaaaattattgtgtcaaagaagacatcagaagggaaattataaaatactttcaaaaagtgaaaatgacgacacaacatactcagacttatgggatgtagtgaaagaagtgctcagaggaaaaattatagctgtgaatgcccacactgaaaaagaagaaggatccataacctaatattataccttacgtaaccagagaaagaagaacgaagtaaacctaaagttaaaagagagaatgaaataatatgtatgagtggagataaaactgaattcgagcttaaataaacaacagagataatttaacaaaaccaaaagttgcttgtttttgaaaagatcaaagttgaaaacctttaactagaatgactaataaaaaattagagaagttgcacatatctaaaatcataaacaaaagtaggaacacaacaaaaaaaaacaaaaataagaaaaaaaaacaaaagtgggaacgatataactgatcttacagaaataaaaagtgtgataaaagaatactatgaataactgtataccaacaaattatataacctagataagatggacgaattcacaaaatactaatacagaccaaaacagaaattgaaattatgagcagacccataacaagtagaaagtttgaatcagtaaccaaaaaccttccaatgaagaaaatgctacacagatggcgtcactgttgaattataccaaacacttgaagaattcacaccaatccctctcaaactcttccaaaaaacagaggagaaaaaactttgcaatacattctatgaggccagtattacatggattccaaagccagacaaatataccacaagaaaagacaaactagatactaaaatcttttatttaacaaagtactagtaagccaaattcagcagcatattaaaaaggattatatatcatgaccacatggaatttatctcaagaatacaagggtggttcagtacaagagtatcaatcaatgtaatacaccacattaatacaatgaaggataaaaaatccatgcaatcatttcaattcactcagaacaagcatttgacaaaattctacaacctttcaggataaaaacatggaactttcaaaatgtgttaaagaggatttgtgaaaaatccacaactaatatacttaatgagaaaaaaaactgaaaaatttctcccataacaaagagtaagatatggctgtatgctttacccagtgctattgaacaatgtactgaaagttttaaccatgacaattaggcagataaataaacaaacaggtaaatgaatagcatccaaattggaaaggaagcagtaaaactctttattcaataatgacatcttctatctagaaaatcaaagaatccacaaactagtagagctaataaacaagtccagcaaaattgcagggtacatgttcaacatttattttaagaaaatcatttgtgcctctatataccaggaatgaacagcccaagaaggaagtcaatttttaaaattccacttacaatagcatcaaaaagagtaaaatagctaggaataaattaaaacaagaaggtgaaagacttctgcactaaagactacaaaacactgttgacaaaaattaaagaagacttaaataaatagaactatacatcctgtgttcacagattggaagattaaatattgttaagttggcgatattacccagtgatctacagattcaatgcaacccttatcaaaatcccaagggcctttttatttgcagaaatgtaaaaactgattttaaaatgtaaatggaattttcccagggccccaaacaatctaaaatcatattgaaaaagaacaaagttggaagactcaggcctgccattttcaaaacttttacaaagctgcagtaatcaaaacaatgtggtactgacacaatgtggtctctaggacacaaggatggacatatagaccaatggaatataatagagaatgtagaaataaacactcacatatatgatcaattcattttcaacaaatgtatcaagaattcagtgggaagagtagtcttttaacaaatggtgctggggcaactggatcctcatatatcaaagaatgaagttggacccataactcatagcatataaaaattatctcaaaatgtatcagagaccaaaaaataagagttaaaggcataaatttcttagtagaaaacaggagtaaatctttatgacttgagattggaaataaattcttagaaaagacacaaaaaacacaatattgtaaatgtactaagtgacactgaattgtacattttgaaatggtttctgttacttaaaaaatttaaagggtgcacagaagactaaaaagcagcacagacagaattatcaccagaaaaagaagactctatattaaatgtcaacatggagaacacatgtcagaaataggtagtccagagcagcagctatagtggaggctcttgcaaatgactaagatttgaggtggcaccctcagagaatcacctcttgggggtagattcgatttatggagtagatgtatctcagagacatggtaggaaagccaaagaatggtgagcatagctgccatctagaaaccacctacacatgcaagcataagagattggttgaaaggttatagcacagtcacactaaggaatactatgcaactttagcaatgcaatgagaaagatctctgtgaatggatgttgagtgatttctaggagatgttgttaggtgagaaaagcaaagttcaaaagggcatatacagaatagtacttttttgggaaatgagaaaataatcatgtcttataaagagcaaacacacacaaactataaactagaaaacactgaaactggttacctataatgggtagggggaattaggatggaagagatatgggtgagaggaagatttctctcagtagctccttttgtttagtattgacttttggaagtatgttaatgttatatgtattcaaaaaataaaattaacaagatagggaccacttctgaggtggtggaatgagcaccttgatataaccactccctgaaaagcaatgataaaactggacaaagaaatataaaattgaaaagtgctaattaaagaaaaaatattaagccttcctaagaatagcagggttatgatttaacgtggggctgccatctccccacccaagctcaggggcacggtaggcttgaggaccagcaacaaagaaggctcatctgattttgaattccatagaaaaccctatgcactatgttaagcaacaaggatttcagtggcaaataattggaggcaacccacatcacagcaacctaatgtttcaatactggttgggcaagcgacagattaagaaaaattttaaaaggaattctggagatatggaagttgtacatgcttgcaggagagatcagagaggtttcctgctatctacttatccttggctgactgtgagaccttttgcaagcagacagtaaaatacaggacagagttataaagtgcctgaactttgaatgtcccaacccacacatagatcccctcagcagagggtggaagattcactggctcaagatgtttaaacaaatgtctgactaatcatggcttgaccactaggttatgctgatccaggggtgacaccaatgaagccaggcttacaaaacaaacataagaattaaaacaaacaaaactgagcaaagacaccagtggctgcacactgcaggagaacacagactctgcagaatccatgcagagaaggcatacacaagcgagcaaacaaataaatgagtaacagaaatcatccctggttagggagaagaactagaatccagagtttctacgatatattatctaaagtaagtttttaacaaaaaaaatgagatatgcaaagaaacagaaaattgtgacccttgaacaagaataatgagcaataaataggaattatctctgaagggccccaaatgttagggcgcgatttcaaagtaagtattataactatgttcaaagaaccaaaagaaaccacattaaagaatgcaagtgtgatgacaaagactcatcaaatagataatatcaatatagagatagaaattagaaaccaaatagaaattctgtagttgtgaaatataataacttaggtgaaaaactcactagtgcggctaagcaaatttgacctggcagaagaaagaatcaatgaacttcaacgcagatccataaagatgattcagactgaagaatagaaagaaaaataatgaagaaaaatgaagagatacccattggataccataatatagtggtccccaacctttttggcatgagggaccagttttgtggaagacaatttttccacagccagttgggggaggctttagttagattctcatacggagtgcacaacctagatccctcacatgctcagttcacaataggatttgctctctgtgagaatctaatgccatcactgatcagacaggaggcagagctcaggcagtaatgcttgcttgcctgctgctcacctcctgctgtgtagcccagtttctaataggccacagactggtaccagtccatggccctggggttgggaacccctgtcctaacaggatgtgtaacaatgtatgtgtaattaagttgtaacatatatgtaattaagagtagaaaacatatgtggaattaaggagtaacaacatatgtgttaataagagtactgagaaggagagaatagggcagacaaaaatatttgagtagattattaacctgaagcagattgtttttgcttaagctgcttattgtaacctccagattacactttaaaaatgggggaaataaactaacaaaggaattagaatggtactctagaacatatctattcaacctgcagaaggcagtaaaggaggaagagaggaacaaaagtgatatgagacatatagaaaataaataacaacatggtagatataaatccttccatatcaataattatattacatataagtgaattaaaaactcaataaagagcagagattgccagactgccttaaaagcaggatccaaatatatatggtctataagagtcacattctagattcaaagacatagttgaaagtaaaatgatggaaaaagatgacatgcaaacagtaataagaaagctagagtgactgtactaaaatcagacaaaattggctgggtgcagtggctcacacctgtaatcccagcattttgggaggctgaggcagacagatcactcgaggtcaggagttcaagaccagcctggtcaacatggtgaaactctgtctctactaaaaattagctgggtatggtggcaaatgcctgtagtcccagctacttgggatgctgaggcaagagaacggcttgaatccgggaggcagaggttgcagtgagccaaggtcacgccactgcactccagcctgggcaacagagtgagactccatcccaaaaataaaataaaaataaataaaatcagacaaaatagactttaaaaacaaaccatgttattagagatactgagaagcattttacaatgacaaaagggaaaatttaacaggaagaaatagaaatcataaacagaagtcataaagaaataaaaatttataacagctaaaaacacagccctgaagtatatgaaataaaactgtcagaaatgaagagagaaacagacaactgaacaataatagacaactcaacaataatagtactaactcttgttgattttctgtcttgttgttctatcaattattcagagtgagttattgaactattacccaactactattcttggatgaaatggtgggaggtgaggctatgtggcactctgcttaataccctcccctgttctggtgtcagggagacaaatgtggagctgacttttcgtcagaaacagtggtacccagaaagtagtggggtaacagatcccaagtgctcaaagtaaaaaaaaaaaaaaaaaaaaaaaaaaaaagccaaccaagaatactgtgtccagaaaagtttctttcaaaaagaaggcaaaataaaagcattcccagataaacaaaaacagaattccttgttagcagaccagttttgtaagaactactagaggaagttcttcaggcaaaaaggaagtgctcccaggaagttcacatatatccaaaagcaaagagcaaggaggtaaataggagcaaagctgttctagagtaaggaaataccaccagttggtaactcaaatccataaaaaccaaaaaagtggatcaaatatatgatataaggaggttaataaaacagaaactagaaatatatacttgctctcctttcagcttctttaaagatatatcattatatagtatgatcattataatagcgcataataaagatgtaatatatgtaacaataccacaaaaagtggtaaaactgaataaactcatacaggaataacttctgtatctcaccaggattaatataaatatgaagtaaattttgagacgatacataaggtaagccctagagcaaacactaataacaaatagaatattgaagaatcataaaagaaatgaaaatttatattagaaagtagtcactagatggaaaagaaagcagcaaaggagaaatagaggaacaagaaatagtacatagaaaagaccaaaagtaaaactgtggatataaatctaattatatcaataataatattaaatgtgaatggattaaacaatctaatcaaaggcaggaattatcagaccagatttgaaaaacaggatccatctgtattccatctatatgaggcacactttagatgataaatgccaactgaaagtaaaaggatggaaaaagatatatcatgtaagcagcaaccataagtaacctgaagtgctataataaagtcaaaggagattttaaattaagaatgttactgaagttaaatatgaatatctcataatgataaaatgtcaattcatgagaagatacaatgattataaacatatattcacctaacaatagagaactaaaacataagaagcaaaaactgacagaactgaacagagaaatagccaattcaacaatagtagttggagacttcaacactccactttcaataatgtgtagtacaagaaagaagatcaataaggaaacagaagatatgagcaacaccataaaccaactagactcaaaaggtaattatagagcacttcgcccaacaaccaacattgaatatacagtattttcaagtgcacatgagacattctccaagaaggaccatatgctaagtcacgaaacaaacctgcataaatttaaaaggattgaaataatacaaggtatctttttctgaatataatgaaataaaagtagaactcagtagcaaagaaattagggaaacatacacatgtggaaattaaacaacactacattcttaaataatcaatgggtgaaagaattcacaagggaaatggaacgtactttgagattaatgaaaatgaagatacaacataacagaacttatgggatacatttaaagcagtgtaaagatggaattttatagctatgaatgcctatatcaaaaaataaggcttcaaatcagtaagccaactctccacctcaagaaactagaaaaagaagagcaaactaaacctaaagcaagtagaaaaaacaaaataataaatattagagtagaaataaaatatagaatataaaaataataaagtcaacaaatccaaaatttggttctttgaaattaacaaacctttgatagattggtaagagagagggagagggagaagaaaagaaggggaggaagaaagagggggaggaggaaagacagagagggaagtgcatgaggcaaagggggagagagaaaactcaaattactaaaatcagaaatgaatgacagttttacaaattaaagcaaaaaaacgaggctagctgcagtggctcacacctgtaatcccagcactttgggaggccaaggcaggagaattgcttgtggccaggagttcgagaattgcttgtggccaggagttcaagaatagcatgcacaacaaagcaagaccctatctctacaaaatattttttgaataacagctggtgttgtggtgcacacctgtcataggctaaggggcaaggatcacttgagactaggagatcgaggttacagtgagctatgattacaccactctattccagcctgggcaacagagagagactctgtttctcaaaaagaaaaggaaaaaggaatgaatgagggaagtatactaccaacctgacagaaataaaaaggattatgaaggaacactatgaacaattttgtgccaataaattataaaacttagatgaaattgacaaattcctagaaagatgaaaactatgaaaactgactaagaaataagtagaaaatgtgaatggatctgtaataagttaaagagattgaattagttatgagaacactagttgaaaagaaaagcccaagagggccagatgagtgaatctaacaaatatctaaagaatatcaattctttatgacctcttccaacaacaaaaaaatagaagagaaggaaaatttttccaatacattctttcagtccagtatcaccctgacaccaaaaccagacaaaaacatgaaaagagaacttataaaatttattttacccattttaggtatatagttctgtggcattaggtaaatccacgctattgtgctttatgctttcttgatgttgtaaatagaattgttttcttattttcagattgtttttgacagtgtataggaatactattgatttttgtatttcattacaataactgtgatgaaaatgatgtaaaaccctcaaaaccctcaacaaaatactagcaagtaaaatcaagcaatgtttaaaaaggattatacattataaccaaatgggacttatttcaggaatgcaaggttgaattaacatctgaaaatcaattaatgtaatacaccattatcaacagaataaaagacaaaacaccacgatttctgtcagtctgttcagactgttataacaaagtatcacgaactggtggcttataaacacagaaatttattttttgcaattttacaggcttggaagtccaaggtcaaggcactggcagattcagcatctggagaggactcgctttctggttcatgaacagttgtcttcttgtgtcctcatatgacggaagaaaaaaaggagctcactgaggtctcttttacaagggcactaatccattccatgaggtctccaccctcatgacctaaccacttcccaaaggcctcacctcctaataccaacattgggggttaggatttcaacatatacattttgaggaaacacacacattcagtctatagcaattaatgatagaataaaagacacagaaaagcatttgggtgataaaattcaacacccttccatgatgggagaaaaagccctactcaatatactaggaatagaaaggaacatcctcaacctgataaagggcatctattaaaaatcacagttggccgggtgcagtggttcacacctgtaatcccagcactttgggaggccgaggcgggtggatcacgaggtcaggagatcgagaccatactggctaatatggtgaaaccccgtctttactaaaaatacaaaaaaattagccaggcatggcagcatgcgcctgtagtcccagctactcgggaggctgaggcagaagaatggcgtgaacctgggaggtggagcttgcagtgagccgtgatcacaccactgcattccagcctgggtgacagagcgagactctgtctcaaaaaaaaaaaaaaaaaaaaaaaaaaaatcacagataatatcatacttaacagtgaatgactgaatgtttccccgttaagatcaggaatgagacaaagagatctgctctttccacttctattcaacatttattgagtgttccatccaggataatttgggaagaaaaagaatccagactgaaagaaagaagtagaactatttggagatgacataaatttgtgctggtccagttttgtgttactataaaggaacacccgaggctgggtaatttataaagaagattttaattggctcacagttcttcaggctatacaggaaatatggcaccagcacctgctcctggtgagggcctcaagaagcttacaatcatggcgaaaggcagaggggcaggcatatcacatggcaagagcaggagcaaggtggagggaggtagcagattctttaaacaaccagctcttagcataaactaccagagtaagaattcgctcattaccacggggatggtaccaagccattcacgagggctccgtccatgatccagacaccccccaccagaccccacctccaacattgggaatcattttaatgagatttggagggaccaaacatccaaaccgtatcaatgttgtatacagaaaaccccaaggaatccattgtgaaacaattacaacgaatgagttcagtaaggctgcaggagacaaaatcagtatataaaaatcaattgtatttctacacactgtcaaaaaacaatctgaaaatataattaagaaaacaattccatgtataacatcaaaaaagaataaagcacaacagtgcgaatttacctaatgccacataactatatacttaaaatgagtaaaatagtagattttatgtatatttttaccataataaagaaaaaataaaataccttgggaataagtttaacaagtacaaaacttatcctctgaaaattacaaaacattgttgaaagaaaagaagatacaaataaatggacagacattacatgctcatagactggaagacttaatattgttaagatggcaacactcccggaatcgtgctgatctacaaactcaacacaatccttaccagaatctcagctggtttctttgtagaataataagctgatgttcaacttcatatgaaaatgcaaaggacccagaatagcaacaattttgaaaaagaaaagttggaggcttcatacttcctgatctccaaattgactacaaagtaacagtattcgagaaaatgtgatactggcatgagatagatatgtagatcaagggaatagaatcagagtgtaaaaacggagccatatatctatggtcaattgatttttgacaaggatgccaagaatgttcaatgcggaaagaatagtcttttgaacaaatagtgttgaaacaactgatatccacatgagaaaaatcaattggtccactccacatcatatataaaaattaactcaaagtggatcaaagacataaatacgtaacagataaagctataaaattcttagggtaaacataagggtaaatctttatgaccttggatttggcagaggtttcttagatataacaccaaagaacaaggaacaaaagaaaaaaagtagatatattggacttcataaaaattaaaagcttttgtgcttcaaaagacaccttaaagaaagtgaaaagacaacctacagatgggagaaaatatttgcaaataatctatctgataggggacttgttactggatatataaataactccttcaactcaaaaacaaaaagacaaatatcccaacttaaagaatggatgaaaaatcggaatagaaatttcttcagggttgacatatagttaataaacacatgaaaagatgctcaacgtgagtagtcacagggaaatgcaaatcacacccaaaaggagatactgcttaacaaccactaagatggctataattgaaaaaagataatagcaagtgttggtgaggatatggagaacttgcgcagtgctcatatgctggtggtgagaatgtaaaatgaggcacccactttggaaataattggtcagttcttcaaaaagatagttatcggccaggtgctgtggctcacacctgtaatcccagcactttgggaggccaaggcgggtggatcacgaggtcaggagatcgagaccatctcggccaacatggtaaaaccctgtctctactaaaatacaaaaaattagctgggcatggtggcatgtgcctgtaatcccagctacttgggaggctgaggcagaggaatcgcttgaacctgggaggtagaggttgcagtgagctcagatcgcgccactgcactccagcctggcgacagagcaagacttcatctcaaaaaaaagatagtgatcatttgactcagctttccactcccatgtgttttcatatctctttcttttcttcctttctttttgtttttttgaaacagtcttgctctgttgcctaagctggagtgcagtggcacagtctcggctcactgcaacctcttcctcccgggttcaagcaattctcttgcctcagcctcccgagtagctggaattacaggcacctgccaccatgcccagctaatttttgtatttttagtagagatggggtttcaccatgttggccaggctggtctcgaactcctgacctcaggtgatccacctgccttggcctcccaaactgttgggattacaggtgtgagccaccaacacacccagcctttcatatctctttcatgcccaggagatatgaaaacacatgtccacacaaaaacccacatgttctagaagcattattcatagtagtcaaaatgtggaaacaatctaaaatgcttatcaacaaataaatggataaacaaaatgtttattcattgtatatcatacgatggaagattattcattcataaaagaatgaagcacaagggccgggtgcagtggctcacgcctgtggtcccagcaggttaggaggccgaggtgggcggatcacctgaggtcaggagttcgagaccagcctggctaacatggcgaaaccccgtcactactaaaaatacaaaaattagccgggcttggtggtgcgtgcccgtaatcccacctacttgggaggctgaggcgggtgaattgcttgaacccgggaggcggaggttgcagtgagccgacatcgcgccactgcactccagcctgggcgacagagggagactctgtctcggggaaaaaaaaagaagcactgaagcacaaaccttgaaaacatgatgctaagtgaaagtaaccagtcacaaaggaccatacattgtatgattccacttatataaaatgtccagaataggcaaacccatagagagaaagattagttattgcctagggctgagggggatggaatagtgggtttgggggtgatatttaaaaggcactgggtttctttttggaatgataaaaatgttctcaaactggagtggcagttgcacagctctggggatacacaggcacacttcacttttttgcactttgtggatattgtgtttttaaaaaattaaatgtgtgtggtaagcctgcactgagcaagtctatcagtgccatttttccaacaacatgtgctcacttcattctgggtcagcattttttagcaataaagtgtctttcaattaaggtaggcacattgttttcttagacatggggctattgcacacttaatagactacaatataaacataacttttatatgcagtggcaaaccaaaaaatttgtgtgacttgctttattgcaatatttgcttcattgcagtgtactggaaccgaaccacaatatctctgaggtatgcctatactaaaaaccattcaattatattctttaaatgggtgaattgtatggtatgtaaactatatctccacaaggctgttagaaaaaagctatagcagaagatatttggggtccagggccaaagacttcttagacctgacatcagaagtgtaatccataaaaaggaaacattgaatctcatcaaaatttaaaatgtttgctctgtaaagtaccctgttgagatgatgacaatgaaagctacaatgaataaatatttgcaccctgtttctgacttaagataagtatctagaatatataaacatctcccaaaactcgacagttaacaaaaagtctaattgggaaatggaaaaatgatatcaacaagaatttcactgcatagaatacaaaaatggcaaacaggcacatgaaaagatgttcagtatcatcctaatgaggaaatgtaaatgtaaaccacaatgagatctcactacacacctatctgaatggagaaaattaaaaacagtgtgaacatcaaatgccagcaagaatgcagagaaactagatcacttagaccttgctggcaggaatggggaatgtgaaatggtgcagtcactctggaaaatcagtttggtagtttcttataaaactaaacatgcaactgccacacaactcagcaattacaagcttgggcttttatcccaaagaaataaaaacttatgttcacacaagaaccttacaagaatattcatgtcatccttatcaatgtataaggttcccatggctgctgtaatacatttccacaaacttagtggcttaaaacaagacacgctttttttttttttctcacagttctagaggccagaagtctgaaaagagtcttaggggacgaaaaatcaaggtgtcagcagggctggttccttctggaggcttcaggggagcatcccttccctttccttgccttttcttctggaagcgttctttggtttgtgaccccttcctcaaatcacattgccatttcctgcccctgcttccgtggccacgtaaccctttttctcttctgtagtcattcttctgcctccctgttataaggacccttgtgattacaccgggcccattcagataacccaggatgatctctccatctcaaggtccttaatttgacacatctgcagagtgccctttgccatagaaggcgatagtcacaggttctaggcgttaggacctggctactttgggggccattgttcagcctactctgatttgtaatagcccaaactgggaatgacccacatgtccttggatgagggaatggttaaataaactggggtatatgtccataccgtgaaactccactcagcactatgatttaatgaactgtcgcgatacaaaacaaccggaatgaatccagagaatgatgccgagccaaaagaccccgtttctaagatatcgtgtattgtgtgattccatttacgtggcatttttgaaaagacaaaactagagaatcagagaacagatgagtggtcaccagggattggagggatgggatgggagaaagtccgtgtaaaaggacaaataatgggaaccccgtggcgacgggagcactctgcatctggactcttgctgttgacatcctggttatcatattgtgctatggttttagaagatgctaccactgacggaaactaactaaagggtgcatgggatccctattatttcttaccactgcatatgaatgtctaaaaataaaaagcttgaaagtctcatttttttaaacgggcaaaagatctgaataaatatttcactaaagaagatacacaattgggcactaggcacgtggaaaaatgctcagcatcattaggaaaatgcaaatcaaaaccacaatgaggtaaccattccaactggacagtatttttttttctttctgtactttcgtggaaggggtgctagagttggaaaatgatcatttttgcaactaccacagtaaagcctggtttccaaaagcatttaaatctggagagactttttttttttttttaacaagtagcagggtatatgcatggccttaaagaatctcccccgattgtttattggttgcaaggcaaaatatagtaactgtaaggtagaaaagtggataacggcctcaatttggtgatcaaaataacatcgttaataaggggcagatacactgtgtgcctcaggatgtgatacactgagaaggacatcaggtcacttacagagtacacaacgtggatctaacctgaggaaacatcagactcccccaagaagtggcaggactgtatctttaaaaaatatcagtgtcataacagagaaagagactagaaatgttccagattaaacaagactgaagagacacatctaaaggcagtactgaccctgaactggatcttgcagtggaggaaaaaatgccacaaaggacattgtcatggcaactgacaaaatgggaacataggcattaaattaggtccaagtattatattgatgtttaattgcagaagtcaataactgtattactgctttcaaagataatatctttatttttcagaaatacacagcaaaatgtttaggggcaaagagctgtggagtatgcaactcacagatgtttcagaaaaacatgttatgtgaatataatgtagagaaaggggttcaaatgataaagcaaatgtggcaaaatgtaacaattagtaaactggtaaatcttagtgaagggtatgtaggtgtttttatatctcgtgcttgtaatttttctgtagttcaaaattatggccaaataaacagtttgttttgttttaagaaacaatcctgagggactgctttagctcagcaggtcacaactgggggcaattttgccctccaggggacatgtagcaacatgtggagatgtttttggtggtcataactgaggccggagatgctgctaaacatcctgcaatagacaggacttcctccctcaacaaagaattatccggcactagatttcaatagaggtacagtggagaaactctgccccacttggctgacaataagtcactctgccaggactggtgggcaggaatgccggccgggaaagaggaaccctgcctgtggaattcaaggtcagacaaaacgagaaaaacaacctggctacatcactgaaattaacaagcctattcctgtgtcacgggctgaattgtgtcccacaaggtttgcagttgaagccctggtctttaatacctcggcacgtgactcagcatgtttggagacaggacctttaaagaggtgatgaagctacaatgaggctgttagggtgggccctaatccagtgtgactggtgcccttaaagaaaaggatatttggacacacagagaaacaccagggtgcaagtgcccagagcaatggtcatgtgatgacacaggaagaaggcggccatctgcaaggcaaggaaagaggcctcagggaaagcagccttgctgacaccttgatctcagacttctatcctccagaattgtgagaaatacatgtctgctgtctaagccacccagcctgtggtattttgttatggcagtcctagcaaactaatacatcctggaaagttaacacatagaaataaaagttctgtacatagaaacaggttcaagaacctatgttcttgaacaaaatgaattttaagcgatagagaacatcacagagtatgtacaccaaaggaaattaagcagagattataaattttagaatagaattgaaatagaaataaaattcaattagagatagaattaaatcaaaataaaattgtttcagcagccttagaggcatttttactattttactgattgagaaaaacaagatgcagaaagcaggtatgatatgatcccgtgagtttggaaaacaatgataatgccttcattatgtcacatgtattttatttcattgaatattatatgaacatcaggaaaaatgtaagacaacaaatcctagattatcaacataggtaacagagaggaggggagcccaagcaaacataagaaaaaagttctgtactgaaacacatctattccattctactcatctgtaaagttaaagtgtgaatattggaaagtaatacaacattaaggacactaaaagaaagaatagcccctattcagatctggtattgatagagcctgaggccaatttggcagcagacagagacacaagactgtttgctgcatatgggtcctgggtgagcacttacatgttctaactcactcagtcaacacaggagtcctgggagcaggcagttaggatcctgatttcacagatgtggaaactgaggcacagagaatgcagtagcttgcttagggccacataagaaaatggcagagctgggctatgaccctaaagaaggttggccatataggctgtgctccaaaccactccatgaaacctgccactcaatttttagaaacataattgtacaggaagatttaattttcctgtctcagaatttggcagatgtattagggttttttttttttaactaagggcagagcagacctaaatgaggcaatgaataagtatgtatacacaatccatctcaatgtacattttgtctgtccatgtatacaaataaaactttgtgttatacaaatacagaagatattttctgaggtctgtggagcatttacaaaaataatgatgttattttcatacttggagacaaagaaaatcttcattttaaaaaaagtggagacttcataggctacatcctttcactgtaagcctactaaattagaaataaataacagtgataaaaatttactgcttaaaaattaagaagacattaaaagaactctaaagagaaaaatcaaaacacaaaattaaaactatcaagaaagcaatgaaaaggaacatatttcataatcagatctacgtgtcacagctaaagctgcaatcagaggaaaatttatagcctttaaaaatgcctttagtagaagaacttcaaataaatgaactatgactcttaagtaaaagaaaacaaaaatagagttagccaagaaaagggaattaatagctataaaagcttagattaatgaaatagataacaaagagtacaaagatagttttctgataataaaatataaataaaacataaatttctcatgtgcttgattaagaaaaaaggagaaaaaccacaaaagttcaggcataaaggaaaagaaaaacgaagagatgatagagaagaccataaaatcactaaaggaaaaaatcagttgctaccaagtggcaacacaattgaaatgcttgaggaaattaaatagcaatgaataaattactccaaaagatgcaataaactaatttagaacaacatatcataaaacagactaaaaagaaattactaaagatatcctataaaacatgtatcaggcccagatggttttacaactcaattctatttaacctctacagaaaagataatcccaatgttcttcaaacagttccaagacacagaacaaggaaggtagataaaactttgttttgtaaaccattgtatttgcccccacatgatggcagatttcatactcttctgaaagatgtactgttatttctaggatcagatatcagggatgtcctgcatcagtgatgagagtgaagcttcacagttttgatggctgtttaacggagatatgatacttgaagcagacctccactgatgggtatgtcggtggtttgcaattttttgctatttaacaattgcagaaatcaatatcctgatgatggattattttgcaaatgtgtaagatatgtgtagaataaatttctagaatgattcaaaggcatatgcatctttaattttgattgaaattgccttatttatctccacagaggtttgtatcaatttatttttctaacatcaatgactgagactgagagtttccatgtacacatacccatagagtgttatcaaactctttgatatttaataatcagataagtttcaaaaaccccattgctttagtttgcatttctcttg

SEQ ID NO: 140 - DNA, 1226 bp, Homo Sapiens
gcagaatgcagatggagccagcggggagaggagtggacatgagagaaagatcccatagccctcttggtcttggttggaacaggaggaaaatgaaaactggacatccatcttaggacttaatcctacggagaccacaagctggaagaggcactcaatactagcatggcttctgtggcattttgatgagtagtatgggctccacactgaaatattaatatcttattgttttgatgatgatgatgatgttcattggcccagggcaaaaggtaaaggttgtgttataaagctgatctattcaatatctgtggatgttaactccaccccatccccttattgaacaattacgatgcctataaatattgtattgagaaagaaaaaaaaaactaaggcagaagatatcatattacctgtccatatgtgacattttggctggccaagccataatggccaaagaggagcaactgtcaaaatttaagtggggttagaaaagaagagaggaacttgcacgtttgcacctacaaggaccctcttttctcctctggtagccatggaaaccactccttggacctcctttcaagagactctgcatggggagcacagttgactgacagctccaattgctgctccttcgagtccaccatggcactcatgcccacgcaatgtttcctccagggttctccaggtagagatggagcaggtggggttgccagaggcaggccatcaggccatcttgactgatgtgggacttctaatgcttccaggtctgaaggctcacctgccacttcctgctccctcctcctttacccttcacaggagtttcctccccataaatttcttgtgtatctagtcctgtcttggcatcagcttcttggaggacttgaactgatatgcactcaacagccagtaaatcctgctaattcacaaaatccttgattatcagtactaaagaaagacactgggggtgaagatgtcatcttctaaaagacttactggggataatctaccaccaaatgtaggtggcaaatgccatctttgatcacataatggaatcaatgaaggaggttattgatctggttcagaggtgactttagaatgtcccaaaccctttaaatatgtgtgtattgagtatgtgtgcaattctccttgaagaacatttatacctttcatctcattaatctacaaaattatcagcagtggcagctaattgtcagttaactaggtagttg

SEQ ID NO: 141 - DNA, 3516 bp, Homo Sapiens
gccaagctggctcaaagagcaaccagccacctctgcaagggtgtgccaggagcaggtggagcagccaccaacctcacccactcaaagaagcagggatggccaggttccaacagcctgagtggctgccacctgatggctgatggagcagaggcgtgaggaaaagctgatggcactgctttgtagtgctgttctttgtctctcttcatctttttcagttaaagtctgttttatcagagactaggattgcaaaccctgcttttttttgctttccatttgcttggtaaatattcctccatccctttattttaaacctatgtgtgtctttgcgcatgagatgggtctcctgaatacaggacaccattgggtctttactctttatccaacttgccagtctgtgtcttttaactggggcatttagcccatttacatttaagtttagtattgttacatgtgaaatttatcctgtcatgatgttgctagtttttaatttttcccattagttaatgcagtttctttatagtgtcaatggtctttacaatttggtatgtttttgtagtggctggtactggttgttcctttccacgtttagtgcttacttcaggagctcttgtaacgcaagaatgtggatttatttctggtaaggtaaataagtggatttatttctcaatgctgtattctatgtcctttaccccaagaatcattactttttaaaatgcaattcaaattagcataaaacatttacagcctaggaaaaggcttgtggcattagaatacttatttataggattattttgtgtttttttgagatacggtctttgtcatcgaggcagaagtgcagtggtttgatcataattcaccacagccctgaactctgagtccaagccatccttttgccttaatctcccaactagttggatctacaagcataaggcatcatgcctggctaatttttttacatgtttttttttttttttgtcgagattatggtatcactatgttgctctggctgatctcaaattcctgacctcaagtgatctttctgccacagcctcctaaagtgctaggattacatgcatgatgcaccatgcctagcgtagagtattacattagtttcaaagtcttattctaagagccatttattgactttggcctaaataactcaatataatatctctgaaactttttttgacaaattttggggcatgatgatgagagaagggggtttgaaactttctaataagaattaacttagacccatttaagaaggaaaaaacacaaattatcagaaaaatataaaagtaagatcaagtgcaaaagttctgtggcaaagatgatgagagtaaagaatatatgtttgtgactcatggtggcttttactttgttcttgaatttttgagtacgagttaacatttaaagaatctacattatagataacattttattgcaagtaaatgtatttcagaatttgttattggttttgtatgagattattctcagcctatttcattatcaagctatattattttattaatgtagtttgatgatcttacagcaaagctggaagctgtatcttcaaaatatgtctatttgactaagaagaagttattcaacaggagttattatctatgaaaaaagtacaaccagaatataaaaaacttgaggaggataaaaagatgttggaagaagtaatattaaatcttaaaaaacatggaaactgcacattggtgaagacacattggtgaagtacaaaaatataaattggatgtagaagaaagggcaatgcaggcaatagaaaaattagtagaaatccctttacaggttagtttgtaaaatcaggtaagtttatttataatgtgctttcatttatttcactgcaaattatattttggatatatatattgtgtttcctctgcctctcttatagcaatttgccttgtagagttctagcaaaaaggtggcatctgtttttactttcaaatatttaaatttccatcattataacaaaatcaatttttcagagtaatgattcttactgtggagtcatttgattattaagacccattggcataagattacatcctctgactataaaaatcgtggaagaaaacctaggaaatattcgtctggacattgcacttggcagtgaatttatggttaacctgcggacgcccaggggctcctccatctccaccgtgttctcctcgggctgaagcccaaagtcccacattttctcctcaaacagctctcagagccacttctgcaggcaggaggacagcgcgtggactcagtgtctgacttgggaagccacatgtgaaggaactgctgggtgactatggtcgtaagtcaatcaaagcagactttccctggcttgctgtgctacgttgattttgttttcgtattttaaaagaagcagaagggaggttctaggaaatttgcccaacgtagatgctgacaagagtggtgacatgaaaaagattacccagaaggaaaacgagctattttctaaacatctgaaatctgtgtaggcttttggaaaagtgaaactagatgcaaaacacaatgatataattctggcaatttccactgacacagaactcagtcaatctgaattaatctaagagttataaggaaaatggcactccaagaagtacctattaacatcactcagctgctgtgaaataggcttacaggcaacatggagtgtcaattacccaatgtttaaagtcgatcatacagattggactacaatctctatggctcataaagtctttaaaggattgacagatgatttatctcatatgtagacaatgattctcagcagttaactagcgcaacttgataatgtcaattgcttgagaaaatcagataattgcttgagaaaattaggacattgcttgaggaagttaggtagttaaataaattactttttttaaagaatagtttaatattttggcaagtagactttaaaataggttggtaatattttaaaggctacttttaaagaagtagcaatataacatgtttaattatgaaaaataatgttggaaacaattcaattttctatcagatcattcacaaatacagaaataccatctcaataattagaagaagtagcagcaatttctgtcatttttatgcaagttactcttagtccatttatttggttttaaatagtgtttttaaaatttgttttcaaacagggctaatcataaataatagaacatattttacaatagttgaaggtaacaaaaagtaagtgccatttaaaaaattgtattagattgtttaaaaatgttgtgggtacatagtatgtgttgtgggtacatcgtatgtgttgtgggtacatagtatgtggggtccatgagatgttttgatacaggcatgcaatgtgaaataagcacatcatggggaatggggtatccctcccctcaagcatttatccttcaagttataaaaaattcaattacagtcttagttatgtcaaactgtacaattaaattattattgaatatagtc

SEQ ID NO: 142 - DNA, 3205 bp, Homo Sapiens
ggcaaccagttgggggtccactgccgcagtgtgggaggtttgttctttcgctctttgcaataaatcttgttactgctcaccctgggtccacactgcttttgtgagttgtaacactcactgggaaggtctgcagcttcactcctcaagcccgggagaccgcgagcccaccgggagaaacgaacaactctagacgcgccgccttaaaagcggtaacattcactgcgaaggtctgcagctttactcctgagccagcgagaccacgagcccaccagaaggaagaaaccccgaatacgtctgaacgtcagaaggaacaaactccagaagcgccacctcaagagctgtaacactcaccgcgagggtccgcggcttcagtcttgaagtcagtgagaccaagaacccaccaattcgggacacaatacctataatcccagtactttaggaggccagggcaggcggatcatctgagctcaggggttggagaggagcctgaacaacataccgaaaccccgtctctacaaaaaatacaaaaattaaccggttgtggtggccggtgccggtagttccagctagtgggggactgcggaggtgggagctgaagcgggaggatcgcttgagcctggaggttgaggctgcagtaaacagggattgcgtcaggacactccaacctggggaacagaacgatgccctaaaaggctggctgagctgactggagtccaatctcctgactctcaatcctccaccatgccggaatccacttgcatttctggcaagaaggttgtttacgctcaaggtctacagggatggaagtggcacccagtgagagggctctgccgatggagctgtgaaggcgtcgacctcattctgacgggcttgttgagactggtcagcgcctgggcaagagggcagctgggatatgtctatgccatgtttgacccatgctattgttttttcctccctttttactttctatctgtactcctctccttctcttccactccattcccctgcccacctccacactgaaaatcgaggccttgggaggagaggtcaagggaggaaagaattctggaaagaattcttccacactttataacaaggagcccaggcactagtattttcctcttgccatcggcggccagccataaaaagggttgatccatgagttgtttctccaactcttcgagcagctcagttcatggcactgctatagtttagactaacccgctcaacattgttagaaacatttagaaatgtctccccctttgccgcaatttccctctctctgccggtgtctgctctaacagctggaagaaatttctccttcatctgctatattcagcctttcactaagcgccatcaattttgcctttgaaatttcttttgtactggtctccttctctcctttccaccgctaatcccggggcctgtctctagccctgtgattctgaactgtttaagaacctcctgacagagctccctgcctctggcttctccacctttgatccattctgcacagccaagacagattcatttttctcaagctctgtttgcatcttaggaggcctcagctcaaaacccctaggctctctaatgtccttggcattgcccagacagctttcacagctccctctcactctaccttcttcccagatcgtggctgcttttgcctcctgtactgttgtaacaaatcaccacgaacttggtggcttaaaacaacggaaacttattctcttacagttctgtggccaaaaatccacactgagtcttataggcctagatcaaggtggcagcagggctgtgattccttgggaggctcccagggagaattctctttcctggcctcttccagcttctcagggctgcaggcatttcttggcttgtggccacatcactccagtctctgcctcagtggtcatattgccttttcttctccctgtagtgaaatcttcccctgcttccctcttataagatacttataattacattaggagcccatctggataatccagggtaatctccccatctcagaagccttaacttaatcacatctgaaaaatcccttttcccatgtaaagtagtagttataggctccatgaaagggatggggacatggatctttggggggaccgttattcagcctctcatcatggccagcttaatccttccacttccctactcgctactacaacaagtatcagttgagtatctactatgtgctaggcactgttttaggcaataggaatcataatgactaatgagccttttcggattcagtctcctgcagggtgaactatccctttcctgagctctttacctcttagagcttggtatcattacatagcatgatcatcacatactatgtatgtctgtgtgtttgacatgtggttcatagctggtgaacggtgctcttcgtttctataggcaggtaggatggacgtgcttcgtagggcctttctccgcaagccctgacatacacagcacagagatgggacagccccctactacatcctgccagatgttgctggcttattttaaaattagaaacgcctatacagtaccataaaccagtgatgccaactggtttatactccataagtttgtactcttggaagtgctagggttggttgcagcctaatatttaggaagagttttgaaaggcactgtgacttgtagcttcacacctgtcttcttaaaagcctggccctttcccgatttcaggttgacatgtgcctcctgcaggcactgacactgaggccttaccggtgactgtttccttattggtaagtgtgttgctttcctaggtggaaactctctgaggaaaaagatcacgttacacgcacacaagcacacacatacacatctttgtaactctctggccccccattggatctagcaaagataacttggatgctagatatttgcataccagccagtgttgtccagcactttcgttcaactctttgacaactatcgtcacattcctatactgcttgtgctatcatttgattaatgtttgtatttaatttgtctcaacttttagcttgtgtaaacttattttaaaaggaagcatttgcatctctaccataaatagaagaccagagtcatttatcataaataaagcataactgtaaaaataaagatactgaaaatgaaataatgttattcccctaagaattaaacaataaaatattgagtaataaaattg

SEQ ID NO: 143 - DNA, 3206 bp, Homo Sapiens
ggcaaccagttgggggtccactgccgcagtgtgggaggtttgttctttcgctctttgcaataaatcttgttactgctcaccctgggtccacactgcttttgtgagttgtaacactcactgggaaggtctgcagcttcactcctcaagcccgggagaccgcgagcccaccgggagaaacgaacaactctagacgcgccgccttaaaagcggtaacattcactgcgaaggtctgcagctttactcctgagccagcgagaccacgagcccaccagaaggaagaaaccccgaatacgtctgaacgtcagaaggaacaaactccagaagcgccacctcaagagctgtaacactcaccgcgagggtccgcggcttcagtcttgaagtcagtgagaccaagaacccaccaattcgggacacaatacctataatcccagtactttaggaggccagggcaggcggatcatctgagctcaggggttggagaggagcctgaacaacataccgaaaccccgtctctacaaaaaatacaaaaattaaccggttgtggtggccggtgccggtagttccagctagtgggggactgcggaggtgggagctgaagcgggaggatcgcttgagcctggaggttgaggctgcagtaaacagggattgcgtcaggacactccaacctggggaacagaacgatgccctaaaaggctggctgagctgactggagtccaatctcctgactctcaatcctccaccatgccggaatccacttgcatttctggcaagaaggttgtttacgctcaaggtctacagggatggaagtggcacccagtgagagggctctgccgatggagctgtgaaggcgtcgacctcattctgacgggcttgttgagactggtcagcgcctgggcaagagggcagctgggatatgtctatgccatgtttgacccatgctattgttttttcctccctttttactttctatctgtactcctctccttctcttccactccattcccctgcccacctccacactgaaaatcgaggccttgggaggagaggtcaagggaggaaagaattctggaaagaattcttccacactttataacaaggagcccaggcactagtattttcctcttgccatcggcggccagccataaaaagggttgatccatgagttgtttctccaactcttcgagcagctcagttcatggcactgctatagtttagactaacccgctcaacattgttagaaacatttagaaatgtctccccctttgccgcaatttccctctctctgccggtgtctgctctaacagctggaagaaatttctccttcatctgctatattcagcctttcactaagcgccatcaattttgcctttgaaatttcttttgtactggtctccttctctcctttccaccgctaatcccggggcctgtctctagccctgtgattctgaactgtttaagaacctcctgacagagctccctgcctctggcttctccacctttgatccattctgcacagccaagacagattcatttttctcaagctctgtttgcatcttaggaggcctcagctcaaaacccctaggctctctaatgtccttggcattgcccagacagctttcacagctccctctcactctaccttcttcccagatcgtggctgcttttgcctcctgtactgttgtaacaaatcaccacgaacttggtggcttaaaacaacggaaacttattctcttacagttctgtggccaaaaatccacactgagtcttataggcctagatcaaggtggcagcagggctgtgattccttgggaggctcccagggagaattctctttcctggcctcttccagcttctcagggctgcaggcatttcttggcttgtggccacatcactccagtctctgcctcagtggtcatattgccttttcttctccctgtagtgaaatcttcccctgcttccctcttataagatacttataattacattaggagcccatctggataatccagggtaatctccccatctcagaagccttaacttaatcacatctgaaaaatcccttttcccatgtaaagtagtagttataggctccatgaaagggatggggacatggatctttggggggaccgttattcagcctctcatcatggccagcttaatccttccacttccctactcgctactacaacaagtatcagttgagtatctactatgtgctaggcactgttttaggcaataggaatcataatgactaatgagccttttcggattcagtctcctgcagggtgaactatccctttcctgagctctttacctcttagagcttggtatcattacatagcatgatcatcacatactatgtatgtctgtgtgtttgacatgtggttcatagctggtgaacggtgctcttcgtttctataggcaggtaggatggacgtgcttcgtagggcctttctccgcaagccctgacatacacagcacagagatgggacagccccctactacatcctgccagatgttgctggcttattttaaaattagaaacgcctatacagtaccataaaccagtgatgccaactggtttatactccataagtttgtactcttggaagtgctagggttggttgcagcctaatatttaggaagagttttgaaaggcactgtgacttgtagcttcacacctgtcttcttaaaagcctggccctttcccgatttcaggttgacatgtgcctcctgcaggcactgacactgaggccttaccggtgactgtttccttattggtaagtgtgttgctttcctaggtggaaactctctgaggaaaaagatcacgttacacgcacacaagcacacacatacacatctttgtaactctctggccccccattggatctagcaaagataacttggatgctagatatttgcataccagccagtgttgtccagcactttcgttcaactctttgacaactatcgtcacattcctatactgcttgtgctatcatttgattaatgtttgtatttaatttgtctcaacttttagcttgtgtaaacttattttaaaaggaagcatttgcatctctaccataaatagaagaccagagtcatttatcataaataaagcataactgtaaaaataaagatactgaaaatgaaataatgttattcccctaagaattaaacaataaaatattgagtaataaaattga

SEQ ID NO: 144 - DNA, 4673 bp, Homo Sapiens
tccacctttactttcttctcttaatgtttataattaggtcgttaccttaaattctcctattgcttatgtttgtcactttaaatgatatctttaacctctatttcttgttctgtgaattttaggtaggatcccttaactctacactttaaaaattaagatatggtagaatttttttggcaagaaaaaaattaaaaagaagaaaaacttaagctatttggctccttactcttccttcaacttttcttccacaccagagtcctttccacatcccaccatctaccacctactttttccttttatatttccaaggttgttaacatttaccttcatgcaatcaccacccgggtttctgtgctttttcacagattgactctaaatataatgacccagaaacagcatttacattatccttattgtgtaaatattctttaaagttggaccaagtactatattaagattgcattacttttttctgtggaccaaatacaacccctagggtcactcaaaagagattgtgatggctttgtaatgtgttagtgcgttatgctaccagctaggctgacctatgtgttctggaattcctctccctatatgattcatattagattgggccacaagagacattctgtgtcagattttgaaggcagaaatgaaaaagtggttatattgtttgtatgctcagaagatcaaggaagaggcaacaggaggttttagctctcacatattttcttatttagcagctcacattgttgggtaggagcagaagcccagcctgcagctgctccatcttcccctaggtctttctgtttcttcttctttcagtttcttctacgccaggtgtgtgcttagctccatgacaaaaggtgacagcttattctgcagcacacacacatcatcaaagtgggaggtggtgagactggcacactgacagtctgtcctagcagatttcagctcacactggtgagttccagcatgcttataccgctattttacacgtcttcccttcgccattgtctatctgcagacttctccaacatcagatgccagatgtctcatggaaactaaataacttctacaattgtgtgtgtatttatataattgatacaaatattggttctaacatcaattccaagttgattttttaacattcaacaattacttccaattgtgtcacttcttattttgcttcatattttttactgacatttctaattatatttcttggttccttgaatttgtaactttatcatactcatattcttcctcattcttaatcatattgtccatagagttccttcccccacacctttcccccaaccccatagataaacttatttatttccttcaatcgaggactatgcaaactataattatgggatttctttgacttctttaccagttagacacactgtttccaaaattccatataacctttgtgcactcttctgttttactttaatatatcctgttagtcacaaagaaaaattgatgaagaataaatattttgaattttgcatgattaaaaatgtcttcaaacaatcatcatatatggttgatggtctgagcataaaacattttgtctcataaatttgaaaaatatttttatagaagtttttagtgtcttttctccttggtgatctgtaaaatgttacaagaatatgcctttgtggggatctttttgcagtctcagacacctagtggatccagatccttttaatctgaagactcatgtccttttcagttttaaataatttccttatatccgtatctttaataatacttcctcttccatcgccaccaccccatcctaaccccaagcacgcactattttttgttctctttctaagactcttactaaccaaaagttgaacattccatatttgaaccctatgcctcatttccttgctaacatttccattactttctcatttgggtctactttctgggagattattatcttttatctcaatggttacattttaatctgtagaagctctcttttattgtgtaatagttttctttgcattactttcctgttcttggattaagattaataaaaaaatactaatatcctctttaaatttctatgaatatattaactatttcagatacaatggaaaggacactggccttgagtcagatatctggaccttgattatttaatgtaccaaacaaggataatatttactattccacaggattattttgaatattaaaagagataatatattttaagagccttgtaaattatgaaatatgtaagtacaacataagaaagatatttaaattattatatatccctgcatgacaatgtttctgagcatggcaattaaatgcttttacgaacccacgtttagttatttccttctataatgttctatatacataaaacttcaaccacatcacacaatgaaacttgtggagttatttttttgagtcctttgctgtcattcctccaggccttgcttttgttaatggagcagacactgtcatatatacccaatattcattttccacatcttcagtaataaaatcctgtttttagcaaaacacatcatttccccacttctccacctctcttgaggttgcttccagaaataaacagaatcagtgtacacaacttttggtaaatgtttggaaataaagagggcatgctcttcttccctactatccctttcctttctgctggctggaatgcagatatgatgaatggaaataatgtggccgtcttagagcctgagctggaagccatgtatggaatatggtggagaaacaacatggagggaacacccttggctcctacctctgagtacagtacccatgctagactaactatacctagatttcttttatgggagcaagagacagtttcctagcttgtcagaccaatataacttggggttttctactactccatgatgaacctaatcctaattaatatgctgttatagtttctcagccttttggttaagatcagatatactaagacactccccatcaggacatgacagtatttactcatcctttatgagccaatgaaagcatcaccctctctagtaagtcctgcctaatgagacctccccaataggatttaatgtctttattatagaatatatttttcatgagacaaaggatcctgtttattttattcactagtgtgtgcctagtgccttgaaaaatgtgtgggccatattaagcaggtgtttgtttgttttttgagatgcagtctcgttccaccacgcatggccttaagcagttaaatagttgttaagtatgcacaactctataacccttaggattttgtggttacctcagctaaaccatagatgcttttcccaagcctctctccctacacaaattgtaacctcactagcgggtaaaaccgtatatatgtatcacttactttgctccttaatatatggtacatgactgacagtacttatgaattgaataatttaaatgagaataagtgtaatgatatataaaaaattatttttaaaataaaatttacataaaagtattacaatttgagatgaactacatcaacactttttcatcaaaaaatagtgttttctctcccctgattataatgagacaatttagtgactgcttttatcaaacataatagagcaaaccacaatctgacttggagcaatttgctggacttccaaacctcagttttgtcattaataatatgaggttcatatccaccacatttggcatcttggactgtgcttgattaacacttgtgctcagtaagtggtagctgcaattcttatagtgactaagaaaaagcattatctttaaaatttactgatttaaagttttatatacattcatttattcaatagctatttgcttgatccctacaatgtaacagcaatctagatgctggggacacaaggtccaccttccaggaatatggccatgacaccagaaatcacaaacatgatgagaatggaatgactggggaagaagtgccagatgcttcacttgtaaatgaagacccagcctctggggatgcagataccacctccctgaagaagctgaatatctgcagataagtggagttcaccaatgatgaggagcgggatggagaaaggaggtagggagagtcatccaaggaacatgagcaacatgttaaaaggtaagaagtgagacaatggtgaggtggtgaaacttaacaagtcggccatggctgggggtgagagtgagggagggtggtgggaaataaagttgctgggatagggagaagccagatgatgcagcttttgcaggacatggtacagatttgggaaaatattgtaaggttttgggagagtatgagggatttatgggtcaggtttatattacaaagattattctaaaaatattaggcctcccgaggcactcaagccttttaccttgcagtttctactcaccctttgggactcagctcaaatgacatttcctcgggggtgctccctgatacccagattgtgcaccctgtgattctccttcagagtatcacaagtcgaataaaatcgttaataatagaaaaaatatcctgtatgtaaataggctactttaaaatgaaatcatttcacatgtattatattttctatttaaataaattctaccattaaatttttgaaacatatttacctcttaactatatgtctagttaagaaagt

SEQ ID NO: 145 - DNA, 2093 bp, Homo Sapiens
acagatgggagcagagaagccggtctttctagcatttctctccctcttttccactagtcctcagtaaaacagccttgccagaaccagatgtcttttttctgcagatatttactgttatgacttgggaggcagcaggttctggactgttgccctcacctagaccgccccccccccttgtcagatgccacccgttttctcagacccgtcggtctcccagaccacattgctttgtgagcagatgcctgtcagggacagctctatcagaacagaccgagtccagcccagtgagccgtgatgttctctcactgctcggtcccccctctgccatctacagcgacataggttgggtctgttcccctggcagacagcaggccttcagagccctgccagaatctcttgtgtctcccctagcacacacacatccctccccacccaccaccgccaggcctggatagccctagttctctcccatttcttggtgtcagggtgttcagaccttttaagcagatgaatgctaactcattcaaggcttttaaaacccagtgccttagcagggtacagtggcacacacctgtagttacagctgtgtgggaggattgcaggagttcctgtctagcctgggcaacatagcaagacctccttgtcttttaaaagaaaattaaaaaaaaaaaagtgccctaaactgaatccagccctgcagatgtagctgggccaggacagaacagagggtaaccactgccttcccaagcaagcaatggaaactggcagctgcagtgtcttcatcacgcgatggggtgggaatgctgccccttatctgggcacaaggaatagtgtcatctgtgcaccttaaagttgcacaaaagctttcctagtagcgacatctcatccttgtcaaacttgaaattatctaaaaaccacaagtctcttcataggaactgtttgcaagtcagcagttccccattttgtactgcatgaaatgcacccttgagcctaaatatctggcttgcatttgccctggtacatttaactggcgtggtgaagtaggaggagcaaaggcgtcggaatctaacagtgctgtatgattcttgcttctttaagcttcggtttccttgggtttaaaacagggttcctaggaagctgagatggaaaaaggtggctgccgcctggctccattccaagttgctgctctcgttctgtagctagcccaggtttccgggttccgtattaaccctgtgaccatctcaacccttgacactgtcgataggaagctggtcgttctctcagctgggcctttacttaagtcctggacaaacaagttgaccaagggcaggcagagactgctacagggtgccacatagtgtatgcagtgcacaaatggttctatttttggtgggtcggtgttgccagcgagctgaccctgaccaggtgtggaggggagtgggtggggggctgtggaaatgtggccaggtccctacccctatcggcagaggctccatcctgcccttcctctcagccacaggtgcaggatggtagatgggaacttgccagaaggatgcgaccctatttaagtagttgtgttttcttccagcccagcatccccaccaaaacaggaaaagaagtgctctcgtgcagggcttgttcacagtgagcctggctggctcctcatgatctctgagtttaaaatgtgccagcagatgattttaacgatcccatcaaaaattgttgtctggatcagtttcgagctagcgtttccttgcagaggccattcttccttttttgacaaaagttgggtcggccaggtgcagtggctcatacttgtaatcccagcacttcgggaggctgaggcaggtggatcacctgaggtcagaagttcaagaccagcctggccaacatggcaaaaccctgtctctactaaaaataaaaaataaaaataaaaataaaaaaaagccggacgtggtggtgggcacctgtaatcccagctactggggaggctgaggcaggagaatcacttgaacccaggaggcagaggttgcagtgagccaagattgcaccattgcactccagcctgggcgacaagagcgaaactccgtctc

SEQ ID NO: 146 - DNA, 1476 bp, Homo Sapiens
atgctactcctgggaggaagcttcaaaggcctcagccacaagtagctctagctcaagcaaaaacaaagcatgttgagaattgtgaacaatcagtgatgcaacacaaggtggtgctcttgtcccagtgagtgctgtagagccttgttagggcattaggcaaaggatgtacaactccaaaagatttggttggtataaacgccaatggggatctgccggacagactgaacagctgactggggggcacaaagccaaagggcatgtgccaccatgcctggctaatttttgtacttttagtatagatgaggtttcaccatgctggccaggctggtttcgaactcctgacctagtgatctgtctgcctcggtctcccaaagtactgggattacaggtgtaagccactgcacccagcctgagagaccgtattatttctaggcctgaagaagcaaggggagagagcagatactgtaacacagagtgggtggctgtttggagataactgcccaaccagagctgaagcttcccaaagagagaccaaatgattcacaatgacccagcaggcagggagcaaggaaattaacagtcttacctcattctcctatcaaccccaatctgccaccaggcttcccactgacagaacctcatggaacctagagggcaagggattcagtagacacggtccatgcagaactaccaaaaaggatttcttataataatcttgaaatctagtcttagtggagaaagaaaaagaatttccaattgtgtagctcccattaacataccaagaaccaggtctgggaacttaggttgttgcattttttcccagctttgaaatggtactgcctctaaggatgatggctaggccatgaagtttgctattctaggggaaaagagggattggaagaaagaagaaagcctgaatctgtctgttctgtccccaggagaatgataaggggagagagtaagaaagcaatgagatacacatgtcttgactgcttctcttcatgctgaaatcctgggggaaagaagtgctaaatcagttgaggacatgggaacatttattctggtgagtggatgttgagggcagaggggtgtttgccccattcctttggtgtgctgagtgttaaccactttgcagggagagctgtatggggcgtcatgttaacatgaagtcattaggtgggccttaatccaatataactgatgtcttcataaaggaagaaatttgggtacagagacagacaagcaccaagagaagatgatgtgaagaagcacagcgagaacaccatgtgaaaatggaggactggaatgaagcatctacaagccaggaaatgtctgaggctaccagaagccaggagagaggcctggaacagatcctgcactagaaccttcaaagagagcatggtcctgctgacatgttgattttggacttctggcctccagagctgtgagaataaatttcagttgttttaagccatc

SEQ ID NO: 147 - DNA, 2400 bp, Homo Sapiens
gtgggtcaccacatgttgtcctcaccatcatcgtttcctgtagaaataaaatgcctaaggagagaagggagatatgaaatatgaatatctactttaacaagggtagaggaaaacatatactcctgcatgggcaaataaggttcaaaatcagagactctataatgttgcaatatttggaaacaaagagaaaaaaacagaattattaaataaccaaccccatatgtgtaatcattaacttaaacatcattctaaataataagaaacatttagggacatcaaatttctcaagatagataacagaaacaaagaacggtttggccccactgatcaactaaactttggtttaaattctcttcttccctcatgcccctgcattttgatccaacacagcctgaacctgcacacaacccatctttaatacccaactattgggtacttgggtttaatacctaggtgatgaaataatatgtaccacaaactaccatgacatgtgtttacctatgaaacaaagcttcgcatgtgcctccaaacctaaaacaaaagttaaaaaaagaagatatttgttatgacatatcactatgtccttgggagaaatattgttgccagttaactcttcaactagtttgtctgtgttttttattttagccatataaaagacaagacaggtttttagcattccaactgatttttattttctcagtctcctcttgcccaaattctgacttcattattttgtgagacaaagatcttcatcattgtccattttgctttgattagatggctgattggacaggtggactaaagtcaatctttagtattttttcattgtaagattaactattgagtcatttgatatgacaatgggttcacagtagttttaaagattatgcacaacacatatttgagtggaataacacagaaaaatacaaaggaaaatatttggagtttacatcttaacaaatatttggagtttggatcttaacaatcacataggctgccatctatataattcatgtaacagacaaacaagatttgttgtaattttcaatatgggaatattcacttttaaatataattatgtattctacgcataagttggaatgaaaatcttcatgtgtacttctcacattgaaattctaagtttaaatgtatatttattttctaagaataaaatgctacaataattaatatgattacataggtgtataaagctcaccagcttgtacactgagatttaatgttttatttttgctacacctcaattaaaaatcttttttagaagataaagtgtcagtgaagataattttcttccctgaggttatataacattttgttacaaggataagatgcagcaaaaattatcatgaaactaattgtgaaaatacacttatctttgaaagttcttaactatttgtttacataaaacaataacagagttaagaatattcaaatataagtaaataacaaaataggccaggcatggtggctcacgcctgtaatctcagcactttgggaggcccaggcaggtgtatcacctgaggtcagttcaacaccagcctggccagtatggtgaaaccccatctctaccaaaaatacaagaattagtcagctatggaagcgcaagcctgtaggtagtcccagctactcagtaggctaagcaggagaatcgcttgaacctgggaggcagtggttgcagtaagctgagatcgtgtcactgtactccatcctgggcaacagaacaagactccatctcaaaaaaaataaaataaaatacattggtggtatattacaattttaagagaaaatgtgaaagatggctaagtagttgagttattatttgtacccaggttgcctgactctacagcctacatgtgaaaccacaaaattccattaaatgaatacaatatgtaattgcctgcctggtaaactgtgaatattttacacacagtgaaccttttggaaaaatagactttccagtgttattggtataagatggtagcccaaattcattggtggggtggtgggggcagtgggcaagaatcttacatccaatgaacaaactctgaaaagaaagcttaatgtttctcatagtttttatgattctcaaaaaagaaaaaaaaaagaaaaaaaaagagataactaagacatgtgatgagcacctttaaatactcgaaggttccccaaatactaattcagggaatgtcatacccaagcctgtagctggcagatgacaaaacactactgctcctgtgtagacacataattaaatataaaaacataaccacaccatcagtcttggaaaataatacatatggttgccacatatcacttaatcaccacattttcatcttcccagactaagagtttagcctacttttacttggttattaacaaatacat

SEQ ID NO: 148 - DNA, 3900 bp, Homo Sapiens
gggatgcgcttcgctgttctctaggaggtaccaacctctggcggtgggtcttgcgtcccggcggaaagctccgaggagtcctgtagacttgtggctcgggtggagccggcggaaaaccccgagaagcttgagacagccgtggctgaggtggagccggcgtcgctgccctggagcgtgggcgagtttcctcttagccggagcttcagggattgactcaaagactcctccgcttttttagttgttttgggtgtgaatacagcccggactaaaccttagtcgcctagactaaaccttagcctcccaggctgccaaaacagcacagcttttacagatgactcttacatcaccatccctactctgtgatactgtgtttttcaaagtttagtgcctgaaccatcagcatgaaatctgcctgagacggttgttgaaaattcacatcgctgggccttgcggcaggatgcctcttgaagcccaagtggaagccaacagaagaggggtccatgtgtacagataggcctggagtgatccatgttccaacagcagtccctttaacctcacttgaatgtggaggctgcacaggtcacaagtctgaagactacaagctacctttgcttaaaaggaaccacaccaccgctgatagctaactgctagattgttctccagcatatcagagctacattgaattgcttgagttgtgcttcaattaatgtagagatcttcactgaatcgcacataaccattgaagtaacctgctgtttacagtctctatcatgctctgccaagagagttattttacagtgacaaaacttctcttctggtgccctgacacatcctaggactttgatgttggtaattctttcccctcagcaaatgttggttctaaatccacagaactacttgagaaactagatgcaaaattgtagtaggtttaaactatcaatactcttttttttttttttttttttttttgagacagagtctctcgctctgtcacccaggctggagtgcagtggcgcgatctcggctcactgcaagctccgcctcccggattcacaccatttgcctgcctcagcctcccgagtagctgggactacaggcgcccaccaccacgcctgggtaattttttgtattttttagtagagacggggtttcaccgtgttagccatgatggtctcgatctcctgacctcttgatctgcccgcctcggcctcccaaagtgctgggattacaggcgtgagccactgcacccggcctatcaatattctttatatgttttgctattcccatttaaaagagggaaactgtagctatacactttctagtcatgttctttggtgattttcctgcacaaaccaacactgttgttcagaaatataatttcccctagaattaccctccatccaaaacatattgttattctatcacagagataaataatggctttccaaatcctggttaaaaaaaccaaacactctcttcttctctgtatttttacagaacaggcatagatgatggcaattgtgttttaccatcttttttttttttctgagatgttagttttctaggatatggaaatcttaggattcataaaaagtgaaacaactttttgaaatgttagttttccaaaattggacaatctttttgagccattctatttttaggactattggttagctgactttagagcctttaatgtttccttattatttcaaacaatagagaactttcttcccccccacgttttgagacagggtctggctctgtcacgcaggaggctgtctgtagtgcagcggcacagtctcagctcactgcaacctccgcctcttgggctcaagtgatccttccacctcagcctcctgagtagctgggactgtaggtgcaggccaccacatctggctaattttaaacaatagagaacttccaaaacaaaagttctttattaattcttcaagaaatctgttttttacttagtcaattaatgtccatttcatgttgcctcaatagcccatgtatgaatcactcttcttgcagattttgttcagttttgttgtatgtagacccatctttctttgattgagttggtttctttgattgagttgatttgtctgtattatatatcagtcagtattaaaacccaaacaatacctaagccaaaaaagcaaggtaggcacctgtgaactcacacacttggttgcaattgcttcagtaaaaaggacagtttacactcaaattgaagcaaccattatgtttccacaaacaacattccttattatcccacctcaccttttcattcttcctatgctgtctaatctgattcggtacaagagataaggcaggtactgctaaatgataacttagatgcaggggccatcatgaaaatattcatcccatatcttacattaagcaaactactagcaactgtttgttgaaaagtataaatgaataaatgaaaataggacagataggcagtgtgggaagctaaaatatggaagtgttattgctttgctttatgtggtataatgatctgactttatcttcccagctctcccaggaagtatgcagaataatatttatctcatattgtggatgtggcaatcaagacagagaggctagatgctttacctaaagtcatccaacaaatatttggtagaaccagtgctagaatgcaataaatggaaacagagtttatttttgtgtttcttttcctaatacttgccctattcctgacaaatgaataatggcttcagaaggtgtcacttgttgctagggctaaaaggataaattttacctgtaataccgtaccacttactattagttaacgacccagtatttattctctttttttctttggaatctttggaatgtgtaaatatttgcctcccgggaagctcactttatcctctcctcaggaaaaaatcctgatttggtctgaaccaatcttggtaactatctttcttgccagttttgttttaggaatgggcacgcaactcagttctagccaatgagatatgaggagcagtctactggggagtttctgggaaagtttgtttttcttgtcctaataagcaaacaagtaatggggtcactggattggagatcctattgagtcaaaggaatattgaatttgacacagtaaaatagtctggaaggaaaggaaatgatattcagtaaatgaaatgctgaaaattgatattatgaaggtggcacagtagttgttattgattaaatgaaacagttgagattaagaaagtttagccaggacaagttgtatagcacaaatcatttcaggtaaggaagttaaaaaaaaaaccctgagaggctaggaagtcctggctccaaacttctgctcctgctggacttgagccccactagcttctcatcttccactaatctatgcacccctcctttcccactcctcaaaagccgagctcactcaacaactttaattttattcaaataaattatttacacagacattttgtttttagtagatgttattagtgattaggaaaaatgaaagagattgacatctttcaattgacagagatgccaataattttaagtataattttttaaacactttgttcttaaaatgagaaagaaatgcaaggaagggatcactaccctgggtgttagcatgtccgaatatgataactaaacctgctgcaattatcttgcaaccagggaggagctagcttgaaaataaagccaacacagttagatgacaagcagaaagtggaaagaacctaagtcattgatgatgctattcagctgatgaattaaacctggagtgtatgttccatgggcttctgtaaggaattaaaatatttttactgtttaaaccagtgtttcattgttttctgcagaaatcctaattggcataaagaaactattgaccga

SEQ ID NO: 149 - DNA, 2474 bp, Homo Sapiens
aagacaagacaagatcagcaggagaagggttggacgcatggtacctttccatggaaatcctgtctggggttcatgacccagagtcttggtctgtttgcttgtctcacagtgcacaagaggcaagagcttagaaagcagatcagggaagagtggggaggaaggtatttgtgcatccctgtgggggaaaggtgggcacttcccagcacagcccgggacagtgcgaggaatggcacagaggaacactctgctttttggttcacagtatggccaggacagaaatgagacctttctctacatcctgaggttttattttctttgtctttctcaggtggagcagttaggtcaggccaagcctggccctgttctgatacagctcacctagcagatttgaagttagactatttacaacaagaagaaggcatgccctgccatggcaaaacctcaccaggtctccctgtatgattcttgaatgtcttctttagcaaggttacacctggcacacagaccctatcagccactgactgcattccttacaaacccaaacccattggtgggcagagcgggaaggtggctggccaccatccagacagtaaacaatagaggcaattattatgcagccattaatcttgtcaattacacattaacccaggctgtgtgtaaacaggagcacaatcctcattctttttctctgcctttctcaatggcttcccaccccacctcctcagaaaataaaaagggactgcattctaccacattctcaatatcatccttaattccactttttcacttatggaaacaatcataccaatctggaaattcctttaacctgtgtatcgattttatctttttgtgtgtgtgtgtgatttctattacatatgatactctgctgagtgcttgggaagctgattttgctgttttctacaaatctatggttcctttttcactttgaactccccagttgaaaaggctatattcatatatattacctcatgaggtaatataatgattgatagcacaaatttattacatgttttgaagtcgctttctaatatacctggataaggatctatttcctattcatcttcatctgggtagatgccacccaaagacatccttgtccacttaaaaacctgtagcagttggctttgtggtcaaaggagatttttgttttttaaagtgaggagcagttctggaagcaattagatctggcattgttcagggcagatggtgaagtgggcagagattctcttcaaagcctctagcctttcattttcctgtgctcactcttcctttagtacacttgacctctcctttccctcctcctcctccaaagccatctctaagaaatggcccacgtcagtcatttatctcttcctgggcattaaagagtctggggaatgctcattcctgctgtgttttcactgaaagccttatctttaattgtggaatgaaaggaatttcaggtattggatcacagctcaaagttcaagtttttaacgttctattcacatagcagtcaggaaaaaaaaatcctttttgattggaaggagggcagttttcacaggccctcttctcaggctctggtggtgatccgtctctgttctctcctctttgtggagccattctggaagacaaggcttgaggttggggtgggcaggacaagtagcacagagatttctcaaacgttgctggataaggtgtttgagaccgatttcagtagaaccctaatacacattaggtaagatttctgaatcaggaatgtgagaaaggtctgttgaaactgggcatcaataccctttttccttgggatatgtcagggaattccccaagaggcttcaatgttcagggcagccctgctaccctattttttgggtggtggggtgggaacttggaaagaggtcttgctggctgaaattaaattagcatgttgtttcgagggagttgggaacattttcaagttgctgtgcataaacctgcgagctcattttctcagatttggttcatgcatatagggtggtactatgtattcactagaaagggttcagacttgttgcatcttggttctgtctctagatctaggataatgcatttattccaaaacttaattttggtaaaacgaaagaatcaactaggcaatcactgaggttccttctagcttcaaaaatcccgatgatctctgagatctatgaattaaaattaattggtgcaacttgtgggatgttatttaagtgaaaattcttagagtcagggcactagtgaaaggtaagagccaggaatgcaggggatactggtcattttccatagcttctttcctcccaaattgtagcaattctggggttgtgggaagaagtagagatatgagtggcaaatcaatacaaactgtgtcaccaataaggttgttcagggaaataagtttataaagagtggaaaggaacaggctgagcctgacagggttaaaggaagcaccaatttct

SEQ ID NO: 150 - DNA, 4953 bp, Homo Sapiens
acgtgacggggctccggctgggccggcgggttcttcatccccggggatgatcgagttcatcaaagtggaaaacttaaggcggtcttcgtcgggctgatacttcctgctttattgaatgttgatattaaatgcttacctccggaattattttttgaggtatcgactttagattaaaagcctaacaattcttacctttcccgtgggctgcctggctccccgcgcggttcaacgcgagcagcgccagtgcgctgacccttgccaacgacgtggctggtcctggggatcacagggcttcgctcatcccatcttcctccatatccccaaggtggaaacaagggggcgagatgtccacaaactgaggaacagacaaaatgctggctgtccatgcagtggagtgtgagtcagtcatcaagaagagtgaagttcagacccatgccacaacatgggtgaaccttggaaacatactaagtaaagcaagccaatcgcaaaaggacaaaacctgtgcgactccatgctatggaccgagttctgtccccctaacatttgtatgtgaagccttaatccccaatgtgactgtgtttgcagaaagggcctttagagaagtaattaaggttaaatgagattataagggtggggtcctgatctgataggattagtgtccttggaagaggtaccacaggcctggcactgtggctcacacctgtaatcctagcactttgggagtccaaggtgggaggaccacctcctccaggagtttgagaccagcctgggcaacaaagcaagacccctgtctctacaaaaaaattaacagggcaccgtggtgcgtgcctgtagtcccagcaacttgttatggttacgtaagaggaatgtgaattcaaccctggtgattttgggtcgtgtcaggagcagccctgcgacaccagttggcaccttctgcagactctatgtgtcgataagacaaggtcccacccagcaagtgcccttttctcagctgatgaacataagcctgcatggacgttactgtccatggaaaggagcggccggcaccggctgtgacagacacgtgcctgtctgcgatctgagtttcatgaacagtaaactctgttggtcacagcctctttggaaaacaatgttagttaaaagaagtgccctgtgaccagcagtgccaccctcgacagggttctccaagtgggacccgggcaagcagcctcagtatcactaggggttgttagcaatgtgccttcctgggctctgccccagagtggccgcaccagtgactgggagtgaggtcccagggccctgtggtccatgaagagctctcaggggattctgatgcccagtggtacaggtgggccaccggactggggtgtcatctgcccgtgggcatgagacatgaacaaggacatagcaggtctgttagtagtcataactaaaagaacaaaggagccgggcacggtggctcatgcctgtaatcccagcactttgggaggtcgaggcgggcagatcgcgaggtcaggagatcgagaccatgctggctaacacagtgaaaccccgtctctactaaaaatacaaaaaattagccgggcgtggtggcgggcgcctgtagtcccagctactcgggaggctgaggcaggagaatggcatgaacccgggaggcggagtttgcagtgagcccagatcatgccactgcactccagcctgggcaacagagcgagactccgtctcaagaaaaaaaaagaacaaaggaaaaaaccagaaaaccacccagatgttgatgagcagatgattgtactgttgtaatagtaatctggtacaacatttgcaacatcgcggttgttaaaaatgctaacgcatgaacctccagtgtgtatacacagatataaataaacgggtgaagaccatctgtgaggttgcatgacaaaggcaagtgcagaagcagacagggtgggcacatttcttttctttctttctttctttttttttttttttgagacagagtctcactctgtcgcccaggctggagtgcagtagcgccatctcggctccctgccacctccgccccctgggttcaagcgattctcctgcctcagcctcccgagtagctgggactacaggcgcccgccaccacgcccggctaatttttttgtatttttagtggagacggggtttcaccgtgttagccaggacggtctcgatcttctgacctcgtgatcctcccgcctcggcctcccaaagtgttgggattacaggcgtgagccactgcgcccggtccacgtttctatcaaattgaaatcatgagcggttttgctgagggtgtggggcacccagagcctgcggcctgtgctcgagtgaaaatggtggccccgctccagaagcctgcgacggcgctcacggaaccgcagccttcgtgcggcggcacctgggccgtgctactcctctgtgacttcccggaagagatgagctgctacgtccagcaaaaggcacatccaagatcgttcaccccagcatgactcgttacactccggactagaaggaaccccaaggtgcttcagtgacagaacgatgaaccagctggggtgtaacccccatgcaatggaatatcgtacaggaacgaaaaggacacgctacccctacaagcaacatggatctcagaggcaggatgttgcgcagaagaaaccagacacaaatgcttcggctcgtgttgctgcgactcattacaggcagccgaatctgcggtgatgggggccccaggagcagtgaccaggaggcagtgccacggagcctgcggtgggggctgatagtcagtagcgtgacctggttgggatgttctgtttttaagctggagtccatcatgtttgtttatttgttcatttcgtagaggtgggggtcttgtagaggtgggggtctcactctgttgcccaggctggtctcaaactctgggcctcaagcgatcctcccaccttggccttccaaagtgctgggattacaggtgtgagccactgcataaggccgttattgttattagtgcttaaaaatatttagtaaacattttatttagcctaaaaaccattcagagagcagaggctggatggaacacggcgtgccaggcggtgagagcacagaccctcctcttccagagcaggaagtgggtaaatgacttttaagcctcatttctggggtggcaaaactcttctgtatgaagaagtacaaatatgtaatgtcccataatggcagctatgggacgttacgtatttgccaaaacccacataacgcacaacgccaagagtgaactgtaatgtaaactgtggacttaagtcaatgatcgtgtcccgatacgggctggttggttgtgatgcagggcaggtgaggcccaaagtggagcttagcctgccagcgttcttggctttgcccaagaaagaattcaaggacaagccggaggtagaagagaacaacttgattgaagaggcagtgtggcagccccagggcctggcaccgtaggacctctgcaggctggtgggggtgaatgaatgattgattgatgaatgaatgaatgaatgaatgtcagttcagctgccatttcaccgcctggaatttgggactcggactggcttcctggctcctcagcttgcagacggcctattgtgggacttcacctggtgatcatagaaacagtggacccactgagaccaagggcaaggggaggaaaggcccggggtagggctgaagacacaggttccaggcccagctctgctgctcaccgatgaggcttctcctctgttgagcaggtagccccagttgggagctgaggtgtgttgattggggctctgggaaccatagcctgccagctgtggcttggccatcccctctgccagcgctttcccgcccatcagcccttttctctggagtccctccttcagccaggtcctgaaaagtcataccttttggccaagctgctgaaaatactactcagccagaactcatgtgctcatgccagcctcattcatgacaccctccaaaccagaaacagcccaggagccgatcaacagcttcatgggaaaatgtattgcagtctatctcatcgccgggcccttccgtggccgtggagacgggcgaatcatggtctatcccgtcgccgggcccttccgcggcagtggagacaggcgaattgcagttatgcgcagcaaggaagcctctctcaatcacattgagcagaagtggccaggctcaattctgtggaattctgtgtggatcacaaacaggcaacatagaggatggtgttttggggtgcatgttgagggagagacggggttctcttcatcacaatggtggctggcctccaggaagggagggacagtggctgggaggccaggggcctctgggatgctgaaaaattctttttcttctccttcttcttctttttttttttgagatggagactcactgtgtggccgaacctggagtgcagtggtgggacctcggctcacggcaacctctgcctcccagttgaagtgattctcatgcctcagcctcctgagtagctggaattacatgcgcctgccaccatgccaggttaatttttcgtatttttagtagagatcgggtttcaccaggttggccaggctgatctcgaacttctgacctcaggtgatctgcccactttggcctcccaaagtgctgggattacaaggcatgagccacagcacccagcccagaatggttaattttatgttatgtgaatttcactcaataaaaaaaagacaggaaggggaaagaaagaaagaaaaggcagggagccgggcatggtggctcatgcctgtaatcccagcactttcggaggccgaggtgggtggatcacgaggtcaggagattgagaccatccgggctaacatggtgaaaacccgtgtctactaaaaatacaaaaaattagccaggcgtggtggtgggcgcctgtag

SEQ ID NO: 151 - DNA, 2535 bp, Homo Sapiens
cctaatctgattcgttcaaagaatgttttggctgaatgtaaactccttgtgtgtaaacttgaaggagttagtacagtttacctttaaatttcaatatcattgtaaatagttagtttaaaaattttaacatgcttttcctcaacatttggccctcatttaaaaagaggtcagataagaaccaactcaaattccatctggtatttttttaatatatcattcaagggtatacattttagcctttttttttcttttcttttttttttttgcattaagaccatgcattcctaagacaaacttagttgtcagaaattttgccaccaaaggcaaatgcttaaggccatgtagggattgatgttgtattttttggtagagacgggttttcaccatattggccaggctggtctcttaacttctgacctcaggtgctccacccgccttagcctcccaaaatgctgggattacaatggataatttgggacatccatgtccaaaatggtggcaagatcagtttgttcctttagaatctttatgagcctgattttctagagcttgactcaacatacaaagattttttttaaagttttttaaatatcaatagcaaggttcactgaagaaggggcagccataaaaggcaaaaggacagttaatttattaaagggtaggacatttttcagcagtttccaaagagaaatgttaacactagtgcacttgtatataattagacaaattcatcaactgaccctgaatttcatagtttgtattcctgctaaggaaaaacaactagttttctatatgctattaggctaatgatttgtttgactgccatgtatgcatcatcagaaaaagaaaacacttagcaattgtagcatttgcccctagaataacctttctaaagagactttggaaacattccctaattgaagctttgatccacacctgggaccacacaagacataaaaacgcagtcagaaaagaggcagagaagagctattctctgaaacagagagtattaacatcccttctttaaaagggcacagaaagaacactggatttcactataagatgaagatattttgggaaagtattctatgcatgccaaagttccagctggcaccagagcatacctctctctatcagctaagaccacagactaatactatattaaccatttctttaaaaatatctccagtgtgagctggcaggtttgtttatccacaaaagagtctggagacttactctgacaagctggtgtaggacatattttttgtcacatgaaaacacataccacacgacaaatttttagatacaaaatgcaaacttagtacttatctgttgactctctaaatttttctagaaaatttcaacagatacagaaatagaataccacatactccacattcaacttcaataattattaactcatgagaaggggtggtggggataaacccagctctgctgaacaagccttgagccctggcctggggctgctcctgcctggggcagggagcccctttttataatgtgcacgaagtctccatatggcctagaggtagcccaggagctggcatacaaaagttgggtggcatctcctgaaggaggagacattatagaggcatgtcactttctgagactcagtttacaaagcaagatgcagagaagaaaggaaggctggcagcttgaactgagctgagccatctgacaagtgaagacagggtcctggcaggcaggactccctactgtggaggtcagggccttcctggcactctgtgaggccttttctgggtgttctccaagctgctgtccactgccaaggaggagcctccaccaggcaggccagagtggcatgcaactgctggcacccagcggctaccacattcccacccagatgctgcctgagctttgggcacaccccttcccacaactgtccccttgctttccccctcctcctgggctatcatcaggctgtagcgaaagcatcagaagctccctggggatatgtctgaaaccccttggctgggataatcagcaccagaaaagcattaaaaacaggaagccacagggataattgacaggcattgctgcaaacacctggggtgggggtgtgctcagaatagggacagaataaggagaggcagcgtccaggattggggaagaataacacaggactgttctggggatgtggggatgtgtctcatcataaggtcccattcattatgttccactaggttctcccaatatactaaagctgagatcataaactgtcatgacaaagaacaggtcatctgtactttctctgaaagcctcatgattagacagtagaatagcttagaagagtgacataatgtttagaccctttttttctgtttcttgcccagagttctttcacaacctctagatgatatgaaaatggacacaacacatggctccaaaatcccagagtactacagaattcttaaacccatgcatggtagataagaaggcaaaaagcaaagcagttataaatggaaggctgcaagcagaagctttctgtttacc

SEQ ID NO: 152 - DNA, 3223 bp, Homo Sapiens
ttatcttccgtataagctttggaagcagtttagtgacaatggtactcttgtctttttcttgattttaaaaggagtgatttcgatatttttaatcacaaaacatgataggtgctgtaggttatttgttgactccttttatcaggttaaggaaattaccctttattcataggtggaaatatcatgaattatttaatttttgtaaaataattttataggccttttgagacaatcatataacttttgtctttaattcattgataaggagatgatttcagtagattttctaacattggactaaatttgtattactaaccgagcttgttcatggtttttatactttgctaggtatacttcctagtattttgtttacaatatttgtctctgtgtgcatggatgaggtacacaatagcaaggttaccctagtctcaaatgaattgaagaatggcctcttttttctcccctcgcaaataattagtgtaacattggaactacttgtgacatcatctgggcatcctgttttctttgtagaattattaattatcaactcaattactttaatggtatgatttccatccagattttctaattatttgagtcaactttaataagttaaatgtatccaaaaatttgttaatctcacttatttacaaatgcatatatttaattgtcttattacttaatgaaatagatcataaatataaaagtgtgtatgtacagcttaagaagaatataaaatgagcatatgtgtccttccttcaggttatgaaatagaatatttccagtatcttagaaactcccattgcccttctacaatgccactcactccttccacaagaggtaaccactatccctaacttcctgttaatcattccattgcttgtcattacagacttgtatattgtttagttttgcacatttgactttttaaataagtgaaactatgtattgtttcttatgatcagatatgcatacacacaaacatgtatatgtatgtatatatacacacatacacacattatttttaagagcagttcaaagttcacagcaaaactgagcagcaggtatagatttcccatatactccctgtcccccacacatgcatagcctcccccataataaacatcccccaccagagtggtgcatttgttacaattaaagaacctacatgatacatcttatagtttgcattaaggttcacacttgggcttggacaaatttacaatgacaagtattcactattaaaatatcatacacgtactttcactgccttaagcatcctctgtgctctggttattcatccctctcttcctcctaactcctgggaaccactgatttttttttctatttctatagtattaccttttccagaaggtcataaagttggaagtgacatatgtagcctttttagattggcttctttcattctgcaatatgcatgtaagcttccactgtgtcttttcatggcttgacagccatttattttatcattgaatggtattcagttgtctggatgtaatacagtttgtttaattattcacctactgaaggtaatcttgcttgtctccaaatttttgcaattataaataaaacgtccataaacatctgtgtgcaggtttctgtgtggacataagttttcaactcctttgggtatataccaaaaaacaagattgcagggtcgtataataagagtagatttagttttctaagatgccacaaaactattctccattttgtatttccatcagcactgaatgagagttcctgttgcttcacatcctcatcagcatttggtgttgtcagagttctggatttttgccattctaatatgcatgcagtagtatctcattgcagtgctgtgtttgagaatgtgagtagctgcaattcattcactcttagtgctgcgaggtactctattattggaatatatgatcatttagttacctattccacaatctacccatattgagagataactggattgtttccaggtttttaaaattgtgaacattctcatatatccctaggtaaacaaatgcaagaatttttctggggcctgtaacaggctgactagattgcactaggttgtagtgaagccactgggtcatagggtacatgcatgatcagctgtatgagctaacatccgttttccaaatggctgtccttctacttgcatgggatgaatgcttccacggttctttatccttgccaatactacacctttcagaacttccaaaaaattttgtcaatatgtgtgaaagggtatctaattgttaattttcattttcatgattattattaggttgagcactttttcacatgcttatgggctatttatgctaacttcttgaggtgttatttttcacttattaatttataggagagctttatatattctggatactaaacctgtctaggtaacatgtgttgcaaatatctctgccaagttttgcatatttttttctcattgcggtatccaataaacagaagtcttaaatttttatgtgatcaagttagtttttactcttgccgtttgttcttcttccctatgtaaagataaaagagatgctccacagtttttttctaagaatgttgagaaggtatctttatccattaaaatatatttttaggtttggtctatgggattaagtttcaatttccttttttcccccttatggagaccagtggtcccagtgttgcttattgtaaaatttactatcttcacttaaccacaataaaagctgtgttacaaaatatgtttccaagtatgtgtgaaaaatatatttatctttatgattctactcagattaattagctctcaggactgctgtgtccagagttgattccttctggtgggttcgtggtgttgctgacttgaagaatgaagctgccgaccttcacgagcgctgattggtgtgttttacagagcatggattggtgcgttttacagagcgctgattggtacatttcacagaactcgtgagacagtcgcaggtggcatgatttgatttgtgtgaaggcaatgaaatgatacacagatacaccgaagcctcccaaaagaatcctggttccaagattcaagaagatggattaatgtttttccattaattgttggaatttatgccatttttttactatgtgccatcaattttaaagcacttctgaaaagagataacaatctacaatagctggcattttaaattcataaaaatatagtattttcttc

SEQ ID NO: 153 - DNA, 1521 bp, Homo Sapiens
attcccagggccagatggggaaacacgggaggggaggagctggccacctgccaagcccagacctctggccgagccccagctcctagattccagcctgtgctcagcctctgactctacacctgactttcagcaagtccctgatccctctgagcctcagtttccccatctcttgagttggcacagagagttgtgaaaaagaactcagaggctgggagctggagcgggaagggagtccccagggagcacagctgactggtcttcacaccaaaagcaagcacaggagaaagggagctagcatttcccagtgcctgtggtgtgccaggagctcctgcattttccattaattcccatcaccctgctatgaggtaggcattttctccccattttgcagatgatgaaactgagccccaaacaagcagagattatagagctgggtttgaagctagctctccttgcttggggcctgggattctgtccacagcagccactgggccatacctgcaagggtgtcagaaggtttgtgctggcgtcagtgtcgccaaggactctgggagccactcacattttgggcactgcctaaagttgattactttgttaaccctgcccaggccccaggcagaggctttaaattgttagaacaatgaagaagggagagctggataaacactggccaggcttgagggagtcctgggacatagttggggtaaaggactgatcagagcatatgctgaggctcaggaattcataggcatcttcctccagctccctgacacagggtacctagaagactaacgatggtggtgctgagtactagaaaggttctgtcccggacacaaatctagacaccaagtctggtcccccgaacaaggcagggacccaggttattggagcaaggctgtgagtccctgaggtgaggaactacagggcttggcctgaagatggagcttggcacggtttgtgcaggagcaagcgggtcaacaacaggccagcatcacaggtccacaggactggcccagccccacacccatgccaggtttctgccctgccacctaaggtgaggctggctctgccatggtgcccatgggtggtggggcgggggatgaggaggtctagtgcccacagagctggctctgccaccactgggcattttcagagatagagtcttgcccaaggattaccccatagaggttttaccaaggaacttctggagacagaagggcttgacccaaagacatcgtgttgacataaaattccaagcactggcagaccactcattttctctcaaaacccacttttcctgagcaactgttccgagccaggccctcttctggaacacagaagcaaaccaaatctactcccttaaacaatgggactcacaccaggtgctcaggaatgggacggaggggaggaagcagaggagctctgggactgtagcccagccagaaggagcccagaagtaccaatccagtgtgggatcaggggtcagggaagacttcttggaggaggctacctaaggttgag

SEQ ID NO: 154 - DNA, 1064 bp, Homo Sapiens
gcacttactgggaattcctcattcatggggaaaaattgcaatccctgatcaccatcgccaatgaggttcaacaggttacccacatctgccacatagggtaggcacacgctgagccagtcagtgtagcgcgcgtgcagccctggacatttaagggcatcacagacctgttattgctcaatctcaggtggctgaacgccacttgtccctctaagaagttgggggatgccgaccgctccagggtcacataactagttggcatgccagagtctcgttcgttattggaattagccagacaaatcactccagcaactaaggccatgcaccaccacccgtggaatcgagaaagagctatcaatctgtcaatcctgtccgtgtccaggctgggtgagttttcccatgttgagtcaaattaagctgcaggctccactcctggtggtgcccttctgtcaattcctttaagtttcagctttgcaaccatactcccctcggaacccaaaaacccaaagactggtttcttggaagctgcccagcgggtcatgggaataacaccgccacatcgccagttggcatcgtttatggtcggaattacaacggtatctgatcgtcttcgaacctccgactttcgttcttgattaatgaaaacattcttggcaaatgctttcgctctgttccgaaaaccaacaaaatagaactgtggtcctattccattattccaagctgcagtatccaggcggcttgggcctgctttgaacactctaattttttcaaagtaagtgcttcgggccacaggacactcagctaagagcatccagggggcaccgagaggcaagaagcagggacgggctgtggctcgctagcccacccgctcccaagattcaactacgagctttttaactgcaacaactttaatatacgctattggagctggaattaccacggctgctggcaccagacttgccctccaattgatcctcattaaaagatttaaagtgcactcattccaattacagggcctagaaagagtcctgtattgttatttttcgtcactacctcccccccaaccg

SEQ ID NO: 155 - DNA, 12952 bp, Homo Sapiens
gaccccgcagcgtcgtggctagagtagggtctggagagagctcccactgtggcgagtcctgtcgttggattcccgcggcgccccgtaaggctccgccccggcggtgctaccaaaccctgttcgattttagaatcgtacattcccagagggaatcctagacccctcattttacagttgaggaaacaggcccaagtagcatgacttgttcgcgccgctagtcgaaggagcagcagccccgatcccttgactctggggcactgctttccctttagctcatttttggaggaaatgggtgcgcccttgctcgacctttggtgattgccgccacaggccttcccgccggctaactcagcgtgcccaagtcccgtgacttagtgccaggacggtgctgtgacccgttatcccctgtcgggttttacctccccccgggagagctcagccctggatcccggcgggcggcggagcctctctggagcccggacgggacagcccaccagggtctgcttctgtgaggggccgaggcgtcattccgcgaagccttctccttgctgttgccatgtgaagaaggatgtgtttgcttccccttctgccatgattgtaagttttctgaagcctctccagccatgccaaactgctcttcattcgatgtacaaaaaccacaagattatctaaatagatgcagaaaaggccttcgataaaaatcctcattccttcatgttaaaaactctcaataaactaggtattgaaggaacatacctcaaaataataagagccatttatgacaaactcacagccagtgtccttactgaatgggcaaaagctgaaagcattccccttgaaaaccagcacaagacaagtttgccctctctcccaacccctattcaatatagtattggaagttatggccacggcaatcgggcaagagaaaaaaatgaagagtatttaaatgggaaaagaggaagtcaaactatctttttttgcaggtgacataatcctatatctagaaaacccattgtctcaacccaaaagcttcttaagctgataagcaacttcagcaaagtctcaggataaaaaatcaaagtgcaaaaattgctatacaccaacaacaggcaagccaagagccaaatcatgaatgagctttgattcacaattgctacaaaaagaacaaaatacctaggaatacagctaacaagggaagtgaaggacctcttcaaggagaactacaaagcactgctcaaagaaatcagagatgatgcaaacaaatggaaaaacgttccatgctcatggataggaagaatcaatattatgtaaatggtcatactgcccaaagcaacttataaattcaatgttattcccattaaattaccactgacattcttcacataattagaaaaaactattttgaaatttatatggaaccaaaaaagagcctgaatactgaaagcaatccttagcaaaaagaacaaaggtggaggcatcaggctagctgacttcaaactatacgatagggctacagtaaccaaaatagcacggtactggtacaaaaacagagacatagaccaatggaaaagaatagagaatacagaaataagactgcacacctacaactgtctcatctttgacaaacctgacaaaaacaagcaatggagaaaggattccctatttaataaatggtgctgggagaactagctagccatatgcaggatattgaaactggcaccttccttacgccttacacaaaaatcaactcaagatggattaaagacttacatgtaaaaccccaaactataaaaacactagaagaaaacctgggcaataccatttaggatataggcattggcaaagatttcatgatgaaaacactaaaagcaattgcaacaaaagcaaaaattagcaaatgggtctaattaaactaaagagcttctgcacagcaaaaggaactattaacagagtaaacagacaacctacagaacgggcgaaaattgttgcaatctatgtatctgacaaagccctaatatccagaatctataaggaacttaaacaaatttacaaaaaaaagcaaccccattaaaaagtgggcaaaggacatgaacagacacttctcaaaagaagacatacatgtggctaacaaacatgaaaaaagccttcacatcactaattattagataaatgcaaatcaaaaccaaatgagataccatcttacatcattcaggatggtgattattaaaaagtcaaaaaatgacagatgctgatgaggatgtgaagaaaaaggaacactttaatactgttggtgggagtgtaaattagttcaaccattgtggaaaacagtctggtgattcttcaaagacaaagaggcagaaataccattctacccagcaatctcattactggttatatactcaaaggaatataaatcattttcttataaagacacatgcacatatatgtttattgcagcactattcacaatagcagacatagaatcaacctaaatgcctatcagtgatagattggataaagaaaatgtacatatacaacatggaatactatgcaggcataaaaaggaatcaggtcatgtgcttcgcagggacatggatggagctggaggccatcatccttagcaaacttacacaggaacagaaaaccaaatactgcatgttctcacttacaagtgggagcaaaatgatgagaatacatggacacatggcggggaacaacacacactagggtgtgttggagagtagggagaggatcaggaagaataactattggataatgggcttaatacctgggtgataggatgatctgtgtagcaaaccaccatggcacacatttacctatgtaacaaacctgcatatcctgcacatgtatccctgaacttaaaataaaagttggaaataaaaaaaaaagagtgattatgtcagggactaggtggtagctgtggagatgatgaaaagtggtcagagtctagatgcattttgagggtgggcttgattggctggtggattagatgtgaaggatgagagaagaaaaaggtactaggatgactctagagtttttgccttgaacaagaaaaaaggatgaatgccatttaccaagattatagaaaatagccagtctgtttattcttacactatcaattgacacaacttccagttaataagttcactttattttctgaaagttacaggagaagactttactggttatgaccttatactgctttaatggtcatctgtagccaaaatcatggacataaattctgaggagggttcctggtaagcctcccattcctgctatgagaagaaaccagcatgcccatgcttcccagcagcatactgtaattgctaagtgtcaatgatgatgtcagttttagtgtctcagtaacagttgctagaggaaggaaggaaggaaggaagggagggagggagggagggagggagggagaggatgaagaaaaagaacgaaaagttagaaactatgtagtcccagcctctagaagccagaggcatgaggtctacttagggtcctcttgagacaggtgaagacttttcagtgtcacaaaattaatatcacaaagtgatattatgttagtattatgacatcaaaatgtgtgggcaggctgggcacagtggctcacgcctgtaatcccagcactttgggagtctgaggcaggtggatcacctgaggtcaggagttcaagaccagcctggccaacatggggaaaccccgtctctattaaaaatacaaaattagcggcgcatggtggagcaagcctgtaatcccagctacttgggaggctgaggcaggagaatcacttgaattcaggaagaggaggttgcagtgagccgagatcgtgccattgcactccagtctgggcaacaagagtgaaactccatctcaaaaataataaaataataataataataataataataataatgtgtgggcagatgtcatctacaccatagtttcagaatgcaataaattcacatttaaaaaccttgaagtacaccgtatcaaaactttacttcatctttcattcttatgtgattcagttgataggctggaagaacaatgaaagtgagttccatcatgctgcctggtgtccgtgtccttaatgataaagactttgagtgtatttgcaaactctctgttaatgacagcatttttttttattctgagctttattaaggtataattgacatacaaaaattgtacatatttaaggtgtataatgtaatgttttgatatacatatacattctgaaatgattaccaaaatcaagataattaacacatccatcacctcatagttatccatttagcaaatcctttactaggtggcaaaattgattttaaaatcacatttttatccccttgaagttttttcatctgtaaattttcaagggcagtcttttaatagaatacaaacagctcattccttatgtggctccaagctggcatttcagcattgggtttaaactttagagcaacatatgaaaatctcctgaataaacttgtcaatgattatggtcatcaaaacttagtatgatcaaggaaactggtttttgcataatattctgaatatttaaactccacagagcttgaataaatgaagtacaaattaaacatatcgatttttttcttttggtacatggtctatgttattgcagattagcatcccaaatcccaaaatcccaaatttgaaatgcttcaaaactgaaaccttttgagcactgatataagtctcaagggaaatgcattttggatttcagatgctcaaccagtaagcacataatgcaaatattaaaaaatctgaaatccaaaacacttctggtcccaagatatgggatactcatcctgtaccatggtaaatggttagttcttccttggcttatgccagtggttcttgatttaagccccaggagatattggaaatttctggaaacatttttggttgtcaaagcttgggggtggagtatgtttctggcatctaatgggtagaggccagggatgctgctcaatcttataatgcataggacaggccccagaagaaagaattgcctggcccaaaatgtcaatcactagtgctgaggttgagaattcttgacttaggccatagccgttccacagctcaagtcacagttgcattcctttagttgaaccttacagttcagttgttctactcaatatttgaatgctgaaggaagactggccctctagggttgtatttctagaacagggagaatgtagtactttgaggttgcatgctttagaattagtcattatgtgagttggaagaccatttgattctttattagaagttagcaagtgtgccagattagaccttcacccaagaacgtcatgagggttaatgagaggtttttaaaagataatagttatctttgtttcatgtttaacaactttatgcattggctggtcattccagctccacagaaagctcttcagttgagtttcaattacagcccgcaattccagatgctacaacattttaactgtggctgccagatatcagtgagattcacaggcctggagtacaacattctttacaatgtgtgcttcatattttgaaggccatctgtctcattttcatctacaattggctctgccgaagttttgcatgccaaatgatattttttaaaataagcttttgtgctactttaaaaatgtttcaaaaatatcttcgagatacaattcacacaccatgaaattcagccatttaaagtgtacaagtcagtggtttttagtagattcacaaagttgtgcaactatcactacagtctaaatttagaacactttcattactccataaagaaaccccatgcccattagcagtcactccagttcctctcctagtcctgggcaaccactaatgtaatttctgtctctaaagatttgcctgttcttatgaggagtggcggtgtacacctgtagtcccagctacttgaggaggccaaggcaggaggatcatttaagcccaggagtttcaggctgcagtgaattatgatactgctactgcactcccatctgggtgacagagtgagaacccatcctctaaaaaaaataaagatttgcctattctagacatttcttataaacagaaatatacagtattttgggactgctttttttcacttagcataatgtttttaaggttcatccatgttgtagcatgtataagtatttcatttcttttttgtccaaatcatattccattagaagtataaccatatttgatttatccatttatcgtttgataggcatttgggttgtttccacatttgcctactataaataatgctgctataaatattcacatacaagtttttctgtgaacacatgttttcatttctctccattattattataggctgaactgtggctccaccaaattcataatttgaagtcccaacccctagtatctcaggatgtaactgtatttaaagataaggtgtgtatagaggtggttatgctaaagtaaagctgctaggatgggggctctaatcccgtatgaatagtgtccttataaaaagccatcaggggcctgtccgcacagggaaacaccatgtgaggatacagaaaacaaccatctgcaagaaaggagagagatcttagaagaaaacagacctgccagcactgtaatcttcaactgccaggctccaaaactgtaataaataaatttctgttgtttaatttactcagtctgtggtattttgttatggcagctctagcagactattacaggtaaatacctaggagtagaaatgttgggtcatgtggtaactccatttaacactccaggtacctgccagactgttcatatgagtttttgtatgaatatatgttttattttctcttaagtacataggagtggcatagctgctaggtgtacatttaactatttaagacacggataaatggttttccaaagcagctgtaccattttacattcctaccagcaatgtttgagggttccaattttctgtatccttaacaaaacttgttattgtctatcttttgactatagttcagggactaagctctgatttttatcttgcccaaattcctacctaagaggtctggggagtcatgtcctacaaaccatggatcctcatcagatggcttttatttgaccatgtatattgtgacttgcttttcaatctgactctggcgtgacattatgagacaaggaaataatatttagccccataatatatttccttgccatgcctcgaaattgccctgcaaagtctcttgtgggaaaaatccacattccatagaaaatctccttccccttttattttctttcctttctttgcagatccagtggataatcaactaagagctaggcatccttttagatttgataagaaacattttacaacctaccctctctctgaagtctgccatctgagagattcttctgaacaataaaactggttctccacaatcctttatcttaacctgaacattcctttctattgatcccaagtctttagacaaattcaaccaactgtccacccgaaaatgtttaaatttacctatagcctggaaggccccactttgagttgtctcacctttctgaaccaaaccaatgtatttcttaaatgtatttgattgatgttttatgcctctctaaaatatataaaaccaagctgcaccccgaccaccttgggcacatgttctcaggaccacctgagggctgtgtcacgggccaaggttgttcatatttgactcagaataaatctcttcaaatattttacagagtttgactcttttcatctacaagtcatgtggtgtaaagtgatagctcattgttttctaatagactattttctacgaaagttttaggttcacagcaaaattgagcagaaagtacacagagttctcatatacccctgcctccccccaaccccatgcacaacctttcctactatcaatatcccacatcacagttgtacatttgtttcaaattatgacacatcattatccaaagtccacagtttatattagggtccatttttggtgttgtacattctatgggtccagcaaatgtgtaatgacatatatccacccgtgtagtagcatacagaaggctcactgtcctaaaaatcccgttttgtttattcattccttcctcctctccaaaccttcatatttcggttttgatatctactttcccagctgctaaagctgttgatcatcttttcatgtgcttattggtcacttacatattatcttctttggagaaatgtctattcaaatcctttgcccagttttaaattgggttatttgtctttctgttgttgactatcactttttaaggttgagtttgctccctgccaaggaggaaaacccatgacttttgtctactatgagaaaaacgctaatactttattattctggagaatggcttcctcaggaatttcactgttcctttctacttgagattcactaaatgttaatacagccactttgtggtttcggagcagagccatcatttttcttggcagccagatttataggactccaaaagaaacaaccagcattaggcagtattaaataaaatttggagataaaagctaatcagtgtgtataacaattactgatatcaaaatcaaggaataagaatcaaatagcacttcttactgttcatggacttcaaaagatttatatgaatttggtactattaaaacttcctctaaatttaaatatgaaacagatgggaataatacagttacatgagaaatattagtcatttctcagtgcttatgagctgggtccctttggtggacagtatttgtgcaaatgttttagtaactacatgactctgctctgttgtgagccatagttatcatatttttatttattctaaccagttaaattactatttactgaacacccactgcctcttgtactgaagtcattaaattctttgatacattttaaaaaagaaatagttgctttttctctgtttactaactttaaaaaaaaagaaaataacaccccccattcctccttgtatttcttagttggctgaagatattctggaacttaacaccatatattttgggagaaagaaaaacaaacctaaaacagaaaataccatagttatttaaatataggacttaaactcttgaagtttatctgcacttaaaaaaattctttccttttcttaaaatttttcagaaaggatttcactatctcctttgatagtttattctgcattctaaaactctcttttctcatggataatcaaaaccgatcctataggcgcctcttctgtattcagtagaaaaggtgactagcagccgggtgtggtggctcatgcctgtaatcccagcactttgggaggccaaggcaggtggatctcctgaggtcaggagttcgagaccagcctggccaacatggtgaaaccccgtgtttactaaaaatacaaacattatctgggcatggtggtgggtgccttgtaatgccagctactcgggaggctgaggcaggagaattgctggaacccgggagtaggaggttgtggtgagccaagatcgcaccattgcactccagcctgggtaacgagtgaaactcaatctcaaaaaaaaaaaaaaaaaaaaaaggaaaaaagaaaaaaagaaatggtgactagcttccccccaccatcttgatataatgatgaaattcttcacgccttctctacccaatgagggagaaaacaaacatgaaaatattgcaagacacaagactaagtactaacatttgttgacaatattaattttctcaatgtttaggtttctgaaaacagaacatttactgttgactttttccctcatgttaccaggtgtatctccaaacattctagaaacttcatgagataataaattattattaagcctaaattaggtgctttatctactttttgactgaaaaaattgaaacatggaataaattcattatttaatattaacataggtctacatttcctctgcaaaattcttgacccataactgccaattttaagattaaaaatacaggctgagtgcagtggctcatgcctgtaatcttagcactttgggaggctgaggcaggaggatcacttgagcccaggagtttgagaccagcttgggcaacatggagaaaccctgtctctacaaaaactacaaaaatcatcctagtgtggtggcatgtgcctgcagttccagatacctgggagattgaggtgggaagatcaccagaccctgggaggttgaggctgcagtgagtcatgatcatgccaatgcactccaacgtgggtaacacagtgagatcttgtctcaaagaaaaaaaaaaaaagttgaaaaggaaagaaaaaaacttttcaggaagggtacacatgcaaagcaagcctggcacgtaatgagtataaattagaaactatataaaatatatacattacaaaatataataagttaatgtatataaaatagaaaatatacttttttggttaataaaacaaaatgatgtgaggttatgaagaaattgtataatttcttaattggctttgaaagcaatttcaagcatcctaaaagagtttcgagtgataaaaacttaactagaataaaagcttctcacattcgtaagagcaacaattacttctcttccagtgatctccaaacttatttaattacatatctcaccagtaaaaggtttgtgcaactatatatccagtgcacatttatttaaaatgtaaataggttattagctatttctattttaaagcacgcataaattatagttggagtaaaacaatgtaaaagattgtgtttttacttactaatgggacagaatctttttgctgttattaaaacatagatttttagtttttaaataaaaacaggctatggaatatatttcattatttaaattctttgttgttgtttgtattagtccattttcatactcttatgaagaaatccccaagactgggtaatttataatgaaaaagaggttgaattaacttacagttcctcatggctggggaggcctcacaattagggttgaaggtgaaggaggagcaaaggcatgtcttacatggtggcaggcaagagacttgtgttgagcatgttgtttttgttgacacatatgaagaaaatcctagggcccttcagactccttggtcttggagatccctaaggaccacacttggaaactgatggtctatggcaatgggtccttttaggccttgaatccctttaagaatctgacaatatgaaactctgtctctaggaagctgctggaaggtacacatcttgggagtttgccctttgaagctcacctgtggaccttttttcctttcgaaaagaagcataagctgcaataaaaatttggtttcaagataacaaagtcagtccccaaaaatcagtattgagagtcactgacattaaatgatgaagatacgaggatggtgtggggacctttactcttcgaagatgagctatacatgcccctgaaaaggctgtctgaagacaggggaaggctggagatggcaactttggcctctgccaagtactcgtgctattttctgtatgtgatactatctgttttgtaactcagaggcaacaccacatacctagcataaggcttgaactccctttggggttatcaattacttacatagccttcctctaagggaaggcttgcaagtggttcatattcgacccttccatgtgataagcattcatgtgggcttcacaatgtaacagaggtacacagagattcttgtaaacagaaaattttataaaactgttaactgatctcactttgaagaagtcttactgactagatgtcatttatcagagtagacaggcttaaaatgcattgcttgtactagactgttgtaatgcatttttttgtttttgcattggtttttaattcatttaattggtttacactcatttttttttttacattccatttttgcatttgtatgccagttaaaaattatgaaatggcacattgtgggattttgtttagctaaattctagaaaaattgaaagataccttttattcgacttaagcctgaggttattcagcacggtgatctctgcatttttgaaaggttgtctcgtcgtttaataaacgtaaataacttaagcacattggaagagctattaaatgagagcaggagattaaaaagacatgatttcttactttatccacctgacaggatagcttgcattggtgattaaccttgcattgttaaattcatttcctaaatatttaggtaagtagttggtttgatcattatttgtaaagtattagtagttgcatgttgaattatcatgttaagatttttagtttgttgttcatgtgatatgaaagataacaattcctaaaactgaatgcatgcatggcttattcagctcaggtcacatacaaagagaaatgtgacgctgcaataaacatagcagagctatctgggtttgaagcaaaaaggctatgacgttaggtatatgcactttacattgtatgtatctttttagttctagtgaactcatctggaatcatgttacagaaaatgattctccaggtccaaacacatttaagtttaatgactgggactactctaacaattgcggctatctcattttgtctcattggttcattagcatagcacccatttaagaacaactacttctaaacacagtaatatttcagaggctataaaataatagagaaagaaaacttaaaaaatcctttgtttgcagccaagaaaatgtgaggatcagatttgtacttgttttgaacaattggaaactgtcacaattgtttttaagatgtaataaatgtatataaaatatgggattctatagtattagccattttgatatcttttgttgaaagaaaaaaccaaaaaaccccatatgttctaagtctcagaaatcaaagaattccac

SEQ ID NO: 156 - DNA, 12856 bp, Homo Sapiens
gaccccgcagcgtcgtggctagagtagggtctggagagagctcccactgtggcgagtcctgtcgttggattcccgcggcgccccgtaaggctccgccccggcggtgctaccaaaccctgttcgattttagaatcgtacattcccagagggaatcctagacccctcattttacagttgaggaaacaggcccaagtagcatgacttgttcgcgccgctagtcgaaggagcagcagccccgatcccttgactctggggcactgctttccctttagctcatttttggaggaaatgggtgcgcccttgctcgacctttggtgattgccgccacaggccttcccgccggctaactcagcgtgcccaagtcccgtgacttagtgccaggacggtgctgtgacccgttatcccctgtcgggttttacctccccccgggagagctcagccctggatcccggcgggcggcggagcctctctggagcccggacgggacagcccaccagggtctgcttctgtgaggggccgaggcgtcattccgcgaaggctcttcattcgatgtacaaaaaccacaagattatctaaatagatgcagaaaaggccttcgataaaaatcctcattccttcatgttaaaaactctcaataaactaggtattgaaggaacatacctcaaaataataagagccatttatgacaaactcacagccagtgtccttactgaatgggcaaaagctgaaagcattccccttgaaaaccagcacaagacaagtttgccctctctcccaacccctattcaatatagtattggaagttatggccacggcaatcgggcaagagaaaaaaatgaagagtatttaaatgggaaaagaggaagtcaaactatctttttttgcaggtgacataatcctatatctagaaaacccattgtctcaacccaaaagcttcttaagctgataagcaacttcagcaaagtctcaggataaaaaatcaaagtgcaaaaattgctatacaccaacaacaggcaagccaagagccaaatcatgaatgagctttgattcacaattgctacaaaaagaacaaaatacctaggaatacagctaacaagggaagtgaaggacctcttcaaggagaactacaaagcactgctcaaagaaatcagagatgatgcaaacaaatggaaaaacgttccatgctcatggataggaagaatcaatattatgtaaatggtcatactgcccaaagcaacttataaattcaatgttattcccattaaattaccactgacattcttcacataattagaaaaaactattttgaaatttatatggaaccaaaaaagagcctgaatactgaaagcaatccttagcaaaaagaacaaaggtggaggcatcaggctagctgacttcaaactatacgatagggctacagtaaccaaaatagcacggtactggtacaaaaacagagacatagaccaatggaaaagaatagagaatacagaaataagactgcacacctacaactgtctcatctttgacaaacctgacaaaaacaagcaatggagaaaggattccctatttaataaatggtgctgggagaactagctagccatatgcaggatattgaaactggcaccttccttacgccttacacaaaaatcaactcaagatggattaaagacttacatgtaaaaccccaaactataaaaacactagaagaaaacctgggcaataccatttaggatataggcattggcaaagatttcatgatgaaaacactaaaagcaattgcaacaaaagcaaaaattagcaaatgggtctaattaaactaaagagcttctgcacagcaaaaggaactattaacagagtaaacagacaacctacagaacgggcgaaaattgttgcaatctatgtatctgacaaagccctaatatccagaatctataaggaacttaaacaaatttacaaaaaaaagcaaccccattaaaaagtgggcaaaggacatgaacagacacttctcaaaagaagacatacatgtggctaacaaacatgaaaaaagccttcacatcactaattattagataaatgcaaatcaaaaccaaatgagataccatcttacatcattcaggatggtgattattaaaaagtcaaaaaatgacagatgctgatgaggatgtgaagaaaaaggaacactttaatactgttggtgggagtgtaaattagttcaaccattgtggaaaacagtctggtgattcttcaaagacaaagaggcagaaataccattctacccagcaatctcattactggttatatactcaaaggaatataaatcattttcttataaagacacatgcacatatatgtttattgcagcactattcacaatagcagacatagaatcaacctaaatgcctatcagtgatagattggataaagaaaatgtacatatacaacatggaatactatgcaggcataaaaaggaatcaggtcatgtgcttcgcagggacatggatggagctggaggccatcatccttagcaaacttacacaggaacagaaaaccaaatactgcatgttctcacttacaagtgggagcaaaatgatgagaatacatggacacatggcggggaacaacacacactagggtgtgttggagagtagggagaggatcaggaagaataactattggataatgggcttaatacctgggtgataggatgatctgtgtagcaaaccaccatggcacacatttacctatgtaacaaacctgcatatcctgcacatgtatccctgaacttaaaataaaagttggaaataaaaaaaaaagagtgattatgtcagggactaggtggtagctgtggagatgatgaaaagtggtcagagtctagatgcattttgagggtgggcttgattggctggtggattagatgtgaaggatgagagaagaaaaaggtactaggatgactctagagtttttgccttgaacaagaaaaaaggatgaatgccatttaccaagattatagaaaatagccagtctgtttattcttacactatcaattgacacaacttccagttaataagttcactttattttctgaaagttacaggagaagactttactggttatgaccttatactgctttaatggtcatctgtagccaaaatcatggacataaattctgaggagggttcctggtaagcctcccattcctgctatgagaagaaaccagcatgcccatgcttcccagcagcatactgtaattgctaagtgtcaatgatgatgtcagttttagtgtctcagtaacagttgctagaggaaggaaggaaggaaggaagggagggagggagggagggagggagggagaggatgaagaaaaagaacgaaaagttagaaactatgtagtcccagcctctagaagccagaggcatgaggtctacttagggtcctcttgagacaggtgaagacttttcagtgtcacaaaattaatatcacaaagtgatattatgttagtattatgacatcaaaatgtgtgggcaggctgggcacagtggctcacgcctgtaatcccagcactttgggagtctgaggcaggtggatcacctgaggtcaggagttcaagaccagcctggccaacatggggaaaccccgtctctattaaaaatacaaaattagcggcgcatggtggagcaagcctgtaatcccagctacttgggaggctgaggcaggagaatcacttgaattcaggaagaggaggttgcagtgagccgagatcgtgccattgcactccagtctgggcaacaagagtgaaactccatctcaaaaataataaaataataataataataataataataataatgtgtgggcagatgtcatctacaccatagtttcagaatgcaataaattcacatttaaaaaccttgaagtacaccgtatcaaaactttacttcatctttcattcttatgtgattcagttgataggctggaagaacaatgaaagtgagttccatcatgctgcctggtgtccgtgtccttaatgataaagactttgagtgtatttgcaaactctctgttaatgacagcatttttttttattctgagctttattaaggtataattgacatacaaaaattgtacatatttaaggtgtataatgtaatgttttgatatacatatacattctgaaatgattaccaaaatcaagataattaacacatccatcacctcatagttatccatttagcaaatcctttactaggtggcaaaattgattttaaaatcacatttttatccccttgaagttttttcatctgtaaattttcaagggcagtcttttaatagaatacaaacagctcattccttatgtggctccaagctggcatttcagcattgggtttaaactttagagcaacatatgaaaatctcctgaataaacttgtcaatgattatggtcatcaaaacttagtatgatcaaggaaactggtttttgcataatattctgaatatttaaactccacagagcttgaataaatgaagtacaaattaaacatatcgatttttttcttttggtacatggtctatgttattgcagattagcatcccaaatcccaaaatcccaaatttgaaatgcttcaaaactgaaaccttttgagcactgatataagtctcaagggaaatgcattttggatttcagatgctcaaccagtaagcacataatgcaaatattaaaaaatctgaaatccaaaacacttctggtcccaagatatgggatactcatcctgtaccatggtaaatggttagttcttccttggcttatgccagtggttcttgatttaagccccaggagatattggaaatttctggaaacatttttggttgtcaaagcttgggggtggagtatgtttctggcatctaatgggtagaggccagggatgctgctcaatcttataatgcataggacaggccccagaagaaagaattgcctggcccaaaatgtcaatcactagtgctgaggttgagaattcttgacttaggccatagccgttccacagctcaagtcacagttgcattcctttagttgaaccttacagttcagttgttctactcaatatttgaatgctgaaggaagactggccctctagggttgtatttctagaacagggagaatgtagtactttgaggttgcatgctttagaattagtcattatgtgagttggaagaccatttgattctttattagaagttagcaagtgtgccagattagaccttcacccaagaacgtcatgagggttaatgagaggtttttaaaagataatagttatctttgtttcatgtttaacaactttatgcattggctggtcattccagctccacagaaagctcttcagttgagtttcaattacagcccgcaattccagatgctacaacattttaactgtggctgccagatatcagtgagattcacaggcctggagtacaacattctttacaatgtgtgcttcatattttgaaggccatctgtctcattttcatctacaattggctctgccgaagttttgcatgccaaatgatattttttaaaataagcttttgtgctactttaaaaatgtttcaaaaatatcttcgagatacaattcacacaccatgaaattcagccatttaaagtgtacaagtcagtggtttttagtagattcacaaagttgtgcaactatcactacagtctaaatttagaacactttcattactccataaagaaaccccatgcccattagcagtcactccagttcctctcctagtcctgggcaaccactaatgtaatttctgtctctaaagatttgcctgttcttatgaggagtggcggtgtacacctgtagtcccagctacttgaggaggccaaggcaggaggatcatttaagcccaggagtttcaggctgcagtgaattatgatactgctactgcactcccatctgggtgacagagtgagaacccatcctctaaaaaaaataaagatttgcctattctagacatttcttataaacagaaatatacagtattttgggactgctttttttcacttagcataatgtttttaaggttcatccatgttgtagcatgtataagtatttcatttcttttttgtccaaatcatattccattagaagtataaccatatttgatttatccatttatcgtttgataggcatttgggttgtttccacatttgcctactataaataatgctgctataaatattcacatacaagtttttctgtgaacacatgttttcatttctctccattattattataggctgaactgtggctccaccaaattcataatttgaagtcccaacccctagtatctcaggatgtaactgtatttaaagataaggtgtgtatagaggtggttatgctaaagtaaagctgctaggatgggggctctaatcccgtatgaatagtgtccttataaaaagccatcaggggcctgtccgcacagggaaacaccatgtgaggatacagaaaacaaccatctgcaagaaaggagagagatcttagaagaaaacagacctgccagcactgtaatcttcaactgccaggctccaaaactgtaataaataaatttctgttgtttaatttactcagtctgtggtattttgttatggcagctctagcagactattacaggtaaatacctaggagtagaaatgttgggtcatgtggtaactccatttaacactccaggtacctgccagactgttcatatgagtttttgtatgaatatatgttttattttctcttaagtacataggagtggcatagctgctaggtgtacatttaactatttaagacacggataaatggttttccaaagcagctgtaccattttacattcctaccagcaatgtttgagggttccaattttctgtatccttaacaaaacttgttattgtctatcttttgactatagttcagggactaagctctgatttttatcttgcccaaattcctacctaagaggtctggggagtcatgtcctacaaaccatggatcctcatcagatggcttttatttgaccatgtatattgtgacttgcttttcaatctgactctggcgtgacattatgagacaaggaaataatatttagccccataatatatttccttgccatgcctcgaaattgccctgcaaagtctcttgtgggaaaaatccacattccatagaaaatctccttccccttttattttctttcctttctttgcagatccagtggataatcaactaagagctaggcatccttttagatttgataagaaacattttacaacctaccctctctctgaagtctgccatctgagagattcttctgaacaataaaactggttctccacaatcctttatcttaacctgaacattcctttctattgatcccaagtctttagacaaattcaaccaactgtccacccgaaaatgtttaaatttacctatagcctggaaggccccactttgagttgtctcacctttctgaaccaaaccaatgtatttcttaaatgtatttgattgatgttttatgcctctctaaaatatataaaaccaagctgcaccccgaccaccttgggcacatgttctcaggaccacctgagggctgtgtcacgggccaaggttgttcatatttgactcagaataaatctcttcaaatattttacagagtttgactcttttcatctacaagtcatgtggtgtaaagtgatagctcattgttttctaatagactattttctacgaaagttttaggttcacagcaaaattgagcagaaagtacacagagttctcatatacccctgcctccccccaaccccatgcacaacctttcctactatcaatatcccacatcacagttgtacatttgtttcaaattatgacacatcattatccaaagtccacagtttatattagggtccatttttggtgttgtacattctatgggtccagcaaatgtgtaatgacatatatccacccgtgtagtagcatacagaaggctcactgtcctaaaaatcccgttttgtttattcattccttcctcctctccaaaccttcatatttcggttttgatatctactttcccagctgctaaagctgttgatcatcttttcatgtgcttattggtcacttacatattatcttctttggagaaatgtctattcaaatcctttgcccagttttaaattgggttatttgtctttctgttgttgactatcactttttaaggttgagtttgctccctgccaaggaggaaaacccatgacttttgtctactatgagaaaaacgctaatactttattattctggagaatggcttcctcaggaatttcactgttcctttctacttgagattcactaaatgttaatacagccactttgtggtttcggagcagagccatcatttttcttggcagccagatttataggactccaaaagaaacaaccagcattaggcagtattaaataaaatttggagataaaagctaatcagtgtgtataacaattactgatatcaaaatcaaggaataagaatcaaatagcacttcttactgttcatggacttcaaaagatttatatgaatttggtactattaaaacttcctctaaatttaaatatgaaacagatgggaataatacagttacatgagaaatattagtcatttctcagtgcttatgagctgggtccctttggtggacagtatttgtgcaaatgttttagtaactacatgactctgctctgttgtgagccatagttatcatatttttatttattctaaccagttaaattactatttactgaacacccactgcctcttgtactgaagtcattaaattctttgatacattttaaaaaagaaatagttgctttttctctgtttactaactttaaaaaaaaagaaaataacaccccccattcctccttgtatttcttagttggctgaagatattctggaacttaacaccatatattttgggagaaagaaaaacaaacctaaaacagaaaataccatagttatttaaatataggacttaaactcttgaagtttatctgcacttaaaaaaattctttccttttcttaaaatttttcagaaaggatttcactatctcctttgatagtttattctgcattctaaaactctcttttctcatggataatcaaaaccgatcctataggcgcctcttctgtattcagtagaaaaggtgactagcagccgggtgtggtggctcatgcctgtaatcccagcactttgggaggccaaggcaggtggatctcctgaggtcaggagttcgagaccagcctggccaacatggtgaaaccccgtgtttactaaaaatacaaacattatctgggcatggtggtgggtgccttgtaatgccagctactcgggaggctgaggcaggagaattgctggaacccgggagtaggaggttgtggtgagccaagatcgcaccattgcactccagcctgggtaacgagtgaaactcaatctcaaaaaaaaaaaaaaaaaaaaaaggaaaaaagaaaaaaagaaatggtgactagcttccccccaccatcttgatataatgatgaaattcttcacgccttctctacccaatgagggagaaaacaaacatgaaaatattgcaagacacaagactaagtactaacatttgttgacaatattaattttctcaatgtttaggtttctgaaaacagaacatttactgttgactttttccctcatgttaccaggtgtatctccaaacattctagaaacttcatgagataataaattattattaagcctaaattaggtgctttatctactttttgactgaaaaaattgaaacatggaataaattcattatttaatattaacataggtctacatttcctctgcaaaattcttgacccataactgccaattttaagattaaaaatacaggctgagtgcagtggctcatgcctgtaatcttagcactttgggaggctgaggcaggaggatcacttgagcccaggagtttgagaccagcttgggcaacatggagaaaccctgtctctacaaaaactacaaaaatcatcctagtgtggtggcatgtgcctgcagttccagatacctgggagattgaggtgggaagatcaccagaccctgggaggttgaggctgcagtgagtcatgatcatgccaatgcactccaacgtgggtaacacagtgagatcttgtctcaaagaaaaaaaaaaaaagttgaaaaggaaagaaaaaaacttttcaggaagggtacacatgcaaagcaagcctggcacgtaatgagtataaattagaaactatataaaatatatacattacaaaatataataagttaatgtatataaaatagaaaatatacttttttggttaataaaacaaaatgatgtgaggttatgaagaaattgtataatttcttaattggctttgaaagcaatttcaagcatcctaaaagagtttcgagtgataaaaacttaactagaataaaagcttctcacattcgtaagagcaacaattacttctcttccagtgatctccaaacttatttaattacatatctcaccagtaaaaggtttgtgcaactatatatccagtgcacatttatttaaaatgtaaataggttattagctatttctattttaaagcacgcataaattatagttggagtaaaacaatgtaaaagattgtgtttttacttactaatgggacagaatctttttgctgttattaaaacatagatttttagtttttaaataaaaacaggctatggaatatatttcattatttaaattctttgttgttgtttgtattagtccattttcatactcttatgaagaaatccccaagactgggtaatttataatgaaaaagaggttgaattaacttacagttcctcatggctggggaggcctcacaattagggttgaaggtgaaggaggagcaaaggcatgtcttacatggtggcaggcaagagacttgtgttgagcatgttgtttttgttgacacatatgaagaaaatcctagggcccttcagactccttggtcttggagatccctaaggaccacacttggaaactgatggtctatggcaatgggtccttttaggccttgaatccctttaagaatctgacaatatgaaactctgtctctaggaagctgctggaaggtacacatcttgggagtttgccctttgaagctcacctgtggaccttttttcctttcgaaaagaagcataagctgcaataaaaatttggtttcaagataacaaagtcagtccccaaaaatcagtattgagagtcactgacattaaatgatgaagatacgaggatggtgtggggacctttactcttcgaagatgagctatacatgcccctgaaaaggctgtctgaagacaggggaaggctggagatggcaactttggcctctgccaagtactcgtgctattttctgtatgtgatactatctgttttgtaactcagaggcaacaccacatacctagcataaggcttgaactccctttggggttatcaattacttacatagccttcctctaagggaaggcttgcaagtggttcatattcgacccttccatgtgataagcattcatgtgggcttcacaatgtaacagaggtacacagagattcttgtaaacagaaaattttataaaactgttaactgatctcactttgaagaagtcttactgactagatgtcatttatcagagtagacaggcttaaaatgcattgcttgtactagactgttgtaatgcatttttttgtttttgcattggtttttaattcatttaattggtttacactcatttttttttttacattccatttttgcatttgtatgccagttaaaaattatgaaatggcacattgtgggattttgtttagctaaattctagaaaaattgaaagataccttttattcgacttaagcctgaggttattcagcacggtgatctctgcatttttgaaaggttgtctcgtcgtttaataaacgtaaataacttaagcacattggaagagctattaaatgagagcaggagattaaaaagacatgatttcttactttatccacctgacaggatagcttgcattggtgattaaccttgcattgttaaattcatttcctaaatatttaggtaagtagttggtttgatcattatttgtaaagtattagtagttgcatgttgaattatcatgttaagatttttagtttgttgttcatgtgatatgaaagataacaattcctaaaactgaatgcatgcatggcttattcagctcaggtcacatacaaagagaaatgtgacgctgcaataaacatagcagagctatctgggtttgaagcaaaaaggctatgacgttaggtatatgcactttacattgtatgtatctttttagttctagtgaactcatctggaatcatgttacagaaaatgattctccaggtccaaacacatttaagtttaatgactgggactactctaacaattgcggctatctcattttgtctcattggttcattagcatagcacccatttaagaacaactacttctaaacacagtaatatttcagaggctataaaataatagagaaagaaaacttaaaaaatcctttgtttgcagccaagaaaatgtgaggatcagatttgtacttgttttgaacaattggaaactgtcacaattgtttttaagatgtaataaatgtatataaaatatgggattctatagtattagccattttgatatcttttgttgaaagaaaaaaccaaaaaaccccatatgttctaagtctcagaaatcaaagaattccac

SEQ ID NO: 157 - DNA, 987 bp, Homo Sapiens
attggcagttggcccttcagctgctgtacagcctcggtaggggcccaggggtattgaatctggttttggaccacaggaggagagtgaagtgaagtacaaccaatattgtcaacagcaagatcgtcaagtgagtcctgataatatattcatggaaagatatattgttctgcttctaggttctgtagggaaggagggcccagggagaatgcatgttgcaactctgcaagcagaatctacccctctgcccatagaagctggttgtggttgttcagttttcctttagctttttggtttcatttctgcaagtggcatgttttggttgctaagcaaggtgttgcaaaatatgaggtgagatgtcaatataactttaaaaggggagatgtggtcagaagggacgtaatactcagattttaagaagaaaaaggatttttgaatttggcattattaacagagagctgtcatgttcctttccctcaacagagaaaataagtgacccaaaatagaaaataaatgaccctttctgtgattagcaactcactgtgtttgtttagtgtcaagaatgctattagtaactaataaaaatttataatcatgagatcacctccccaaacaaaaatgaataaacagagaatacatctttatagcaagtctaatgacacctttgcagctaaggagtctggacctagcagagtatcctgcatgcctagagcaggcatttcataaatgttgaaaaatgagtgttgtttgctgaatattgaacttgcctttgcagtctatatccctccccaaataatcagcctgttgtatgacctccagatttatattattgcaccgtcactttggtgctgagatttggcataattactttaggaaaatatcccttattgatacacacattagtccactgtagtgagtggcacctggtatgggaccctaaacctgatacattctcaataaatgcttgttaacctgaatagtcactaggaa

SEQ ID NO: 158 - DNA, 3141 bp, Homo Sapiens
ttaacaccacttgctcaatccgtatgcaaatttcgttgtctattttgttaaaacatgtccatatacgacccttttccaccactgttcaagccactgtcatcatattatatatctcatgcacaggactgtttaagataggccaacacgatgccccttcacaaggacccaataaaatctacattgtcttatggccctacagatacctttgcctcttacccttgcctctcatttggaaaaatgtatctagattttaggttgggaaaaacagttcttattaataaaatgcatattcttctgaatctgttgtttggtcaggacctactatgcagtcttgacttttgacattcaatagcctagattttaaaaatcccaagtttcctttctgtgttttggtgctttgtcctgtggcagtgaatgctttacaaattctattttaagtggaggaagaacacgtttaaaaataatttctggaaatgaaaaaacatatcataaaatgaatgcctctccccatatataccattcgaatatttttattattcattaacattttgatgtattttcttccatccttttttctctgctcaattttgaaaacatttgcaacaaaataaccatttaattttatatcctggatttcttccaatttatcattataatctgaacactcttcatattattaaaaacgttctataaatatcatttcaataattccaaaatattatatgaatgtacatagtttatttaaccatgatcagttagaatactttaaacattttaatttgtatgtaatattttgtatgttcaaatttaccaaaatttctgattactcccgcagtatagaaaagttaaattgctaggtcaaagtgctttaacattttaccattcttgatattatagcttcatgattaagtgcatgaatttttaaagtcagatataccctatatggaatcccgaatccaccaaaattatgagaagtactatgttgaagaggaacggtgagagtaggcatcctggtcttgttcccgttctcagagggaatgctttcaacttttccccattcggtattatattggctgtgggtttgtcacagatggcttttattacattaagagaagacagctataactccaaaagtgagagaaagtagaagacatgccagtgctcaaaagctacaaatgtaaccagagccgtggcataaaatgaaatacttctggttcatatacttccactgagcagcattgcattttatacacttcttctttaatggttcagacatatagttcttaacatcacatggagactcataaccttcagaatacagcatgaatcagctggctgcactgcaaagagaatacaaaataccatcaagaatgtcctaactggaacagtaaacttttaaagtacaaacaactcatctgttagcagcctggcattttgctttctggaaagtaaatacattagagagatatctttaaagagagtctattacctgtgtaagtcagcaattttcaatcatgactgtagcagatccaggtgagagacactgcgacctggccttatagcaggaccaataagcataagcaatcccttggtcctaagagtttgtgcatacttatatatacatgatgtctcttaaataacccagaaaaaatgctctgagaagacctgaattacaagtgtgtggaatacctccatcttctgcttaactgatgtccagcttagtgagagatgttttctatttaatcccacaccttgtgtaggatgggataagaattataaattaacaagtcaactatattaaaagagaaattgaagaatgacttaaaccttctcagtctcaaattactccgtcctggatacatatagttgaatcctgttaagtaaaatacaagtgtaatatgtcgtccccatgctctaaaacactacaataagaaaggagacaaaagaaagaaaattataataaaatcttatcttcaggaatccttaagagaatacatcattctgaactgtcaaagatttgctcacttgaatcttcttataaaaatctttctaaattgcattgcttatttcactacattcttaaacaacgtactctataatttaatctgttcttagatgatataagattattgttattttaaaataaaagtccactctagtgtacagcaatggtggctgcatgatctactgtggtggataagactgagtattgctgagctttgtgagttattttgttttgctttatggatactgttttttttttttttgctgaaggaaaccagtattgttttctgttatatttgcaatcaaaagcatcttaactgaaagaatttggaatcaggaagtagggtgttacataaagccatgaaagtgtccttaatattttgggaagataatgtagaagtatatggcgtaaaatgactaaatggtaattaaattatcttccttggtcacctgagctcaactgcccaacaggatataaagctctaggagacaatgttgccaccaccagtgaagaattcaaacaattcagtgactatcagtagaagtcagtgtttctgatgcattagtaatattaaagaaagagattatcaaattcaaatacataaatttttgtctcacggtacgaactaaaacctaggaacttttagttactgggctaacagcacctctaatgtcttttatttccccaaatcacattgtaatgatttggcatccagtaagagtaacgaaataggtggtcagagtaaatagaaaaccccactgattagaaagaggaatcagtgataatacttctttcatttaccattggttactgtttttcaaaaatgagaacatttagagatttagcaaaagcattacgcatctccatctgctttccatgtcaggcaagacagatactactcactacaaataattatttaaaggatggagggaggaggaggaaatccagaaacaatgtttatttgaacatcttgaaagacagcacaattatgctgttttataagacatgtataacttattattgtaagaactttaaggttttttttttcatttttttttttgctggtctgtatattctaaattttatttatacctatgtattatatttgttataagaatataagcacaatagaaaag

SEQ ID NO: 159 - DNA, 874 bp, Homo Sapiens
aagacaccgaaacaaggatttcagtgcaagttgtttcatgggagacttcaagaagcatcagggtcgatcccagcactttgggaggccaaggacatctttcaatggctcctggccaactggcagcagaattttaccttcctgtgcatgaatgaccttggatattattcttggtggcatgactggacacctgcagcctcttgatgtttccagtcaaaaaggtatttaagagccatttgtcaggcggaccacttgagcccacgagtttgaggccagcctgggcagcatagtggcacgctgtttctaaaaaacaaaacaaaacaaaaacaaaacaaacaaacaaacaaacaaaaaacgaaagaaaggaagaaagaaagagaaaagagcagtaatatcttcatcactggtcattggtcattgtctttaaaacaactttccatcgatatcttctggggagaacaagagagcactagtgtcaaaacttcaaccagcttggaagaaaattctggagataagagagcaataattttttaggttgaatcacataagtttgccatcttttggtcaaaaacagtctaatgagcaatttcacttggttccacttacaagaaaagttccatctctaacactcttgatgggactgtgtgcagaaataagggcattgacaagtcggaattaaaacataatctagaagggttgcattctgaatataaaaagttttaggaatatttaaaccagtttgttttacttatattttccttctttatacatatgacaagagtaatattttttaaaaaattatttaaaggcctattcatagcttgaaaaaaaattcttgcagtaaaagcatttgcaaaaatatgaaataaaatttgac

SEQ ID NO: 160 - DNA, 1628 bp, Homo Sapiens
aatgggctgcattaaaagcaaagaaaacaaaagtccagccattaaatacctgaaaatactccagagcctgtcagtacaagggtgagccatgggagcagaacccactgcagtgtcaccatgtccatcatcttcagcaaagggaacagcagttaatttcagccgtctttccattccattataccatttggaggatcctcaggggtaacaccttttggaggtgggcatcttcctcattctcagtggtgccaagttcatatcctgctggcttaacacgtggtgttactatatttgtggccttatatgattatgaagctagaactacagaagacctttcatttaagaagggtgaaaaatttcaaataattaacaatacagaaggagactggtgggaagcaagatcaatcactacaggaaagaatggttatatcctgagcagttatgtagcgcctgcagattccattcaggcagaagaatggtattttggcaaaatggggagaaaagatgctgaaagattacttctgaatcctggaaagaacaaaacaaaacaaaaacgagagagcgaaactactaaaggtgcttattccctctctattcgtgattgggatgaggtaaggggtgacaatgtgaaacaccacaaaattaggaaacttgacaatggtagatactatatcacaaccagagaacaacttgatactctgcagaaattggcaaaacactacacagaacatgctgatggtttatgccacaagttaacaactgtgtgtccaactgtgaaacctcagattcaaggtctagcaaaagatgcttgggaaatcccttgataatctttgcgactagaggttaaactaggacaaggatgttttggcaaagtgtggatgggaatatggaatggaaccacaaaagtagcaatcaaaacactaaaaccaggtacaatgatgccagaagcttttcttcaagaagctcaggtaatgaaaaaaataagacatggtaaacttgttccactatatgctgttgtttctgaagagccaatttacattgtcactgaattgatgtcaaaaggaagcttattcaatttccttaaggaaggagatggaaagtatttgaagcttccacaaatggttgatatgcctgctcagattgctgatggtatggcatatattaaaagaatgaactatattcaccgagatctctgggctgctaatattcttgtaggagaaaatcttctgtgcaaaatagcagattttggtttagcaaggttaattgaagacaatgaatacacatcaagacaaggtgcagaatttccaatcaaatggacagctcctgaagttgcactgtatggtgggtttacaataaagtctggtgtctgctcatttggaattctacagacagaactggtaacaaagggcagagtgccatatccaggtatggtgaaccatgaaatactggaacaggtggagcgaggatacaggatgccttgccctcagggctgtccagaatccctccatgaattgatgaatctgtgttggaagaaggaccctgatgaaagaccaacatttgaatatgttcagtccttcttgggagactacttcactgctacagagccatagtaccagccaggagaaaacttc

SEQ ID NO: 161 - DNA, 1852 bp, Homo Sapiens
catgcgtggctgactgtgggcgagcgaatcctggaacatcacatgttttgtttgtggagtggtgtgtacattgtttgtagagtggtgtgtacattgtgtgtagagtggtatgtacattgtagagtggtacgtacattgagagtggtgtgtacattgtagagtggtgtgtacattgtttgcagagtggtgtgtacattgtgtgtagagtggtgtgttcattgtagagtggtatgtacatggagagtggtgtgtacattgtagagtggtatgtacattgtagagtggtgtgtacattgtgtgtagagtggtgtgtacattgtgtgtagaggggtgtgtacattgtagagtggtgtgtacattgtgtgtagagtgctgtgttcattgtagagtggtgtgtacattgtttgcagagtggtgtgtacattgtagagtggtgtgtacattgtagagtggggtgtacattgtttgtagagtggtgtgtacattgtcgagtggtgtgtacattgtttgcagagtggtgtgtacattgtagagtggtgtgttcattgtgtgtagagtggtgtgtacattgagagtggtgtgtacattgagagtggtgtgtacattgtagagtggtatgttcattgtgtgtagagtggtgtgtacattgagagtggtatgtacattgagagtgctgtgtacattgtagagtggtgtgtacattgtagagtggtgtgtacattgtgtggagagtggtgtgtgcattgtagagtggtgtgtacattgtgtggagagtggtgtgtacattgtagagtggtgtgtacattgtgtgtagagtggtgtgtacattgtagagtggtgtgtacattgtgtgtagagtggtgtgtacattgtagagtggtgtgtacattgtgtagagaggtgtgtacattgtagagtggtgtgtacattgtgtgtagagtggtgtgttcagtgtagagtggtgtgttcattgtagcatggtgtgtacattgtgtgtagagtggtgtgttcagtgtagagtggtgtgttcattgtagcatggtgtgtacattgtagagtggtgtgtacattgtagagtggtgtgtagagtggtgtgttcattgtagagtggtgtatacattgtgtgtagagtggtgggtaaattgtagagtggcatgtacatggtgtgtagagtggtgtgttcattgtagagtggtgtgtacattgtttgcagagtggtgtgtacattgtgtgtagagtggtgtgttcattgtagagtggtgtgttcattgtgtgtagagtggtgtgtacattgtgtggagagtggtgtgtacattgtgtgtagagtggtgtgttcattgtagaggggtgtgtacattgagagtggtgtgtacattgtgtgtagagtggtgtgttcattgtagagtggtgtgtacattgagagtggtgtgtacattgtgtgtagagtggtgtgtacattgagagtcgtgtgtacattaagagtggtgtgtacattgtagagtggtatgtacattgagagtggtgtgtacattgagagtggtgtgtacattgtgtgtagagtggtgtgttcattgtagagtggtgtgtacattgtagagtggtgtgtacattgtgtggagagtggtgtgtacattgtagagtggtgtgtacattgtgtggagagtggtgtgtacattgtagaggtgtgtacattgtgtggagagtggtgtgtacattgtagagtggtgtgtacattgtgtgtagagtggtgtgttcattgtagagtggtgtgtacattgtggagtggtgtacatggtttacacacgtgtgtgcatggggacaagacttggatggagtttgccatcccctgtta

SEQ ID NO: 162 - DNA, 1395 bp, Homo Sapiens
agacagagtctcgctcttgtactatcttggctcactgcaacctccacctcccggattcaagcgattcttgtgcttcagcctctcaagtagctggaattacagatgtgcaccaccacgcctggctaatttttttgtatttttagtagagacggggttttgccattttggccaggctagtctcaaaactcctgaccttgggtgatctgtctgccttggcttcctaaagtgctgagattacaggcgtgagccactgcaccatgctgtttcttctgctaataagacttattttattttatttttttaaatggagtctcactctgtcgccaggctggagtgcagtgctgcgatctcagctcactgcaacctctgcctcctgggttcaagcaattctcctgtctcagcctcccaagtagctgggactacaggcgtgcaccaccatgctgagctaatttttatatttttagtagagacagggtttcaccatgttggctaggatggtctcgatctgttgacctggtgatctgctcgcctcggcctcccaaagtgctgggattacaggtatgagtcactgtgctcggccgagtatcctcttttttttttttttgagacagggtcttgctcagtcacccagggaggagtgcagtggctggaccacatctcatgtacctgaacttcctgggctcatgcgatcctcccacctcagtctcccaagtagttgggactatgggcgcatgccaccacgcctagctaatttttttttttaagtagatactgggtctcactatgttacctaggttggtcttgaactcctgagcttaagcgatcctcccacctcagcctcacaaagcgctgggatcacaggtatgagctactgcacccagcccatcttggatttcttttgcttttttttttgagacagagttttgctcttgttgtccaggctggagtgcaatagcactgcctcggctcactgcaacctccatctcccaggtacaagggattctcctgcctcagcctcccgagtagctgggattacaggcgcccgccaccatgcctgtctaatttttttgtatttttagtaaagacgggggttcaccatgttggccaggctggtctcgaactcctgacctcaggtgatctgcctgactcggcctcccaaagtgctgggattacaggcgtgagccaccgcgcccagccctcttttgctttcttaaataggtctgcttccttctaactacaggcccgttgcacatgctgtttcttctgctaataacactttttctctcctctttgcctggcaactactcatctttcatgtttcagtttaacatttctccagggagactttcctgaaccttcaggctactttgaactgtctggtatagcacactaaac

SEQ ID NO: 163 - DNA, 16209 bp, Homo Sapiens
agcttctgcccgcgcggagataaacaagcaccgcgaccgccgagcagcgccgaacccagcgcgcccagtcagaccccagggcctgtgtaccgagcatgcgcagttcccgcccaagccaggagcagcgtcaacctgagactcccgagacattaagaattcggaagggatgagatggtagaggggctagagctacctccaagctttatcctgaggcggggagtgaaggagagatgcccaaggcccaagaggggccgcgagggcctttgtccgatgccacccagtctgtcagcactcctagagctttggttttatcttgtattagcatgtgaagctttaaggggggggcacctacaggcttctgactgaagttgtgtaaacgcaacaaaatgaagctttggagcgttaggacattgatgggagggtgacgcccccctctagcagcgcgccagaggggcgagtcagaggcggccacacaccacggaagtcgggtccaagcccgctgacgtcgccggggtcccgcccaccaaccctctggacccgcccacatttcttctagacccgcccctttcggtgccgaactgaagtcgagctcttcccacgccctgtcagccacgggtgagttgaaaacctggagagcggaatcccgaacggcagccggaaggccctggactcctcatagcaacagccagctaggggcatctagtgggaagctgggattcattctagccaaccacatcacgtctctgtaccacaaggtaccattcacgaccaataagagagcgcccccataccacgtgcctttactccttcaaccaatcgagaaaaacgctagtcgtaggatccgcaagcccacctcccagtgccttgccaggcggggctcttcgcgcacgctctgccaaccaatcgtaggtgagctggcgagtgacggaagcttcggccaagccaaccagagctcgcgagccccttgccaccgaggccggcgggatggagacagggaccggctgctggggtttgggaggggcagagattgaggagccagttgctgtgccctgttctggcaaaagaacaagatgcgttgcaagccagaatgatgaattccacttttcacgtcgcctccgtggcattctgcctaaatgatgggcatggaaatggtgctgagggatgtgggctgaatcgagaacacagggacttttgtcttcagggtgagaaatgttccggtccttaaggaaacatcgtgcagcagttgcatgggtcttccaggcgttcctcccaaaacattattttttttctttcactattgagttttaaaacttagcgttctgtcgctagcattgcatcttagttacacatcctctcccacccataacgtcaaatttaggagacgatacatccccaagctttcctgcattattttttgcagtaactggttattcagtttactttctttaaactatgtccttctcaaactagtctcacctgttcgttactgtcgcacatttcctgcgaataacacgtttctgtagttctgttgttagagcctggcatacctctccccgttcctctttcccacaaggtcatcatgcagaggggattttggtctgagttaaaagccaggtattctttcaccatcttttctgtcgatagtcaaactactacaaagactactcaaatttagtagtttcttatttccctatagcttcgttatattagaatggataacttatatttgcattaccttgctgtaatgaacacacaccaagttttcatttaaaattatcaaggacaaatgtcctctgaatttaaaaatgtgtatgtagtaaaatataactcagcatttcttgattacatatcattaaaatatgaatggtactatctgagccaccagaatcagcagtgaaggtattatattaataaaaaggactaagaatcaggactgttttaagggaactggaaccgaagaggatctactatttcatcctaggctagttaacatgaaatagtgaattaaaattgaaagagcttacatggatgcttcatatctgagctactttggcagggatgtttcaagaggatgtaggtaagtatggtgttcacctagctttccagaagtctcatattttgtgtaaaattggtatgcttattcatggttactttgggttagtagaagctatacttcttttccaaggaaagacagactgtcttaagattctaactgtgcatcttggtgataagaagttcttagggttgttaaatagagccaggaagcgtgaagctttctctctagatcatgacaactcatctagtaccttgcattacaaaggagctctaagtccatttactttgcaaggaatgaagttccagtgattaatgtttttgagaaatttgtattgggattgtggggtccagaaggttgccttaagtaactgttttcatgactcctaggtccctagatgttgagaagctctggattgaagctgtcacaaaaatagtgagtgggctccgtagtcactccatttagcataatacagagtaggacagctttgtgacatttctcaggctatttcccctgacctctcatcaatgctgacgtttttgataagaaggggtatagagactgcagcccttggggtggttacagttcatttatttacaggccttatattgacaggcctcagatttcatgctcagtaccataaaggttgatttttaaccaccaagaggcaaaagaaacatgacaggtcggagcatattttctcacctattctggcttaaatgatggtacttacctgatttgtggttgtaggtgaaatgttgggtgaaagattagctgctataaaaaggatgtcaggacgtgtagagaatttagaggacttgggtgggagatggatgtctattttctaaccccttagtcatgttcattccgatgccagcataaactctattttgagatgattatagaaataacttatatcttcatttgtttgtgggaaataaaaaataaaaatgatataaaagaaatttgaattattcccaagagctgtaaatctgtaagatagtgaaaacttaacgcagtaactgacactgcaggatccctttagtttccaaagtgcattgccaggagaataaaaagaaagaaaatcttcatttctcctctctccactaaatctgaaagggagttatctcacctatagccagataccttcaattatcgcacttgtgttaccgtggaaacccaagtccatcctttctttctgtaaaaggtgttggaaaaggtggtatgaagtgggaaaggtactgtattctgggacttcctgacaccagcaagaagcaaatatgcagataatttaatagaaacaaattagtagaggatgtttgtaatgcgaggggtacttttcgactgtaaaaccctgattcctaatgcttcttattaaagcctgcatgcctctgattaaacataaaggggaagggcatgtcaagtacatttagcacctgtgaaacgctgctggcaagtataaggagagcagacgatggtttcttgacctgtgaggctcctaatacagttgagaatctgcagtatatatgtggagtggaaaggaaggggcaaaataaactttgttcttcctttaaaaaatgtgatatgtctcagtgcttttgaaaagaaaaggaattagaatgcagaaattaagagtatggaaacaactcaataaaagaaacgtatgggtggagagagtagatgtttcaaaaggccattttaatcagaaaaaaaatctgaaagaaaagacgtaatgattaaaatgtaggcagaaaaaagaaaaagcctgaagaatcttaagagctagaggattctgcggaaaacagagcttcagtgtggttcatttaacaaagcagaagagcaggcacagtgttgcttgcgtacccagcagtttccctttatttttgccaaagaagctgggatgaatcaggattggactttaatagcattgctttccctctgcccacggttagtccaaaagtaggcacgtgactcagttcttgtcattggaatggggagaaggctgctagggctggagggatttctaggatattgacaagagtgaggaaatatccccgttttctgatgtcgctctctttgcttcctgctttacacattgaaatatgagaatgtggcctccatttgggggctatgatgcattatgacattatggtgcaatactgtagaaagccagcaacttcggatggccagggaggaggatgggaagaacctaggtcctgcatgacaacattggacagtcaaaccaacattagaactgcccacatttggacttatggctaagtaaacagctggtgtctttcaatttaagtgtgtgttggtaaggttttctgcatcttacagcaaaatacatcccacctgttaacaaaaagtatgagggattccagccaaaatcgggctttaaaaaatcagcaagcatttgtgagcactttcatttcactaatatctgaacgatagttcaaagatactataatattaattgagtaattactgtgtatattttttaggctctggggataaaacaataagcaattagccaaaagagcttgtattctagcaggagagacagatattaagcaaccaattacatgtttatattataaaataatggttatgcttaaaactaataaggaaaaatcaggaattagaaagggtatatagtaattatataaataataaaatattacaaaatatataactaaataactgaatgaaattacaaaaacaaacactttccaagtaaatgagaatgaaatgtatagtttttactgacattcccagaggtcgagagaaacagtaaattggagtaggttagtccaggagagttgtctgaagcaaattaatattgtatcaggttttgaaggaagtggcgaaaggacaggctagatggggcagaagagagcactctagatgtaaggaaccagaagagcaaaggaagaaagcaggaatgaagtaagagtgaatgagggaaataccagaatcacttgattttttaaattccctgtagcaacagcattctaggggcatctctcagagaaaaagacagaaagatgccagaagtctcaaagcaagattatttaaaggtataaaaataatataggagaaaaatacagaagacaaagtaggagtacaagagtgcatttgaaattaaggcgtcattcaaaataatgaataatttataatgtgggcgtcaaaagagttgtcataagaagtaattatggatttaagggcatcaagaaggagggattcaaactttcacaaatagaaatagaaggaaacatgaggagtggcaaaaaatgaagacaggtagaaaaacagtttttgcttgttatttttccatgatagctgttattgacatgcattatgtagaaatgaatggaatttgtttgaaaagaaaaatttcaatagagcagtaatacataaaggtaggctttttggtaaatagtgtaatttaaaatgttttcactagaatgcctttttgtaccttcctgtaggaaaatcttttcaacaaaaaaagctgtaagtcataataagttacagattagcaaagcatttttgaaataaaaaaaaacccatagatgtgccaaatgtaatagtagagcaacaataataaatatttgtaataaaaatcagaacttgttaggcattatgtggtttctggtcaaatatggttgtactaatttttctaatgctattttctgtacaaatataagaattttttaaattaagctatggtaggtatatgaacacatcttgatattactggaggtaggatttaccactcactttttgtgaccccaagtgtaaccctgaacagacttctgtcttaacaccaataacacatgattgcactgtcttctccagtgactggggaaagggacagtgctttgttcatttttgctttaccagcattcagcacatcgcctaaaaacaattgtgggaattcataaaatgtttgtaaataaatgagcaattgagtggactataatgttgcttctaaaaaccctgggttttgaacacagagaagatgagaataaaaggaaaggaataaggattttccccaaatcaaggtgaggttgatgtaaatgtcctccaaagttggtctaatctccaaagaagcttgtatctcaaaaacagtaagtctccaacaggcaaagtcaatggcagtttgtagacctggaatttaggagtgccaggaaagatctgaaaaatcatgtcttctatcaactgactgttgtctgaaattctgcacttaggttttagtcttttgatgtaaaagttatttttttccaattaaaatgtaagtaggagatatacagttaaattgtaccatcagtctgtcaacttcggggcatgcaactatgcttacctggatgaaaaagaaaatgaagaaagtaaaatagaagaacgtagtttaaattgggggataagtcatggcatgagtatgtgcccagagcgagtataagaaggccatggaaatccactgtatttttgtcatacacttattaatttgtttcaataaggttaatcactccacatggtgtaacaagaaaaataacagcctttacaattactagattcttaaacttatttcaaatactttttaatttttatgagattataagaattttttaaactttgaagctgcatgccttgtctgattccttccatttctcttctgcttctcacattattgtgttcagcaatggtttggaggcatcttggggaagacagagcagagttatggtgtaaggaccatccaactcttctcagcagccatccagttatcttgtcaagggaagttactcatcctgctctctagaattatctcctcaaaaatcggtttcctgcttttcacagaacagtacaccatcttttactattatcctaattaatgcttctcacacagccttacaaaatattagtcacttaattattaaccacattcattgggctgcactagttgaaaaagatgtcttgtttacttagtcaaagcgctgtctctgtgcaatggcattgatggtgaaattgatcagagtctacgtttgaatgagagaagctgagggagacatttcagaaatagtaagcctttttatttccttggtgtaccaggtagtcaaggaaagttaaagtatttttttatactttgtcttgattacattcttttggggactggtctctggtgttaggtttttaataaagattttggccattttccatgcaaactaatgtttccaatgaaaagatacaacattgcatgtaaattacctaagaaatattaatctgtcaatgtaattaaattatataagcaacaattagtttcaaagctggaatggattaagtcagttctatactgcacactgacaaagtgaaaggaactaaaatggacaaattgtggtgctgtaaggttatgattcttaagatttttatattaaagttgcagagtttcaaagtgctcagtgctgctctttacattagggctgtagactctcttaagcccgaggattctatctggatatgtgattgatagggtggaggctgggctgaggcttagtaagacatttaaccatgctttgtataatactccttaaatgttggctctcacaaacatagaaatagcgaacattaactagctctctgtttcaatgtctaccatctacctgtcaacttaaaatcatgaaatctataaatttggagaggagagctttatttcttaccaagagttgcagccagcagggtggccatcctaactggctgggaagtgtaacctcaggcagagaccaaaagcaagttattcaagggaggatgagataggaatttatgctgaatggattggccaagtatatttatttaacagattgtaggaggagctatacatatccatgaagagggggcatgtgcatgaatagtaagcaaacatggatgttacatgcatcccttgttcactttggggtgcagacttcacatttaaatgcattccaattaagccctatatgtcaaaaggtgaagcagggacaggaaggcactcagtgctcagcctctgtaaaccagacagaaccagaagatggtcagtggtctcttatcaggagaaagttactgaaatcagtcttttatccaatcaaagctgtagctgtggcttgtggaacagaggggtcagttagtcagcatctggtgctcagtgagctacgattgtttcaatactgcttatcttgaggccagtgcttgtttagctgctagagaataagaaaaacctgtggcaattagagcatagtttattctataagggtaggggtacgtgacttcagctttttctggcatggccttaggtctcatttattatttggtactttattgccacaaggagtctgttccattagtcttatgatctctattttaacatatctattttgtttttttcctccacttgattccagaaggactaaagtacatttcataaatacatacaagataaataaaaataagaaaaccttcaataaaaatgatctatattaatacatttccagttttagggtcaaatagattgtttcaagaaaccttaacattatctattcaaaataagttttttcagaaactgtgttgcacattggtgtacatctctttaaatagatttcaccttggcattcacactttgtctggctctgtgtgtgttagggttggggtagggggagcattgttaatgcccaaatccttcccaagtctcatcagtgaatagtctgggggaaggagggttgggaatgtgtatattgaacaaaatcctctaaatgattctgacttgcctctgggttgaaaatcaatttaacaatactatgtgttttctgaagtaaaagtcacacttaaagtaactggtgatcttggaaatttttaccaaggatactgactaatgagatggcctaccccaaatccagaatttaacttaaattccacctccccctgttttccttaaactaatctctcaccatattttccaaaaatgttatacttttcttctcatatgtactgcaatttgtcttgcattgtatttatctttgtgatttcagctagtatatggactcatggatgtctgatggggaggagggtggagaatctataagttttttcatctttctaatctttattatgctttagtcaatagtatatattcaataaatgctgaatgaattggattaaatataaaacattaaatgttatgaaaagtatgcttaattttcaaattatcaaatgattctctctattgaagggaaatcaatggtgtttttcaactttgaactgaaactctaaactatatgaaatcataacaatgtgaaattttaaacagtattattcttcataaaacagtaatataggctttaattcacaagaactgcaatggggtctcatcctttaagcagtcatttttaatgttctaaccaaatccttatactaaaacagaaacaactgctgaatgtgataaagtaatggaaaatatagaaaaactcccattttctctatctcattgtgtgtgaaatcattcttaaaaagaatcacttccacttctatttgaatcaaaaatagccaatagggcaattctaactggttaaaaaaaaaaaaaaaaccaacgagaataaaacaaatcaccaaggcaaacgagttttaaaagatatgagtcatcaaggttaaaaaaaattagaaaaatatataaaaacttacacatgtccttgatatagttttgtcttgtgtccccttaaaatttcagtagcttttcttgttgcttagaaatcaaggacatctgattggcaggactttgacaagctgcctaaaggaaactatgatgttttcagtccccatattaaagacccccttttacattccagctgagggctggtataggcaggataggaaagcttacagatggtgggaggcacagaaccttcataggggctgaggcaagaatatccagaagacaggagagagaatgaaagatgccagccgcctcattgtgagttcacagtggctgccttggtcgggagcttttggcatggttctcatgaattacacaatctaatctacttctgtacagaagattttagaggcacagttgagtgtgctaaaatggcattactacctactcagaacatgatgcttctgtgtgcccatatgcccaacttattttcaaatgtatttgagaaaaatagaaaataggcattcttagtactagagacatacaataaaaatgcgcatgactctatccatttgtaggtttcttgggagttttatcaggctccaggggacccatgtttgtagcacatgagttctctggtcgtagatcgttgatgtggtcattggcacacggtgcctagctcatgagccagtaagatttgtttcctcctaggaatttagaactggagtccagagggtggggctgggcatttgaactaggaagtaaggaaagccacactgggaaagcctttgatgggctgtgtgtacaactcagcggaaatgccaatatacagagaaatgtcaaagaataaagtcgattcttagagaagtagtgatggctcacttagttcctgagagctttcctactcatgaggagatccaattgcattttctaccattggcattgagatccccgcctctaccccaacattacactaaattttcctttaagttagtatcagtggttttctggttttctattacaaccagaaggttcctgaaaaagacaaaattatcctgttagatcatgttctcttatatctctgttagaagtacattggaaatgaacagcattctattgtcagtttgtcagcattaattataaagtatggcccaataatttttcagaacctaattgcatatagctgatgacagtggcttctggagctgttttatgatagtgttagttagagagtcctgccagattccctggaggagatagtttgtcctttctgtaatgttggaaataatgtctctcgtgcaggtttaataacaagatgcagtgcaaaagctccaggcactagccaggtcatgtgacatgaggcttgggatcagcttatctcacaaacccagacatagaaccccgtgccagccccacaacaagtggacaatccaggaggatttgagtatttcctcagctattcaacaaatacagagaggtggtttgcttcaataacaataaatagttatttattgttgtccttatgcaacaacaattctccagttgtcatctggagaaactgaaaagtaatatgaaatcatctagttcctctttaagacagtacttgggatcctgtgaatgcaaggatttccttattgtcctacctgcagggaggggcattcagggcttctggatcatagcctcggtcacattttaaaacttgacataatgtctaaaatagctgtatttatattttaaattaacttgaaaatgaaactgctagaccatataatttacctactaaatttggacacttttgagagtaaaacgggatgctattaataataaaatgaaagcaggccttggaactgacccaggcaaactggatgatagtattaccctattcttaggttttgcattcttggtttgtgagtaactcacatattgggaagcccaacaatttttggcacggtttttgaccaaatcaaattttagccgccattttggagtatggcccacgatcccaccacgagtcactagctatagaaatgagcttctctagggcttcagcttcttcacctttacaattgaatgggtaactccaaatccctttcagcactgaatagtccgtaatcaatgacacatctatgaaagagttttactttttggagaaatttgtattattttgattcatattcaatataagatacagaatatgaatatccataaaagaatattatgaataaggtttgtacacattataaaatcatactgggcagcatggcgtagcaacaaacacctggactggaatctagccacttatttcctctgtgaatttgccgaggtttccaaaccatcctggatgcctaaactggaatactttcaactgtaaaatgggcgtaagaataacaactttttagtaatgttatgagaattaagtgatatgtagtgtgtgaaggtatcaaatatataccacataaatagatgtatatgatcattaaatactagttcctcttcctattagaaggttagtgtcattattgaatatttaggtcataaatgtgcactgcaccttcttataactaaagtaagaatattgccaatgagtttctctattcccaatattggcttttattgacacagagagcaattacgtcggatggaagcacatccatgattacaggcatcatcaaagtcaaacacacctggacccaaaagccctctttcttcttttagatatatgacattgggaggttacttaggcttacagagtctctcttcccttatctgcaacaatgaatgagataatgtgtatagatcacgtggcacaggtcctagtgtatattcaataatatgcattattgttactcattattgttaatatgggagaagagaaattaaaagtctccatttaaaggtgagagagatgtttccataagaagagcttatagtgcatgtggacttcagaagtgactataagtgaagaataatagttgagaaagcaaacccatgagcatgtcgtgggtttagcattatgctaaacagcagcattgtgctattcccactgagaataatgtctttcatggacattgtggaacgattatggactggtcatgatactatgactcctgagaattctaacaccttcagattcacagtagggctgcagatgtgttttacccatccagggctcctgacagtgaaatcaaaggcttggattgataaactctgcgaacaatgtgtattagtccgttttcacactggtgataaagacatacccaaaactgggcaatttacaaaggagagaagtttaatggacccactgttccacttggctggggaggcctcacaattatggtggaaggtgaaaggcacgtctcacaggtggcagatgagaaaagtgagagccaagtaaaaggggtttcctcttataaaaccattaggtctcatgagacttattcactaccacgagaacagtatgggggaaaccacccccatgattcaattatctctcactgtgtccctcccacaacatgagggaattgtgggaactataattcgagatgagatttgggcggggacacagccaaatcatatcacaatgttaagttgctcttaatcgttttattgatgaagtacaacaggttgattagtaatacaacagttttatctgagcctcacttatctgttttgtaaatgttattttggagaaagccactcctacaatttgtttataagaagtctagcatggagtattggtgatcacatttagagaattataactgtgatattaatgaagactgacaatgtggatgatgacgatccaattcatgtgcatcagaaaaaaaaaaatcacaacttgatttttctacctgctttgtttcaattaatcctaatttttagaaaacagacaaatgcaagacccagacaagggtctttgcttagtaaagatttggaattttctcatgccaagagatccttttctgaggccttttccaattgaatccaaagtttgccatccaattcttccagaggagaggggtctagatttagtagagtattattattattattattttgccaacttctagtctctccttcatgtatttgacagctccttaaagtttctggctatagcccagccctccagctccctgactgagatgggacctatcggaagcatgttggtgttaaaatcccaacttgcctccattcctcaagccctggacttaaattggggtcctctggccctgtggatagccttaacctcactacctaatttccactccaggtttgaatttcttctctgtttctgtatctagtgagttcccattctatcttccaatcccggctttaatgtaattatatttgctatatgttgttcaataattacaagtgtttggaatggggccaagggccctttctcagcagtttagtctccagattttggtataagtgaagattagacttctcctgatcttcacatctttcagaatgccatttctaatttttttcatgaacagaattaacagaggaaaccagagccagtatctaaaatctcaaagtccatcactatatagcagcgccaggatctaaaaatctcagagtccattatatattgtgatatagtccatcacaatattttgggaaaacaaaataaaacagtctcctaccctaaaatacttagtatcttgaattaaaaccaccaaccttaaaccctgatggcagtgaaactgcgaattttaaactttgccaaggagctggggttatttgttttactgggaataatcacaacgggtcaggtagtatttgtggagggttcacttttgagtaggagtacgggggtcaccacaagaagttctgtccacatcaactcaacccttgaaggacatggagcatgcatcaggatgcagatgtatgcttgcctttatggtgtgcaagttcctatcagtgagccacactgttctcagatcctcagtgtccacagtgttttagcacgttttttatttggtaccctgaactataggactgggtaccttcacggtagcttcagtcaagatgtgattggtgtagaggcattcactgacctgtgtagggttttcctggatttgttttcctttgcagttttggatggctggttctcttgggatcagtgatgacaccaggcagtcagagtaaggctgtgctctggcagggactgatgaggcctggaggagcagggatgtgcacgactcacaatatcttttttctttttcctttttggcatttaaaaagcatcagattacattgtgaataaatccatattggaaggttatttaagtcattaagcaccagtctgccaaccacataagctgtatagtagcctctagcaggctgcttaaaggaaagcggcctgaagattgatccaggatgccaggacttgcatcctaaaagtcaggctctttgtattcttctgcctttactactgagggaaaggagtaggggaaaccaaggtagagtttcacgaacctccactttccccctcacatcagctctcagcaccaaagaggcaagttaggaaacaacacaagtgtccatcaacagactaaatggatgaacagaatgtactatatccacatagccgagtttcagccctagagaggaaggcaattctgacacatgctacaacatggatgaaccttgaggacattatgctatggtgaaataaactcatcacaaacaaacaaatactgtatgattccacttatataaaatatctagaacaggcaaattcataaatatagaaagtagaagacaccaggggctagggggagaagggaatgcggaattgttgttgaatgggtataaggattctgcttgagttgatgaaaaagatcaggagagggatgatggtgatggttgcacagcattgtgaatgtatttaatgctgctgaacttaaagccacttaaagtggcttctgtctgtaaaaccacagttcttaaaaaggcaagttgaggggattaccacttctggaaagatggagtggattcacttttctctatttctcactgagcacagctaaaacccctggacatgcatgatatgtagaacaaacagaagagtctaaaaggtggagaaaagaaaacaaagcctccagggaccttgagatccaataaatgacacaaatgtgagtttcctcggttttctttttgcttcatataacccagactgcgtgctgcagaagtctcccgcttggaaacacaccaataattgcaggcaaaaaaaaaaaaaaggccctgagtaaaaggcttgacattgaaggtgctggtttcttatttgttgagggaggggaggaggtggagctacaatagggtgactcgatctctaggcctagggagtagcccccagatcactgtggatgcaaacttgctggaaggatctcaaagacacccattgactcccctaaatttttcctttattcagattatgtaaaacttttgttttactctattcaggttaaat

SEQ ID NO: 164 - DNA, 1409 bp, Homo Sapiens
agatctgtatcagaggcacgggcctggcagccttcactgcacttgggctctgaaagacgttctcactcttgcaagtcacctgggaaagccagaatcgatactgtatggtttaacatttgaaactgacttgcaggtaatggcttctgcatttccagaaggcacccgtgtgcctgtagggatctcattttaaggatcactgctttttgtttctcatctacaggctacagagacccatctctcagtttggattttgattaaacagttatgcagagtagaaaacttgggccatacacaaaacttaattaaaataagcctccacttgggattaatgtatgttattgactgaatcgtgtccctccccgctcccccctctcctgccatattcatatgttcaagtcctaacctccaatgtggctgtatttggagatagtgcccttagggagataattaagattaaatgaggttctaagggtagggctctaatccaataggacaccagagagcttgtgctgggaatctctctctctctctctctctctctctctctctctctctctctctctctgtctctctctctctctgttgcctccctgtacaaggccatgtgaggacacagtgagaaggcagctatctgcaagcccggaagagaagcctcaccagaaaccaacacgattgcaccttgatctcagactttcaggctccagaactgtgagaaaattaatttctggtgtcgaaaccacccagtctgtggtatttttttatggcagtcccagcagatacaatgtgactgtttactttcttctctactacaggcaagctgcaaagtgctgctaagtaatatcacacagccactgctgattgtgtgagttgagttggggagaggttgttactatgagacctattccagagcagaaacaggaagattgtgaatctcatcctcgtcacttgcccatggcctgcagcatccagacccctcgaggtcctctcctatcttcttgccaaagcttactttcagggaggacttggaaattcattccctctaggtggtaaataatgtaacagcataaagtgttatgtcacctagggacatgtaaattgagccgagagccaagtgttaagctaaagggatgacaatctaacagggaaatatcatctagcatctacctgtccaacaatatgaatctactgcgagctcaggaacatccccagtatcagatgtaaagctctggggataagagggcaaagaaggcaattacctgaattgtggagctcacatgtgttgagagaaacagacaaataagcagattacgatacagtgtgataaaggctgtaaatgtgaatgaagtgctataggaacatagagcttcaggctcaggccaaataggcaggggggcatgtgtgtgtgtaga

SEQ ID NO: 165 - DNA, 3414 bp, Homo Sapiens
acctgggaggcagaggttgtagtgagccaagatcgtgcaactgcatgcctgggtgacagagcaagactctgtctcaaaaaaaaaaaaaaaaagaaaaagaaaaggaagggagctggcatgtacagagctcacatggtgacagagctgaagcaagagagaggagaaggtgccaggctcttttcaacaaccagttctcacaggaacaaagggttagagaactcatttacttccatgagaatggtaccaagccatccatgagggatttacctccacaatccacacacttgccatcaggccccacctccaatgttagaaatcaaatttcaacatgagacttcgtggggataaacaaaccacagcagtccctgaaaactacatatgcttttttcgctccgtttgttattgggttctgccctgagctcagtggcctagttggaaaatgaagactaaatttaaaactaactgataaataaaattggtttccttgtaaaatcttatggtaaattcttatgatttatttttattcctatgattttaccttgatacccatttttaatcttcctttaatatacccaaacttctttaaagagcttaaattctctctgtgttttaatatgtaaatttgctaccttgtttactccaaaatgtgataagggcttctagccatgtggaacaaactttaacccattccatttacagaggcaaaatttaactatccttttaaactagtgagttttacctgtttcacggctaaaatttttaaacgaaagctacaaaatctatatttgtgtatttttctgtgcacatatgtacatgtctgtgtttgcatattgtgtacatggtaccagattgacataaattaataagtactcataacgtaagtatgtccaaatactttcaagttagtgtgattttagaaatctttaataaataaagctagtttaaaaattattagtaaaataaaataaaaacatcttcaaaatttaattcagacatgtttgcctgggtctgttggtcagactggtttatattgtctctagttgatgttttagggtcataaaactcttatttctgtaatattaatactagcttaatttgtctctgaacttatgtcttggttttgagtgtttagattctggagtctagacaagtggccatgatgaggactggggacacatgtgtgttcacagtgcctgggccctattctccctggtccagctgtttccaggctatgctaataggggtcagatcctccagatactgtcttcacagtcctgttctctgtacttggctctgcacctgacacataacaatcacagttacttacttcccaggttttccattaaaaatcagggttattaagagctaaaattgtaattaatatattattgaaactactaaatattttaaaattctatacacaaagtatagatataagaaaagtaatgtctttttaataaaacattacaaaaagacatcaacatatggattttgttaaaaagaaagtaattttttctagtgtaaaggttttcaaaaagttgttttaaatttaaaatacagttgaaatgaaataaaatattttataaaatcttatttacagaatcttattttgtgttgccaaaactaaaattagatgtttataaagttttcttaaaattaactttaatattaaggatacataaaaaggataaaatttgttcttttcaacaaaatttttatgtcatattaataatagataataaaatatttttgttcaccttttaaataaactacaacccctcccccaccccaaaactaggagcacattttcttattctgtctttatgaaatcttttaattatttggaaaactgccccatcaaaggagtaaaggttttgctttgcaaatctttaaggttggtatggtggatcccacctaatgccagcactttgggaggccgaggcaggtggattgcttgaggccaggagtttgagaccagcctgggcaacatggagaggccctgtctctataaaaaatacaaaaattagccaggtgtggtggcatgtacctgtagtcccagctgtttgggaggctgaggtgcagtgagccatgatcatgccactgcactcagctgggcaatagagtgagactctgtctcataaaaacaacaacaacaaaaagtttaaaagaattgatcaagataggatcaacataactgtaaaatagtagtcatttagccaaagcaataatttaaaaatttattttctttcttttttctttgagtcagagtcttgctctgtcacccaggctggagtgcacccaggcatgatcacagctcactgcagcctggatctccttgggctcaagtgattctccagcctcagcctcctgagtagctgggtctacaagtgtggaccacgatacctggctaatttttgtattttttgtagagacagagttttgccacattgcacaggctggtttcaaacaccaaatctgcctggttggtctcccaaagtggtgggattacagacatgagccaccgtgcctggccaaacctttcttttttaatatcaagtgtttcaaaccattgatatttgacaaacttcccaaaattaattctaacatgtccttttgaactcaagttaacttttagacattccaaaaaaaaaaaaaaaagcccctggaagtccaacagagacatgttagtcttatttggtatgtaaaagtcatacaggaagtattgttaataagaaatagtgtttaacaatctctgagttatagttgtataaatgtgttaatatgtgttccaaaattgtgttagattccaaaaattttgatatgtcttgttatatgttatcagtcatagttatgattatcctgttaaattgttgtttgctacagaaataacaaatttccttgtcaattgtatctttaatgatggctattctaaattttggttattcacaactattgtttcactctgtttcttcacaaaaatgcagtttataatcagctactattcaaacattgtgcttcttcaagtaaattcatggataggaaagtgacagatactctgaaataatgacctctgcttatgactgtgagatcatataattggatcgggtaaaaattctaaaaccttcaaagagaaaaactggactcataaaatgctaacctaacatcaagcagaagaactaattacatgaaactgaactaatgcaaggcaaatgattttaaagttttcactttaaaacattactggttcttgccaggtacagtggctcacgcctataatcccagcactttgggaggccaaggcaggcagatcacctgaggtcaggagtttgagaccagcctgaccaacatggagaaaccctgtctctgctaaaaatacaaacttagccaagtgtggtggtgcatgcctgttatccc

SEQ ID NO: 166 - DNA, 1249 bp, Homo Sapiens
cttctgccccagagaggacaaatatgaatacccagacaacagtctcatctgtctttttgctatatgtgagtcaaggcaacaggaaaacactgtggggcatcgagctgtggtgggtgcaagggcttcttcagatgcagcatatgcaagagtaacgtttattcttgcaggttccgtcggcaatgttttgttgacaaggccaaaagaaatcaatgtagatacagtcaattaagaaagtgttttagagcaggaatggaaaaagaagttgtgcataatgaatgcaatagaacaagcaccagaagaagcacatgtgatggcagcaatatcccctccattaacacactggcacaagctgaagttctgtcttgccagatctcagtctcaagccttggggcaagtactgatatacatgttaaaaaaaataaaataaaagtgttggtgatgtctgtgaatttctgaaacagcagctcttagtcttggtggaatgggctaaatatattcctgccttctgtcagttaccattggatgacaaggtggcgctgttgagatatcatgcaggagaacacttaactgcctggagctataaagagatccatgatgtataaagatattttgcttttgggaaacaactatattattcactgcaacagctgtgaatttgagattagcagtgtaatcagtcgggttctagttgagctggttcaaccatttcaagaaatccaaaaggcaattgtattttttggcccagatgtgaaagggctacacttaaatgggctacatagatccaataaacattaagaacatgcaattccaagggcggatgggtttggagaactccgtcaatgatccgcacgcagtatggctccctgggggaggtttggagagttgcttctgctgctgcccacactgctgcgcatcatttggcaaatgattgagcaaatatagtttgtttaaaaaacttttgcggttgacttaaattggccacctacttcaggaaatgttaaatggggcttccaatgatagtagtcatctccatcatccaatacatccacattcatctcaagatccattaactggacaaactgtacttttaggtcccatgtacacactggttcttatgaagaccacatctgaactcctgaaaccccactcccttccccaccacaaggctttgcacaagaagattacagaacagctacaaatcaagcttcagtcatttcaccagcctctcttcaaacaaaaacaattgtga

SEQ ID NO: 167 - DNA, 1283 bp, Homo Sapiens
cttgagcttcaccacttgctccacattctccaccaactaccgatccctgggccctgcccaggcgcccagctacggcaccggccggtcagcagtgtggccagcgtctatgcaggcactgggaactctggttccaggatctccgtgtcctgctccacgagcttccggggcagcatggagtccggaggcctggccgcggggatgactggggtctggcaggaatgggaggcatccagaacgaggagaccatgcaaagcctgaacgactgctggcctcctacccggacagagtgaggcacctggagaccaagaaccggaagctggagagcaaaatctgggagcacctggagaagaagggaccccaggtcagagactggagccattacttcaagaccatcaggaaccagagggctcagagcttggcaattactgtagacaatgcctgcattgttctgcagatcaacaacacccatcttgctgctgatgactttagagtcaagtatgagacagagctggccatgtgccagtctgtggagagcaacatccatggactctgtaaggtcaatgatgacaccaacgtcactcggctgcagctggagacagagatcaaggctctcaaggaggagctgctcttcatgaagaagaaccacgaagaggaagtaaaaggcctacaagcccagattgctagctctgggttgaccatggaggtagatccccaaatctcagcacctcgccaagatcatggcagccatccgggcccaatatgacgagctggcttggaagaacggagaggagctggacaagtacttgtctcagcagattgaggagagcaccacagtggtcaccacgcagtctgccaaggctggagctgctgagatgacgctcacagagctgagatgtacagtccagtccttggagatcaacctgaactccatgagaaatctgaaagccagtttggagaacagcgtgagggaggtgaaggcctgctacaccttgcagatggagcagctcaacgggatcctgctgcacctggggtcagagctggcacagacccaggcaaagggacagtgccaggcccaggagtatgaggccctgctgaacatcaaggtcaagctggaggctgagatcgccacctactgccacctgctggaagatggcaaggacttcaatcttggagatgccctggacagcagcaactccatgcaaaccattccaaagaccaccacccaccagagagtggatggcaaagtggtgtctgagaccaacgacaccaaagttctgagacat

SEQ ID NO: 168 - DNA, 2710 bp, Homo Sapiens
gcagtctttccgggcaggaccccgcacccaaaggctcacctgtgggaccgcgttgtcagtctcggcgcctgcgctccgctccaggaagaaagcgccaaggcgaggcatggcggtctccgtgcgcaccggcagcttctcgtgggacatcaggatgtcgtccaaagaaagaaagttctcctcaggccccagcgcacccgactccactcggaaataagcctctgacatggcggccacttgagcttctccgcttccactcgcgtgattcggaggagcctcaggagttaggggtgtacaagacggggaagcggagactgggcaggatggttggggtcaggaaagtggattgaaactcgtttcccgcgcccggggacgcatcagacaggagcagtcaattcgggcggtaccgcccaggcagaagcaatcgatcaagtctgcagatttagagcagcgggacacggctggggagcggtaggtgggggcgccggaagttctcttccctccgcttgctgcacggtgtgggaacgttacgaagaagctggaacgctcgttgaagctcctggacccatttgtactggattgtgttcatgtgatccttaactatttatatgaaattaaaaacactttgcaacacttttaggggtttaaaataaaagcatcttgtgcccttcactccaggcctaagtccgaccctttcctacagtttttttcactatgcaactccgttaatcttagtatttgaaagaaatgttaaacaaacaaaaacttccagcactatccccagcgagttattatggtctagatgatgaactagtgtgttgtattttgttagtattttggtgggggttggacggggtgggtagaggggtggagcactagactgcacatggcttgctaaggttgtgagtatacttcagggtgtcttagctcatcatcaactgacaatctccttttgtggctctgaatttaaatccctaaaaatggaaatccaattggtccagtttattgattggtccaggtacgccacaatggtcatagatctccagccaccctgtagatgggggtgcctgtgttgggtgcgatcactatccagtgaccaggggaaggaccatggtcgcatagtaccaggtttggtggctctcctcagccagggctatgggtggcggcatattgttgagagatgcactacagaacttacttcgtctagagcatttctggggctactggagccgggagtaaagggtgtgtgtgaagggaggtgtgtattaaccatggattttagtttctgttttctgtattttatgatgctttgacatcttggggccttggggacctggggaggaattgcccctttcagagttagctaattcctagagatagcaaacaacttgcttgtgaacacccctttcatttacaaaccaaccaacccaagcctatatccccacaccatctttatccatctcacacaccaatattttccctgccccaagtcactgtaataaaccaccccatggccaagtaccagacaactaaaattcacctctatatcccagagcttgccaacattattcaaattattcaatcctaagcttgttcagacttcccttccctgcttcgcccattccttcccacggcaataaaggctctgggctttctcctcgctctctctacctcctcattgaccctaatactttctcgtgtggccgtaggcacagccccttctcttgagaactataataaaattttcaaaggcattggccactaactcattgattgtcatcacccagtcacctttataaatgaaattctgaggacaatgaaaacaaggtgcagtggggtggaaaggaatggccaaactgtggaaaatcttggtaccattctaaggagttaggccattccatagaaaatgggaggaaaatgtaaggcaaataataacataaatctgggcttcaggaagagaattccagcagtagataaagaagagagagattagatgcttggaagctgttcagtgggcagtatttggcaaccaattggatataggaagtgaagtatagtgagtagtcaaaagattcaagttttgaacgtggctgaccaggtggatggacatgtcatgaatagatacacagaacacaggaataggggcagctggagggaagggatgagttcagtttgggacacatggtgtccaagagctactagacaggaaggtctgcagcccagtggagaaagcagcctagaagctttagagaggaggcacactgagaggcagttatatgaaggttttttcctttttcatattttaaatgttcagtttgtgatacagtccaatgtaaaaataaacacaatctgcagtgataatttagaatttctctgatgacatggaatatatggtactggatgtagtttgagacagaaatataatttggctaattgaaggcaatgttatttactgccaaggagagtaagctattttttatgctgatataattaagatagatgcatactgatttattgatgccaaagaaaggcattatttttgtacagagaccacaatactggctccaaactcaaataccactattattttaataatacagtaacaggccaatgtttaacataaaatcagattgccttgtttgtcttacttaatgtcttggctcatcatgaaactatcattgtgtatatattgttctatttaaactgtcctctc

SEQ ID NO: 169 - DNA, 3943 bp, Homo Sapiens
ataaaattaatgtttcagtttatttttcagattacatgcctttctttataagggatgctggcacagaccccctaaaataagcttttggtagtactgtacctttgaagagtggtgaaggatgctaatggataatctcctgaaagttgtggcttttgatacccttactgtggactgtagagttgctaaacgttgtttagcaaataatgttgcttagtttcaaatgacatttgactttcatcactaaaacagcaatgtactcagggttgtaagcttactcaaatagactttcaataagtcttcaatgtatatatgatagtttttagcctaatgtgaatttaaataatcttaatagtttcctaaaagtcgatctgaaacttggggtgggaaaggggaggtagcaatttttgaagtattttagccatttttttcatttaaagaaaccacttgtccccatttcctcttctccactttctcataattttgttttaagaggaacactggttgttttttatacttctcctaatctttaaaaactgcatattgttaagaccccagtgtatttaataggtattttataagcatagcccattggctcatgttagtgaaaccataatcctctttgcttagaacattaaactcataagaagtactacaaaccccaccactctttatagatgtattgtaccactaatataaacagctaaaaaatggggaaattgtaatgttacgcctgtgcaatttttaagtggcatattatggcagattaaaatttagatacttggcttttcttgggcaagccactaagttgtggcggaatgttttctggtgttcttggactgcaattatgcactattaaagtagtggcctgctacataactgcatttagccagcatttctgcagtgcgtaactgtgaggaacgtagtaccgcaaatggcaatggacattaggacccggatgtagtattcctgcttgctccaagattctcattgccgactgcatacaggtaggtaacaagcaatataatctaacttggtgacttgtatgtacttttattccgtgggcattctggcatcacatttctgacaatgaaattacagtgcagcacctaacacttgtatggtaaagcttttttaaaaacatgggcttcatgaaaacaccattgttactaacttgggcttagatgggaatctaatgtgaatagttcaagttatgggacttgtctaaatgtgtctatactctaaacctgggggaaggtggtgtggaacattgacttgactacagtcgaatacatgttgggaatcattcccaatcataagacatcgtcgtttctgtaggatgactgcatatgttcagagtagctttttgaatttggttcccttagctttagggatgtgatgttatagtccaaaatgtttacaagaaaacctaagtcttcaaaagcacaacttttgttgcttaggactttgcatcaactgttgttccagacctcacttcaacttcttggtctctgaactggttttagctagcatgcatgagagacagttttcatgtataatgtttctgctctgtaactggaaagtggtttactttgcataaatgctgatgaaaacttcatgactatgagacttttcttctgtgtatcaagaaaaagcttgctcgttggcaagcaattcacaaggtggggacagacttgtactttaacatgtagtccattcaagcaaacaactttggactctactgatagatgaaagagcaaatgatgactagtttagcctctgcatatcaacaatataatgcagatcaagtataatgctcaatattagtgacatgagtatcactaaattacatagaaccctgatggggtttcctgtgtcgtaatccattaaatcggtggccagtgcttgctgccgtggtttagtgattgggtgttagaaataaaaactcaggtctatttcttaccagtcagtaacaatttttagagaatgtacttggtatataatatatggacttcaggaactttattggggtggggggttaattttgccttaccctgttcactttcagatgattaggcttttgcactttagaatgagaaacttgtgacgttagtgtgttcttactagctttaatttgtatgtagcaatgaattgtgaatcttagtgcagtgggtttttttaaaaaactcaaaaagctgggaattaagtggtttcagtaataatgctataccgaggtgcttgcattgtatttcataattttgttacaaaccaaaattatttttaatgagaacagtcttgggttcagaggtgtgatgccagaatgtattttcgtactgttaggcccttggaacagataccggtgctttctgaaagatgaaagaaatgcaatgggtgctcttcatgcaaggttgcaaacctaccaagaatgcataatagtctcacttttccccaataaagagatgcgtgtgactagttttggacttttaaccttaatgggggttgcatgtctcctattgttaatcattgtcagctgcagtgacatgatccacagtcctgcatttactgcctttcacttaatgattttggacaggttttagagagccaggatgttggtctgggcctttatttggttttggctttagctgataatgttttagtgatgtcagctagtgcagttctcaaatggctgcctattagggaaagaattcagaggatttgactgctcctaatcatctgtcattgctgctagataatgattggcaatttttaagactcaactggaaatctcaacagttgctggtaaaccattaaccataaaaacgttgcttttgaacaccagtgctgaaaaaaatatttttttttttttttttgagagtgaaaagggcttggacttaagataggacaatgtggagaatggggggaagaatgcaaaacgatatagtatcccttatggatggtacatgtgcaacagggaactcttacttcatataccctttgcagtaatcattcagggaggaagaaaaacctggaacttgaatgaaggctgatctttgttttgtgcactgtggccctgccaggcatatagtgaaggtgaatgtcttctccctcagaaaaaaattggttccttgctgtcccagtaaggcatagcttttccagccctaactttaaaactcagtgaggacttagatgggaaagaatgaggtaaatacaaaggattgcaggacaacaactacagcgttgtgtactgtgggaaggggagttgggcactcttggaggactcctgctgaaggtggtcagcctgcctgacaatggaagacatacttgaatggggagcagggtatgtgctttcatatgaaaaaagagctgatgttaaaactcatttggtgaggtcaacgttgtcacataccttcacataagggatagtatattttgggttgcagtcaaacttgtgctcagactggtgaaactgagagtcaggcttttacattttaaagaaaatacagttttcattctaattcaggtgtctacttattttatgtaagaataattttagatttcccccccaccatgaagtttcttcctatttttttatgctgtaacttacccccaatctttatctctggatttttactctttaaattttgaagttgactagcattttcaaacctttattttatacccttgtcttttatattaactttttcttattattctttaggtaagaatgattgatgttggctgatattggagtgctcattcacatgaaaggtggatagatacttctcaagacatcacacagcgtgagtcaatcaaggagggaagccacaagcagactgacaacgtttctagagcaggatcaggtgagctgtgtccagaaaaccaacgagaaggagtggaaggaggaatgaacgtttcattctcgttaataaaggcattatcctaatta

SEQ ID NO: 170 - DNA, 2218 bp, Homo Sapiens
cagggtttcaccatgttgcctaagctagccccgaactcctggactcaaccaatccacctgcttcagttggtcaaagttctgggattacagacatgagtcaccatgcccagccaagttaaaatttattgagacttgttttacagccaagaatatggactactttggttaatattttatatgcacttgaagataatgtgttctgttgttgttaagtagggtgttctctaaatgtcaattaggctaagttggttgatagtatggttcaagtaatagctatattactaattttctgtttactttttctatcaattattgagatggggtgctgaaatctgactattatggatttctctatttgtccatttgtccttttagtcctgtcagtttttgcttaatgtgttttgaaactctgtgattatgggtccataaatgcttagaaattttgcgtcctcttaatgaatttactcctttatcattatgaaattactctatttgttcctggtaacattctttgctgaaatttactttgtctgatgttaatatagccatcctagttttctttgattagtattaacatggtgtatcttttcctaatctgttacttttcaccctgttgtgtcttcatatttaaatattttttcattttgagggggttatttttcagttttttttttccctttttgtagtggcatatagttaggtcttatttttttccttatttgataatcactcccttttaactagtgtgttaaatgtcatatatttaaaagcatttggcatttaatttgtttattgatatcattgagtttaacttgctgcttattttgtattagttccatctgtttatagatccttttgcctggttttggattaaatgagtatttttaatgatcccatttaaccgcttttgtttacttattagatatcactatgtatgtatatgtgtgcgaatgtgtgtgtgtgtgtgttttagtggtactctaaagatgttgctccactgtcttgtggcttcattatttctaacagtctgcttataatccttatcatgtttcctgtatatatgacatgtgctctttgctctggttgcttccaatgttttgtatttatcactgttatttatttatttatttatattatttaaaagttttttgagacaaagtctcgctttattacccagactggagtgcagtgacaggatcatggctcactgcagcattgatcctctcacttcagcctcctgagtagctgggattatagtcatgtgccactattcctgaccaatttcaaagcagaagagagaggcagaagcagtataatcaaagatatgacagtatcgcactatgttacccaggctgctctcaaactcctgggcttaagcaaaccatcctctttggcctctcaaagtgctaggattacaggtgtgagccactgcacctggcctatcactggttttgagcaagtaagtttatgatgtttcttagtcttattttcttcaggatttttgtgcttgtcctgtgttgagcttcttggatctgtgagtttatggttttaaccaactttggaagtttctggctattctttcttcaaatactttttcttcccatttttctatctcctctgtttcatgattccagttatacgtgtctgctttttgcgggaggagggttctttttgctctccttgtgtcaatttaaatagcttcagttaaatcttgaatttaacaaattatttcttctgcagtatcaaatctgtccttaatcccatccagtgtattttttatcttagaagtatttttaacccctagaagttcaatttgggcattttaaatatctcttgtgttgcttcttaatatgctcaatctttcatctacatttttgaatacataaaacatagtgagaataattgtttttgatgcccttgtctactaattctacaacccatgtcatttctgggtctgtttctattgactgctctttctcttagtgatatgttatattttcctacttctttgcatgcctggtaactgtttggtcgatgacaggcactgtaaattttaccttgttgggtgctagatatttttgtattttgttatatttttgtgctttcttttgggatacaggcaagttacttgaaaacagtttaattattttggttatttcttttaagcttgtgaggtgggaccagaccatcatttagtctaggacaaatttctctccac

SEQ ID NO: 171 - DNA, 7025 bp, Homo Sapiens
agtgagggtgaggcggagagacagagcgggaagggaaacaggatggggagagtcaagaggggaagggaagcgggagtcggggtgcgagcctgccctttcccccgccgagggcctgtgcggggcgcggcggccgcgccaactccggcgtcgggaacactcaccgcaggacgctttgccctccttggaatcgcagtagccgcagtggtagccggccctgaggcccttgtattccaccaccgacgccatggccgccgcgagggtccgctcgggccgaccacgcctcttggcgcccggggccgacctcggcgaagcgctggggcccgcggcgggaggggtggagagcgaagcctggcgcggggacccgtgggcggggatggtggtcgtgtccccaagccctgcgtttgggccggtgcttcccacagctgtgcgttatcagccccatttcacagattggcctgggctaaaaatactcaagaccctcagattgcagtagggtcctattccccattagaaaagaagattcagtttgctaaagcagaggcgtactactatcaatagcatcaagaaatgatgatggaagaagcatggaaatacaatatggttccaaaatgggaaactaaaatagaggaagaggaaaagagatcacaacgtgagaaaacagaagatactaaaaaatgggactatctagtgcctgagagggaactgagtcttacaaagaaacatataccaggctgaacaaaccagaggcctcagagaccacaaacaccgactgctccctcaaagaattcccagtgaaatactttcccctaaaatactaacacgggaaaaggatggaaagcatgaaaatatccagaaaacacacaaaactgaaaccagtaagcacaaggtggcatggacaaaggaacagatgaagggacaccaagaccgaatgatctgagggagagaactcaaagcaaagacacgctcagaagcgctccagccccgttccatctttcctaaaatctcaagtggaaaaagagaaggtgaaagagtttgaatgggtcacagcttatccaattttgcaaccttaccagaaagcacttaggaaagtgatgattctgatggagaaataagaaaaaagagagtataaaattaagaaaccactctgaagggagctcttgagtatgccaccatttttgagaagtcaactagaaaaaaataaggtttaaattattttatattttttagactagcatacttttaatcattaatgcaataaaacatatactcccctggtttttttaagtgcatcaaactggcaaaaattaaaaaagccacaagcacagtatttccaagtgtttcagctggctgtgtgacaactctaaaacttagtgacttaaagcaaccaccactttattatatctcgcagttctatgtcaggaaatcagacagagctcaactggacatttctgtcccatgaggtaccaccagagctgcctggggatattcaggtgatgactgggctcatctggagggtccaagatggcttccccacatgcccttggcagggaaggctagaaagctgggcctccctggcccatctctcatttgcagctctccatgtggtttcagtgccacgtggtagttggacttattattcggtgactcacgactccacgaatgtgtattccaagaggcctgttggaagctagaaggcttcttatgacttagcctcacaagtcccagaacatcacttctgtattctactggtcacataagtcaccaagaccagcttaaatccaaggaaagggaaagcggactcctatcaaaaaaactttgggctgggcatggtggctcccacctataatcccagcactttgagaggctgaggcaggcgttatcacttgaggtcaggagttcaagaccagcctggccaacaaggtgaaaccccatctctactaaaaatacaaaaaaaagtaagacgggtgtggtggctcgtgcctgtaatcccagctactcgggagtccgagacaggagaatcggttgaacacaggaggcagaggttacagtgagctgagatctggccactgcactccaccctgggggacagagcgagactctgtctaaaaaaaaaaaaaaaaattgtagccatttttaaatctccccctccaagaatctgaaaagtcttaactcacacaccttcatccttcactatgcttttcattattcttttaacattgctaatcgcaacacttttctagaaatccagaaacctacaatttcacagcctctgagttgatcttgactaaagcggcatggctccctctctgtaggagtaaatatagcagaggatgtacaagcctgttacaattatgcagaaacacattgtcttgtactctccaatccacctaaaacttaatatcatattcctaagcctaaaccctaactctgtccaggagatgtagcccctctgtacttcaaggggtttacaactcatgtggggaagaaaacactgaagaaaaaaaaatagcacgtccggttatgcagtataaagtgttttattgaaaatatggactagagtagggcagcaatttagggggaactgagaatggagcttggatgataacttcttaggcagcggagacaggaggaaggcatggccacaattccaccctgattcctaccaccctcagcacagaaataaggctcctccccagccgttggagacatctatggaaaagatttgtgaatacatgagatgagaacagacaggacaactgatttaagaacaaggtactattgacaaaaccctggaggaaaagaaaggctttgggaaggtgataagttttatttatttatttatttttgagatggattctggctctgtcgcccaggccagagtgcagtggcgccatctcagctcactgcaagctccgcctcctgggttcccgccattctcctgcctcaacctcctgggcagctgggactacaggcacctgccaccacgccaggctaattttttgtatttttagtagagacggggtttcatcgcgttagccaggatggtctcgatttcctgtcctcgtgatccgcccacctcggcctcccagagtgctgggattacaggcgtaagccaccaggcctggccaagttttatttttaaaagataacatggccgggtgcagtggttcacgcctataatcccagcactctgggaggccgaggtaggtggatcacctgaggtcaggagtttgagaccagcctggccaacatggtgaaaccctgtctctactaaaaatacaaaaattagccaggagtggtggcaggcacctgtaatcccagctactcaggaggctgaggcaggagaatctcttgaacccgggaggcagaggttgcagtgagccaagatcacaccattgcactccagcctaggagacaagagtgaaactccatctcaaaaaataaaatataacatgtatttttcagttcagaaatttaaagaaaaagtagctcataataaccactgttgattattttatctttacttgtttgaaatggagtctcactctgtcgcccaggctggtgtgcagtggcccaatcttggctcagtgctacctccacctcccgggttcaagcagttctcctgcctcagcctctgaggattacaggtgcccgccaccatgcccagctaattttgtattttttaataaaggatttcaccacatgggccaggctggtcttgaactcctgacctcaagtgatccacgcgcctcagcttcccaaaatgctggattacaggtgtgagccactgcgctggccactgttgataactttaaaaagtaaaaagtacaggttagaaaattcaatagttggccaggcgtggtggctcacacctgtaatcccagcactttgggaggccgaggcgggcagatcacgaggtcaggagatcaagactatcctggccaacacggtgaaaccccgttctctactaaaaatacaaaaaaattagccaggcatggtggcgggcgcctgtagtcccagctactcaggagactgaggcagaagaatggcatgaacctgggaggcggaacttgcagtaagacaagatcacaccactgcactccagcctgggcgacagagcgagactccttcccaaaaaaaaaaaagtaagttcaatagttacaaaaaggtacaaaatgaaaagcaacatggccttggtttgcaaaatgtaaccacttttaagtgtctcaaattaggaaagtttgaaacaagtagaaagtagaaaaatgacagataaaaaggggggcaactttagacaagaacttagaaagttatggtgttaagactacatgttatataattccatttatgtgcaatgtctagaacaggcaaatttacagaaagtagattagtggttgcttaggggtaagaggtcagaatggtaggtgaggtagagtgacagctaatgggttcagggtcaggggaacaaaaatgttcaaaaattagattgtggtaatggttgctaagccctatgaatagatgaaaaatgatttatacagtttacatagaaattgtaggtatgttaattatatatataatatatattatatgtgtgtgtgtgtgtgtgtgtgtgtgtatatatatatatatatatttttttttttttttttttgaggcagtttcattcttgttgcccaggctggagtgcaatggcacaatctcagctcaccacaacctctgtctccctggttcaagcgagtctcctgcctcagcctcccgagtcactggaattacaggcatgcaccagcatgcccggctaattttgtatttttagtagagacaggctggtcttgaactcccaacctcaggtgatccgcctgcctcggcctcccaacgtgctgggattacaggcgtgagccaccgcatccggtgtgagttatatttcactaaagctgtttaacaaaaaaataaatgctagagtttagagtcctgaggaagcgggcctggaaatgtagggaaaggacctgagcattcgaggctttgaacatcactaaagagttcagattttttttaatcttgaaggcaatgggaaatctgagtaatatgacaagtggttctgaagaagcagaagagacctgaaggacagaagtaggcgataacagattggagtctgtggtagtaacctgggcaaactgagagaagagatcagatggggattagtgactggttaaggtaagggcttggagggtgggggcaatcctagttttccatctgagaaaataaagtcgtaaaagtgccagtataggtcttctagggagatttgaagggctgttttgtacatgtctaaaataacccacaagctgtccagtgagcaactgattgcatgtatctgtaacattttcaagaagtttaggcatcaaagttgtcagactgttcatggtgtaaatgtcagcataaatgatgacagtgactgtgaaaggggaaccagggaaagcaacagacatcaaggatacacagtttcaaggcatagatctccaagtgtcaaatgcacggccatatatccactggagttaacaatttggaaaggaattaggaaagctggcatacaacagactcaatgagtgggaaaggaggtgccacactgccacggactgacatgaggggagacaagtgattctcattaaagaggtgataggatagcagcttgaagagggtcatggtaatgtttttaaaatcagagatgggcttggttgaagggaaaactccagatacaggtgaaggggatgactgagagagcaggctcccctaggaggcaggaagcactggagcccagagtcttccacagaaaagacgcctctacccctgatgccagagggaagcagtgagaaaacatgaaatagcaaagtgggaactgggagaagaaactgactagacttgaaagcatagccgagatgagaagcatggagtagcatgctggtaagatggaaccagggctgatgttgctggggaaagtagtccagcctggcttgccagaggatttaatagtttcttgtgtgtaaatcagaggctgaatcataggaaattactcatatttgaccgtattttacctataaaaacaacagtttcatatgatacaacctatttgttgacttgactagctagcttcgtggcaaaaaagaagtaaaaggaatcataatggtccgcagggcattaacaacctaagtaaaactttcactgggacaggaatagacaaaggagacactctccaataattagaaaataaagagcaactacaattatttgtgaatatggcggtgagtttcctttaatcaaagacaaccatgacaaatttattaactatcaaaagctacattttactaaaaacaatctgcctttaaaaatgttgaatcatacaatatgtacgatacatgccgctttccgttttggacttcactatccatttgagtcctaaaaaggggaagaatagctggttaacagtttataaatgataaaccaaaagttcatataatatacataaattaaatccaacaattagccctcctcagtgagtagggcccaggttaatccacattatatatcttaaatttattccatatttattcccttcttcttttttctttttttttttttttttttttgagacagagtttcgctctgtcgcccaggctggagtgcagtggcacaatctcaggctcactgcaagctctgcctcccaggttcacgccattctcctgcctcagcctcctgagtagctggaactacaggcgcccaccaccacgcccagctaatttttttgtacttttagtagagacggggtttcaccgtgttagccaggatggtctcaatctcctgacgtcgtggtccgcctgcctcgccctcccaaagtgctgagattactggtgtgagccactgcgcccggcctattcccttcatttaaaatatttttacaacttggaacaaaagtatttcaattaattgaagcacatattaagtgcttacattaagtacaaaaaagtttattttaa

SEQ ID NO: 172 - DNA, 2672 bp, Homo Sapiens
ttggagggaggtggtgtgttcacgtgagcctacatccgagggtgctcttcgtaaggggtagttgttgttttatagctccaaatggtttttttattctcagtgtagcaactgtttgatttctttctggatacagctgtatgaacacttttctattttatactgaaatcacacaggtttgtgatctaagtgccagaaccatggaggagactctggccttatctgtagggacctaaattttttaagtgctatgaacactgatcaagtagttgtggagagatgagaagaatatatgcagcaaaggtgctgtgagcccagttccaacggctgtgttctggtaatcgtgcagaacagcatgtgggctctgggccttggcaggtgcacagacgggcgggcgtcacgtgtgttcagagcttgtctccacctcacggctctgtgctcttctgtgtgctgcgttgtggccgtgaagtgggagctctcctttccaaaggcagagcttactgtcatggctcagatgttcactcgcatcttcaccccaaacttccctgaattgcagtgatttctgttataaggcacatagcaagcctgtaccactctacagtaaaatctctacactaacagtttaaagcccgaaagctgaagcattcagcctctgcaagtgtagactactggactgtagtagaggcatttggaatacttacaaagtcaagtgctgtggcttcagttcccccggctccccacccctgacatccatacttatgttgtctggaagagccatggacacatcattattttcagcaaccagctgcagtgaaactccatttacagcaaccccatagtataaaaccacaatgcctcattgtaatgggatattgaagttcattgaagaattactaggttgccatgtggctcacttatttaaaaaaaaaaaaaaaaaactcacccgttttcctgggatttgttgtaaggagttttcactggcctcactcagaccaatttctgcttcaaaaagcactgaatgtgacctgttgcattcagttgtagcatcaaatccacacctagtcattgcttgaggggccaaattgtgttctgtcccatgcacgctctatttggtgttaaaatggaaccttacggttgtgttttaagtattcattgaaaccagcttcagaaaacaagatgccatagtaaattgagaataacattttttccttcttcagggtggctgtaattccaggtggccgtgatttctttcttccccactgcccactccttcgccaaacccacgtattcagtgttctgatcttgtttgtgcagagtgaactctgatgcagtatcagtcttgtcctgggagccgggtcctgctgctcacaagcccagagctgccagggagctcctggcagtagcacgttgtttagaaagttgggtggcttcattcagcatggaacaagctaatggcacaggagacatcagggcagctgttaattccaaatatttgttcccaagtagctactgaactgctcacaccattggaagattttgtattttcataccaattagtaaaaataagaacattgaggagcagtcagagcccagtgttaatctccggcagagatggggtttatgtatgttcagccagatagtaaatgggatttttggagaaataagataactacaaagtttctatacttactataagtggatttagaagcgattttggttttgtattacatacggtagtcctctgcgtcagggagcacttttttgtttgcctcgagactactcattagcgcactggctaagctgcctttgccttctcgtaggcgtgggttgcctgtgtcatgggctgtgtagaccacaacactcaaacacagttgctgcacttggattttcctttaataccaagtatcatttggttatcttactgggacattttcattgatattctatacaccaaagttttgacggtttaccatcattccattttgtaccagttaaaggcattttgatgatgctttttcttgatgctaagatcactgcagaagaataacctgaccttttctttgcatttgttttgaatgtctaacaccattagcttttgtgatctggttaagaagtattagtgccacaagcctgaaaagacagttctcctgtggcagtggcgatgtggcatccagagggccattgtttctacttttgtgggacttcagtcatgctgataatagaatcttctgttcatacaattctgtaatatttatttgtacagttagtattctaatgaaaggatgaagagtctgaactagaaggtaggtttaagccatcaccaggcctttgcaaatggcctaaatggtgttccctttgaaataacgcttgccacaagtatataataagctatattaattgtgttttgcataaaattgccaaaacacagtaatgtgtatatagtggtataagatcttgaaaaaaatctctataattgtgctctttatctgtgaatgggaaaagccatttttagtaggtgactaccatttgaaaaactcaattggatgtatatctgaatgttgcattgtattgtacagtatgcatattattgtttgtggttgcatatggcaatgaagtgtttgttttatattaaaaaaaacctgttatgtacagttgaaataaattttgcatttgct

SEQ ID NO: 173 - DNA, 4450 bp, Homo Sapiens
agacaacctccagagcagggcagcaggcagctgctagagatttatttctccacttagtcgtctccgcttgcggcttcctcccatgagtgaggaccaagagaagccccctgtctctgatgaaagtgggggatgaacactgaaccaaacccacactgctcagcacatttgatgcggccagaaacagactgcaaaggctgagaaagcttttcaggggccgtctggctgtgtgggtgcgaagacctggctgtacttggaatcacctgggaagacttacaaaaatggtttccgagcctcacccgcaaggattctgacttgtggagaaactccaagatgaaccccaaagatctccatctccagctgttcacactcctatgtaatctctagcccttgggtgtggaaaggacttgtgacttactttaaccaacaacagaatatagcaaagatgcctaagaactgcaaatgagaaataattttctcacctggtcacagcatctaccaagaatggcgctgggggagagatcagtgagattccatctttattaccatgtccctccttccctgtcaaaagcatttcacatcccgcaagtccattagacatggcaccactctgctgtgggagatacacacacaactaaatacagggtaacaatacctgcctggtcagcacttcagctccaaatcaagcttcactaatgactatgagattaacgaagatggttttgataattatgactgtttgttttgtttttcttaactattcttcatctgagacttttacttttgtttctgccagcatcctgacaaacatttacaaccagaaagggtaagccactagcttgaagccattaagttaagttcagttaacaaggctttgataacaaccctcatgtttttaaggaaaaacaaagaacctagtaatcctttaggccttaccctgaaagggtagccagaagaaaaatcacaaataacatgaacttaccggaacaatccaccggggtgtgatcatggatgtggaagacacctgaaataattttatatgtatgtatttactttttggaaagactgacttattttcatacttataatacttacttacatctattatgaaatccattctaggagggcaattcttaattcttaatggtgttccttgagctgacatggacttctaaatccaagacccttttctgttatacaacacagatgctatccctcaccacttaagaaagtgtcataattttgagaatctcttatctaaaaatttaccattcaagaatctattactactttcagttcacttaataggactgcccctacctcacacccagtattcagtttaacattttattttctgaaatttcagttaattaattacaaataatgatagccttcttggtagcagcctgaacaatggattgtgactaatccaaataaagagcaacaagaaagtacacagaaaaataatctgtttagatacagatcattctctaattatcatgtatgcatgaagaaagcgcaataaaaacacccatattgctcctggttcacagggcctttgatacattatttttatatgtttaactttctattataggtcatctatgtgtagaattataaactaaggaaacccacccattttactagtaatttagactagtccttgcattggtggccttacatactcataagaaaaaactaatgtaagtccaggtattagtaaattagataaccaccaaaagaataaaaacacaggctgggcgcagtggcgcacgcctgtaaccccagcattttgagagggcgaggtgggcagatcatgaggtcaagagatcaagaccatcctggccaacatggtgaaaccctgcctctactaaaaatacaaaaattagctgggcatggtggcatgcgcctgtactcccagctactcgggaggccaaggcaggagaatcgcttggaggcggaggttgcagtgagctgagatcacgctactcctggcaaaaaagcaagactccatctcaaaaaaaaaaaacccacaaaatctgactttcctaccaatactttttagatgcatgttaacagcaggaaataagagagaaaaaatatcataaataatagtaaacaaaaaatagtttgacagacttttccacacttgcagttaattcttatccttggtaaagtctttgtttattaatctaagctggtcattcccaacgggtggttcccagaccacatctgcaccacctgggaacatgttagaaacacaacttttcagaccccacccaagatataccaaaattagaaacttggaggtggggcccagcaatcttgtgtgttaacgtcccctccaagggattctgatatacacaaaaatttgagaattaatgatctatgcaaacattcagtatcatgtgtatttccaagccttcaggatggcatctagcccctacagcaattctcgtcatatcactcataaggtacaaagttagtcatttctgtttttttttttttttttttttttttttgagacggagtctcactgtgtcgcccagactggagtgcaatggtgctatctcggctcactgcacgctccatctcccaggttccagcaattgtcttgcctcagcctcccgagtagctggcgctacaggtgtgcaccaccacccccggctaatttttgtattttcagtagagacagggtttcaccatgttggccaggctggtcttgaactcctgacctcaagtgatctgcccacctcggcctcccaaagtgctgggattacaggcgtgagccaccgtgtccagcaaagttagtcatttctatctctctcatccctggagggaaggaactgtttcagttggccctccatatccatgagttgtgcatctgtggattcaacaactgtaaatcgaaaatatttggagggaaaaaaaggatggttgtgtctgtactgaacatgtgcaggcttttattcttgtcattatttcctaaacaatacaatataacaactgtttaccagcatttacactgcattagatattagaggtaagctagattatttaaaatatactagaggatatgtgtaggttatatgcaaacactacaccattttatatgagatttaagcatgcatggattttggtatccaaggggagtcctggaaccaatcccccacagatactgagggacaactatacttaatacagtatcttccagactgtaataatgattgatatgttcaatgccattcttacgctctcatctttctataaaactttttaaaaaattaaatatatccttattgtctcaagaaactgctttatccccatgttttctctcatttaatatgatgttgaattataaaaggcttatagagacatgtgatttgtagacagtgatacacaaattcaaagtggtaaaattttaggacagagaggcaatgctaagtggttattaaaacataaactcttatcaaatgaaaagtttaactgaattattaaaaaggaaaaaactggaatctagcaggaacatttttcaaaacagaaatttctttccatcatactattttaaagcatatttacctgaggtgcaactgtgtgatcaattagattctcagttagagatgcaagcaaggcatccaattcatctgtagcttcctatggaagacaggaatctagaattgttaaatgacccctttatcatcagatgttaagttttttccatatcctctcaatttataattctgacacaggcctgattagtgttaatcctttaaatacacagggacactcataaatcatggttgttaatgattccacttctgcatggagggaaacctatactacaatcaggatgtgaaaaagctgaagtgctatgtaaattttcaaatagctattctcctttggtaagacaaaacttgggtagggttatgactattctggctcttaactttttctttttaattacaaaaaaattattttggctggatgcagtggctcacacctgtaatcctagcgctctgagaggccaaggcgggaggatcccttgagcccaggagtttgagaccagcctgggcaatatagtgagacctcatctttacaaaaactgagctaagctgggcacagtagcactcagctgtagtcccagctactcaggaggctgaggtgggaagatcacttgagcccaggagacagaggctgcagtgagccaagattacaccaccgtactccagcctggatgacagagtgagattctgcctcaaaacaaattttaaaaaagtaaatacagccgggcactcctggctaacacggtgaaactccgtctctactaaaaatacacaaaattagctgggcgtggttgcgggcacctatagtcccagctactcgagaggctgaggcaggagaatggcatgaacccgggaggtggaggttgcagtgagccgagatcgcgccactg

SEQ ID NO: 174 - DNA, 8046 bp, Homo Sapiens
caccgcactccagcctaggtgacagagcgagactccatctcaaaaaaaaaaaagattctgaaccatccattctctgggttgcacttaaatttttggcttcattagggatgacttggagctgctatgcttgtcatgcaaaatatattcctccatgttattttccatttgctaatcagttggatccatttgagtcaaactgtgcctttgtagacttggttgcttcttttggaagcttctttcaaagtttctttctttagttgcttctttcaaactaggttacagaaacaagagctgaattagacagctgcagaaagcagatttctactttcaaatttaagatgaaaaatatgaatattgagagtatttctttcatgttgaaatcaagcaactttcttggtaaaattctatttcttaacgcagtcagtaattggtgggtgaggtgaccacatgccctgaggaggcaggtaggcccatctagagcaggagctgggctcatgcagatggatctttgaccctacctctgttcctcatagttggatgaccctggccaactcacttcaccctgttactttccttatctgcaaaattcatgtctccaaaattcccttgtggggttgctgtgaggatgagttgaaatgatgtgtgtggtgtcacagcatgatttccttgatccatggaagttattaagttgttggcagtccacttcttgcttttgtggagttgtatttttgttctagctcttttgttcacagacggggtgactatgtaatttatcatccaaactgggaattaataaatgaaaatgaaagactaagtggaggagagtctgggctcaaaggtgtggtcaggactcttcccaggcaaacctgaacatgtatggtcaccttccctaatactaatgcgtagtcagactgagcagcctgtgggagaaagctggctgccatcattctgccactcactgctggagggacaacaaggcagaagcagtctggcgggccaagctagaccttgtctgtgtcgggaagacttacatcatgtgctggtaaagaactaacaactgctgggcacagtggctcatgcctataatcccagcactttgggaggccaaggtgggaggattgcttgaggccagaagtttgagaccagcctggaccacctagtgagaccttgtctctacaaaaaaaaaaaaaaaaaagttaaaaaaaaattagctggtcctggtgacatgcacctgtagtcccagctactcaggaggctgaggaaggtggatcacttgagcccaggagttagaagctgcagtgagctatgactgcaccactgcactccagcctgggcaactgagcaagacactgtctcaaaaaataaaaagactaacaacctggtctttgaaaaatattgagtggccaggcacggtggcccatgcctataatcccaatgctttgggaagccaaggcgagtgaatcacttgaggtcaggagttcaacagtgaaactccataaaaaaaaaaaaaaaggaaaaaagaaaaagaaaaagaaaaggaaaaattattgagtgaagaagcctcttcccttcctcccccaccaccttataatttggcaaagggcctccatctgtggggcctagattgttttctaggagataaaaatagccagcatgtgtcaagatagcatcaaacctgcaggggcaggtgaggactccagaatggggttataagcaggtcttttttttttgtgagccaggctacatgccaggctttatgctactgtgtttatttctctttgttacttgccagcacagtgatactagaacttgcagaaatttaagggtaaccggtattactttaaaataccttttcccaggctcccactgcagaccttcaaaatccatgtcccccaagattctgtatatttaaactggtgtccagagcagtttctatgacctcaaaaggttgggaaacattgccctcatgttcagaaaagtcctttaaacttttcagctttgacttagttgtggagagatgttgaaaaatgccttttgtcatcccattgcctgtacctcagatatgaaggaagaaatgacccaaggaggcttcgatggagccaaaatcatcagagggagagtctcgggagaaagatgaatctccagggcaggggccagggtttgttggtctctctgcttctggcccctgcagttactctttttcagtgtcaacctcagaggagctgagctttatttttattataaaagcagagattatctgtcactatactttatcaatcctttctcttctttccccatcattcttccagaaagaattgttcatactccttgtctctgcttccttaatcttcattcacttctgactgcagtggaatgaagactgacctgggtaacctgccctatgtgactgtgggcaggttaatgaactactccaaccctcagtttccccactgtgacttgtaaaatgaggtaatgcaagaaaaatttccaacatagtccctggcagatagtaaatacttattttttttatttttatttttttgaggtggagtctcgctctgctggtctcgaactcctgaccttgtgatctgcccacctcagcctcccaaactgctgggattacagatgtgagctacctcgtctggccagtaaatacttaattttaaccctttccctttccctacctctggccccaaaacagagataaaatttcttttcctaaaatcattagtaacataattgatttttttttctttttttttttgaaacagagtcttgctctgtcacccggtctagagtgcagtggcgcaatctcggcttactatcacctctgcctcccaggttcaagtgacttttttgcctcgcctcctgagtagctgggattacaggcgtgtgccaacacttcgttaatgtttttgtatttttagtagagatggggtttcaccatgttggccaggctggtaaaatcattagtaacctaattggaaaattctatcatttttcagggctcaatttacttttttttggtcaacatttaagactatactcaattcttgaaattcctattcttttcctatatttatgccactttttctagcttttccctcctggttccaaaaacatcatctctagcctgcctagtatcagaggcactccctgcccagtgtcacatgggcagtcatttaacagccatgatatcctggccccacataatcatttgctccctaaatagggacttgtatgaataaccacacaaggatttcactgtctttttcctttacatacaccttacatttaggtgtattaatgaaattatgcagccattgaaaagtatcatgttgaaagctatggaaagatgcagaagtgattaacatcttcagtagatatagtgcaatgcaaaatgctacatgttaaaaatcagggtgaggtgctattcaccttaagaagacaccataaaggccaggtgcagtggctcatgcctgtaatcccagcactttgggaggctgaggtgggtggatcacgaggtcaggagattgagaccatattggctaacatggtgaaaccccgtctctactaaaaatacaaaaaattagccaggtatggtggcaacccaggaggcggaggttgcagtaagctgagattgtgccactgcactccagcctgggtgacagagcgagactctgtgttaaaaaaaaaaaaaagaaggcactataggccaggcatggtggctcaggtctgtaatcccagcactttgggaggccaaggcgggcagatcacctgggatcaggagttcaagaccaccctggccaacatggtgaaaccctgtctctactaaaaatgcaaaaattagccaggcatggtgggatacacctataatcccagctacttcggaggctgaagcaggagaatcacttgcccttgggaggcggaggttgcagtgagccgagattgcaccactacactccagtctgggcaacagagggagactttgtctcaaaacaaaaataaaaacaaaaacaaaaaacaaaacaaaaacgaaaacaaaggcactacagccgcctaacacaaagatgatagaatctcatccctacgctgtagccacacacaaccaaacccaagatcccccaaggaaaacggatgaatagagaacactagcaaatgagaattaagcatcactttgctacaaatactccagtaaactgggcctgagcactgctttgggcttccagactgtaggcttcctctatctcccaggcataaatagactcttaccttagtgagagcacatcagacattagccaagtgtggtggtgcgtgcctgtaatcccagctacttgggagactgaagctggagaatcgctttaacccgggaggtggaggctgcagtgagctgagatctcaccactgcactccagcctggtgacagagcgagactctgtcttaaaataataacaataataataataattctctgatgactcttcaggaaattctcctcattttaagagttatgctatgttgttctgtgaaaatgaagactaccagcacttctgtgtaaactctaggaagagtttgactataggagtatggtaatacttgctgtgtaaagaaaggatggaaagctactttgttttgataaagtaaaatgtattgaagtgcctattttgagtaaattaaaattcagagtacttaccatttcagctggtctcaacagcaaatttttagaagtctgaaatacatcaataccgtgaaataggagactcttacttccttaagacattcatgaaatcactgggttaggtgctagtaatgcaatgatgagaaaacacacacacacacaaacacacacacacaatcccagctcttatggggtttacagtcaagtggggagacaaacattaatcaaataattacacaaataaatttaacaaactgcagagtgcatgatggaagagcagtattagatggtatgagatgattaacagggtctgttaattggccagaaacatctgggaaagctcacctgagactgtcagttgtgctatggttggaggatggggatgggaggtggctggtgagggcctcgttagggaaggaactaagggtgcaggagccctgctgctggaagcagtatgagcctcgggtaacacaagggctaacccaaatgcctacacagagtaaggattgtgggagaggaagaagtgacatgcctctcaagtattaaaattcagttttcatcatttaaaaatagagtaacaataggcaaacagtttgtgtttttgacagggattgtaagagtcaataaatgatcactgaactcctaggagggtcctaaaactgagcgtttgaattccagaatttaaatgctgggtagaaaaggatgacccagcaagtattcctgagtctgaagaagaaaagccaggagtgagtttagtgttactaatggcagaggaaaagagggccttttaaaaaggaggcagtggtactcagagttgaaggctaccaaaagatcaaggaaaatgagaactgaaaaaatatctgttggagttagcaacatggaggccaatgacattcacaaaatgcttaaaatgcactgatattgtataattagtttcaaccatcttctgaattatctgtgtcttttgcctgactgggaggggtgtgggttgctttagatcaaattccacacttctggagatctgggggcattctagcaacaatccagatagtgttacaaacaagaccattataagataaacacattttaacaaggcatttattacccaatgctttaatattagagagactcaactgggctcatgttaaaaacaatgaagcatctatgtcttatgcaatgctgtataggaagtatctgataaagtctagatcctcagaacaaaaattctatgcattggtctattgtctttatttaagacaaagagtgtgcttaaggtacaggtatctaccagctactgaaaactgcagaacccctatccatgatgtatccttatttatagaatgctctaaaaatgctctaaaaatctcccataaaacaggatgaaagtagttttctaatccaaaatgttatcataattgacacttctcagggtaaaaattagcacataatggtgagtgagctcagaaagattcaaaataaacaatttatacaaatcgagctctccaacaattgcaaatatacagtatctattagtctttagctgaattaatcatttattttttatttttatttttatttttgagatggagtttcgctcttgttgcccaggctggagtgcagtggagtgatctcggctcaccacaacctccgcctcccaggttcaagtgattctcctgcctcagcctcccgagtagctgggattacaggcatgcgccaccacacccagctaacttttttgtatttttagtagggacggggtttctccatgttgtcaggctggtctcgaactcctgacctcaggtgatccgcccacctcagcctcccaaagtgctgggattaccagcgtgagccatcacactcagcctaaattaatcatttcttaaggccctcataaagttactgtttgtaaaaaataaaattctacatatatgggaatttagaaaaacatttaattgtcataattgaatgtaattaatcattgttaaaatatcaaagcaataatacatttcagaggatatatatgtaatgatttttaaggctctagtgaagcatactctaaaatgtagctaagcaatctattaacaccggccttttacagaatacagttacaatcattctaacaagataaattggctgggcgcagtgactcatgcctgtaatcccagcactttgggaggccaaggtgggtggatcacctgaggtcaggagttcaagaccagcctggccaacatgtcgaaatcccatctctactaaaaatacaaataattatccaggggtggtggcaggcacctgtaaaccttggcaggctgaggcaggagaatcgcgtgaacctgggagacgggggttgcagtgagccaagattgcaccattacactccagcctgggtgacagagcaagactctgtctgagaaaaaaagaaagataaattatacatatgattgatatacaagcaaattatatgtattcacacatatatagtttccttttggaagattttaggaaaatatttgtcacaattaatgatttttatattttatttataaattgagtactttgacaaaatattatattaaatggttcagtaagactgaaccatatatgcttggtttggcacagtggctcatacctgtaattccagcactttgattggccaaagcgggtggatcattggagtctgtgagtttgagactagcctaggcaacatggcaaaacaccatctctacaaaaaaatacaaaaattagctaggtgtggcagagggtacctgtaggctagggaggctgaggtgggaggatccattgagcccatgagacctaggctgcagtgagctgcaactgggcaatagagcgagagcttgtctcaaaataaataaataaataaataaataaataaatttcttctctttaaatcttggacctagtcatcagatcaatctttctaaaattttgttttcattcatgcatattattcagtggctccccacttcctacaaaatgaagttcagctctttgttctgacatgtaaaccatttcaatatttggcttcaaacattatttccaaagcaggccatgctcctcatctccaccctgagcttgtggtgtgttcctcaccttgaaagctcttcctctttctcttcttcaaatcttgtgatttttaaagatgcagttcaactcccacccacctcccttatgaaatcttcccttatgcttctagtgccttcctctggccttgtcttcatcacttattttgggttttaaacaacgactattatgtacttagtaacagtacttgtgtcccttttttttttttgagacggagtttcgttcccgttgcccaggctggagtgcaatggtgtgatcttggctcacgg

SEQ ID NO: 175 - DNA, 1202 bp, Homo Sapiens
acatggattcagacacactgcaaaccttccagagggagctctgttgctttatctgcaggaactacttaacggacacagtcaccattgactgtgggcatagcttttgcaggccctgcctttgtctacgctgggaggaaggccaagctccaaagggctgtcctgtgtgtgggaaaatcccccagaagactgacttcaacaccaatattgttctcaagaagttggcttctcttgcaaggcagcgcagacctcacaacatcaacagctcagagaagcagatctgtgtgctacatgaagaggaaaaggggctcttctgtgaggcagaggagagactcctctgtgggccctgctctgagtcacaagagcatgaggcttatggccacagcccaataggatgggctgctgaggagagaaacttctgaagaaaatggatcatttatggaggagcactcaagaaatgcaaaacaatctaaatcaggaaattagcaaaatccattcattaacggactatgtggccctcaggaaagggatgatcagataacaatatcagaagttgcgccaatttctcctggaggaggagcaacgccatctggagacaatggacagagaagcagaagagattgttcgacaactccaagacggtgaagtaagaataacccaacatataaaaaagacgaaaggcatgtacagagagctgtgggagatgcgccacatgccggatccccagccagtgaacccagaactcacttcctggcacatcaccggacctttctgaggatgtgagaaatgtggtatttggagatgaccatgatggtgcacccggggagtcccagagagcagagaactttgcagcatggggagctcaggccttctcctctggcaggcattactgggaagtggatgtaacccagtcctccagctggattctaggagtctgtaaagattccaggacagcaaacacaaatcatgttcctgcttttgaggaagcattttttcaattttcttcaaagagaaacagcctttatagcctctccaacacctttcttcccttaactcactatgtgcaaagacctttgggtcgggttgggatgtttctggattatgacaacacagttgtgagcttttatgatgtttcaaaaggttccctcatatacagccttttccctttctctttgtcttcccttttgacacctttcttttgtttt

SEQ ID NO: 176 - DNA, 2000 bp, Homo Sapiens
gaggctgaggcagaagaatcacttgaacccgggaggcagaggttgcagtgagctgagatcatgccattgcactccagtctggtcgacagagcaagattctatctcaaaaaaaaaaaaaaaaagctgctgcaaatgctcattccgtcacaaccatgctagtgaaaaaagaaataatgggttagaaggtaattttagagtatatctcttactcttttgccctgtaaaatttttgtatttattacttgccatatagaagcctgtacttcaacaaaagatgtcattaatttcaagtaaatatgctcccacatatattctccctagaaaggtactggtgtatttccagtcaagttgtagcatttctggccttttttgtgctgctgtgtttgtgtgaaataaggcaggaagtaaagtggagtcaaccatgacatttcttgtttctaaagccacagcctctaaaattgaatgttaagtcaactagaaataatgacaatatttaagaaataaaattctttttattttttatagtttataaaaaattatttttgaattataagttaaacaacttgaacatgcagatacctaaaagtgtcatctaggtgatagtattaatattttaatagcttataattgtgagtcacagttgccccattgggtttactgaaaagcagttatttatcttatatgtgtgaatggagaataggctttttataatcctaagcatacagatcttttaagattagcgctatatttagatctgaataaaattgataggcttgtaataacaaattttaatacttttttctaatagaagtgaaaaacagaagtcatttgttaaaatgagtttaagagaaacttcacatgtatttattaaataacacttaaaccacatggtaagttactaatcagtaatttcaatctattttattttagtcactgaaaaagcataacattctttaattattcaatcagaaacagtattcttattagtgtttctgaaagcaactgtagaccactcagtggatgacaaggttcatgctgacaacaaattttctatataataataggctcattttaactttaaatataaacactcattatttcaaaagtaaaattaatggttcttttaagtcataagaggaataatgttataattcacttactgaagtgtttgtctcagactttgtaatgaatactttaaaccaaaaattaagttctacatactatctatggataaaaagaagtggtttgtaaatttatctttatttttactaaattaaaaaatttaaagccaaaatgttaggtcaggatttaaaacaagcattgggtgacagggtgttgggcgtaatggttagattgaaactcggtgtcagctggttactgattgcatccccaactttaggattttggtaaaattaaagcaattaatgcaaataaaggtgcccgaagagcacccagcatatagctctcatttgttgattctgttagatcatgatcaatgttaagcctaaaaacaaggtggccacatcagtggtttgtaacccatgtttattctaatcagtcaatctggggctatatataatagtagttgaatgtttatagtactacccttggaaaattcccatatattcacacccagcatggatataaatacggaaagatttcccattgagtacttctctttagcactccagtaacactagacaaataagcacctaaatgccgagtgtttgtcagttttaaaattagaaaagaaggcaagttgttttcttgtctacctgtttaataaattttttattgccaagtacgtatgttcatttgatttaatacgttgaaatgtagtttaaaatatatattcaaataactaacaagtgaaggaataatttatttagaaacgtagaaataatggtactgtaagcagttgctttagagtcttttatagtattgtattttgaacattaaaaataaacattttatttctgagtgttgggtttagactattc

SEQ ID NO: 177 - DNA, 1889 bp, Homo Sapiens
gcccattggaagcagggcctcagcaccaatgctactgaggatgtcagagcacaggagcagggccttgggagattacccagcattactcaaaccttctgccctgatgggtctgggtccttggaaatcaagctgtctcaggctgaattgctggatgattctgttcacacttacaatgaggtaagggaaaccagaaggcccccaggtcgatctctggtttccacacacacttccgccctcattgtgtgaaagtagccatgccttctcctgaagatgaggatctattacctgggcctggagaggaggagaatcctcttttcaccaggtggtctctgggcacatactaatcaaaacttctctcgtgacaatcggaatgtgtagttcagtgggctgtcttttgtatccttttaagggtaccctccttggaaaccaggacctcgtaccctgcacagcccagtgttggaagataaaacgtgcaaaataccccattgggtgaatctaagggattggacgtggagccaaacctgcttccatcttttgattcctggacacacatgttcttcctattgagaacacagcactctagagacatctctgattcaaacaatgcacggtgtcctgaaagacggcacccacctctcagagtgcttcctccaggctggcactgagttttgcctgtagaagacctgtccagcattccttgtggctggcagcctctggatggtccagatggtgataggattagtggaacccacagccatggaaacactgaaactttcccagccaagtgggtccttcaggcagataatgggctaggagcacctcctagcctgcagatcaggaatgtcaacagcacccggagagtggtgctggctgagtttctgagagcaggacatgaaaacacccatggaatagaagcctatccctgtgaagatgaacctctggcccttccaggatggaagtagctaaatgtagtcaacttgttacttagtggctagttagtcacctaaagaaatagtgccccactggggcacatcatgggcctcaattgctgatgagttggacattcagaggtgtcgacagctggatctgccttggtaggggggagtcagtgctgttggccccatatgtagcctcatgcctgccactgtggttgctccattcatgaactcatcctaccagaccagggctgacccatggtgaaggctggctaacttccatttgtctgtttggttgttcagtgccacttcagacttgggtattttctgtgggtgtaaacatgggattcaagctcaacccaggtggaccattttcacctcatgatggatgctgttgggcctgtccaatctatgactctgtgggtcacacaggcacttggaaccacatagttgcttggtgtcccgtggtcaaacattctatctaatcaggacaagggacactaaaagttgcttctaataggtggcatatgtctctgctgtgaatgacatgaccttactccagaatcccaggcctttcactgtgactttcccactggtgcttggttcagctccatcctgcatctttccccaccaatggcatcaccagcaccagggggtctgagagatggtggctgcttgcaccatggcctggatctgctgcagggtccttttctgtgtgggccccacttgaagctggcctcctcctatgtcacctagagtgtgggccaaagcaacatacctagatgtggaaagtggtgttgtcagaactgaaagaggctcatcaggcagtgtgcttccttctttctggtgaggatgcaagatgaaacagtttgtctgttaccttggaggggacacacctgcattcccctaaacacttggccattgttcacccataaaactttacttcaatgccca

SEQ ID NO: 178 - DNA, 20140 bp, Homo Sapiens
gcttctagtaggccaaactcccaggtgacccccgcaagaaacgcggtccggagagggtctggccccactgctggggcaagggctctaggcgcccggaccccacgcccgcagcctgcggagaacgtgccgacaaggacctgtagggccccactccccctcctccctccctcggcgcagcccggcccaggggtctgtcctcccaggcccaggaaaggaggaaacccacttccgccgcgtccatgatctcccgcggcttctcctgactcttgcggctggcgctggcgctgggcatcgggacacggaactgggcagtggacaccaccctccctcgcaggcttccgtaaggcaggccaaaggggcttctccctccctcccagtctccgccctcccgaccctggggtctcagcacacgcgctcggactccgcgtggaggtgcggctccagaaagatcgcgagagctgcggctatctcgagatcccggagcgctggcggccgcgcgcagggtctcctcccactcttgccccgcccctccgggagttttcccggagttggagggaattcccgggaattcgcggtagtttcgctggattggctctgggggcgggggcaggggttaccaggtggctggctgtagacctgggcgaatgccagctctcttcagcttcgtcccaactgcgacttctgctccattcttctaacagccctttcaactccgctcggctgtaaccgcagactcgtcactaaaacacccacctaagcgcgggccttggtttctcctctcttggactttcccgccttctctcttcccctgggcgacgtagctgcttggggacggaggaggcctcttcgcaatccattgccctgcttgttgggacagaggagtgcagttggcttgccaaggcagcatgggttaccagtccctgtagtgttctttcttggaaccatctgccaagctgtgaggaagctccagagccatatgacaagacctgatggaggataactgaggactttggccaacaaccccagctgagctccagttggaatgtgaatgaggccattttgagtgttccagcctattggagccctagccaacactctacaaactagaactgcctgattgacccgcagaatcataagaaatgtaaactgctgttttaagccagtacattgggaggtggtttgttatgcagcaatacctgactgaaacactggggctcctttgctcagcttggttttgaggccttgcaccacgttcacctgctcacctcatcaccctcaaacctctgcagggaaatacaacttactttctgggttttcacagtcattttagctcatggacaaagtggttcactcatcagtgactatgaaagtggccaaatgatgatcacaatactaattaagactttttgaatgcttatgatgtgccaggcactgttttaagtgtaatatatttattcatacatttaatttttagaacaactttttggctgagaaagacaggattcacttccagtgctttccaaagcagcattctctttgtcttaagtcagggaaggccttcaaattactttcattagaagaagatttaaaggaatgtttctgtttagggtttttcagtctaaacaatttttagaacaattttttgagctaggcactattattatttccattttatgataaaacaactaaggcacagagaggcaaaataacttgtaaaacagtaagtgggtcaaatcaccatcagaacccaagcatcggcccccagagccacatgcttagctactgtgatgtcctgcctcccataaataatatctcaagcttatttttatttttttaaaaaacgtttttgagtcaggatcttgctttgtcacacaagctggagtgcagtggtatgatcatggatctctgtaaacttgaactcctgggctcaaaagatcctcctcccttggcctcccaaagtgctgggattatacaggtgagccaccatgcctggccctacttgagttaagaaaatcctctaaggctttgattgcctcgttcatttattctaggttccaggctgtgtcccatgctggcagttacatttagaaaactctaatgttagagaagtctgaattaactattcctacattcacagttcagggtaggatagagtgtttgcttggttttcccaggtttctcatccctgtgtggccaccgcagagggcagcagagtgacaggctgagggtgcagagggggcagagaagcagaactgatggagggcccaggcagggcaggggtgggcggagctatttgcacatctcaggagtgagagctaggcgggagctcagccctaactctcaccaaccacccactgatggagagggcagcttcttccaatagcaagggctgtggctgccaaaactgtgccatttgacttgaagcggaggaaagtctccttgcttgctatgcaattgcaattgcagccttaaggcaagctccccacggccttcagatccctcccaggcagacatcctggagctgtcactgcaaagcttgtgattttgcttcaagcagcccttgaagttctcctgcttcctatttgcctgataactgccccaaggactctgaaggaacattttaaaagctaattataaaatttagtaggcctgcattcttacattgtattaagagtgaggcctttggagacagccctgggtcagagttccatctctgctgcttaattgctgtgtggctttgggaaagctgttttcttctcagattctcaatgttcttggctgtagaatgggttagtgatatttaccctgtgtgcttgttgtgagcaataagtaatcctatagtcaaagcccttggcctcatatataccaggcaaccatcagggtagctattaattacaaacatagaatatattgtggatctatgagaccattaacataccatgcagtcttagcatgtaagcagcaaagggtaaagctggtgtttcatgctctgctgtacaatgtttgcagaggaaaaaagacaatcaccctgatctattttagaaaaatgctatattttaatcgcttctctttttactttcttattttagttttgtcctttaaatgctttggagcatttaatagctcttctgctttcaacttctataaattcacaacttctataaatttaaaaagtgtctaaatcttgattaaatgctcttaatctgaggcttatgggtttccaggggtctgtgaactttttgaaattgcatgcaacattgtttgtgtctacacatatgtgcatttttgaggggaaatgattcataattgtcaacagactctcaaaggattctgtagttggacaaaagatatagaagagtccttggacaaaagactgaaaaaccctaaacagaaacattcttttaaatcttcttctacagaaagtaatttgaaggccttccctgacttaaagtggatgctgctttggaaagcactggaaaaatggatcctgtctttcttagccaaggactggtctcttttctccaatgtgtccctaacagagtggtgaggctggctcttcccaccagtacaggtaatgtggtaaagataggaccacgtggacgaagaggtattaccttctctaattacagctaacaaagacctaggcctaacctcaactgcaccttctgtctctgggaagtcacttatagagtagacctataattaggatttggtaccggaaacataattctcaggatggtgaatctctaaattatgtccccagagacatacctgagacaaaaccctaagggctgttggccgtaagagggtgtgtgtggtattctacattcagtagggatttataaatgaggatgatatcactcagaaggggcaggtgtccaagaggcccttttgacttctgcaatggggcctgacagccccgtgaactgagctccataatttatgcctccggcatagaatctgtgcaaagcaggaatggccgtatcagcatttggggatttaaagcagcttttttttttttttttttgagatgaagttttgctcttgttgcccaggctggagtgcaatgacacaatctcagctcactactacctccacctcccgggttcaagcgattctcctgcctcagcctcctgagtagctgggattacaggcatgcgccaccacgcccagctaattttgtatttttagtggaggctggtttctccatgttggtcaggctggtctcaaactcccaacttcaggtgatccaccctcttcggcctcccaaagtgctgggattacaggcgtgagccaccatgcctggctaaagcagctttttttatccacagacctctttcccaaattgtaaggaggattcagctcattgatttcactttattttaaaagaaaataattattgatgtgtaaagtaaatgaaaacacagtcaagtgggagtgtaattgaaagtaatttaagagttcaatggttgatgacttttttcaattatgatatctctttattaataggaaattcataaattaaggagtatgcaatataatcattgtggaatatattagggaaacatttttgatccatgcaagtaaattgagatagactgggtgcacctgttcctagtcatgcccagggaatatgtgaaactctggctcaggatgaacgtctgttggtgtcagcacaacaataatgaaacaaagttggcagtagggtggggaagtgtttggtgggtgggagccaccatctgcagccagctcccagcacggctgtgtgttcggatacccatcaaccaggaaagggagtctaaggcctccagatgattttcccctttcacaaaactgttgtaaaatgaaatacaaatccttcctgaatgttcctagcttttcttcctttcggaagttttcagtcaatgggaaacaaagccttattcaaaggattaaagccatagtcattctattgtttggggcttcaataatgtggctttccttccacagacagaattttcaattcacaaatcatctgaaaaacaggaaattttggagaaacatgcttatgataacaaacaagggatctatcgtgtggtatagaagtttacacaaagaggcatctgattttaagtttttgtttttttttttttttttttttttaccgttctgggcttctggctgcattctaggaagatcattccttaaaagaaatagccatatggcttataaggtaagactactcagttcccatcccaacccccagaagagaatggaggaagggaagcagactctggctatatttttatggctgcactccaggcagtactgcagaggcaacaggcaggctctgaaatgccttcttccccctgctatcctcaggcctgtgtttctctcttactccacccaagtcctgggcccttacatggcagagggagggagaagggccagcaacattggttaacaggaatagagaatgttcgaggaaggcagtggcaggcaatagccatagagagtcacagaaggttaaagaggttgtggaaacagtcatttgtttttcaagcagttccggtggggtttgagaaagcagcagcactcaactgtgagcagacaaactcactttggaaacctatgcagccacttctaagtaaactaccaagagaattattattttatttaggttcctcatttcagtgacaatcttttaatcctttgaactgtatgctgaaaaggacattatagatcctcctgaaagataatttttagtgtccacggttccctcaatatgatgatttttttccttggtccctatctttcaccattccctttaccttttatccatgcttttccctgattgaaggaagacagagtctatttgcttcctagcatcttcttctatggctcttgctactgaaagtgtgatctagattccagcagcagaacagcagcattttgcttctgagaagtgcagaatctcaggcaccatcctatgactactgaatcagaatcagcattttaacaagatccttggtgatttgcatgcatgttagtttgggaagggctgatctgtacagatctgccctataggcctgactcataacccacactccccaaaacctgcaagatcctacatttctggccctgtatacttctctagtctcatcccatgtcactctacctctcattcactagttccagccccactagtctttctcgttctggcctccaagcctttgtacttgctgttctctctgcctggagtgctcttgtcccatctagtatggctgactcttttatttcagcttaactgttacttctggctgtgagcggtggctcacacttgcaatcccagcactttgggaggccgaggtgggcagatcacttgagcccaggagtttgagaccagcctgggcaacatggcaaaaccccatctctacagaaaatacaaaaattagtcaggtgtggtggcacacacctgtggtcccagctgctcaggaggcttgagcctggaaggctgaggttgcagtgagccaaaattacaccactgtactccagcctgggcaacagagcaagaccctgtctcaaaaaaaaaaaaaaatttacttcctttgaggatgctttcctgacccctctatatgaagaactacctccaacccagctactctctattccattaccctgttttatatttttatggcacttactgttatctgaagtaattttattcattcatttttgggtctattttattcaggattgtgtgtccagtgttcagaagagtgcctggcacatcaaaagtgctgagttaatgtttattgggtaaatgaatacagttttgggaatcatgaacattgagaacctaggcccagacaattctaaggtaaaatatgtcaccctctgaaccaacccgacagctttcagctgattgacctaagaccagtgcttttgggtgcccggatgagcatatcaaagcctggtcccctgagcagttgcatcaatatctcctaggaacttgatagaaaggcaaattcttgggccttaccacagacctactgaatcagaaatcttggcaatagggttcaccattctatgttttaaggagcctgccaggtaattctgatgcactgccccacacaataccaacatcttaccagtgtggagaacccacagtgttcaaagctctcttacatatatcgctgttgttctggacttcataaaagccctgagaataggcatggcaggtgtcattatttcccctttacagatgaagaaattgagccctaggaaattattccatttgtgttggtaatacttgctttatcagaatcacttggaacgcttgttaaaattgcagatacctgggctctaccctagacctactgaatcagaatcattggggctggggctctggaatctagatgaaaaaaaaaagaagctcctaggacattctaaagctaaaagtttgagaaccaattgcaacaggaaacagtggaatagatatcagagcttatagcccctcattcctaaggcatgctcttagagagtcttgagaagagtaagtaatgataaagaatgatattgatctttagtatcttttagtgaaaatagttaaaacaaactggcagtaattctttcacctttattagaccctaaccctacttgctactgttgtaaaccagggagaatcaaactccatgacaatggactgtttctttgtatataatttagttgtgtatagaaccaactaactggacatcaactaaggggtggcaggttttcctgattagtttgtgatacaggaatttttatttattattaaaaaaaatttttttttgagacagagcctcactctgttgcccaggctggagtgcgatggcaccatcttggctcactgcatcctcacccactgggggcgatcttcccacctcagcctcctgagtagctagaactacaggagtgcaccaccacacccggctaatttttttttttttttttgagatggagtctcactcttgtcacccaggctgcagtgcaatggtgcgatctcggctcactgcgacctctgcctcccgggttcaagtgattcttctgcctcagcctcccaagtagctgggattacaggtacgtgccaccatgccaggctaatttttgtatttttagtagagatgggatttcaccatgttggccaggcttgtctcaaactcctgacctcaggtgatccacctgcctcagcctcccaaagtgctgggattatgggtgcgagccaccatgcccagtcctggctaatttttaaaaaacatttttttgtagagactgagtcttgctacgttgcccaggctggtctcaaactcctgggctcaaggggtccacttgccttggcctcccaaagtgctggaattacaggcatgagccactgtgcccggcctaaaaacagtaacttttaaaaatacttctccaaatgggcaagtaactcccaaatctcttctcctgccccagcttccctggctccaggcccatacattgaactgcatatggaacagttctcttctagatgacctgcgggcatcttcatcttagtatgtccaaattcattactttctttcccaccccatccattcttcttcctggctacactctatcagcgaatgactacatatatcacccactgtgtcatcttagccaggaatccaggcagtttctggattccttccatcctgtctctggatagctaaccagtcatttcattgtactccttagattgctctcaaatcaccaccccttccttcatctctactcaactccagttcaagccctcatcatctcttgcttgggttgtcatgatggcttccaaaatggtccctttgtcggtgcttctagttgacctcatttctcctcttccttccttttggctctatgcttcagtgctgtcaaattgctttcacttttttaaaaaagagttttccattttaatttctgagacacatgacacatctttgtcaatgttaggtctgggaaagtttctattaacttcacaagacagaaaggacccttctctccagcagtgaaaaattcaaaagaagagagcttcagggagttcagttgctacccagcagaagcttcaatttctaacaaaactgtgaagtttcaaataatgaaggggaacttcaccccaagatggtactcacttaggaacattattttccttcagctttcccttgaaatattcaacagcttttttttttttcgagacagggtcttgctctgttgcccaggctggagggcagtggcatgatcttggctcactgcaacctctgcctcccaggttcaagcgattctcctgcctcagcctccctagtagctgggactacaggcatgcaccaccacgcatggctaatttttgtatttttagtagagacagagtttcaccatgttagccaggctggtctcgaactcctgacctcaggtgatctgcctgtctgggcctctcaaagtgctgggattacaggtgtgagccaccgcgcctggcctcaacaactttcttctccccattaggattacctccattgtgggctcttttcgagggaggaggcactgcattctcactcccagtctaaagctgctttcccttctcggtgatgttttctgcttccatgcctttgtacatgctgtgtctgttctattgattttccttttcccatctcctgtgtatggcaaactcccacttgtttttcatgattctgctcaagtgttctttcctgtatgaagcccaagctgtccacttggagagacatctggccagccccccgttgttccagccatccccagttcaggcatcagacatgtggtgaagaagccatcctagatgcccagccccagctaccatctgatgcaaccacactgctcaccccgagcaagaactgcctgcaggagcctagtattatcctctctcacagaaccatggcagggaataataaattgttgtttgaagccactctgttttgtggtggtttgttaggcggcaataggaaactagaacaccatagcttttttttttttttttttttttagaaaataacttgatattcataagcacagctttttaagctgcttttattatttttccctttatacgagtgcattctgcaacataaggagatttctatctcagccctgaacaagatttatgatcttgatcaagtctctttataataatgtcacagaactttacttgcttcaattctaatatgaaggattgaactagttaatcactaaggtccactctagttccaaaattgtggcattctcttctaactatcagggaaaaattgacttattctttgttaagttgtagcttgcagtaaagttttttgggcatgagaattttcagcaaggtggtgagtgccaggaaagtgctgactcagcacaatgctgtctgttagccaggaacaaaaatgaggagcaaccataaatttaatcctttagctccttctccctgcaaaattcagaagatgttttatctgtaacaaaagacttgaaagaggattctcactttttcccttaaaagttgttactcaagtctgtaggtaacttcaggatttttgacagaagattcagatttgcatagttgactcagtctccggaagatccctacactcaaattctaagtttagggcaagtgaactgagtgattcctagaggaaataaactctcgcctgagaacaacagctgaaataaaatcccataagccaggaaaacagccacacaattacagtaacaggtggtcagtttcaaaacaaatttcaaggtctgactcgcctggcacctgctctagaaccacagacagcagtttgacactgtctgggtccaagttaggtcatccctgccacaccataaggaagattaactacctttattagcagagctaagtcatggtaggttagaggactgcttctctgtggtagtaacccctgtgttccctgtctgagaagagggaataagagagaatttgggaactggacaggaccttgcagattaaccattaggttggtgcagaagtaattgcagtttttgtccttaaaagtaatggcaaagtgaagccgaggggagctaagcagagatttgctcagaatcacatgacctgtagaagcagaacatccccacccccattttattgtgaaaaaattcaaacacacagcaaagttgaaaggatttttacaagacacagctgtatatgcatttcctggattctactgttaatattttattaaacttgtttattttctaactatccctctatccatccttctatcaccttatttcctggatgcctttcgaagtgaattgcagacatctgtactccttcccctaaagcagcatagtgttttatcatcatttaataatttaatacctcaattttgtatacattatggaaccaggaaacattataagaaatcactggaccccaaaaatgttaattagccttggctagcctgaaagagaacacaatttcctaaggtcctaactttaaggcacttgaggattcttactaagggcaaattcctgagatgacagaaatactagtcaacacacatcaatgcctatgtttttccctcctcctggaatcctgtgctttccccttcctgctccacctgttgaaatcctctcttcattcgtccaagaatgatctcagatgtctgcaaggaacataaaccactgttacacacgtattgttttaaggaaaaaagttactgaagaagtctgaactgtcacctccttcccaatccctttcctaaaccccgagttttaacttttctcattttaatgcccataaactttcattgctatttttcctccctcattctaccttgttgcagtttagtgtttatttgtttgtttatcacgactactgctcctcctcctaataatacttatggttaatttctttttaagggactatatcttaagactatgtgtcttctgcagttctttgcatagagtcaacgttgaaggacaagcaacttcaaatttccaagcaacaaaattatgttcgggtggttttctgaaagcgagatcttaagaaccacctgtatcagaatcccatgaagagcttgtttagtgtgcaaatttacagattgtcccccctcagaaatgctcatttaggagttcctgtcctttgcggggacatggatgaagctggaaaccatcattctcagcaaactaacacaggaacagaaaaccaaacactgcatgttctcactcaaaagtgggagttgaacaatgagaacacatggacacagggaggggaacgtcacacaccagggcctgtcgggggtgggaggtaaggggagggagaggattaggacaaatacctaatgcatgtggggcttaaaacctagatgatgggttgataggtgcagcaaaccaccatggacatgtatacctatgtaacaaacttgcatgttcagtacatgtatcccagaacttaaagtaaaatataaaacaataataaaaaggaaatgctcattcaggagttttggggtgggggttcaggaggctgcagccttaacaattacctctggtgattttgacacaggtagcacagcagccaaacttggagagatttgttcacagcactgcatcaccaaccttactttctgttaggcctttaatcactttttttttttttttttttttttttttctgagacagggtcttgctctatcacccaggctggagtacagtggcacgatcttggctcactgcaatctctgtatcctgggttcaagcaatcctctctgccttggcctcctgagtagctgggaccacagacatgctccattatgcccaactaattaaaaacattttttttagaggcaggctggtctcgaactcctgagctcaagcaatctgcctgcctcggcctcccaaagtgctgggattacaggtgtgagccactgcgcccggccttttaatcacttttaaaccagcaaccctaatctgcctgtcccttgaatggatccggataaaggtgtggcaaacaagcctcctgtcacagtggggtgtgacagtcacggcatcaccccttcaccacatcatgtgctgccagtcatcacttctgctgttgccaccaacccttgcgtttccctttgtcacttcccccttgccaccaccaacggccactgtccctctgctcctcaccctccatagctgagtcagatccagcattgggcacttgaggaagaagccactgtggaaggcgggatgagggtgttcccattctacattcacaagcccacagcttggagaagaagcacacctaattctgaccctggcttctgaagaagctctgcaaacctggctagaaagttgggcctgtggtttgaggttcctgctgcctttgattttacaatgagtggaaattgaggttgagtaacaggtctcttgcccaagtattaagggccaccacgaagcatacagcaatgaaggcaggagctgatgacatgtggttggttcccccctctaggccaagtatctttgtatagggaaggccgacatggccatcttcacggtttggtattagtggagtgtcttatacatactgaaatttgtttttgttttcaggtgctaaaaggataataccaaggaaaactatgggtgggggcagtgaatggccagcatgcctataatcccagcacttgaagccaggagttcgagaccagcctgggaaacaaagcaagaccctgtgtctaaaaaaatttttttaaaaataagctgggcatggtggcacgtgcctatagtcccagctactcagctactcgggagaccaaggtgggtggatagcttgagcctaggaatttggggctgcagtgagctatgattgcaccactgcgctccagcgtgagtgacagagtgagatcctgtctctttaaaagaaaaaactatgattcaaagtgttgttttatgaagcataacctgctttatgttttgagtttaatataacttgaaatcagtttctctaagacagtgccagccttgccatttttcagttcaacatagatttctctattacagtggttcccaaactttaggaggcatcaaagtcatctggagggcacaaaaacacaaatttatggatgtcacccacagttcctaattctctctctctctctcttttttttttgagatggagtcttgctctgttgcccaggctggagcacagtggtgtgatttcggctcacttcaacctccgcctcctgggttcaagtgcttctcctgcctcagcctcccgagtagctgggattacaggcttgcgccaccacaccaggctaatttttgtattttagtagatatggggtttcatcatgttgttcaggttggtcttgaacccctgacctcaagtgatccacccacctcggcctcccaaagccctgggattacaggcgtgagccaccatgcctggcctgtttctgattctctaggtctggaaaggggcccaataattttcacttctaacaagtggcaggatgctgctgctgctgctggtccagggaccacactttgagaagtatggtactgtgtggtacttaccggaccatttaccatacttcctgcctgcctaattgtgtcacaatatagccgtgcttctcaggcctagcaattcattagaattacctgtgaagcttttaaaatgtaaggtttggatggaatgctcagaccctaccttagacccaattaagcccacagctttgagggtgaggcttgggtattgttcagaaagatccccaggtgattctaatggataccgagggttgagaaccacaggcatatagcaaactctggccctattctaccttaacatatgattctcatttgacaaatacatattgaccacctaatatatgtcttgaaaatgataaagtatgtaagaaatggtccctgacctcaagcagagatacatcatatgcccaaatatttaaacaaaaagctggtgtgtggggtttgtgccaattagaggactaaaccattactgaaaacagaaggctggatgattcagggtaaatcaatgctgcacttgatcctcacattgtttgagataagttatgtatgcctctgctgcacatgaaacgtatccctttggtgggggaaattgctcatttattggttcgttgaggatgttccaactgattcaccatggtaggtgtgattgaaccatggaaatgatggaacattaaatcaatagctagtcagctggtgactattccttggctaagtatgctattaaggttctgtttcagaagtccctgtgctcaatggaggtgaacctttccagtggagaaatacaacatgaattatgtttagaaaatgcttcaatctggggttttaaataaacagtccttaaatatgtataaaaatctgaaattattttagaatcgaagggaaaaaacaaccgggtccaaaaaccaaaccatatttagcttaaaaacacgttcttatttgcatccactagaatacaatataatttaatgattcaatgacagctggcccatgaagggcagagtttctagaaaggaggaaataccctctttgggtgttacttaggtattaagtgtattatttaattcattgttttatttaatttggttatatcttttttttttgagattttgttttcatgttgggtgggtagtttttctaagaataagaaatcccaatgacaacaaaatgtcattgtttttaagagaaggagataaatacattttaaactgttatatttatttattttcaaaaaatgctggaggcatcatgttagcaattgcaggggataacatgaatatgacaaagctgctctcaaaaaacttaccactttgtagaagggaaagctaagtgcctattccaagcaaaatatgatatgatacatgcctttagagaggagtaaattttaatgaggcttcaaagagctggaagaagaggtcaaggttcaaagagcctaagataaggcacagaactggggttctggtacaatgcattacagcatggccaattttcaaaggccagctgttcccagtcaaacgaagatgaagctgagggcaggtgcaatcaatgggaaaatcaggccaccctctcctattttcccatagatgcagtttcatgatcaatagttttataatctcattttgggtagcaaaatgaaaatgaatctgaagcattctttctagtttatttcacactaataaaatccaacctgaaggattttatatgttggctctatggccgttagtatttgattaaggtgtttagcctcattagtaatcaaaggaatgaaaactagaataaaaattcagtcattgtttttggtttatcaaattgataaagacttaaaatggccaccaagcattggggaggttaggagtgataggctctctccttctatctatggaatattccttggctcaccatggctggagaacaatccacatccaatagctcatcaagtctacttccaggaatgtattccagaggaatagtatggacctatgcaaaaacttgtgtacaaaattattcctcagagctttgcttattattgggaagaatgagtaaagaaataaatgcccggccaggcgcggtggctcatgcctgtaatctcagcactttgggagccaaggcgggtagatcacctgaagtcaggagttcgagaccagactggccaacatggtgaaaccccttctctactaaaaatacaaaaattagctgggcgtggtggcaggaatctgtaatcccagctactcaggaggctgaggcaggagaatctcttgaacctgggaggtggaagttgcagtgggccgagattgtgtcattgcactgcagcctgggtgacaagagcgaaacttcgtctaaaaaaaaaagaaaaaaaaaaaagaaagaaagaaatgccccgaaacaggttaataaatttaaaagtattatgccaggaagggaacagtagcagtccactatgcctagaaactaagcctagtaacttagaaaaaaaaatcttccaagtgttttaggtaagttagtattaataattctacccaaggtcaatcccctcccctccatttcctcctcttcagatattctgtgcttctgccaaataggacaacttgctatttgtgtcctgaactgaccttatacactttcttgcctctctgcctttgctcgtgctttcccactgtctcaatggctttccttaatctctgaggtctcacctcttcaagacccaattgtgtaagccaccttacataatgttattatgatgtcccccttcctcatccagccagaaggatttacttccttctctgtatgctcatagcaatttgttcattttctattcttctcacccttgtcctgtgttagagttaccgaaatatatgtatatgtgtgtgtatatattttttgtcttgttttgttcctgttagattttgaacaacttgagggcaggggccaatcttgttcagatttataccccccagagttataaagcatgctgtgaaaatgattgttgactgaataagcgagtgagtgaatgcaaaagtacacttggagccaaatgcttatattctctgcagacatggaataaacttgacaagtgctaaagatgctctttgatttttgtgtggcatgagacctcaggctgaaacttctcatctgagccattgaagggagcctctcatctctccaccgagaggggagaccagaatgctctgtttctggcaggaatctgacaccacttactccttgggtagaaactcccccaagtctgaactatgtgattgcctgagccctgcttcttgttcattaagactgctcctctgaaacggaattgatgaatttttagtggctattagaagcatttgggatccataggcatcagggtttgatgcatggccctcatctctgtgggctcctgtgcaatgattctcatctgtcttagttagaaagtgaattaatcttgaccttggcctcaggggtgtggttctctgccctcttacacatcttcaattcgcttctttatcagaagcacttgttttaggcccaggctcccccaattttaatgacatttagacatttgtctttaagttacattgctttgattttaatcaaaatctatatttctagtattatatgtttccagaaagttctcattctggattgtaatttaattacatggatcattaaagctttgaaggatgctaatgggcagaaaaaagagacttaacaaaacgaaagttattattaggaattacaaatcacttaacatttcaacatcactcgtcggatgtgggcattttgttgaaagagaccttgttttgaacagtgacagtgcagaagacctatggaagaaacaagcttccaacttgatttctattgttatgcatgcatagcaaattattaattctattctaatagggtaatagatttagaaatactattagcagaaaacttgatgtattaggcaatactacataccacattagtctaaccgctcaactgtaatttttcatccatactttcttgggatgtaaataaaattgatattatacaatgaaaataaaattgcccactagtcttgcttattctcttggtgggctgaagagttaaactgtggtgaatgctgttagataggaaggtaatgaaaacttcagttagcttaggattattcttaccagcaagcattagttaaaagttaaatttagcaagtggttacccaaatgttaaaggcatttaaactggctgggcacagtgagtggctcacgcctgtaatcctagcactttgggaggccgaggcgggtggatcatatgaagtcgggagttcaagaccagcctggacaacatggtgaaaccccgtctctactaaaaatacaaaaaattagctaggcgtggtggcaggcgcctgtaatccagctacttgggaggctgaggcaggagaatcacttgaacctgggaggcagaggttgcggtgagtcgagattgtgccactgcactccagcctgggcaacagagtgagactccctctcaaaaaaaaaagtatttgaaccattctttctgtgctgcataaggtattaataataaaacattacatgactgcatgtataattctacctaattgaattgagttttcaaattattttttgtgtgtgtcttagacagtggcgcattgaaagtactgcctgtccaaaatcaggaacagaaaagtatttcaattactcagaaagtagacatggctggaaaatcataagtaagtggttattaatgtcaagtttaaagctctcaggctcttctgtcaggccacgcagggcaaatgagatcaacaggatggtttcttgtttttttttgagacggagtcttgctcattgcccaggctggagtgagagcagcggcacggtctcggctcactgaaacctcctccgcctcctgggttcaagcaattctcctgcctcagcctcctaagcagctgggattataggcaagagccaccacgcccgactaatttttatatttttagtagagatggggtttcaccatgttggccaggctggtcttgaactcctggtctaaagtgatccacccttcttggcctctcaaagtgctgaggttataggcgtgagtcactgtgcctggcccaacagaatggtttctaataaaaatatttattaccattgcatcctaccccattcccactcagtgtgccccttacttaaatggccgccttcacccaggccactacagggagggcactgacttggaaggacagaacactcaccactacctagccttcaccctggtcatcagttgcacttgatatggctatagctggtatatttctataatgatgggaatcatagaaattgttagtattgagttgcaagtcattggtaatgttttccaaggaatgaccaagttctgtgataatatatgcacagacaggaaaaaatacaaataaatttaacagcacatataaaaatactatcaccttatactgttcattttgtgccatccaggcatgtaagggagagagaaataagataaatttgctggtgggagaagcaagcaaatagagagaagtttagaggcaaagaatttgggaggggctggtgaaaaagaaggggaaggaggaagtacaacc

SEQ ID NO: 179 - DNA, 1637 bp, Homo Sapiens
atgcgcagccctcgctctcgcacgcaactcgtggccacctagcctagaggcggctgccaagcgtcctggctgagggatggcgggaccccaggcggctggagtggagaaagttgaccgcccccgtcttttctgccccgtgggtggctactgcgtgcccccaagtaacccagaggttgagggccccccagtgcgcggcggccgggggtcaggatgcgggactcccctccaccgccatgatctcgcagtgtgggggagcgctcggggacagaaatgaggcccgagatgtgtgccttctccttgctcctgaccgctgacttcgttattccaaatacgcagccgaaaccatcgctcttgcaggtgcagcttttctctgcctctcctatgtggaaagcagcgcagcgtggactccagccaaactccctcgattggattgcagctctctggctctctgtccctgtgaccttgggcagtttacctcctctatgtctcagtttcctcagctgtgcaaaggggttactgatcctgcttaatggggtgggttgttgtgaagaggaaatgagttaacataagtagagaaagagactggtgcctggcaagcactatgtgagtgttttgatgttattattgctgtttttattagagctgtgtgtaacgggacgtttaatgagccttttcctgttaccctggaattagtgagtcagggcacaaaggtgagtacccagaggcattcagtatcccacactgtaaaggcagcacaacatggcagcacccagagcttattgttagagggctgaagagccagccctgccattctgaaccaccaccaccctaccctcaggcttacataactggacaacgggggagggatggggcgggaggaagggtaagagtttccctaagcagcttcctgggtgcagaaatagggagggtgcggtgctattactaaagccaacagggtgtagctcaaagagagttaccataatgacttcagatgcctaaaaaagagaggctggcatcttccctgattggatgtctgcttggacagtgtgagcttgctagactgcctttatacctggctttgaagaaatctagaaaactcagagacctctgggcaagggtcttcagggggcttccctgtcattgcttgtgctgtccaatgccagaccacatccactaggcaagaggctgtggagcaaacagcaatagggagtaacactgatggcaaagctagttggagttgggagtgaaggaggttgagctagagctcgtttcccatatcagaacactctatactgaagataccctgcagagcctttggaaaaacttacatgaactccccatgaaagaaggtcagtggggctgggcgcggtggctcatgcctgtaatcccaacacttcaggaggccaaggcgggcagattacgaggtcaggagttcgagaccagcctgaccaacatggtagaaccccgtctctactaaaaatacaaaaattagccaggcgtggtggcacttgcctgtaatcccatctactcaggaggctgaggcaggagaattgcttgaacccaggaggcagaggttgcagtgagccgagatcacaccactgcactccagcctgggtgacagagcgagactccgtctc

SEQ ID NO: 180 - DNA, 2839 bp, Homo Sapiens
agatcagcagcaacacctagccaacccacagcttacttacagcagacatgtgaatcaatctagccaagactaaaagaatcactaaaccaatatgtcatcctatgaataatagtaaacgtttgtcttaaactatcatattataggaaaaaaacctgatatatgaaattaccctgtgagtttatattaaagatacacttaccttctccaacaagagttgtaacaatttttttcttattgcaaacaatgctatggggatacttatagtagcatttctgctcaacgtaatattttattgtagcactgtttgcaataagaaaataattggaaactgcagaaacgatcactaatgaggtatgggttaaaaatcttttaagttgaaagcaacaaatgtgacaattaaaaggcataaattagacatatattttacattatcacaacttgtattactaaatgataaaaatgagttgcaaaataatatatagaactttatattttataaatatgcacatgaaaaaatgtttgtaagtatgcacaaactgttaacagttattacttcagaggagtgaaaaataggttgaaaatgagaatgactttcatttttagtatacttaagtacattttcaattttcaattatatgcagtgattttgtcctttaaaaaataggatggacttttttaaatataaggaagacattttctgtgaaacaataaattactcagtatatacttaatgtgcatgaagtatgaggtaggaatacatccactgacattcttgcatttgcataccacttccccaaatatgaactcacttctctgactttgctagggctgaggaatcatcattacaatatctgtaaaactggatttattaagtgcatccatattgtttatgagtcatagaaaatatgttcattttcctatccatgttaaaggctgcttggaggattgacggagcattgcttagaaaatgttctggaattcagatgaagctgtgttagtataaatcattactggttaccatatactcacacatacttaggggataaagatcagaaattacttaaatgtactttgtcttcttcaatctttccgtagcagcacatgggtcaaaatctcctgaaagttgagcaggggagctgtagaagaattcctccttttctcgcagatgaaatcttatgatatagcaggggttacctggccaagaaggtaagtctgtcatccagcagtgcttgcagagggactaaaatgaattaggatgttcagagttgtatgttaggtgctgcagaaaggaagaaaagatctcatccataaaggggtctttgaccctggggaatggcagttggcaattacgctgcttctcagttccatcctgtgttgccccaggtttacttcatggtcacccaaactttctttgccatgtcttttgtaagacttctacttattactatgtatcatcatcttttggtaaatataaattctggctaggagaactaggacagacaggggagctgtctgcacactgtgattaggcatgcatcaattcagagctccatgctgctagctcctgtattctgctgagctcccagggaggaaataggaaaagggaggagaactcacctgtccaattacaacctactctgcagtacaaagtactgcaaattccacacagtggatctctgtgattgaaggagcacttgtaaaatctgagacatcctagtttttgatttggtatccaaaacaaatctgaacttttaattaaatattgttctttttccttcttgtttccaaatgaatagttacaccagcaaacttattggctgaaaagttgtttcctacatttgcactttgaagtgcatcagacagtggtgtgtttggatgtgggtcttgttgagtttggttagtgagttattattggttgggattgcagtggtcctgccaatggaagagaagtaggtgtgccgagtactgtcatgttcacctccgcctttcacagaggcatatttagccctcagttggtaagtgaactttttgacaaaggtttaagaggtcgtagagtctgtgtaaaagacaaaagtccaaaagtgaagcagaaggaatccagcttcttatttatgtctggcatgggaagcttctggatttgatagtgggtgcaccgaaatttgcatcccaagtcatagcctttgctctgccctaccttctggtatgttgtttttcaagttacttaacctctcagggctgcaacttacttatttgaaaaatgaattctagaatcacagagttggatacaatcttaagggccaattagtcaaactttctttccagaggtattctgcatgatctgaaatgtgtctctgaactatagcttcctgaaatttcattattcttgtaggaacacagaggagaacaaagaaaattcaaggaactaaattccttctccacctcaaccaccagcattgatactccatcacttatgtactgcatcaagccgtcctcagaggtgaggaaggtgctgtcaagactagaagcatgtgtccctctctccattgcaagatgggacatagagaggagaaaagtggcagacagaagtcttaggtatgtctttatcagcagcatgaaaatggactaatacagggaccaatgattgcatctacctcatggactttttatgagaattgactgatttaataaatgtaaaagacttagaacactgcctcatctattgtaaacagtcaataaatattagtatcaattttcattgaatcctaatcagtataactataatgttacattcatgaataagacaaaggctgggacaaaataaatgagacacttcactcag

SEQ ID NO: 181 - DNA, 23424 bp, Homo Sapiens
atgggaaagatctaccttctggaagctactactacgtggtgcttggaaaggtgaggatgggggactgaccccaggaaattgctcgaaactccgcatctggtgggatttccagaaaagtcagtgggagacgggaggtttggaggccccgggttagaaaggtttgtcagtctagggaatgaggagaatcagaataaaactagggcagcaggctgtccgcctttggttgggggagggaggcctcgaaaaatcagggtcccggctctctaacctgtctttgtcgcaggtctcacgtttgtggggagggggtttaccaagccctgcgccatgcgcagtggcccccacccgtgactgcgcatctggaagcgcagtgcgccctgggtctctggcctaggacgagcaccgcccttcttattacataactgagggcatggcacgcgccttctcggcccttccttgcaaccctaccttcttgctccccagggcccatagagctggggagggtctgactgggtagcagtgaaggactgcaatccctgggagggctaactcttgtctagttactggcaggagccaagcttgaggacaaaagtggtggttttctagcctcatcttggggaagaggctacagaacatccttctgagtgccccataccacctatggcccctagggcctctctggtggagggggtggcacccttctttcactcatgtcccatctgatttttgagaggatgtttctgaaggaaaagatgtgatgattatcgggggcttggttgggaggtagttttgacagtttactccccttgtcactggcttcccctcttttccctgggtgggtttatgatctttctggactcctctgatgagctgccattttggagccatttctgctggtctccgacatggtggcgttggtttttctgtcctgctgtgccagttccgcagagtgggcggggggcgggggctatgacggaggaggggaagggggggcaaaagcacagcagaggcaggcacagtggtggctgccgcaatgaaggtggctctaggggcagagccgcctagtcccacccttggacacagtcctgggtggggattcaggtggaaggcgtctgggtaggggttcaacacctgggcccggctttgccagagcgtgggtttcccatgtcctcatcagcctggtgcttggagtagttcggaaaagctgagtgtctgaatgagagtggaggcagaggctcggcagctcatctcagacgtgtcagacccgtggtttgtgttccccaaataggctctgtctccagcagcctccctgtggggacagggaagtgaggtccatggcagctttgaggatctgttcggatggtcctgcctgcttactgtttttcttctctttctcctccatgccccctgccagtgccatggttccagctgtagtcctcttgtgaggctccccgctgcccgttccccctctctccaggcccttctgcgtgcagcggccatcttgtctttcttgctcagaaacttaaaatggtttctcataattcccagagtaaaattccttccctttagcgtgatgctcaatgctggccgtaactggccttaggtttcctgtacagtcttacctctctcagtttcttttggtggaccataggttccaacaaaaccaggcaacttccttttcctatctgttttcaccagtgatgttttccatgcctcttctcctctgcatccacctgtggcagtctcactttctccgtggacctctcctgatttccttggcaagaagcagttctcataaccacccctgccctttcagccaaacttccatacagtctgtccctttttatggtacttttgttgtgttatgattatttgtgtataagtcttatgtcacctatcagattgggagctccaggagggaggctagagaaaggagaaggaaaacaaatacctatttggtgccttctgtttgacagataccatgttatacactttccctgcagttacttcatttactcctttccacagccctgtggggagcatcccatgtctagtaagtggcctggtcatgactagagccctggtcttccaaagcctttacatttttcctctctgaattactggtgtttacaagatggctgttatgaagtagatccccaaaatttgtctatttaaggaattttgtaagtccctaatgctctgagggagtttgggtggtcaatcttgtgtccatggtctgggtccctcagctgttccttgacactgtcattaactttctcctcttcctttgtggtcaggttcactcaagatgatggcttttttcttgtagctgaaattgatggattaactgactcagttatcctggttgccttcctcgtacaagaggagggagaggtggagtgggatacagcatcttcaaagccagaataagctccagaattagagagcagggagcagagacactggacttgaacagacctaggttttcattgtgatccttcttcttagctgagtgactttagacaagtcatatgatttaagttttcagtgagatggagctactacaactgttatacagaaatgcctaatatattggcagcaaataggttcccatccctacccagtggtttatcagggacttaaaatgggagcatagcagggggctagagaagaaatgggggagacaggagctcctgtgccctaagtggtatcacagcaggggcgcagaggaggtaacctaggcgttacgcccttcaagcctgcaaggtgtactgtcccccacctgccataaatacccctttacttctgcatcaggaacatgccatggcatctgagtggtgggggctggtgacggcagagggagggtcagtgagctttcctgggagccttttgatgccaggttagtttcccttctttctgaatctcagcagtggctgcctgcttccctgacgctgctgagtcccacgggaggggagctgggcaccctgaagcccctcgttaccaattcgggggccgcggagcagagtgtgacgacagccagtgagtcgtcagtcgacggcaatggggaccctggtgacggctgctttgttgttttttttcctctttggaagatgactcagtgtatcgggagccgggagatggagctctcagcagagtggccaggatgttctgtcaacatgaaagctacaaaaacagctcggggctctgagctgatccttagcctggggtcattttcagggagggctggacagagaaggcggccaccgcccgggcatcaggatgggagcgacaccagaggactcaggagagtgcagcttgctctgtgagtgggtgacaacctcttggcgactcaggctcagctgaggatggtgccagtgtgccggagacagccgtcatactgccggatagagtggctcacttgcatgtatttggaacaaaaaaaggagatgcctggcagccccgctctctgcagtgctgttgagccaccaatttttgtggttttgtgaccacaagtgctgactgatgcgacatgaccccagtcttgtcagtgaatcatcaccaggctgcttactggaaactggatgcagcaaggaaataggatttaaccgctctctgcctcccaggtaagtccagtgtgggctgctccctccagccttcccccatcctccttccttcccacgaacaccattttccttattccgccggggaatcctcagacgtctccattcagaatctcccaaacgattgttctcttttttgcattcttctccttctggcttttctgtgtggggttagtaaccagcacagggttgggggcagaatgggcagctgaagtggtcgggctgtgcggacgtgtgggagatagctgggtagtgttgctgggtgtggcagttggcagagcatttgggcctcccacagtaatagaaactctctttggctccagcatccagcaggaggttctgggtttaacccctcggtaatcctgggagccttcctggtgcctggggattctctcccctgtgtagtctcagtggatggcctgtcttaactctagatacattttgccttgagggggcttagtctaggttggtggtctggagtttggactgggctgagcagtgagctttgggactctccctaattttggggtttctttgaatgagccactttcttcctctaggccttcattacctttgccttaaaaaacaaaatccctggtccagtaagccattgcaaagcatctctaggaagttgacaaagaaatgcttttcttctgcctcacttgctgccgatcacagtaatagcaatggtgattaaaaatgaaaaatgatgacggcctgcagaatcagggaggtcagtggcatcattgatacaattcacaaagcagactctcggtgcccacacatcactaggaagtctctctcctatcgagtagatgactacagcattcttggccagtaaagccagttggaattagccaacagcagattggtctgggctctaaagataaaaggaattatgttgggtaattttcggaggtacctatgggatcctacctctggccacacagtggtcgcctctctctgctcatatgtttcggtgggggtggggggttcctcttccccatgctgctcccgttgctatccagggaagattggccaattctgcttcctgttatttcttcttctcctctgtccatttgaggtgagtctctaggttggctgtgaacagcctgaggaacccagggctgtttggaagaatctgatgtctcttccttcaaggaccctgacaggtctcagccctccagcagtactgcagtgagggatggcagggggtgttggagtggagagatatcgacttgggtgcagctggggagactaaaaggagtgagccaagtccctcaagaagtgttggctagagtctggccagccctggctgtagggctggagccagacgtagctgctggctgtgcttgggagtctcagccctcatatgtgcagtgtgtccctgggcatggctcttcgtgatccccactcccacgaatagccctgtccttggttagattgggaaaaccagggtgggaagtaaaggggaggttggttttgctcgtggtcatgcagttatctctctggcctctgatgtttccagaattgggattggtgcttccctgctgattttcctatttttgtccctcatctggttcttttcctccttgctcaccagcctgggttctacacacatgacatggggcattgtgtgttcccaatgaggatagcagaacagttggtatctcctgagagaggggccagcatatctggcacttttttcttgacctttgaatttctgaggtctgggagtcaggaggcagcatggggcctctccatccgggatccagcagaggttaacagagttggtggctctggagctgaggtggtgtggcttggctgggagttgtgggggagaggccctgccaggggccctgattggtcagtaccttctctattccattgaatcctggtccggtcagctctgtgaattgtttaatgcatatcttggctctgtcccctggctcgagtgtccctaaggctgcagccacagctttagagaggatctgtaccttgtgctggtcactttttttgggcgtgttacctccctctgagatatgtaagagataccaccctttcccaccagccggctgtctgtgggaggccctcattttgctttgcttttctgagacttggagtgactgtgaggaaagcatggactgagtttgctttcttgctggttccttccacaagagctgctcatgggctgataaagccagagaacacctccagggccccatggcctgtgcggagcctggtaccatagtgtcaagcctacagggatggactggggacatgggggcagatagagccacgtggggaggtggtatgtgtggttagatcacaggagcaagtccaggagggtgtgggaggacaagtccagtgctcagccagggctgcctgtcatggcccaggatggatgtgtgcatctcctgtgaaggatttgcgtctgagtgcctggtactgaaggtaggatggtgccccgatcagggtctataatgaggcatgaaggtatgagatgggcatcagagttgttggtccaagggaaactgacctttttaaagggctctcctctccttatctgatttcatcctcagaacaaccatatgacatagggatcacttcccttttatagttaaagaaacagattaagtgacttaacccaaggttatgcatttggtaagtgaggttgttgagatttaaatgcatgcacttcttattccaaagcctctacgttatctttactcttttgggctgaagtcagacatttttgtgaactaagattctcagaggactgatgtgaaccagagtgaaaaggcagacacccgaaggaactttccagtcactggggacggttgtgccgcattcctttagggggaggcagggcagacccaaatgccctttggtagccatggacaggcagagctgagtaaggccagtacatggcgtctgctgctgtgtacggagcctctgctatgtgccagggactgtgccaggcgctagagatacagaacttgacaaagccaactttccactttcatggggcatacattctagtgtggagagacaccgctaataatgatttttaaaaagaatttaaaaatgtacagggtagacatatatggagattgtgtggggatgaaaagggggaccccccacacacataaggaggagaattcagatgatggtcagagggttctagagacttaggacctcagccatctgaagccacatcaattgagctttccttcagggagttaggactgacacaaactaaccccctcttttttcctaataacttgggaaatccatccaaggtccccatggcttacaggaacttgtcgtgagtcagggatcaaggtggagtagatgtcaagcctttggtctccggcagactggttctctcctgtctgccatggttgctgttggccttctgcctcacaccctcccaggcaccagctgacttctttcctcagcctggtcactgtgccccacacttgtccatgcagcacagggaaacgtgcaggttaggtctttgccgagccattggtcaaatgttcctgcaggaggctggttctgaactcagcctgtcctgccagaacgagccgttcccagagctaatcgtctcacgatagggaagggatgggcaccaggcatagagaagtgacctgtgccagatgcttggttgagctgtgtcttgagaggcggaggcaggttggtggtgctggggacagggcaggcatgtgtcatgtgttcagcgcatgtagctccagggctcgggacttgtttacttggtggaagaggcagcggacctgcggagtcaggccatgtgattgttggctctttggctgatcatggacagctgacccgccggactgcacacactgccatctgctgccaggggtctgaagttgcacagggatgaggtagtgtagttgggggtgctcagggaggaggagggtcaggaaagtggggtttgtgttgctctgtgttgagtcagccgaccctgattctggtcctagctcttgttggtaaaaactcactcactttcctcctttcagctccagtttcattatctatgaaatgaggggatggaaccagaatctctttggaggttccagctgtatcctggggcctccctgaatgttcatggagatgttccttagccagtaattcaagatgaggaaaactaggcccaggtttccacaagagaaggggagggatcttgatgacctgtctcagagcggctgaagtggtactgttggaattagggtgggtgggtgggaggaggtagtttttaaagacctcccagaagtggaagcagagggctggaggtttcgtgaaggtgttgatgaggatccaccgggtggtaggggacatggctacgcgcttcccccgggaggcttgttggagatgggtttatgtgggagctgctgggggtgcctgctgtcctgcaaggggctgacccaagggaccctgctctaggaaagatgctccgtcctgtctggccctaaaccctggagagagaatgcagctgtggtttgagggagggtctgtgccccttgctgtcaggaagttttcctttatatttagccttctcttttcatgtattttttgaggccctcgactaaaaaattaaatttaattttaaaaaataacaatgaaaaaaataaaaaataaacaaaaatatctcagagccactggttccattttggctttttagtcttgagtcactcttaaaaagatagcaaaataaaacacatgcaggaaagccgaaggtcccaggcccagccagatgggggctaggagtggctgggactctggcctagcttctccatggcagcgttagtcccagacgtacaccacttctgcaaggctgtgtgggtaggagcccctggggctgagggggcacattgtgcaatctgctaagcagaatgtagagttttaaaatagctacctttctccaagacactatctgcttgccgctttgtgggatgtttacctgggattaataatagctgagtgccaccccactgccagtatggaatagcaaacagcgatctgggctaggactcaggcaggagaggaatggagtaataaccatcgtatcagctcacatagttcttttcatacttgctggctcatttggtcctcacacaaccctgagagggtaggtggtcttatccttgtcgttggtaaaactgaacctgagagtcaatcctgccaagatctgactgcttgtagccgcttctcgtgggtctcccatctaggtcctctgacttcagctgttatttctctgggttctgactagtggggcagggacaggagtaggggagtggagtctttggcagtttccttaatttctgaaggccttagagggcctagagatgccttttctatgtgttgaatgggaaacggaacctcagcatgtccaggttctccaactctctgattcttcagacttcttggagctcttgtgagaactggcttgcactttttggctgggaagccagccactcaccatgtgttcttggagaggtttcctgtatttggaagcttctggaatatgtgatgcatcaaaccactgtgacacatctgtatggcacctcatgcctatgcacacaggcatgcttctgctgagtgcagctcacttagagatgaggcccagtgtagggtttttgaaatttttccaacacatttgtaagagatgccctgagccttgcccagcatgcatgttgtgtgtatgctacctgtttgctggctaatgtacagcgcctgctggaagccttggctaatgtacaatgtaaagtaagggactagaaacactggctttagttctgagtgtctgcttcatgattgacttgaaaaagtagggcttacccacagagagaaaggtgggtaagagaactcgtgggtgtcagttttccttaaaggcagagcataatcccccactctttataagggctggtaaggcagagtattggacagcaggacttcttggccagttagccctcttgagtgacctttgtttaaatagacccagaacttgtatgaaggaggaaataatggtttatctttatttacagcggatttagccatgatggtttaggctttttctgggggtattcctttaggacagttgaggttggacaggggcagcatgcatatgtgtctctaaatgtctgtcctttggtatttcctgaatgcatccttggctcatactgaaaccctgtgatggggaatccacagcggaattgttttagtggataaagccttctgtagcttcatgtgtgaagatttgtcatgttggatccagttcattctgtccacttgaaggatggaaaagagagtgggcagaacttgcagcaaggagagtgatttgggctagacttctgggagaactgtgcatcacctctgctgagggttcctgaggaaagatgaagcctctttatttgaggtaggagactcggtgtcctccacaggatcctcccagtcccaagtctgtggcactttgagacagtccctggaacagcatgaggtttgggtgccaggatctagagcaggcatttctctccatctttcccatctgtcttcaagacaggcccaagctggatgcaattgaggggatgcatgggcagggtacaccaatgtggtcatcgaatctggaactttgaccttgtttccctttgcagagagaacttctggcactgatcttataggaactggtgttatttgcatataaaaaaagagaaaggcatgttgtccctcatcttttccaggaaagagtgctgagctgctctaatcctatggtggggagggaggagggccgtgtagaggacgcaaggccagacatggtttgctgggaagaaggtaggaggtgggagaggaacatcccagggcaggcccacaactctgggagccacagacattgcctgctatactaaaggcaaagggatgtgttcaaataggcctactatttagcggtaacccacagtctgaaataaatcagttaatggctaaatgagagttgtattaaatatggaaaatcatattttttgtgtgtcatcaccacctacagatttagcatcaacaggcctgaaaggctgaggatgctgaaatgggccctgtccgtaagatcatgcttattttataatgactttttgtctcttttcattactatttcccactcttattccttaggtctacgtgaatatttatttatgcagttgtgttatttccttggggtacagttcttccagtgtcattggcatcaatgaatatgtgactttgatttcaagtgtaaacaaaccactggttcacggcagggacaagccatctctgagacaagggctccagcagctgcctacagatgcccttcccccaatagccctggactgtttcggccagacgcctgagacgagagtcaagggtgttcttgcagggacctgcccaacgctatgtcatgtgtcctgcctggagggtggtgctcacacatgcatcttccagccttattagctggtactgcttttcagcttgacccgaggagtggtattggaagtttgagaccgtacatcccttgctaggtgagaagggggtcagagaggtcaggcacagacagagaagggaacgcaggctcctggccactagcctctctcaagacaggtgaactttgtgttaagcgaactcatttaatattttgggcctaatagaagttatttgtattttctctcctctcttttccctcctctctctcactcaccctccccccactccccagcctccaaagaatttaatctgctggacaacaaacaatactgttataaaactttgaaaacaagagggcgcggcctccctgacaaggagaagggcatgttgggtaacggcctgagggagcgtgccaggcctgagatggagccgggcgagagcccagttggctgggtacctgggcgcctgcccctgcatagcccactagccgcgccatccccaggccagaggggaaggaaccaaaacaaaatggggggcagagaaacgcttgaaaagggaagttgcacatgttcccctctctctgatctgatgggaatgcactagactgtgaaacttcctcctccacctcttctcccgagtccctccctccctcttaccctccttcctcctctctcctccctcctttctcctccttcctcctcctgctactcactgttcttgagtctggcagacagaggtcctgatagcagaatgaggctggaatagcaccataggtgcagctaccagctgggccagccaaagaggaaggagagaaagtgggcttgcagttggctttggattcaaatctaccctctgtctggcccagcctccctccattctattagggaagtggaactacatcacgccacagggtgtgcccagtccatgtgtgtggaccaggtgtgtgcccaggtactggggagaactgccactcagagattagttcaggaagcaccctgggcttcctggtgccccccttgggctgtgctctgctctggggagagtgtttgacttgttgaaatgctctctcctttgagatgctgtgctctccctccagggaggagcagaggctgtgctgcaagaggctggggcatgtctctggaggagctcttgggaacaggaacgtgcttctcccagcgagagcagccatgccgtcttgtgagtgtggtgcctggtaggatactgcatctgttagttacttcccagtggctgaaggaagtggtcaccagctctgcctgggggaggtgggggagctgggctttggggcgtctccctccctacctccagagttaggtttcacctgagactgtggtttcacttttgactccatcttcactgagtcaagcagatgatttaggaatgaccagggagcagcattggtggtttgcctttggatctgcattggtttggacccatgaactctgtggtgggcattgtgtttgtgtaatagaccattggtatgctcatttttcctcttgcagaaagcactagctttcttgaaagcagttcagggacatgcccatccttctgtgccagagctgagcccttctactgggggaacatggagacacgcgagctccagtcttcattccactcctcctccttccctttgccctccactgtctcctgctgtccccccagctcatcccaggggcagggtaaccttggtgcatcctcccatccagccagcagtcccgacccagggcccccgtgcctggactgagtctggggtttatgtcagtagtgttaagggagggatggaaaactgaacttttaggagtgcagctgcctaggaacatagacctccatacctctgacgcaggggaaaccagaaaaaccgatgctgggtccacgtaggcttggaaggctgttactttttgccttcttacctgaataggaatttgaggggcactgtgggtttggaggatgtgattcccacactggggctcagggcctgggaaatgcagtggtccctgggttctgagtcctcctttgaaggccaccctgccagaaaggaagagcctgatggaggtttctggggactttgggccagccggtaactccatgctccctctgctccacccttggcccctcatgtgtataccattccttttatcacccttccctctgattcacagcccccaccctgacagctaaagacagaatgcccaggctgctgcctagaatgacaggaagctggactgccctttcagtttatacatgcaatggcctgggactgtctcttgagggcaagacattccccttttacaaaagagccttccccaggcccctctctcaccaagatgagctcttccttgctgccaggagccctgaaatcagcattcccagaggaaagaagatggccatctgggcttggcttccggctccccccatctggctggaacacacatcagtcacgtaagtagctgtgactcagcacccagcactgccttggcagaaccttcccacgttctggatttgcacacactgtggtagcgcagcacaagcaagcagggttaggtaactggggaccagtgtctgtttgttcagtgggtttgcctatggatttcagaaagaaggattccctcaccttcccattttcctcccatgttattttttaggtaccatgctaggctttaaagacaaagcatcatttatagaatgaagtagaagctgtctttgcagtctccaaactatttttaaccaacagcctatagatggtatttaaccctcaggtgtgtttggcctgcacgggtttttgtttttgtttgagacagggtttcactctgtagcccaggctggagtgcagtggcacgatatcagcttgctgcaacctctgcctcccgggctcgagcagttctcatgcctcagcctcctgagtagctgggactacaggtgccaccacacctggctagggttattttaatgtatctgattttgcatgcatttagacaaaatatggcctctccagttcactgtatttctgctgcatgctgttgctgcttctctgtctcaggtttcctgcccaagccctccgagcatttgaatgtgctgtgagcagcctacctcagcctcctctctttacacatgaagacactgaggcccattcagggcaagtggcaggtccctgttctcagagttggggccaagcagagagtaaagagttaaattttagaatccaggagtggggacccagactgtggcttctgttaactccctcagtggcagtggcgtcctgctatgcacagcccctctgctgtactccgaatggtcccttacgggtagcaggagagacattaaataatcacactgatgaccaagtgagataagtggtttttgaaggaaagaacttgaggctggcgaggaccacttaaccttctagcaagggctggactcagggaggctttcctgagctgcggggaggatgacaggttccctggagtggtggtgggtgggggcggggctgaggggtggtagccaagggagggtgaaggagagtattccagaagagacaacagcttaggcaggcaggacctcgccatggaggaaggtgctttctgatcactgcgggacacctgtgtgatagctcatagggagggggtactggtaactaaaagttgataaggaagagtggctaaaatgaaaagcagaaaagtgagaatctcatcaaatcccctcatttgacaggatttggactcccagtagtaactgtccttaaacactcactcctgaccttacaaccctggctgttacctggttaacaagccccaggtgttggctacaggtgtcatcactgagagcccttgtgtgcagatctgccccagctctcccacctgtgactgaggctagcaagtcccccgtgggctgtagagcctagcgctggtgtcagaatcgcttgttgcaggttcatcttcagtgtctttcccacagccacatgctggggaaagacggcaaaggcgctagaggagcaggagaacaaagcaagctgccccagaccacccggctttcgcagaacccagatgatgctcctgtctccccctaagtataacgtgttatgtagtcagtatgatcccattcagtgcagaagtatcgcctaggaatttcctgccccacccaccctgttttgttcttaatgaagttcaagaacaaaatgagatgatagtcaagttatggagcaggctgcagtggatacaagggcagaaacacagtctttggagttagacctgggatctgcattgattggttgtgtgactgcagacaagttatttagcctcattaaggatgaatttcttcgcaaaaattggaataatacctgccccatacgactgttgtgagaattaaacaccgcaacttttgatgttcaaattctatttcttctccttctagcaacacatactgttagtgccaggaaccataaaaattataaggctgtatctagaggcctgaaaggaagctaaaatatacagtgtctactctgtctcttttctcttggttatggtatcagaggaaatacacatattttcttagcttcaaaccaccaaaaaagatgatgcagtaaggagatgggaaatctaatttggaatacagtgtgcaaatcttattttcaagcagactttgaaaataaaactcaattcttacgttagaggattatctgcttaatacaattatagggtaccagtttttgaagtcacatcggggttaaataagattgcaggttcatggggtcatatttgaatgttctgatacttacatatggggtgggaaggaggaatgcatgcttttctcaagttaagacacataaaagagttgtcctggcccaggtgagactcgcctttgtgtagcagctggagcttcattccacaggcagatagggtgcttgtgtcctgatgaagtaagagaatatatctggaaacactttgtgtactgtgaaatactatacaaatgcagggcagtacaaatgtaaatattaatgtattttagtaataattttagcttttatttcatcatatataataatttgtagtgactggtgtgaagttaaatagaattaacctagaattaatgagttttgtattgctctcatctatttgaagcatcagctgtgcctttcatgttgccttgtgcagccctgtgtaacctcctctgtgcctttcccatggagcactgtgtcatatcacaagtagaactacaagaagatatttctcctcagggcagaggctgggtcttccgattgaatctcccttctttcttcattgagatcctcttcttctggaagctggtttcacatggtggcttagatttttccatctttgtatctagcaccatttgaaatcagtgttttaggagtaagaattgcagcacagccaagggtggactgcagaggaactgctgctcatggaactggctcctctcctcttgccacttgagtctgttcgagaagtccagggaagaacttgaagagcaaaatacactcttgagtttgttgggttttgggagaggtgacagtagagaagggggttgtgtttaaaataaacacagtggcttgagcaggggcagaggttgtgatgctatttctgttgactcctagcagccatcaccagcatgaatgtgttcgtagggcctttgagtgtggcgattgtcatattctgttggataacaatgtattgggtgtcgattgtcatggggcaggggagagggcagtacacctggaggaccattttgtccacatcgacaccatcagtctgctcttagaggatgccctggagtattcggcgttgattgcggggcacccgaaatcagacttgccacctggactgtcgaggtgcagaccctgggagcaccactggcccatctcttacacaggctgaccgatttctcctggtgttcagagtctgtttttgtctagcaccatttgaaatcggttatgatgtagggggaaaagcagcagcctcgaagcctcatgccaactctgggcagcagcagcctgtggtttcctggaagatggatgggcagagaatagggaaggaagatcatgcttttccctactaacttctgtaactgcatgtatgatacattattgcagaggtaagagatagtttaatggatttttaaaaacaaattactataatttatctgatgttctctagttgcattttgctgaaatgtagtgctgttctaaattctgtaaattgattgctgttgaattatctttctgttgagaagagtctattcatgcatcctgaccttaataaatactatgttcagtttatcatgtctgtgtttttcatctattatttcccattcataattctgtgatgataagaagtgggtcctgaaaaattaattggctgtgcagatcttgcctacttcataaagaatttgaagtaggttacagccagccagacattaaaaatgaagcccattaagagaagaatgaaattctatgagccaagaaataaaatgagagaaaagattagggaagagaagaaatgttgaagatcaaggctgagggatgctccctactgaatgggaaaactccttagttccacatgggctgtagacacagcccttctgccagcaactgttcctgcaaggaactggtgctcaactaaacatactgtcacatggttccttgaaggggcacagcactgatttcacttgcattataaaagattgagtggtgcttttgactattagtttatgtcaacacttcaaaacaagatgagccagtttttttttgttttttttttttgtttgtttgtttgttttagacggagtctcaccctgtcacccaggctggagtgcaatggcactgtccccgctcactgcaacctccgcctcccgggttcaagcaattctgcctcagccttccgagtagctgggattacaggcgtggcacctccacgcccagctaatttctgtattttgtagtagagacggggtttcatcatgttggccaggcttgtctcgaactgctgaccccgtgatccacccacctcagcctcccaaagtgctgggattacaggcgtgaaccacctcgcctggcccagtgagccagttttgtaaagctattcagagattagccagatttgatttgataggggatcaagcttgtaggatcttcaggaaggcgggctgtggccccttgatcaggctttttgcacaggaggtgcatgactatgaactaccctcagtagaactcttttaagccagtggcttgcaataaatgatggcaaatcagccacctaggaagccatttctaagcccaaccccctgccacagtcttcctctagatggctgccctgcccagtgggctgagagtggggggcggaagtagcatttgctgggaagacttgccagtacatatgttgcaccccctcactgcagctgcagtgctatttcaggctgttgatggaagaacccatgttctaatccccaggatgtggtgggaagaccctaagtggtggtgttagttaagaccctaagttatattgttttgttcacttcccactgagataggctacaatagtattaaatacctataggtcagacatttttggggtctgttgtactacctaccaattaaacagtttttgatccgcccaccacgctcaaagctccagcctaggtgttgcaaatacagacgacagatttttgctctcaggaggccctgattccagtcctcaaacgagtaagtgtgaaattgagtgcagcattaaagcacaaaaacaatgatttgagacgtcttttctataaaagaagtttatagcactctcattgaatgcttaaatagtgccacactgctaagtcgtgagaagcaaaatgtaactgcggtgcctcaaacaggattattttgttttattcatttggatgcggacagctctttatctaaaattgccattctgaggtggttttgcacaataaattggtaattatgtagactgtttcttccagagacagcatcttgaatcgggtttatgaagccatgctatcaacctaggtagaaaatgctttgtaggacatgggtcctgcttatctaaattttaccagattttattagctgtaaatttataagcgggtcttggtgaatagataatgaaaaaaatattgagtggggaggcttattagactgacagcaccttcaagactcatgcaagttggactggaaaatcccacctgtggaagtaaaacactgatgagtccttaataaatatggatgagacaagtcaaatatttggccaatttaggtgaaacagaaataagtctagaactggacaattatttgtgtaacatactggcccagaccttcactttgagaagctggtgtgtagtttcaggagagtacctggcagactagtgtgtccatacttcgatggagcttgagagttttccttgaacacaaaagttgtatttttgagtttattctagtatgatggtgccctaccctatcttcctattcagttcacccaaagagcctttaaattagtgttcccttggtcccatccctacagtctctggttttgctggtctgggaatgggtctggacatcactgttgttttaaagttgagagcctctcttctgtggtcttgttcctaaaacgctttactactcactgtggtctgagggcccccagcactggtgtgttagtttcctgtggctgccctaaaaaattaccacaaacatggtgtcttaaaacaacacacatttgtacagttacagattccagaagcctgcaatcagctcactggactgcaagggccacccgccctctcagaagcgccgggagagaacaggttttcttgccttcttcagctgctagagctgcgttctttggcttgcacccccttcctctgtcttccaagccagcggggcagtcttttgcttcagtggccatgttgtcttctggcacagtcacatctccccctgcctccctcttagaaggacccttgtggttacatttagggcccccacctggataatccaggataatctccctatttcaattttcttaatctcatctgtaaagacccttttgccatataaagtaacattcacaggttccaggtattaggacttggatatctttagaggccatcatacagcccaccacaaacagctccttaggcactcattagaaatgcagaacctcaggccccaaccgataccttttgaatcttctgattctaatttaagaagatcaccatgtaactcactagcacactaagacttgagaagcacgatgctatgggaacctaaccaaagaattctcaagtcccaacttaaatacaaatttacagagtatttttcctaggaacgctttcaggtggaggagattaatcagacgatagataattttcctgaacaccattctgaagtgcttctctaagcatttgttcctgaattctctctcaatgaagccacaagccccaaacaccaggattactgtttacaggggttcctgtttacagtagtttagcacagggtttgccacactgcagcatattattatagtttagttttgtaaaaagctacatgagagaggtaaatcttataaatggaggtggagtctcctaacaccagttttaccacctctgtacaggtttccctgggctatgtactatcgaatcaggaatcaggaagggcggctttttcaaatgttatctatacttttggcaatttgttcaaacgttctgctggtatgtgagagggaaggaaaaattgtttattgaccacagatccacaatattatacttctcctatacttaagcaataagggacagcatttaaaactcttttaaaaatgttaatcttggctgggcacagtggctcatgcctggatccccagtaatttggaacactgaggcaggcagattgcttgaggccaggagttcgagactagcttgggcaacatgcgagagcccgtctctacaaaaaaaaaaaaaaaatacaaaaattatccaggcatggtggtgcacacctgtagtcccagctgttggggaaagctaagttgggaggatcccttgaacccaggaggttgaggctgcagtaagctgtgattgagccactgagctccagcctgggtgacagagcgagatcctgtgtcaaaaaataattttgatttcacggaaggagaagaggactagtcttataccatatcccaaatgaaattgaaaatgtcttctgggaatcacagcaatgactcaaacttctgaatagtgactaggtttgagctggtaaggaagggattgtcaaatgccgtgacagtccacaggagggcagcagtgctccgatttacaaaggattagtcatactagtgtaaccttttctgagtgagcctagaaattctgatgaaaacagtgtagtccaggaaaaaaaaaaaaaaaatctgtatgtacaatcactcaattttgaatcatttctggaagttattagactccatgttaaatcctacttaagtacaagtatgcaaaatttaaaaatatgcagaaaagctcattcttggttaaaatgttagctgaaagacattactaagttttagaataccatagagttgactatttcccacaaaccctaaaatctacttgaacaccacaaattcatattccttctaatcccaagtcccttcagcattcttacagatttattgttagttaccttacaaagtaactaactgtccccatgtattttatcccaatttaaaaaatacattacagtctcaaggtcacataagattttccaaaatgctctattcatagtcaatataattttcaggccgggtgcggtggctcatgcctgtaatcccagcactttgggaggccaaggtgggcggatcacctgaggttgggagttcgagaccagcctgaccaacatggagaaaccccgtctctactaaaaatacaaaattagccagacgcggtggtgcatgcctgtaatcccagctactcaggaggctgagtcaggagaatcgcttgaacccagaaggtggaagctgtggtgagccgagatagtgccattgcactccagcctgggcaacaagatcgaaactccatctcaaaatatgtgtgtgtgtgtgtgtgtgtgtgtgtgtgtgtgtgtatatatatatatatatatatacacacacacacatatatatataattttcacctagtgttttattaaacagaatgcttctgtatttttatgtttatttgagacaatgcttctgtatttctaaacaacagctagccttgttcagttagccaaacaacaaaaccttaattcaagtcttcaatgaaattttctgatttaataggctgaattaagaaagccataattttcttctataaatataagcctttaacttctatctttacaagtttatatagaaaaatttactgtggggcttgagatttactaatgcatgggttttcaaccttagctgcactttggaatcatttaggacgcttggaaatccctacacccaaaccacatcccagatcaattacactagaaatctctaggggtgggacccaggtgtctgtaaatatcccccggtgattgcaatgtgcagccatggttgagaaacactgaagcctgctctgagaaatttagcaatccgacttaattcaaatctgcagagagagcaacaatgatttttgcagaaacaaccaaatcctactagttacataaattttatactttgttaggacttgggtttttatttagctctacatatgcgatcataggatgcagaagatatatcttctactggacacgtatatatagatgcttaaatgtggctatcccaaggttaggtaataataaagactataagagctgggcagaaatcaggcacagtttcatgaagggtaatatctgagctgggccttggaagatgcataggatctcaacaggacagtaggtgtttcaagcaacaatgaactaggaatacagcagaaagcacaggggaaatggtcaggcttgactgagagtaggttatttgaagaagtgcaatagaaaatgcttggggaagaaagttgggatttaattgtaaaaggtcttcaagtatcaggctaagaaatgtggacttcatccagtaggtaatgtgatgtcactggatatctgtgcagtatctatgtgatgggttgggagtggagaagcctggggatacttaagggtctgagctaggagggacaggaggaatggctgtgggagtggaatggttagaagatgggcccaattagaaacatacttcaatttgagacaaaacccactagaaataaacacatcatcatgaaacatctccaaatgtacaat

SEQ ID NO: 182 - DNA, 1470 bp, Homo Sapiens
ctcgggagcctccacccaggcgcatggctccatgaagcaagaggaggaggcagagcgcgagagatcccgtccgccccagccgcgtctgggccaggagaaaagcaaaaccatattcctgctgctgtcagttttgatgcactgagaaaacttcagagacctaagctttttccagagaagagaagctttactggtgttccagccctaagaaacttaaatcctcagtgtgacacaactcagtccttctactgcagcagctcttttataaaagcctcccaaagctccaagaaggaacaaagaatgtgacccagtaagctcacaccataagtctatattgcagaaacctttgttcaacaaaactgcagatgctctgttgaatccactggagattgtcctgatactaaggacaagtatcaaccatctttcctgtgaaaaattccctctcctagtactttagttctgtggatccaaaatttatagcattcttctaccaccacaggggtgagtatataataaaaaatgtcagttattcaagtatgtaagaaacttgaaagtcatcactcccatccttacaacaagaaaaatgctgtacaaacagactatcaacaactcattttagatccattagaggactgaggtcacagaaaaactgctgcgcccaccctaaatccccattaaattagagagatgggaaaatgcaaagaattatagcctagtggagcaaaagcccaggagcccccacaggagttagtaatggagtagaaaactttaatatgcagttgattaatttctggaagcacattgtggacaagcttgagaattaactttgaaaaatatataacatgataatactaattaaaagaaagctggattaatatattaatttccaacaaaaagacttcagagaaagaacaattatagggggatacaaaggggtattacatagtaacaaaggatttaattttccaagaaaacgtaacaatccttaatgtgtttgcatgtaacaggctgtcaaaacacatgaggtgaaaacagatagaactgcaggaacagacagataaatccactatgataattggaggtgttaacacctctctatcaataatgaatagaaccagcaggtggaaaatcagtaagggcatagttcaactgaatagcaccaaaatcagtgagtcccagtctctcttcccggaagttgattcttgagcagggacgtcaggagtagagtgatgtccaggccatatttaataacaaataaatcagagtctggacatgatatgtaggcattcgtttctttaaaaaaaaattgccccaggtgattccattgtgaatctaatgttgagaagaaatatgtgcagtcgttttctttgaattcattctgcctgagatatctagagttgttctggttgttgacatcgttttgtttagcaattcattcattcaattttgtgaattaactttcaagaaatgcct

SEQ ID NO: 183 - DNA, 3504 bp, Homo Sapiens
gatcgtacaactccgtgaatatactaaaaccccagagttgtataccctaggaaatttttttttttttggagacaaggtcttgctctgttccccaggcttgagtgcagtggcacaatcttggttcacaacaacctccccctcctgggttcaagtgattcgtgtgcctctccattagctgggactacaggcgcatgccaccacatcccattaacttcagaattttttttttttttttcagatggagtctcactctgtcacccaggatggagtacagtggcgtgatctcggctcactgcaagctccgcctcctgggttcatgccattctcctgccttagcctcccgagtagctgggactacaggcgcctgccaccacgcccggctaatttttgtatttttagtagagacagggtttcaccgcattagccaggatggtctcgatctcctgacctcgtgatccgcccgcctcagcctcccaaagtgctgggattacaggcgtgagtcactgtgcccagccaagtttagtattttttgtagagacagagtttcaccatgttggccaggctggtcttgcactcatggcctcaagtgatccacctgcctcggcctccgaaagtgctgggattacaggcgtaagccactgtgcctggccttaaatgggtaaatttcatatggtatatgaattatatttcactaaaactttaagaaaacattatacagtactgttcaaattttaagtggtccaatttaaatgcactattgtatacaattctatgtaatgtccttaccatggtatatgttaactataaatatctatgcccctacccttagtatcaaagcatatattatatgccagtgagccaagccccacatgtctgtgaaatgtggtcttctagccatagaagtagcttgtgctcctagggtattccttgaggctctgtatgaagaatgtccatttgtttgagtccctaacctacagaatattcctgaccatggaaatgtgatagataggagtaagcacatggaccaaaaggcctggaggctcatcatttaaggtacaagccaattatgtagtctttgaaagaatgctttgaaattcagcttgcttgattcaattcccaatattttcatttgtattaaaagatttggcccttacaggttaaaaacaatgtcagtgtaaccaagtgacattcaaattttggctcccaacatgtgatatgacatcacttcatgtgaaaatagcgaagctccaaacattttctttcagtcaccttattaagctcgctgagccctgacagcctaatgaaaggctaagggggaagaaaatgtcccaacttctacactgttgaagatgggctaatgagaggttagcttgcaagaatcattctttcttggcatcctgcttctgactgcttggctttcagcttatacccagcatgaaaatttaatttcctcgcagttgaaggtagtttaaagcttattactcacatgctaaaatgttgatgtatctgtttttgtgcttgttttctggatgattggaatgctctgcagtgatgttcatatcagcagtacagcgctggacttcctagtgaagaaaacagcaagattatagacacagtttagaaacaaaggaacaccatatacatttaaaggcataaagtatttactcactccctggccacagccaccgttaccttctcaatcccaacttcggatataattattgatatatttataacgagtttatgaagaatgtgaaaaaggtataaagatttcattatttactatttcatcaatcatctacttttttctagtttttgacctagtccctgagatgtaaaacaatatctctttttgaatacatcatagtctatgggtgagaaaaatattcaaaaagatagtcaaacatgatgaatacaaaagaggcctgagaaagctctgatgggagcacagaacagaggaaggctttagacaggtgaaaaaatttacctaagtcttaaaggaagaaagggaatttctaagaagtataatctctaccatgatttgcaatatgcttacaggccttatagcctcattttataattgtgagggtgcattgactctaaagactcagtgctgaaataaccctaataacagcccaactaatggtcatatctcatatatacagtcttgacaaattatttgtgaactctagtattttaaaagttatccttctttggaaaaatagcagtagcagaaataacactcttatcctaccttggccgtggatttaaacgtcatccattagcctaatacaacgttgctgaaaagccaaatttttctacactatatgcttcaaacccaagaaagtactggagctgactaataagggaagtcattagcagtacacagctgctacaaagagcctgaacaaagtaacacaaaattatcaggagaaatgttttacacagaacagatgtagcagagtttagaagcatgcagactttttttttccacaaaggagttgcctagtaattatgcatgttttccatagtatttacattaaacataatgaaaacaatgaactggttgtcttttatattcacaaagtacttccccagggagaagtacacttcttctctagaaggaggaagttactgtactcaaagaatttaaggtataaaagcaaagaatttctgtgtgttcaaagaaacagtattcaatgactctccaattgttggacactgtaaattgaagtttccataattatagtccttcccagctgtccatttaaaaaaaaaaaaaaaagccccacaggcattaattcaatccacctttctgggaaagtgtgtttaatgacagttcttaccctttccttactcttactaaactccaatatattctgttctaacatagtttataacctatggtttggaaaacactggtttaaggagctttaaggctgccctttggctcttctctaaaatgagataataaagtgtgatcacaaatcagtctacgtaagaacatgagcaatgctagccaaacttagcacgttgggacctgccttttgaaactgccttataagctctgagccatgctcttttgaagagtttcaagggcagacaacttttgaaaatggatttgaaacaagttagtcttttgttttcgggttttgaaggtcacacctttggcatgtacttctttagggttgagttgttcaggtatcttatgctgagagattttggcttttagtaccttagtctgagatttactttgtttattgatttttttttcctgttgtatagatctgaccaccctagctatggactgaagttggagcctcttttctaatataatgcaattgaccaagactgcttgggagcagctgtcagtattgtttaaagctgtcattcaatatggccaaactctttgttatctaaaaccccttgtctgatctgttgcctctgtttcacttttccaattagatgaatgacagaaacaaaaaatcgtaataaatattgtca

SEQ ID NO: 184 - DNA, 11580 bp, Homo Sapiens
ctctacccgcctctgctggaaaacaggccgcagaatataggtgttctcgggctcccctgcgttcttctcagcctcaggcaccccgtcgcccaccgagaaggacactccgatggacgtggccatgccggggcttctcggtccgggcgtagctcgcgatgaaggcctagcgggttgcggtcgcggccggcagcagggaaagcgtctccagggcaacagggccgccctcccgcctcgctgaagcccgcgagcgccccgcacagccgccctccctgcccgcgcctgcgcaccggctgctgggcgggaactggtcgcgtccggacgcgcgacagcttccacccgcctcaggcagtatcagccgcgccgcagtcggaggaaatagacgcggggcctgaggctcctggacttgagaaaggattcaagacagccgatgatgaaaacacccatgcttgcaagtgaaggttctgcctgtcacttctcgcagaggctgcagaaaaggcccaggaggctgttgatgacatgaacgaccaccaggagaagctggagcaggctgatgcacagaagggcggagaagagggacacgtgccagacaacagctgcagagggctccaggcagacggagttccagagcgaacggtcatacagataattcctatcccaaaaaataaggagaccaggggtcaggcgataagtaaggaaagccaaacaggcaaccccagtagaaaactggggtctcccctgaccgggtcatgggactgggctcatgagggtgaccgttactgctccatttgcaattttctgagtatcagaggagcaagatgctaggatgtgtgacccaaaggagcttgtagttcgtctgtgtgtctttttgtctctctctctctctctgtctgaaaagaccaagcccaagcctccacccatttacctactatgcaggtctttgaatgggtaaccatatttccaagcttgtgtctgattgaaggatgaaacatcaaacatgcaaaaaggaccatctttcagagcaactccagaagtgacaaagcaaatcagggctccaagtaaagccaggccacctgacaacagagcaccattcagcctctgagctaaagaagaagctaccacaggcccaccactgactcttctaaggaaaagctgcattttcaaaagttccaggttcccaactctgattcttctctatttcaaatcaaggataaaaaaaaggaagggagggaaggaaggaaagaaagaagcaggaaagaagggaaggagagaagtgggagggagggaaagaagggagagaaacagcgagagagaagctgcagccaagctctgaaatgactccacttctgtcgctgtgtttctccagctgagagctttcttggccatcagtctgtgctcccactgccctcccagaaaataactgggtttccttccttgacaggtttctagcctgcttctacattggcttctttctcgttccttccttccttcccttccttccttctttctctctctctctttctttttgagacagagtctcactctgtcgcccaggctggagtgcagtggcacgatctcagctcactgcaacctctgcctctgagttcaagcgattctcctgcctcagcctcccaagtagctgggactacaagcatgcgccaccacacccagctaatttttgtatttttagtagaaatggggtttcactgtgttggtcatgccggtctcaatctcctgaccttgtgatccacctgcttcagcctcccaaagtgctgggattacaggcatgagccaccgtgcccggcccatattggattctttcttagggttctagatttttttctccctcccccaaaaatgcctattttaaaaatgtgaataacacctacatagcgtttttctgcagagtcatggagtcattctcccactgaggtcaagctggtttggagttggggagggatcagacaaaggtgcatagtaagttttgactctgagttaaaggagtcaagatgaatcagtaagcctagggcagtggttcccaaaatggggtccctgcccagccgcatcacatcacctgagaacctgttagaaatgcaaaacttccccgccatcctgaatcagaaactctggggagggagcccagcaatccgtgttccggcaaaagccctccaggtgattctcatgcacattcaagtgtcagaactacgtgccacggggaaaaccagaatgagaacagacagtgaatgaaatgtgcaagtgtttatttatttatctatgtacttatttatttatttattttgaaacggagtctcgctctgtcgcccaggctggagtgcagtggcgccatctcggctcactgcaagctccgcctcccgggttcaagagattttcctgcctcagcctcctgagttgctgggattacaggcgcccaccaccacgcccagctaatttttgtatttttggtagagacggggtttcaccatgttggccaggctggtctcaaactcctgacctcaggtgatccgcccatcttggcctcccaaagtgctgggattacaggcgtgagccaccgcgcctggcctatatttgattttttaacatgtaactgagtcagtgggcttcccaacatgtgggctgcagatatcagagcaggctgtggagttaccataaggccacagattcatgtctgagaacgagtgtgtgtgtgtgtgtgtgtgtgtgtttgttacacacacatatactgagatctttcaagtttatacagttgctgctgtaattaataaggtagaaatttattctgggcctcagtttatctgtaaaatggaggggttagattagaatctagtgattagatgatctctggaaaactttcctgttctaagaaaatattagttaaaataactaggaaaatttccatcaatgacacatgattacagtgtcataactcatgtccatattgtccaacaccctaagagagtaacagtttctcacactggtacagacgtctgggtcctcacactggtacagacgtctgggcttcactaagcactactcccttgacttgatcagctcccattttacagatgaaagcctgaaactggaaagatgaagcaacttgcccaagaacttagcgttactgagggtcacagtgaggacctgacttcaggccccaagaccaaaattgcctctttaccgccctgcctctagagtaatagaggtggagacattctgggtgttagaagagtggaatctggtgcttacgcttcgacagagcccactcttactgaagcagccgtatctccagcccatcaaggagatgaggatagctgcagtgagtacctgcaggagagagaagaatgttgagatggggaaatcgactttgccggctgtttctaggtgctgcccacagctgttagagtggctggcagctcacatgaacgcagtcctgttgactctgactctggggacccacatttgtatgacgagcctgatctaacgctgtggatgttaactttcacacccgacctgcctggtcccaagctaggcttcctgtctcttagagcttctacagacccaagatcagcttgttagaataaacttttctgcaaggaatcaaaacactcttcccatgccaccttcctgctccccgccggggtctctttgagagttcacgttcagggaaccccggacacttaccatgaggcctcctccccagagcccagttcccagcatggcatgcctgccaaggaggcccctcaacaggtaggtgacatcccagttaggaaggaggagtgccacgttggccccagcagcaaacagggctgcagtcccaaggctcagtcccaggatacgggagcaagtccgtgagcttgcctgcgtgcagggagaggacaccatcctggaacagatagaaagggagtcgcagcagctctgctgtggggggatggggaagggaactccagcagcatatcatgggtgagggaaacagactacagaaaccgccaccttccagggtcagaccaatgagagccaagcaacctgcttaaaaactctgctccttaggaatcttccccagtgactaggatttaattgtttccttttctgctaacccctgttcacacatacatagtttgcattccatcatattttgtttatgcctctattacagccagtgattatttctgacaaaaagaaatgtttaaaggtgtcttcatgatgtccattgtctccacttctattcaacgttgtactggtcctggccagtgcaatacgaaaataaaaggaagcaaaagccacacagataggaaagaaagaagtaatattgtcggccaggcatggtggctcaggcctgtaatcccagcactttgggaggctgaggcaggcggatcacgaggtcaggagttcaagaccagcctggccaacatggtgaaaccccgtctctactaaaaatacaaaaattagctgggcacggtggtgggtgcctgtaatcccagctactggggagactgaggcaggagaattgcttgaacccgggaggcagaggttgcagtgagctgagatcatgccactgcactccagcctgggtgacacagcaagactccatcttaaaaaaaaaaaaaagtaacattgttattattcacagataatgtgatcacattatgtagaaaatcctaaagtttattagaattaacaggtgagtttagcaacgtcatagaataaaagattaatatacaaaaattatattgtatttctatatacaagcaatgacaaattgaggattgaaattaaaatatatcatttacaatagcataaaaatataatacatatggatgaatttaacaaaatatttgcaagacctatatagtaagaattgcaaagcattgctgagaaaattaatggagacctaaataaatggagacatataccatgttcctgaaccagaagactcaaaatagttaacatgttctccctaaattgatgcaaagatttaaagcaatatcagtcaaaatcctaggagagttttgttatagaaattgacaaactgaatctaaatttatatggaaatgcaaagcaattgtgaagattagccaaagcaattctgaaaaacaaacaaagctggagaacttacgccatgtgatttcaagacttacaaagctacagtaattgaagacactgaagccacgcgtaaggaaacacatatggactactggaacaggctggagctcagaaacagacccggtccaggaaaaatgattttttttttttcttgagacggagtctcgctctgttgctcaggctggagtgcagtggcgcgatctcagctcactgcaacctctgcctcccaggttcaagcgattctcctgcctcagcctcccaagtagctgggattacaggtgcccgccaccatgcccggtaattttttgtatttttagtagagacggggtttcaccgtgttagccaggacggtcttgatctcctgacctcgtgatccgcctgtctcgggctcccaaagtgctgggattacaggcatgagccaccgcgcccggccaataaatgattttttaagaagatgacaattcagcgggaaaaagtctcttccacaaatggtgccggaacaatgcacatgcaaaacaaaactgccttcactattacttcacaacatattcaaaaattcacttgaaatggagcatgggtctaaaagctttataaaatttctagaataaaacaaaggagaaaaacactgggaccttgggttagataaaggtttcttactaaaatgcaaaaagtacaatccacaaaacatgattaatcagactgcttaaaaatttaaatgtcagctgggtgcttgcctataatcccagctactcggaggttgaggcaggaaaatcgcttgaacccaggaggcagaggctgcagtgagctgagatcgcgccactgcacttcagcctgggcgacaagagcaagcgactccatctaaaaaaaaaaaatcatgctaaaagaaataagccagacactaaaggacaaatattgtatgattccacttatatgaaatattcaaaataacaactttatagagaaagaaagtagactggaggttatcagggactgtggggagggaggagagaatggggagttattgtttaatggttacagaggttttcaggttttgttttgtgttgttttgttttttttttttgagacagagtcttgctctgtcagccaggctggagtgcagtggcgcaatctcagctcactgcaacctctgcctcctgggctcaagcaattctcctgcctcagcctcccaagtagctgggactacaggcatgtgccaccacgcctggctaatttttgtatttttagtagagacagggtttcactatgttggccaggctggtcttgaactcctgacctcaggtgatctgcccgcctcggcctcccaccgcgcgcggtggttttggggtttttttagagatgcagtctcactatgttaccccagctggtcttcaactcctggactcaaatgatcctccagcccgtgcctccagagtagctatgaccagatctgggccactgcccacggtttaagggttacagactttctgtttggggtgaagaaaagttttggaaatagataatggtaatggttgcacatcattgcaaatgtaattaatgtcactgaattatacactttaaaatggttaaaatgacaaatctgatgttactttaccacaataaaaaatcaattaaaaaatttgtgattactcaaatccttatcagtaatcaataggtgaatcaagacaaattgtgttatccatacaaatgagttctattaggtaataaaatgcgtaaatttctgctacatataacatggatgaatctcaaaagcattgtgttaagtggaagaagccagaaacaaaagactactcacatgtttctatatatacgaaattctagaaaaggcaaaacttttaacggagagcagatgagcggttgccatgggctgagaatgggaaagaggattagtatggggcatgggaagctttctgaaggggtggaagcattctgtgtctagattctggtggtgaatacataactgtacatattgacaaaactcattaaactttgcacttaaaataggtgaattttattgaattttaactatatatcaataaagctaattacaattaaaatgtcatatctagataaattataaaatgcctcttccactccttatgttcctctcttttatattttcattgatatgtgaacttcttgttttttagaaaaatatgaattaaggccgggcacggtgacttacacctgtaatcccagcactttgggaggccaaggcaggtggatcgcctgatgtcaggagtttgagataagcctggtcaacatggtgaaaccgtgtctctattaaaaaatacaaaaaaattgctggacgtggtggcaggcacctgtaatcccagctactcgggtggctgaggcagcagaatcgcttgagcccaggaggcagaagttgcagtgagcagagatcgtgccattgcactccagcccaggaaacaagagtgaagctctatctaaaaaaaaaatatatatatatacatatatatatgaattaaaataggactagtaatatttgggcagactcatgtcaatgtggatctgaaaaaagtcagcgtcatgacatccccaggaagtggcctgttcccactgtgcagttcagttacacgtctgtctccccttaaggctcgctatttatttatttatttaatttatttatttattttttattgaaaaaaatttatttttagccgggtgcagtggctcacgcctgtaatcccagcactttgggaggccaaagccggcagatcacctgaggtcaggagttcaagaccagcctggccatcatgacgaaaccccatctctactaaaaatacaaaactagccgggcgtggtggcgcatgcctgtaatcccagctactcggaaggctgaggcaggagaatcacttgaacccgggaggtggaggttgcagtgagccgagattacgccactgcactccagcctggacaacaagagtgaaactccgtctcagaagaaaaaaaaatgtaatagaggtgaggtctccttatgtggcccaggctggtctcaaactccttggctcaagggccctcccacttcagacacctaaagtgctaggatgacaggcgtgagccactgcacttggccacttgaggctcttgacacgcctataacacactgctttgcacctaatcagaaaatatgtgtatagaggccaggcacggtggctcacgcctgtaaccccagcactttgggaggctgaggtgggtggatcacgaggtcaggagtttccgaccaacctggccaacatggtgaaaccccgtctctactaaaaatacaaaaaaattagctgggcatggtggcgggtgcctgtggtcccagctactcgggaggctgaggcagtagaatggcgtgaacctggggggctgagatcacgccagtgcactccagcctgggcaagagagtgagattcggtctcaaaaaaaaaaaattaactgcgtggtggtgtgcgcctgtaatccaagctactcaggagcttgaggcaggagaatcgcttgagcccgagaggcagaggtggcagtgagcccagatcacgccactgcactccagcctgggtgacagagcaaaagagagagagagagaggagggagagagggagggagggagggaggaaggaagaaaggaaaggaaggaaggaaagaggaaggggaaggggaagggaagaaaaaaaatatatatatatataaaagatatggatcagaggctctatatatatgcacacacacatatatatcatatacatataatgtataatgtgcgtatatatgtgtgtacgtacacacacacacacacacaatagtcccccatatctgcaggggatatgttccaagagctccagcggatacctgaaaccacagatcataccaaactctgtatattcagatgcttctccacttatgatggggtcgaactcctataaacccgttgtaagtcaaaatatcctaagttcaaaaggcatttaatgctggcaacacagtagactgtccctgactcacaatggttcaacttacaattttttttttttttttttttttgagacagggtcttgctctgtcacccaggctggagtgcagtagcacaatcattgttcactgcagccctgatctgggctcaagtgatcctcccacctcagtctctcggatagctgagaccgcaggcatgcgccaccatacctggctaatgttttagttctatagagacagggtctcactatgttgcccaagctgatctcaaactcctggcctcaagtgatcctctcacctccacctcccaaaatgttgggattacaggcgtaagccaccacgcccagtcccaatttacttttgactttgtgatggtgcaaaagcaatgagtattcagtagaaaccgtaatcccatcataaagggtaaggagttcactgatgatggagttaggtccctagaaacctgtcgtaaagttggaaacttagaagtcaaaccactataagtagaggactgtctgtactatgctttttcctatacatacatatctgtaataaagtttaatttataaatcaggcatagtaagaagttcgcaacaataataataaaatagaacagttataacaacatactgtaatgaaagttatgtgaatgtggtctttctcattgaaaatattttatgtaagttttttgaactgcagttgaccacagatagctaaaactttggaaagcaaagcttcagttaaggggggattactttacatcacacataaataatgaaatatttcacagcatgaagaattaaacattgggggagggccagggctgaaaaactatctgtaggtaccgcgctcactacctgagtgacgggaatcactcataccctaacctcaacatcacacaatagacacggaacaagcctgtatatgtatccccggatctaaaataaaagttgaaattatatttttaaaatttgcattaaaggccaggtgcagtagttcacgcctataatcccagcactgtgggaggccgaggcgggtggatcacttgaggtcaggagttcaagacagcctggccaacctggcgaaacctcatctctactaaaaatacaaaacttagctgggaatggtggtgtgcgcctgtaatcccagctactcaggaggctgaggcagaagaatcacttgaacctgggaggcagaggttgcagtgagccaagatcgcaccactgcactccagcctggaccacagatcgagactccgtctcaaaaaaaaaaaattgcattaaaaaagaattaaacataatgtgtaaaatatatttgtaacttgtgtgagataattaacacccatgtaaacacaaccaatatcaaacatacgtcattacccatcacatcactgacactcaggtgtgccctctccaatcctgccttctttctggattccttcctaggaactactatcctatatttcatcttcaacatatccttttaaaaacagttttacgacttaggaactcagaattgttttagaaacttgtttagtcgggtgttttccatttttcaagactgtagcttttcttttctttttctttttttttttgagatggagtcttgctctgtctcccaggctggagctcagaaacagacccggtccaggataaataatttttttttttcttgagacagagtctcactctgtcgctcaggctggagtgcagtggcgcgatctcagctcactgcaacctccgcctccccggttcaagcgattgttctgcctcagactccccagtagctgggactacagctgcacaccaccatgcccggctaatttttgtatttttagtaaagacagggtttcaccatgttggccaggctggtcttgaactcctggtctcaagtgatcctcctgcctcggtttcccaaagtgctggaattacaggtgtgagccaccaaacccggccagactgtagcttatggtaaagaagacaaggggaggggtgccctgggagggtgggggtaggagagaggaagggtgccctgagaaggtgggggttaggagaagggaggggtgcactgggagggtgggtgtaggagagggaagggtgccctgagaaggtgggggttaggagaagggaggggtgcactgggagggtgggtgtaggagagggaagggtgccctgagaaggtgggggttaggagaagggaggggtgcactgggagggtgggtgtaggagagggaagggatgccctgagaaggtgggggttaggagaagggaggggtgcactgggagggtgggggtaggagagggaagggatgccctgagaaggtgggggttggagaggggaggggtgctctgggagggtgggggtaggagaggggagaggtgccctgggagggtggccagaggacaggggaggagtgcacagggagagtgggggtaggagaggggagggatgcacggggagggtggaggtagcagaggg

SEQ ID NO: 185 - DNA, 10304 bp, Homo Sapiens
agtcctggtgcccgccttggcctagccccggccccgggacggaagggggcctctggggtggcagcctgggcccagtagagctttgcatctcttggatatctttcccgggcgcagaagctgcggggcttagggagtcgccattgcgctggaaagtcctcccgcccacggagaccccagcaaactccgagtgtcacacagtcgcctctggcgacccgtgcgggccggagccgttcgcgcacaggcagggcgggtgctgagcgtggaaacggggctggaattggccgagccatgcctttccgggatgcccaccgccagtcaaagggttgggggtggtctctgcaccttaagtactaacctgccgcccacgcgcctcctgaccacagcaccccgtcggctttctaattctgtgagctgccctcgtgggcgtggcctccctgtggagctccccatgtgcctccccttggtccagcctgcagctaggaagtgggtcacagcgacggggctgggctgggccaggccaggctccgggagatgtggaattggcgaaacaactgccccagtagtatcctccgcctaggactccaagaggtggcgaattggggcactacgcccgggtaaggcagtgcctgttcagggctgccgacctgtctccccagggctgtcattctcagcaagtactttaggagtgccttagatcggcacattctcccattgaaatatttttgttagtggagacaagggaggtaatggcaaggacacggatcatcacagcccctagggatttgttgaatgacctttggcaaatcacttcccttctctgggcctgtagttcttggctgaatatgagggaatggatttcaaattatgctccatgtaatacccgtgtttttacctctgtaaacagatttttttgttttttttgagacggagttgcactccagcctgggcgcatggtggctcatgcctataatcccagcactttgggaggctgaggcagtcagatcacttgaggtcaggagttcaagaacagcctgaccaacatggtgaaaccccatctctactaaaaatagaaaaagttagccaggcgtggtggcaggcgcctgtaatcccagctactcaggaggctgaggcataagaatccttgaacccaggaggcggaggttgcagtgagctgagattgcaccattgcactccagcctgggcaacaatagcgaaactccgtctcaaaacaaacaaacaaacaaaacaaaaaaacttaatgaatacagtccctcctaagattttcaaataaatgaaataccacattaatcatattgttttatttttatcattacattaaaaatcaaatagtatcactaggtttataatgaaaaacagcagaccctgtcccagccctccacactctcagtttctactccctagatataatctctattcacccagctacctcttctggtatttatctccgtatttctaaatagcatgcttatactactaattcttaatttttcagtttgggccattattttactttttctataggaaataagatatgtgtttatactctgaagactggtaatacacacatgtatttctccatcttccatccttcagtttatctatatcaccctatataggtagagtactattcattatactattataaaggtatgtaattgatccagttagcataatatgattatatttcctttattttgattgaagttaactattgcctctttctccatgcaactttcttaagtacctagcattcaagtgtctataatcaatttattccaaactgtcctttcaaaacattgaaacacatcaagtagtctatcaatcagtttattttttaaattggagacaactctctaggagcccatcatcctccttcactgtggactagtttttctctaagcctactgcacagcttttgtcctgaaataattttatcctttctaccctgttttccacttctttttgtttttctgaaagatttccaccttccagcttttcttttgaattttaaaatttctgttatgttttaaatttgccagaatactttcttgtcaacctctcttttaattaaaaatattttttatttttgtaatttaaaggtttattgtaaattgacaagtacaaattggatatatttatggggtacaaagtgatgttatatgtatacaatgtggaaagattaaatcaagctaattaacatatccatcactacaaatacttctttgtggtgagaatacttgacatttaccttcagcaattttgaaatatacagtacattattattaaccatgctatactctttatctcaaaaaatgtattccctttatctaactgaaacttcgtactctaaccaacatctccttgtttcccctaccaccccttccccctactctctgataaccatcattctactctgattctgtgagtttgttttagattctacattaggaatcatgtgactttgtctgtctgtgcctggcttattccattcagcataacgtcctccagggaagcactttcttgtccacccccttcccctttttaaatagcagtctgttccatttggtggatgcagtatcttattactctaagaatattgctaatgttttcttttgtttcttgaattgtctgtgttgaatttttaaggcttgtttctgttttgtgttggaagcttttcttaaacgtctagagatccttggccatccattcatatgtaagagtggggcactagaaagccaatagaaagttctgtgtacactggccagtgaggtggctcacacctgtaaccccagcactttggaaggccaaggcaggcagatcacttgaggtcaggagttcaagaccagccttgccaacatggtgaaaccccatctctactaaaaatacaaaaattagccgggctggtggcgcacgcctgtaatccttgctacttgggaggctgaggcttgagaatctcttgaacccgggaggcagaggttgcagtgagctctccagcctaggcaacagaccaaaactctgtctcaaaaaaaaaaaaagttctgtgtacatacttaggacttgtaattggtaggacatactgcagtatttttcaaacttctggtcgcaaacccattagtagtttgtgaaatcaatataatcagttttatttcccccaaatgacagaacagaatagaaaacaccacctcagaatacatctacatagaaagagaattattttatgaaactttggtttcttacacatatcatatatacatattatgtactggtttgatcccataaaatgggagttttttttttttattgtgggtgtttcttcaaagaaatttgaaaaagtacaacttaggataatcaaagagatctccaactgtcaggacaggtaggtcttttctcttagagaggttaagttccggcccagtgcggtggctcatgcctgtaatcccagcactttgggaggctgaggcgggcagatcatgaggtcgggagattgagaccatcctggctaacatggtgaaacctcatctcttctaagaatacaaaaaataagtcaggcatggtggcacgcgcctgtaatcccagctactcgggaggctgaggcaggagaatcatttgaactcgggaggcggagattgccactgcactccagcctgggcgacagagcaagactccgtctcaaaaaaaaaaaaaaaaaaacggagataagttctcctggagtaaaattctctaaacttttgcctgcatgctagtctgatagacagtactcattcattcaggtattggttgaggacttactatgtgccaaacactgttccaggttctgggtatacatcagacaaaactgtctcctgggactagattctagtgagggagataaacagtgggttatatagtatttagatcttgcgctaggtaacacagcaacagaagggaaagctgaacatatgcatatagatgctggtaagagggtggatgtggtggatgaatgaagtagaaaacaaggtcatcatctgagagtgaaaatggggaggaagtgttggaagaaaagagaaggtgtgaaataatttaggacacagcacagcaaactatagcctttggtcaaatcctattttggtgcaatccacaagctaaggatacttttttacttttaaacggttgggaaaaaaatttaagatgatattacatcatagcatgtaacaaataaatgcaattcaaatttcatttatttacatattgcctctggctactttcatgctacagtgacaaagctgaataattgcaaaagagactatgacctgctatgccaaaaatatttatctggccctttacagaaaaagttggctgactcctgatctaggaggatgggaaggtatatagagtagggaaatatgattatcaggcagcattaaggcctgaaggttatggacatgaatttaaagtaagactaaacagcatagttgctgcacagaagtaggtacaaaggcaaagagctggctttaaagttgtgattttgcaaactgaaaatgacaaaaaggggtagactaagttaaaagtacatgcaagttgcatgattataatgagtgatcctgggatttaagttgattatgacaggaacagaaggaacttggagattagggacaatgaaaaggtggtagtgaaaggagtgttggagttaagttactagatgtctggaagacagactgtggtggtcagataatgagatagattatggaggggttacagtttttggtaataacgagagagatctaaggtatgactgagagtgaatggatgagaatagcagagaacaaggtcagtggaaaactactcttcaaagaacctatagtcagggtgttgaaagattaaaaattgctaagaattaaatcaggagtagtgctgcgggaaatgaaatgagcagtgaactaaacttactgagaaatgagaggggatgacccaggggtttgtagattttgtagatgatagcaatgaagagaagagatattatttgatggtatggaactcaaagctgagagttttaagggaagataggagacgtgtctagaagtagtaatgaggagcaagaacatcatctaccccatctccaggaccagtaataggaggactgtgggagaaaaaaatcaccttgagagggctgtagtgaaagcagtatcctaaggtagcagccaagtttcagactgctgggatccaagccagggaaaggtttctgactctttagaatgctgagctttaggctgggcacagtggctcacgcctgtaatcccagcactctgggaggccaaggtgggcagatcacttgagtccaggagttcaagaccagcccaggcaacatggtgaaatcccatctctacacaaaatacaaaaattacccaggtttggtggttcatgcctgtagtcccagctactcaagagactgaggtggagaatcacttgagcccaggaggttgaggcagcagcaagccatgatcacaccactgtactccagcctgggcaacagagtgagaccctgtctcaaaaaaacaaacagaatgctgagttttaaatccctatattcagtaggatgtctcccctcagctcccagttgttgttggtggcttcaactagttcatcttccccaggagataatgaatgaacaaatgaatgaatgaatgaatgagtttataaggggcgaggatctcaggacttcatagtctttcaagtaatcatcttgtttttagccctctacctactacctcttgcttttcagataactgatgcctccaattcctaagccttttctggggttctgtggtacaaacatgcttgcttattgctagtaacactccaccagcccctgccccagacttctgctttctctggtctactcagtttgttccttgttttttgctttccggattcaaagattttgttgacattgcctggatgctgccatcttttgtctcatattctttgtccttaatcatttaacattcctttactgtcattttaatggcatttcaggaggaagccatgtttctagtccaccgttcttttttgttgtttttgagacagagtcttactctgtcacccaggctggagtgcagtagcatgacctcagctcactgcaacctctgcctcccgggttcaagcgatcctcccacctcagcctcccgagtagctgggaccacaggcatgcgccactacaactggctaatttttgtatttgtaagtagagatgaggtttctccatgttggccaggcttgtcttgaattcctggcctcaagtgatccacccacctcagccttctaaagtgctgggattacaggcatgagccaccacaccgggccaatccactgttttttaaaaagttgtcaagagttttgttaaggggtcagacatgtctgactggttgacttttcccagaatgctgcttagtccctcaaacacacaaattcctgatgggtccacccactaggcttctggtatacacagacagatctgaatcccagtggtggaaacaacctaggctgattctgagtttcccactgcatttcttcttctaattgtccctcttttccattcctgtcctttccctcatcccttacctgctgaaaatgaatcttaccatttctaaaattccactcttccgggggcatccacagctggatcctcttcttcactgccattcctcaggccttagaacaggtccccttcttacacccttgtgctccaactggtctttatgaaacctgttcacttcaatatacttttaggccaggctcacgcctgtaatcccagcaccttgagaagctgaggccggtgcatcacttgaggtcaggagttcgagaccagcctggccaacatggtgaaaccctatctctactaaaaatacaaatatatatacatatgccaggcatggtggcatgtgcctgtagtcccagctactcaggaggcagaggcacgagaatcacttgaatccaggaggcggaggtcgcagtgagccgagattgtgccactgcactccagcttgggcaacagagcaagactccgtctccaaaatatatcttatctatatatagatatagataggtatatatagatctatatatagatatatactttcaattctccaattgttcccgtataccatagagaaactcttatgagctcagtttctgcaggacttacaaaacagggtaattgcctcctcattatggtcagctccagcaccattcaaattctctgtccttacccatttccagaacaagcaggatgaaaatcacttatcactatagcacccacccttaagcacaaggttatccaatgttttcaaggagtccagcatttcataacagaaccccctgattagtttgctaactgatgaaagcagagttaaattcctgttatgcaggtttagagtacaggagattctatgtccccatatcctctgccccccaatctatcccttggcaaacacaagtacctctactagaataaccatactccctcttcccaacccacttctcttgtttaagggcactggcagtgtttgtgtatgtcaacaacatcggagtatctggggtccctggagagttagattttctgtattaattacagactgggagattactctggctccagtaaaagcaataccaggattgaagtcccctctctgattatggtggctgggatttgctggaagaggcataggtccagaaaagaatgtaaaaaaggtactagaaagaaagaataaggcctatagccatcaggctgctagaacctttggacaagtcactatctaaaagcaggtaaagacccagctttttgtccatctggtcaggcacctggtggcgtgagtctttcagaacatactggtcaggcggtggctcacgcctgtaatctcagcactttgggaggctgaggcaggaggatcacttgaggtaaggagttggagaccagcctggccaacatggtgaaaccctgtctctactaaaaatacaaaaattagccaggtgtggtggcgggcatatgtagtcccagctacttgggaggctgaggcaagagaatcgcttgaacccaggagtcggcagttgcagtgagccgagatcacaccactgcactccagtctggatggtaaagtgagaacccatctcaaaaaaaaaaaggaacataccacaacccttcaataaaaaggtctctgagaaaacagttgtcacaatgtccatgtacttgtacttgacaccatgtgagaaacagcctccagtaggtcactggccagacaggtgagtatgaaataggacaacactgtattatagctcaggatgcattgataatagaagtttgaagcagcagctgacagacgagtctaagcaataacacacagactagtttgtctctgctcttgagaacagcagcctgcaacccttcaaacaagccataatgtgtgagtcaacaagaagctacatttgattgacaatgccattttaataaagatgttctagagtcaaagaatttggcgtgagaaattgtgcccaggctggggtgcagtggtgtgatcatagctcactgcagcctctgagctcctgggctcaagggatccccctgccttagcctctgaagtagctgggactacaggcatgcaccactgtgcccagctaatttttaatttttttgtaaagatagggtctcattatgtttcccaggctggtctcgaactcctggcttcaagtgatcctcccaccttggactccgaaagtgctgggatgtgctcaatattaaatgtcatgaagatactgttaaaataataattgtgctcaatagttgtatctttatactattctgagccttaggtttcttttctgtaaaactgaacaatactaccttctttgcaggggatagcatagtccctggtttacagtaaatgctttcctccaattgaatcaagatatacctctctgctacctccccatctattagaaatgcttgccttctggtaccagaaaaaaaaaaaaaacaccttccacatgacaactctgaagacaataatcacactaccattgtgtttttctggatgtgccacacattgtatacatgtccctgccttacaaatgacatctcctatacacagagtccttaatatttctacatgcaatgtataatcaattaaaacatcagtatcatcttaatgtgaatttctgttaatccaagttctcccccactatgcaagtgcaataaatatttaaaaatgaaggtaacaatatatatatatatttttttgagacagagtctcgctctgttgtccaggctggagtgcagtggcgtgatcgcggctcactgcaagctccacctcccgagttcatgccattctcctgcatcagcctcctgagtagctgggactacaggtgcccaccaccactcccagctaattttttgtatttttagtagagacagggtttcactgtgttagccaggatggtctccatctcctgaccttgtgatacacccctctcggcctcccaaagtgctgggattacaggtgtgagccaccgtgcttggccaacaatatatattcttaactgtgtaaattttaatttgttggttttattcttttgagattattatgaatattgattctgtcattcatcgcttaaggaccaggcaggtgaaccacttgacattttttatcatcagaataaattgacaaaaacaaaacaaaatactttgaggtggaatggaagtatcttgagtagtagtaaaaccatagttctagatggtgataatcattgtcataatgaaagcgtgttgcttgttgactatttaaccatgctgtttaagtcatattaaaaacatcaatacgtccctctccctctcccctctcccctctcccctctcccctctcccctctcccctctcccccttcccacggtctccttccacggtctccctctgatgccgagccaaagctggacggtactgctgccatctcggctcactgcaacctccctgcctgattctcctgcctcagcctgccgagtgcctgcgattgcaggcgcgcgccgccacgcctgactggttttcgttttttttttttttggtggagacggggttttgctgtgttggccgggctggtctccagctcctaaccgcgagtgatccgccagcctcggcctcccgaggtgccgggattgcagacggagtctcgttcactcagtgctcaatggtgcccaggctggagtgcagtggcgtgatcttggctcgctacaacctccacctcccagccgcctgccttggc

SEQ ID NO: 186 - DNA, 2770 bp, Homo Sapiens
ggaagaggggctggctctcagtccctgcctcgtggggggtgcctcccccccctgcgatgggggtcctgagagccggggaggatgaggggctggctctcagtccccgcctcgtggggggtgcctccccccctgcgatgggggccctgagagccaggggggaagaggggctggctctcagtccctgcctcgttgggggtgcctccccccctgcgatgggggtcctaagagcctggggcggaagaggggctggctctcagtccgtgcctggcggggggtgcctccccccctgcgatgggggtcccgagagccagcgggggaaaaggggctgactctcagccaccacaacatggggggcctttatgttcaggttttgcccaagagtcagctgatttgcttcttgtactagcagggcagttgctgccaaggccctcaaacaggggagccatccttcagaaaccctgtctagttgttcagagacgtaggccaccggcctcagccagggccccacagtttgggttaaaagtccagctgccatcttttctgtctataacgcatacaatggaaaaggctttgtcagatcgggtatccccagggctggggctgccagacatttttcctttaactcatgaaagacttgctgttattgggttccccattccaaaggttccggtccacgccccctttgtgacctcatacaaaggcttggctaatactgcaaagtttgggatgaacagtctacaaaaccccacagcccctgagaattccctcacctgccttctgcccttaggctccggtagattgcaaatgacctgctttctttctgttcccgggcggcatcggacccgtcggagagtaaatcccaagtaaggtacctgccgttggcagatttgagctttcttcttggacacctaatacccacagtcctccaggtgagtcctaagtatcttaggatccgcgatgggggtcctaaggcagggggggaagaggggatggctgtcacccaacccaaaatgggcggcctttatgttcaggttttgcccaagagtcagcttatttgcttcttgtactatcagggcagttgatgccacggccctcaaacaggggggccatcctttagaaaccctctctagttgtttagagacgtaggacattggcctcatccagggccccagagtttcggttaaaagtccagctgccatcttttctctatctgacgcgttcaacggaaaaggctttgtcagatcgggtagccccagggctggggctgccagaagtttttcctttaactcatgaaagacttgctgttgttgggatccctattccaaaggttcccggtccctgccccctttgtgacctcatacaaagacttggctaatactgcaaagtttgggatgcacagtctacaaaaccccacagcccctgagaattccctcacctgccttctgcccttaggctccggtagattgcaaatgacctgctttctttctgttcccgggtggcatcgacccgtcggagagtaaatcccaagtaaggtacctgccgttggcagatttgagctttcttcttggacacctaatacccacagtcctccaggtgagtcctaaggatcttaggatacgcgatgggggtcctaaggcagggggggaagaggggatggctgtcacccaacccaaaatgggcggcctttatgttcaggttttgcccaagagtcagcttatttgcttcttgtactatcagggcagttgatgccacggccctcaaacatgaggggccatcctttagaaaccctctctagttgtttagacaactaggccaccggcctcagccagggccccagagtttcggttaaaagtccagctgccatcttttctctatctgacgcattcaatggaaaaggctttgtcagatcgggtagccccagggctggggctgccagaagtttttcctttaactcctgaaagactttttgttcttgggatccccattccaaaggttccgttccccgccccctttgtgacctcatacaaaggcttggctaatactgcaaagtttgggatccagtctacaaaaccccacagctcccaagaattcccttacctgccttctgcccttaggctccggtagattgtaaataacctgctttctttctgttcccgggctgcgttcggacccctgtcggatagtaaatcccaagcaaggtacctgccgtcagcagatttgagctttcttcttggacacctaatacccacagtcctccagtaaatcccaagcaaggtacctgccgtcagcagatttgagctttcttcttggacacctaatacccacagtcctccaagtgggtcctaaggttcttaggatccttgatgggggtcctaagctgtgggggacggggggctggctctcagtccctgcctcccggggggtgcctccccccctgcgatgggggccctgagagccagggggcaagaggggctggctctcagtccctgcctcgttgggggtgtctccccgccttcgattggtgtcctaagagccagggggagaagaggggctggctctcaatccctgcatcgttaggggtgccttcccccctgcgattggtgtcctaagagccagggggggaagaggggctggctctcagtccccgcctcgtagggggtgcctccccccctgagatgggggtcctaagagccgggggcggaagaggggctgcctctgagtccctgcctcgtggggggtgcctccccctcccctcctgcgatggtggtcc

SEQ ID NO: 187 - DNA, 1955 bp, Homo Sapiens
atttactttgcatcttgtagtgtctctgccagctttattaatagcagtcgcagtataccaggcagaatcttggctgacagtggaatcgattttaagggcagcttctcccttggttccttcaattctataaaaagttgggggagggaataatcaatatagtggtatagcttccctggttattggatttgtataatgagcttagctttattatttccatacttacctgattttgggatatttatgaggcacaatgatgtcactgtttttcaaccatacaatgtcagggttggggttacccgtagctctgactttcatttcaagtcgggaaccttcctttatattgacatttttcagtttttctacaaacatcggttttacctgatgttccacagctgaaagagaaaggtcatgatttagagggagtaaggctgaaatacctgtttataacccaagtgataagaaaattcatttatttttattttatctcattttaccttccacagttaaaatcactgaaattgaagatctgcctgccctgttttgggcaaccacagtccattccccagaatcactgggtgtggcagggacaataattagtgattgagtaccatcttctttaatgactactttatgggtatagtcattgacaatttgctggcctgtgaaaatatgtttaaaagaaagtagattttaaaatagtttttaaaaattgttagatgcatacataagcttgtttttgtgtttttatgattcatgagcaaaaacttatcacgcttaccatcatgaaaccagaacgtctctggcataggtctaccaacaacctttaagtcaaatctggcagtttgcccttctaaacatttgaaagaaacaggttttaacacaaagactggtttatatagtctctcaagttgtgactcatctgtctcctccagcctacgtccaggggacattcttgcaggggacatccgtgcaggagacatccttgcaggtgacatccgtgcaggagacatgcgtataggagacctgctcactgaacgtggagagagagatctgcaaaacaaagacacacaatactttcgtgaggcataaagaaaactcagcaaaacaaacttcattttgtcttattcattattcatgttattttagaatttacttcttgcacgtattagaaggcacctcaaactcattcagatctaaaatagaatatattattgttgcccccacaactatgtttttcctatattctcaattttagctggtagtcattcagtatatccaggtacccaggctcaaaaatcttggaataatcctcaatactctcttttccttaccacttggatttaatcagtcactagacttttttgatttaactactaaaacatcctaataaatgttggttggataagtaaaccaatgaatacatttatggaaaaataaaaaatacacattctttatctcagaggaggaaaacatagaaatgaatttggaaacaaaacaaagcaaaacaagactccatctacacattgcagccagactgacttggagtttgaatgctggcaccaccgcttacaggctggatgaattaagacaattttcatagattcccagggcctcagtgttcctatttccaaaccaataatagtcatctttttattgcagggctgttgtataaatttacatatgtaaaaatcaggtgtcaaataagagctattgtgatattagctatagcactaggaaaataaacagtatgttacactgatgaaaattctttgctcatcttacacaggggcaagaaataaaaacttctggcaattgttggtgttgccaatggtgcaacataccatgaagattaaggaaacttagcaacagtgaacttggaccttctaatagctgtctaaccccgagctcatcacttgaaaatgaaaatatcaaataaaaaaaggaaagtataattt

SEQ ID NO: 188 - DNA, 1956 bp, Homo Sapiens
atttactttgcatcttgtagtgtctctgccagctttattaatagcagtcgcagtataccaggcagaatcttggctgacagtggaatcgattttaagggcagcttctcccttggttccttcaattctataaaaagttgggggagggaataatcaatatagtggtatagcttccctggttattggatttgtataatgagcttagctttattatttccatacttacctgattttgggatatttatgaggcacaatgatgtcactgtttttcaaccatacaatgtcagggttggggttacccgtagctctgactttcatttcaagtcgggaaccttcctttatattgacatttttcagtttttctacaaacatcggttttacctgatgttccacagctgaaagagaaaggtcatgatttagagggagtaaggctgaaatacctgtttataacccaagtgataagaaaattcatttatttttattttatctcattttaccttccacagttaaaatcactgaaattgaagatctgcctgccctgttttgggcaaccacagtccattccccagaatcactgggtgtggcagggacaataattagtgattgagtaccatcttctttaatgactactttatgggtatagtcattgacaatttgctggcctgtgaaaatatgtttaaaagaaagtagattttaaaatagtttttaaaaattgttagatgcatacataagcttgtttttgtgtttttatgattcatgagcaaaaacttatcacgcttaccatcatgaaaccagaacgtctctggcataggtctaccaacaacctttaagtcaaatctggcagtttgcccttctaaacatttgaaagaaacaggttttaacacaaagactggtttatatagtctctcaagttgtgactcatctgtctcctccagcctacgtccaggggacattcttgcaggggacatccgtgcaggagacatccttgcaggtgacatccgtgcaggagacatgcgtataggagacctgctcactgaacgtggagagagagatctgcaaaacaaagacacacaatactttcgtgaggcataaagaaaactcagcaaaacaaacttcattttgtcttattcattattcatgttattttagaatttacttcttgcacgtattagaaggcacctcaaactcattcagatctaaaatagaatatattattgttgcccccacaactatgtttttcctatattctcaattttagctggtagtcattcagtatatccaggtacccaggctcaaaaatcttggaataatcctcaatactctcttttccttaccacttggatttaatcagtcactagacttttttgatttaactactaaaacatcctaataaatgttggttggataagtaaaccaatgaatacatttatggaaaaataaaaaatacacattctttatctcagaggaggaaaacatagaaatgaatttggaaacaaaacaaagcaaaacaagactccatctacacattgcagccagactgacttggagtttgaatgctggcaccaccgcttacaggctggatgaattaagacaattttcatagattcccagggcctcagtgttcctatttccaaaccaataatagtcatctttttattgcagggctgttgtataaatttacatatgtaaaaatcaggtgtcaaataagagctattgtgatattagctatagcactaggaaaataaacagtatgttacactgatgaaaattctttgctcatcttacacaggggcaagaaataaaaacttctggcaattgttggtgttgccaatggtgcaacataccatgaagattaaggaaacttagcaacagtgaacttggaccttctaatagctgtctaaccccgagctcatcacttgaaaatgaaaatatcaaataaaaaaaggaaagtataattta

SEQ ID NO: 189 - DNA, 24910 bp, Homo Sapiens
aacccgtgattgctgggactggctcaagctccaccaggagccgtcgttcttttacaaagaggggtggaggttccagtggaggctgttgttgcctttttttttttttttttaatgaatggagggcggcggcgactgctgcagctgggccagctgcgcgggctgcaccccctcccagcctgcgagaggagctagtagaagatttgtaccaacaaaaccaaggagtaaacaacttgagaataactgcatgagctcagggcttggactgtcagattccatttctaagcttccagaagagcgacacatagacactggggaagtcagagcctttgaactccaatgccatccccgtcacccacctccaccaccagcaccaccaccgaatggcactttggacaatttttccctctcatgtgacttttgtcatttcttacgtcagttggagccagcacctctcaaatccatcttctaaaacccagaaaattgtgtgtaacacatgatgactgaaagggagtaggctgaccagttaagagcctgccactggaatggaaggctgtgggaaggtgaggggacggtggacatcaaccgggaagagctgaaagatggcgttaccagataaggaaactgagtctcagggaggtcaagagacatgccaaagcacagcttggaagtggtaaggtgaagaacagagtgctggtgttctgcttcctggtttgtctctctccctctggtttatgtcatccagcccatttctccctgtacctggagatgctccctaagcaaacttttctgtgcagatgcagattgaatacagatgttacaatagggttagtcccacatagctgaactctttctaaagaaagacagaatcgtttgcagagaaaaccagagcttgtttcctaaaaacttccctggtagagggtgggtttttgtctttttggcccaagacagagatggtggatgaagcttctccttcaaatcttcaagatttaaagaaattgctccgcctctttgcctggaggaatgccgtgctgctcaaaacacacttttggacacggcacatttttctgtcacagtggaaagacctgactccctcaaaagggtgtttgcaaaaagcatcgcgttctcagaatgacaaaacagttttaaaagaaaaaaacattgtgtcagccctgcagcttatcaatataaaatgaagactaagattcatttatgtgaatggatcattttttgggggagggagttgttaaaaattcatatatcttggctaatggaaccacttccatatccacaatgaaaaaaattaaaaaggaggcttataaaacctttcctggaacaaccagaaaaggagtgagtccctgaaaatacaaattggtggtgttatctttgcatatttgcaaaattctttgaacttctgaatagtctgttgtggacctagtctgctgttactttgacacagggtcttgctctgttgcccaggatgcagtgcagtggcgtgatcctagctcactatagtctcaaattcctgaggtcaagcactgcttccacctctgcctcccaggtaggtagaattacaagcatgtcaccacacctggctaattttttttttttttctttttgagtaagtgtctcacactgttgcctaggctggagtgcagtggtgtgatcttggctcactgcaacctctgcctcctgggttcaaatgattctcgtgcctcagtctcccagtagctgggactacaggcgtgcaccaccatgcctggctaattttggtatttttagtagagatggggtttcgcatgttggcacaggctggtctcgaactcctgtgcctggccctagttatttttatattaacagtaatgaccaagctctgagaggttccttaatattagtagcaaaggtaggattcaaatgcaggtctggatgacccataacacatatcgttttgcactactcggtttgccttaaattagccccttctttggaataaagcaccctgttaagaagacaagttgaaggccgggcgtggtggttcatgcctataatcccagcactttgggaggccgaggcaggcagatcacgaggtcaggagttcaagaccagcctggccaacatagtgaaaccccgtctctactaaaaatacaaaaattagccaggcatggtggcgcatgcctgtagtcccagctacttgggaggctgaggcagtacaatagcttgaacctgggagacgcaggttctggtgagccgagatggcgccactgcactccagcctaggcaacaagatcaaaacgccatttcaaaaaaaaaagaaaaaaaaaggcaccttgaatgtcacatttgtcctcttcaaggtacttgctatctaaggtgggggtggagaatcctttattttacagaaacagtgattagttcttaagccttacttcatagataaggaaactgtgaatcaaagaggtcaagtggggcaggcgcggtggctcacgcctgtaatcccagcactttgggaggccgaggcaggaggatcacgaggtcaggagattgagaccgtcctggctaacacggtgaaacctcgtctctactaaaaaatacaaaaaattagctgggtgtggtggtgggcacctgtagtcctaagtagcttacttgggaggctgaggcaggagtatggtgtgaacccgggaggcggagcttgcagtgagccgagattgtgccactgcactccagcctgggtgacggagcgaagactctgtctcaaaaaaaaaaaaaaaaaaagaggtcaagtgatgtgttcaaggtcacagctatgaagtgacaagaccttttttttttttgagatagggtcttgctctgtcacccaggctggagtgcagtagcgtgatccccgttcgctgtagccagcgtcaagctcccaggcttaagcaatcctcccatcttagcctccccagtagttgagactacaggcacttatcactgtgcaccactaattaaaattttttttttttatttagagatggggtctatcaatgttacccaggctggtctcaaattcttggctttgtgatcctcccacatcagcctcccaaagtgctgggattacaggcatgaaccaccacgcccggccttcacatattttacttacttcccacttccctccttacctcccttccctcttaatttctggctggtcagtgagcccagtagggctatcctgctgcaatcacatctgcagtgacagcgtttccctgcttcacactctgggctccctggtgactgtcctgctatgtacgaagttcattggaggtgcacacattaagggtgaaaaaatgctgggacctcctaacatacaggggaggtgggctagtgaggccactctgtatttgggctttagagtcacccagcctgggtgttaatcctggcctgtgccacattggcagtgtgaccaaaggtatgttatttaatatatctgtgcctctgattctgtatttgcaaaatggggatgagaccagtacttacctcgtagagatgcaggaagttttagaagcattagttcatgacagccctggcactgataagtgttagggactattatccaaaacaaacacaaaacattaggtcctaccttgttagttttagagttaattgatttaattaactgacaataaaaacaactaataataacaatagctaacatgtgcctggcatagtgccaagtacctttaattattaacttgtttaaaaatctgaaggtacaagagggatatgtctccctcctaccctgtattatttagggttctacagagaaacagaaccaataagatatagagagaggctgggtttggtggctcacacctgtaatcccagcactttgggaggctgagacgggcagatcacctgaggtcaagagttcgagatgatcctggccaacatggtgaaatcccatctctacaaaaattagccgggcatggtggtgcacatctgtagtcccagctactcgggaggctgaggcaggagaatggcttgaacccaggaggcagaggttgtagtgagccgagatcacaccactgtggtttagcctgggtgacagagtgagactttgtctcaaaaaaaaaaatatgcatagaaagaaatttattatgagggattggttcatgacatggaagcggagaagtcccacattctgccatctgtaagccggagaatcaggaaagccggtggtggagttcctttccaagaccaaaggctggaggaacacagagcaatggtgtaagtcccagtctaagtctgaagaccccaaaaccaggagtgcagatgtctaagggcaggagaagatggatgtcacagctccagaagagagaattaactcgtcctctgcgtttttattccatgcaggtcctcaacagattggaggatgccagtccaccctagtgagggtgatctttactcagtctactgattcaaatgctgatgttggccccagtacagtggctcacacctgtaatcccagcaatttgggaggctgaggcgggcgaatcgcttgagcccaggaggttgagaccagcctgggcaacatggcgaaacctcatttttacaaaaaatacaaaaattagccaggcgtgctggcgcatgcctgtattcccagctactcaggaggctgaggtgggaggatcagttgaggccgggaagtaaaggctgcgatgagctgtgattgcaccactgcattccggcctgggtgacagagtgagaccctgtctcaaaaaaaaaaaaaaaaaaaaaaagctaatgttttctagaaacacagacacacccagaaagtattttgccagctatctgggcatcccttatcccagtcaaattgacacataaaattaaccatcacgcccccatggtttcctccatggaagcagccattattaccaatactctgcgtatcttttcagatatcttctgtgcagacgattatttaaatatctttctaccccttcagctttaaatgtaaggaaacgggctcagagaagtcatatagtgaattgtaataatagctcctattctgtgtgtgaggctctgccctgggcactgtgtgattttgaatcctggctacaaccatgcagcatgagacttattgtgtagaatagatgctccaggcctcagtttgcctcagtgggttgactgaggattaaatgaaataatccatgtagaggggcttctcagatcctggcacatcataactgctgagtaggtgatgactgcaggggaggggaggatccgaggtttttttttttttttttttttttgagacggagtctcgctgtgttgcccaggctgatgcacttagatcctcggccgggtgcggtggctcaagcctgtaatcccagcactttgggaggccgaggcgggcttatcatgaggtcaggagatcgagaccatcctggctaacacagtgaaaccccatttctactaaaaatataaaaaattagccgggcttggtggcgggagcctgtagtcccagctactcgagaggctgaggcaggagaatggcgtgaaccctggaggcagaggttgcagtgagccgagatgacgccactgcactgggcgacagagcgagactccgtctcaaaaaaaaaaaaaatactaggaatgtaagtgaatatttatttcaagtgagaaacagagctctaacaatttacacattttatcttttttttttctttttaaaagttttttttttttttggctgggaccggtggctcatgcttgtaattctagcactttgggaggccgaggcaggcagatcaactgaggtcaggagttcaagatgagcctggccaacatggtgagaccctgcctctactaaaaatgcaaaacttagccaggtgtggttgtgtacacctgtaattccagctacttgagaggctgaggcaggagaatcatttgaacctgggaggcggagtttgccatgagcagagattacaccattgcactctggcctgggcgacaagagactgtctcaaaaaacaaaatttttttttttttcttttgtagaaatggaaccttgctatattgcctgggttggtctcaaactactgggctcaagcattcctcccacctcagcttcccaaagtgtccgggccagtttacacattttaaaagccaacaaatacctcaaacactacacactccagaagaataataggacattttttcttaatttactgcctgacacacttctgtagcactttttattcctatattatccagcttcatactctttgatcacttcttcatatgataatgattttctaaaataattttctgtagagcgaataaaagataattcagtcttttctctagcatgggtgatcaaaatttgcttttagttattgatagtctagacgcaaaaaataaagacattcatagacacaaacactgtctgtagtattactacgtgtttgtgtctctcagaggaattttagtaaattcagttttgtgttattcccaccaaaaatgaaaaaagaatctaaggtgggccaggcgtggtggctcacgcttgtaatcccagcactttgggaggctgaggcaggtggatcatgaggtcaggagatcgagaccatcctggctaacacggtgaaaccccgtctctactaaaaatacaaaaaattagccgggcgtggtggtaggcacctatagtcccagctactcaggaggctgaggcaggagaatggcgtgaacccgggaggcggaggttgcagtgagccgagatcgtgccactgcactccagcctgggcgacggtgcgagagtctgtctcaaaaaaaaaaaaaaaagaatatgaggtgcattacaattaaatgcacgtgttaatagagtgtatttcttttttattgttattatttattgaggcagagtcaggctggtcttgcactcctgaccccaagtattccatccacctcggcttcccaaagtgctgggatgacaggtgtgagccaccaagcctggcctagtggagtatatttctgacagacgagaacttccattttgattgactcttcacctatttttcatgtctaataacgggaagcatttttcacaggcgagcatctaactatatacattttaaaccttccttcttccccaccacatccttcaggattgggccctgtaggatgtgttcatatggtgatacaacttctgatgaggtgtcaggaccttggtggggggtacttgctactggagttttactgggagctgttcctaccctgggagggttagcaatactcagcttaatgatctgctaaactcaatgtaccagcgactcaactcccatgtgcgtgcatccctgaatgcccgtggccactcttaacgtcacacaacaggaagggagaaggggcagaagggagactggagtggagagagatggaggtctttccacttgtggttaaaagacttgatgctggcaaatgttagagaaaccaaagaccatccgatggatgcttttctttccgggccctttgcaagaccttggaaggggctgatccaagcagggatcctgaagcttcagctgtgttagcctcacggtggacctggttagttatcacttatattcatggttcagggcagtgtcatttgagagcgagccgtggagcccactcaggagctgcaggcctcgctggcatgttaacatgctccataaaccttggttcctcagcaggaagcatgacactattaatagtctccacctcactgggaatataaagtccacgagggcaggcactggtctgcttattgctgtgtccttggtgtatagaacccatgggccgcactgaacatatggtatgctaggtgttgggtggctacccccaaactctcagagaaaaggaaactgaggcacaatgagcttacataccttcacttgaagccagacgtgtccagctccaaattccttttcctgtacaacatgctgcccctagtcaactggatggagatccggggtctcggcctcctttccttcctgcatattctcccatgcaaactgaacaagcaggggaaacttagcccacctctgagttcctgagatcatcatctgagttattctctcccttatggatctgagaaggagtccctgggatttgttctgatccatggaatacattgttctagagactctttggactccaacctgagtccctgggaatgatgtgaggtaggagatgtggaagaacaaaaatgaatggttttgagccataaaatagtgagcctgaaaaacgagtttggaagatgaatggctttggggcttctggaacttagcaggggctatcctgggaattactgacatttctgcctcagacctctgggaggccactggtaaaccagaggccacccccctcccttcacaggtccattggattcgaaggggtcctcacacgaagcaggaagtcaccctgtatctcagaactgtggagatctcagtccgtggtcatcttgtcatacatgacatggcaggagccatggtccagggaaccaggtggctgccaacttgcagaacaggcgacaaaaccccagcctggacccccagaccatgcacttctccctttgccctgcttctcctctgcctggtacaggtttccagccaagctctgcaccggcttctatgtctgtttgttttccttagaagcttcctatagaaagcaccaggtaaggctgaagatgctcacttccccctgttgtttaacaacgcaactgggattttgcagcctctgcttccagcctaattctccattgagccctgggataatatttacacacaaatgctggctctaatctccacccaggaaaacactagctgctattgaaaatcttttcacccgtgatagaaagcagagcggccaggcctcacgcaggcaccctcgagcttctctggagagtgttagggaacagcaagtgtgttttatttatatttttttaaagtcatcccagggctgtgtccaggcaactgagggcctgtcaaagaaccgaatgtctaattccctttagaaaaaacaaagggattaggtgtccctgggactttaacaaatgcattgttggtggttttgatttaggtttcatttagggaaggcaagtgcagaaacgaggatgccaaagatccaggctaccagtgttgcgaagatgcctggagacaggcatgcataaaatgttggcggggatgtaaattagtgcagccttttggagggaaatttggcaacatctttcataaaaaatgagcgtgacctttgatgcagtaatttcatgctttgtaaactacactacgttaatagttgcacgtgtatacaaaaacctatgttaaaaaatgctcactgcagtgacaaataggaaatcaccatgaatctatcagtaggggcctggtttgataaattatattttatccacagagtggactactacatggccagtaaagaaaagaacaaggtggggccgtgtgcggtggctcaagcctgtaatcccagccctttgggaggccgagacggcggatcacgagatcaggagatggagaccatcttggctaacatggtgaaaccccatctctactgaaaatacaaattagccgggtgtggtggcgggcgcctgtagtcccagctactcgggaggctgaggcaggagaagcgtgaacccaggaggcggaggttgcagtgagccaagatgacaccactgcactccagcctgggtgacagagcgagactccgtctcaaaaaaaaaaaaaaaaagaacaaggtagattataacaatggccaacatacatatagcacttactgtgtacacactagtctgaaagttctatgtattttagaatatctgcacatttataatattaactcatttgattttctcaacaattatctggttactattactagaatttttttaaatcaggaaagagatgttaagtaacttgtctaaagtcacatagctggcgagtcggggagctgggcttcaagtcatctggcctcagggtctgggtcaataaccactacccaaatgcctgtatgtacaggcatggaaagatgcttttgacatatgattaagtggaaaattcaagtagcagagaagtaggagcttatctttttcaggtaaaaagaagctgcatgtgtgcatgcctacgtgaatatattttatatatttgtaatagtaaaggttctggaaaaatacgtgttcaatcagcaattctcaaccaggaagggaggtgagatgggctacataaagaggattttggctgggggcagtggctcatgcctgtaatcccaatactttggtaggccgaggcaggcttgagcccaggagttccagaccagcctgggcaacatattaagaccccatctataaaagaaaaaaatttttggctgggcgcagtgcctcacacctgtaatcccagcactttgggaggccgaggcgggcagatcatgaggtcaggagatcgagaccatcctggctaacacggtgaaaccctgtctctactaaaaatacaaaaaattagccaggcttggtggtgggcacttgtagtcccagctactcgggaggctgaggcaggacaatggcgtgaacccgggaggcggagcttgcagtgagctgagcttgtgccactgcactccagtctgggtgacagagcgagactccatctcaaaaaaaaaaataataataataaataataaataaaataagtgcagtggcacaatcttggctcgctgcaacctccatctctggggctcaagcaatcctctcatcccagtctcctgaataactgggactgcaggtgcaagccaccacccctagctagttttcatatttttggtagagacgggcttttgccatgttgctcaggctggcctcgaactcctgggctcaaagtgatctacctgcctcagcctaccaaaatgctgggattacaggtgtgggctactgcttcccgccaaatttctttttttttttttttgagatggagtctcgctgtgtcaccaggctgcagtggtgtgatcttgactcaccaaaacgtccgcctccgaggtttaagcgattctcctgcctcagcctctcaagtagctgggattacaggcatgcgccaccacaccctgctaattttgtatttttagtagggacggggtttcaccatgttggtcaggctggtctcgaacttctgacctcatgtgatctgcccgccttggcctcccaaagtgctgggattacaggggtgagcaatcatgcccaaccatttggttttcttttctaaatggtcctttcaaaagaagacttcctgttaatcgtgggctcagagtgacacttttgattaacaccaaagtaagagatgtggagccaagcctaataagtcttgcaataaattggatgaaggtagaccaattaattgttgttctgattggctgaagggatcctgagataatgactcttgtcctcattaccctctagtcttgccttctcctggaagctttggcccagatgttggaagagtaatgttgattttcttgacatacagcccctccacattccatcttcactcccatgcccccctgcatttaatgtgttcatttaatgcattattgcacctcatgtaaatacccctggtactttacttgggctgttgtttaaaccactgtcccttcagggtcatccagtaaaaaccggactcaggctgccttccatttgcaggcactttacaatctcctaatcttgttcccattcattattttggttaacggggtggagccttgtcactttaatgcaggttgtgcaatatctctttcaaagtaaaactaagcagggtcttaggagagggtctgatgaggacaatgagggttatcaaaattttaatccccatttttaaaccccagtgtttaaaccttgctttgtgaagtgtaacctatcacagtgaatatagaaaaatgacataacagcttctacttactgtgtcaggtcaaaaagcacccaaagtttccatgtgttttctcagttttgttcttgcagcaagtttagggggtactttttttttaaatctcccattatctccataaggaagccgaggctccaggagactaggtaatgtcctcaacaatacacgtgtggaaagtggaaaatggatttctcaaccaggtttgtgtatctgtctgcaattcccagtgctgagcctctcaatggatgaaataattgagaaaagaaaaaaagtgtaactcaaaaaccacccccctaatagatagtagtactcatataccatctccctaacatactgttagcaatttaggtttatttcctttgtgttatgtatctaaacaaaatgaaatttaaaaaaacaacttggtaactagaggatatgtaaaatgtttatatcctgttttgatttttttttgtcctactaacattgtcatcgtaaccatcttccttattgcttcgtgtcatcattttaaatggttgcactctatttagagagtggtggccttgggggagagattcctagatgtggaaattggtaggtccaagagtataaatgtttttatggtttttgatacacattgctaaattgctttctaaaagatctattttaatttgcacttcaatcaacaattttgagagtgtcattttcatcacattcttgctggcattagttattgttagaaaacgaaaccaaggccgggtgtggtggctcacgcccgtaatcccagcactttgggaggccaaggtaggtggatcacgaggtctcaagatcgagaccatcctggccaacatggtgaaaccccgtctgtactaaaaatacaaagaaaattagccaggcgtggtggtgtgcctgtagtcccagctcctcgggaggctgaggcaggaggatgggttaaacccgggaggcataaattgcagtgagctgagatggcgccaccacactccagcctgggcgacagagcaagactccgtcttaaaaaaaaaagaaaaagaaaacaaggccaggcatggtggctctggcctgtaatctcagctctttgggaagccaaggtgggtagatcacttgagctcagcagttcgagaccagcctgggcaacatggtaaaaccctgtctctacaaaaaaatacaaaaattagccagacatggtggcacgtgcttataggcccaattactctggagggctgaggtgagaggatcatttgagcctgggaggtggagactgcagtgagccacgatcacaccactgcactccagcctgggcaacagagcaagaccatgtctcaaaaagaaaatgaaaacaagaaaaagtcctaatatctaccaaattgttcacagtagttagtgtcgagagtgggctggggctggtgaagtgaggaggtgtctattttcttttcttttctttttttttttttttttttttgagacagagtcttactctgtcacccgggctggagtgcagtggcatgatctccgctcactgcaccctccacctccaaggttcaagtgattctcctgcctcagcctcccgagtatgtgggattacaggtgcgtgctaccacgcccagctaatttttgtatttttttagtagagacagggtttcaccatgttggccaggatggtctggatctcctgacctcgtgatatgcccgccttggcctcccaaagtgctgggattataggtgtgagccaccgtgcccagccaggtgtctattttctcctgtatctaatgtggtattattaaaaatattttattataggcacatattacttttgtgttttttatatatatacgtatatatatacactttttttttttttttgagacggagtctcgctctgtcgcccaggctggagtgcagtggcgccatctcggctcactgcaagctccgcctcctgggttcacgccattctcctgcctcagcctcctgagtagctgggactacaggcgcctgccaccacgcccggctaattttttgtatttttagtagagatggggtttcaccatgttagccaggatggtctcgatctcctgacctcgtgatccacccgtctcggcctcccaaagtgctgggattacaggcatgagacaccgtgcccggcctgtcatatatattttaaactttattttgaaataatttgtctcatagaaaagttgcaaaaataatgcaaagaattccctgtataccctttgtaacacatatttttttgttttgttttgtttgtttgttgagatggagtcttgctctgtcaccaggctggagtacagcggcgccatctcggctcactgcaacctctgcctcctgggttcaagtgatcctcctgcctcaccctcccaagtagctgggactacatgcccgcgccaccatgcctagctaattttttgtatttttagtagagacggggtttcaccatgttggccaggatggtcttgatctcttgacctcgtgatctgtccacttcagcctcccaaagtgctgggattacaggagtgagccaccgcacccaggctgtgatacatatgtttttttgagatggagtctcgctctgtcgcccaggctggagtgcagtggcgcaatctctgctcactgcaagctccacctcccgggttcacgccattctcgtccctcagcctctggagtagctgggactacaagtgcccaccaccacgcccagctaattttttgtatttttagtagagacagggtttcaccgtgttagccaggatggtctcgatttcctgacctcgtgatccacccgcctcgcctcccaaagtgctgggattacaggcgtgagccaccatgcccagccacttatttttaaatataaagtaattaaaataaatgttttctaaatgtcagtccttacatcaacttgtaagttgagatttcttcataggtaggctagggctcaacagcaacttggggaaatgcttattaaaaatgtaaactcttaggcctgagcaagacatcgaatcagaatgtttgggggtgagcttggaaaatctttcagtagcccttctcctgccctctgaggcccatcaggggctgagaaccagtgtcagacaggttcctctttatttcctccagcaatattgtggcttcttcaccttgagagccctccagtgtgcaagggtttggaaaagtgagtgaaatctgagcatctttgttgtgacttttcccacttggtgctgctactgctctgctccagccaagctgtctgtaatttgttttcacaagagcctgctctctccctcaaactagaaaagacccctccacaggaggccaggtccggaacgcaggtttaggtggtgtaggcccttctcaccctcaccccttctgtcctgagtgttccaggtggatgccaaggaggtggaggaggcttccctgtctcctggctctcctggaggagcaactgtgaggccccgagatggggagggagcccagattctggcttttggtcttcctgctgtttcttttgtctgatgctggtgcatttccatggacagtttatttcccttggacactgtgggcttggtttttccatgagtgtgtgacgctgtggtcattcaccaggccctgttggtggtctcggtgggggccacaaggctcagatctcacctgccccttttcctacctcctccactctttgctcagccatcaacattcctttctgtcccagaagtgttctttccaaaatgcagatctgcccatgtcccctaatgacgtcacttattgacttcgctatggaaaaggagcgatggggaatgtggccggaaggacagcagagagccagactgtggagacctttgaattccagaggaacaaaagtattttgggtggctcacacctgtaatcccagcactttgggagaccaaggcgggcagatcacctgaggtcaggagcttgagaccagcctgaccaacatggtagaaccccatctctattaaaaatacaaaattagccaggcagggtggggggtgcctataatcccagctgcttggaggctgaggcaggagaatcgcttgaacccgggaggcagaggttgcagtgagccaagattgcaccagtgcactccagcctgggcaacagagtgagacttggtctcaaaaaaaaaaaaaaaaaaaaaaagaccgggcgcagtggtggctcacgcctgtaatcccagcactttgggaggccgaggcaggcggatcacgaggtcaggagatcaagaccatcctggctaacacggtgaaaccccggctctactaaaaatacaaaaaattagctgggcgtggtggcgggtgcctgtagtcccagctacttgggaggctgaggcaggagaatggtgtgaacccggaaggcagaggttgcagtgagtccacatcatgccacagcactccagcctgggcgacagagcaagactccgtctcaaaaaaaaaaagtgtcttatataaaaatatatacataaaatataaaaataggcggggcacagtgtctcacacctgtaatcctagcactttgggaggccaaggcgggcagattgcctgagctcaggagtttgagaccagcctgggcaacacaatgaaaccccatctctactaaaatacgaaaaatcatccgggcatggcggcgggcgcctgtagtcccagctactcaggaggctgaggcaggagaatcgcttgaacctgggaggcagaagttgcagtgagccgagatcgcgctactgcactccagcttgggtgacagggcgagactccgtctccaaaaaaaaaaatatgtatacacacacacacacacacacacacaatatacaaaaaatatactgttttatgtataaacatacataaaatatacatatacatgaaaacatacatatcaatatacataagtatattatggactaatacaggcaatttggaaaaaaagaaagtagaaagtagggggaaaaaagttgctagtcgttctgctagccaagtaaagctgctggctgcatttgggtgtggtcgtgtgcaggataagggcacaggccctgaatcaggtgagtctgggttcagatgccttccttcttccttattagctgtaggcaaccatcgggcagcttaattatcctctgggtgcttcagttttctcattggtgaagtaaggataaaaaaaagttcctaatgtgtaggcttgccttgaagatgaaatgaggtaagtatggaaagcagttagctggctgcttcctaagtgttagttctgtttaatcttgttcatttcctttcagtccttttactctaaagaggggtgtgtgtgtttggtttgttttcacatagttgtgatcacattgtctatataattttatttactgcttgcttagcataacatctgtagccaagcattttccatgttattttcaactcctcataaacatgcatcttaatagttgcataataatccgatggatggatatatcatagtttaaccatttccttattgttggccataggaattgttccaggttttcattgttacagaaaactcaaggcatgactgggcatggtggctcacgcctgtagtcccagcgctttgggaggccaaggcgggtagatcacttgagtagatcaggagtttgagaccagcctggtaaacatggcaaaaccctgccccgtctctactaaaaatacaaaaattagccaggcctggttgcaggtgcctgtaatcccagctacacaggaggctgagacaggagaatcgcttggacctgggaagcggaggttgcagtgaaccaagatcaagccactgcactccagcctgggcgacagagtgaaactccatctcaaaaaaagaaaactataggcatgaacacctttatgtgtcagatatcaccagcaaaaccagccccacttttcccagcctgttagaacaagttccttgagaaaaattcttagaaaggatgttacaaagtcaaattatatgaatatttatcaagatttgtgacttatcctgccaaattcattcctgtaaagtgagttcccacttctatttccaagacagtggatgagactgtggctgagggatgtggattttgttctgcagtgctgctggtgagggcatgagaccagggttttgatggattcatccagcagccattgggtgggtggctgggcagagtcggcgttaggaggctctcagcggtgacttaactatctgcaaacctggccccatccccatgatgactagagctcccatccgtaggagagggaggccctgtggtcacagtgtcacattccttttcagtccagcataagcactttcacattgttttttccctccgtgattcaaatgacaagaactcttcatctttagggatcacagtataagacagtgaataagttcatgagccttggtgttatcctgcctggattgggatctcaactctactatttattagctgtgtgattctggacctcagtttctcaatctgagacatggtactcacctcctaggattaaattaaacaggtattttatacacaacataataagtgctgaatgcttcttagatcttcttatctatctccctctttctaaatgaaagcgcctggttgaaagaaactaattgaacctctgtattcaccactttcctcctcttgaaaatgcaacaagggaagctgtataaagaaacaatactgggccaggcgcggtggctcacgcctgtaatcccagcattttgggaggccaaggcgggtggatcacctgaggtcaggagttcaagaccagcctgaccaacatggcaaaacctcatctctactaaaaatacaaaattagccaggggtggtggcacatgcctgtaatcccagctactggggaagctgaagcaggagaattgcttgaacccaggaggcagaagttgcagtgagccgagatcgcgtcatcgcattccagcctgggcaacaaagagcgaaactccatctcaaaaaaaaaaaaaaaaggaaaaagaaacaataccagaaagcccatctctacattgctaggcaacctttccaaggtgtgtacccaccctgaaaccatggggatgaagggaaggaggttgggaggctacagtggtgcatgaccaatcatctcgggacatggtactgtcagtgctaagactgggacagtccctggcaaaccaggagtgttagtcaccctggcatggtgagagtgggtgaaggatctggtaaagttgtccaagggtgggagaacaagactctggagcatttgagaagggtttgcttttcctttaattattgtttggcaaatccccttgaagctcatttcacctgcaacttctgggaatgaattggctgccaaaaataagacccacgtggggtgggggcaggggggtaattaagtgcctcccaggaagcaggggcaaggatacttcaatatcttccagattcctagagtgtgaatgatgtgagcttgccttggggtgaaggctgctggagtcagctctttccgatcctggctagttttctgctcctaataaaggcttctttcatggctgggcaagaggaagactcagatggccctccgtggacaagggttggttcccgaatctgtcccaggtaacttcttgttcctctgggtctctgtgtgtaatatccccagagacagaggccaagagaggggaaagtgactacacttacactgcaggccagcggagggggtggtcaatagctggtacttcctcttccagctcttttaaagcattttaaaattggattagtgtttcaacaaacacttgaaggtttgctttcctcggagaggcccgaagggctgaggaagagccttcatctgtttactttttctttatgtggaaatctacttgggctgtttctacaactagcttgcccctctcccttggtgccccctccaccaggtaaacctcaccccctaacttccaggcaggtctgcattcaccctcagggccctggcccaccatggctttctgggttggctgaatcctcgtgccctccaggagcactttggagcagcagggctcaggcagctctctctgacctgtgccagccttgaaagttttcctggaatgaagaagtgagctgacagtggacagtcctgtgtacttcatctgcttcttgcagggaaaccaacagaagcggtctctttcctcctgtgggtagagaaagccaggaagatggggcaaagccttgggaaaacaggtggctctcagccccaccagagctctttgtcctcatcctttttatttaagcccctgcttggagccaggcagtgtgtgtgtgtgagagagttgtgcaaacagatatgtgcatggatgtatgtacagaggaaaaaaagactggggcagggcattgtggagctctgaaagggaaggagggcaggcggtcaaagtagacttctatgttttattctgtgtattagtatattatatatgaacacatttaaagtacatattgaataataagagaattatcctctgagatccatgtgatcactgttaactgaagtacagggtcaagccttggaagattcaggaatgacttcccagaggaggtggcgggcaaacagagatcacaggataagtggaggtagctggattcattttatagacatttgttgagtgtctgttgtgtgtcagatactatttttttttttattttttttgagatggagtctcgctctgtctcccaggctggagtgcagtggcatgatcttggctcactgcaactgccgcctcccgggttcaactgaggcaggagtgcctcagcctcccgagtagctggaactacaggtgtgtaccaccacgcccagctaatttttgtatttttagtagagacggggtttcactgtactggtcagactggtcttgaactgaccttgtgatctgcctgcctcggcctcccaaagtgctgggattacaggcgtgagccactatgcccagccccagatactattttagaagcaaaggatctagcagagaataaacacataaagatcttgccattgtggaacttacagtccagtggagggagaaagatgaacaaaaagatcatatgatgtcaggtggtattaaagaagaattaacacttatggtaaggaagactttattcaagactattgcaacaggagttgactttttttcttttttttttctttgagatggagtctctgtcacccaggctggagtgcagtggtgcgatctcggctcactgcaccctctgcctcccaggttcaaccgattctcctgcctcagcctcctgagttgctgggattacaggcacataccaccacacctggctaatttttgtatttttagtagagatagggtttcaccatggtggtcaggctggtcttgaactcctgactgacctcaggtcatccaccctcctcatcctcccaaagtgctgagattacaggcatgagccattgcacccggcctaggagttaacttttgcaatagaggaaggaggttgagttcatcactgaatccagcaaagacctagttgggcatttataatcagagtgagggggtcattgggtggaaaatcactaagagaagacacgaagggtaggggaactcttgctaaaccaactcaacaggattctgtggaaggcaggccaaggacttacacattaaaagtgggggatgaggaacttggtcagatattgagggtgggggaatgactcagctgaattatttgctaaaggcaggccacatgaagaagaggatctagaggagcctgtctaaagtttggtcaaggagagagtctttgttggtgctgtgaagcaaatgaagcagctgtgggatagtgaggctacagagtgacaggttaggccctttttttgtttttgagatgggtgtcttcttctgttgcctgagctgtggtgcaatggcttgatcatagctcactgcagcctcgaactcctgggcccaagcaatcctcctgcttcagcctccttactagcagggacaacaggcacctgtcattgtgtttggctcataggggtgctttttaaatttaatttagttttatttttgaggtgaagtgttcactgtgtagcgacacgatctcggcccactgcaatctccgtctcccaggttcaatcaattctcctgcctcagcattctgagtagctgggattacagccgtcctccaccacgcctcactaatttttgtatttttaatagagacagggtttcactatgttggccaggctggtcttgaactcctgacctcaagtgatccacccgccttggcctcccaaagtgttgggattacaggcgtgagccaccgcacccggcctgcagtgctttttaatactcagtgttagcaaggtctttagggctgaaatctggatcatgtgtcagagccagactttcaaatggcccccctagagggtgtgttctgggtaaaggaaacagcctgtacaaaggccctgaggggtgtgttcagtgtgtttgagcaacagtgaggaggagggggtttgtaggggaagagtgataggaaataaggttgaagagggtggggtgagagtagatcatgcaggccttataggatgtgataaaaaaggatgagaaagaaagctgggaggaaggataatttggatttagggtaagggacagcgttgctcatctacaggaccacaaggggttctgtgctgcaggggcataagaaggagcatgtgccatgtggggaatgcagggaagcagggcagagggacgtaggagaggaagattaagagccaagggggaggggcaggcaggcaggtccttttccatcttttcagtcagggtttctcaatcattttaatgagagcctcagcccttgcgtaaaaatcaagcaataaagggaggaatgcctctctgtttaacttgaaggagagctacagaagatggaaaagagggttagttgaaataaagttggagctgatctcgcttggctggctgccctttctataaatatcgccctcccagtcctggaaatgcagcagttagggtccttgtgagctactgaggaacatccttcctgttcaaatgcccaggacttggctgcctgtgcacttccatatgcaaagtgcctagaagctggggagagggagagtgcagggtcaaaagtggggaattctgagcccactccttttaccccctgggggtggcctcacttcctctgggggctctgacagctctctggcctgtcttcagcttagaaatctgcaaaagtcattggccaggctcaggagaactaatcctttgtgccagaggtatggtggtatggtggggagctagctcctcgctggtgctgagccctgctgcccctggggttttactgggagagagggagagggtggaggggctagtgtaattcggcaatttgtgagttaaaaagcagatgagaacccacagagtaacgagacattcttctctttgcatgcaagattctgctgaatgttggaagaggaaggaatatttttcttgcttttcagacatgacatcctgtgaggggaagatttggaacagatgggggccaggggagcctcactgtatttgcttgtttcaccaccacctcctccctcccacaaccagaaatgtctttttcttcccgcctagggaagttaatgtaaaggcaggtaggggggatgtcctgtagattaggaaagtaagttatcaggggtcagggaaaaataatccattaggtttccagaaagaatccacttttcattgcagtctccttctaggtccaaagatagacaactaactcaaaattgtatcttcgctttaatcactgctctggtgatatttgcattaatgaaagagaaaagaaagcatccccaacagatggaaaaggcggctctctgactagtgaaaggtaaggaatttttctgaaatcttgggtgcacaatgtgggaaaaacaaaattggtaatgtctcatgggatcagcgcaggcatctgcacagttttcactccgacttctgtctgtcagattgactgcattagagaagaccgtaaatgtggtgatggaagtgggctgtgacacacttgactggctgtagcagtgttcctggtagagccacattcccagcacagctgtgggtagctgggcagctagtatgatgttagtccccaaatcacagccgattctttctgctgtcaaatatacagcccctgagcccccttcccctgaacctggaagggggttctgctggtgaagtcagatggccttgttagccagggtgggccagtctaactgcctgttgcatcttgtctgttccccaaagacagcttggcttgatgtgatgtgaaaaggatggggcagaaggagaaggggacagattctgtgctttccttctgtcgttcttttttggctggtgggagcctgtgttgtttttctcttccttcgtaggaggggattttgagttctggggtctggctgaggagacacgtgccagagtgtctggcccttttgggtcaggctgcctgactctggcacacagttctggaaggatgtcctggagagctggtttactgaggcaacagctgcaagctaactagggaaagagaagaggaaagtactaggttgctgtgtgctcaggatccccggttgagatatggagaattatgtctggggaacaaaacctaacaggctgtcctcatcacatgagatatgttcccaggctggagtgcagtggcgtgatcttggctcactgcagcctctacttcctgggctcaggagatcctcccacctcagcctcccaagtaactgggactacaggcacgtggcacaccccatgcttggttctttctttcctttcttttccttcttttcctcccttccctcccttccctttccttccctttctttccctttccttccctttccttctctccttccttccctccttccttccctccttccttccttccttccttccttccttccttc

SEQ ID NO: 190 - DNA, 2810 bp, Homo Sapiens
ctttctcctgtgatcatcggcatgataggaggcgagtgaggaactcagtgtcttctgacacaggcatctcacaacaccagtgcagccggaccgttgtctggtaggtctctgtgcacccaggaggacctgggcctgcgagaagtctggggcccactgctgggtatgctcgtttcttgagcatccgagtcacctttacagtctgcgatgattgacgaggtcaaacaggactcacttgcattgccgggtctctgtggcgacagggaggacttggagatcaaagaaactctagtaacgtggaaattcatgctccgagtagtgacaagccagtgactttttctatagaaagggtacaagactccaatttgaaaatctcaagcagctttatattcaagcaagttcaatccaatctcttcctgactcactgtctcatcaacatgcaaagctctcgaagagaaatcatctcttacttgcctgagggagttctggcagacgttttgaatgtggatgtggaagttctttcctcgtctccatcctgtcaagagccgtggagcaaacagcaggatgaggaagacatggaagacaaaactgataacgcacgtcacctcgctgcagcgggagacagaatgtaacttcaattcagcctctttggggtttgggttctgaccaagtaaatcgggaatgttgttaacatatcaagccagcctttattgtttgtcttaacccaagaaaacacaaaatgacacttactttgttgctcatttaggttttaacttgttgatgtcctccccacaaaaatcaaacttgaaaatgcctggcagggacccctgagatctagggtttgaaatgctcttttgacaagttaagaggttaaaaagaattcaggaacatactgtagagtctcatgggggattttagaaaaaaaatatgcaaagcatctttaaatatgtggaaaatccttaggagtgaaattgcactgaagtcagattgttttcctattgaggttgcattgctcggctgcaagaggtggggtgggcacatcgtggggggagagcagaagtgcctgttagggtgctgccagacctcagtgtggaattctgcttctcacagttggccataatcaatcaatcagactctctctttctcctcccttctccctctccctttctttccgtggttgaagggcccctcttaaatcgctcttgagcctgcattctaatttgctctctctcccacgtgaaatccacttctcccagctaagctgcgttttgcagctttatgacggtactgaaagcactttatttccacttaaagagctgcctgttctatttaccatcactctcggggtacttaacctcatttaaaaggctaacttttctcctgcattataaagttgctcgggagtctcaaagcctctttctctgcccagcccgcagccagccctctccagccaccccagcctcgccctcacccctcccagcctctgttccaaggcccaggcgcgcccgcgtggggcacgtgtccctgaacgccccgcctccggccagcctgaccgctcagtgctcggtgtcacttctggcacgtctccacattcctcaaatcccagagaggacctcgaaataggatagaaaacaagaatttaaataagaagcaacagggctgcccgctctggctggggagggcctcggcccccgcctgcacctgcggcccttgtttcttgcgcggttttgcaacgtcagagccgtccacactcgcaggccatttttagcggcctgttggaaagggaagacgatgaagtcgggctaagcagggcaacgccttgccctctgagaggcgtggagggcccttgggaagctcagagagctacgataaaatggctaaacgaccttcctctcctccaagtcaccaaatacgaggcaggagaggtgcccgatgagctcccagtcatgtggttcagggcgggctctggaagactcacagaggagactcctccgagaaaccaagaaggtttctgtccaagtcgggatctgctctgctcaggatgctcctccaacacacacagtgaaaaactgagcacctagagagcaacaccaaaaacccatggccaataatggagagccaaatcaggagagcattcagcaaagcaattcttgctgtagaaggaacagcacaaaaagctggaaggaaactgaggcatgcgtgaaagataacttgtcagtgtttgcagtctactgagatccccgctgcaagaaaaggcaggatttccacttgcttcttggcccgcctctgttgtccagaatccaggacaggtgacaagagaagcagatgtgatctgcacaagctggctcagctgggttgggagttgctcttcctggacaggccgggaagggtgctggaggggagggaggaggagagaggttttaggggaggggtgctgagcagtcagggacctgtaaggtcacatttctttcaggtattctttctaggtgtactgaatgggaacattgtctgtcatccctagactgcattaaagacctaaactgcttccatttatctttggttgttggactgaagtttctaatgtacctggtgacacagagcacagctctgtgtttttatgggttgcttagttcaagatctggatgaaagaagcctgaacccatttttgtgcaaaagcctaagggtgtacagcagggatgctcaaacttttgtttttataagaacccacttttatattaagtaggttttctgtgtgtgagaagaaatgcttgaacatggaaatgaaaagttctaactgtaggatggagtttaca

SEQ ID NO: 191 - DNA, 2007 bp, Homo Sapiens
aatttagatattataaagggcaagccagtacatatcacaaaatatcagtataactcactgtttcacaaaaggggaagacgtaacagtcatcaatttaggaaaacaattgatatagagattttatgataagctttctgtttaagacacgtccttttatgtaaggtgatttttttggtgaaaatgtatcaaaatgctttacatgtctgtgtcttcagacacagaaagtagctgaaagagcttgtaaaaagtgaattaaatgttagccaggcgcggcggctcatgcctgtaatcccagcactttgggaagccaaggaaggcatatcacttgagtaggagtgcaagaccagcctgggcaatgtagcaagaccctgtctctaccaaaaatacaaaaaaattagccaggagtggtgacgttgatcacaaaaatatcttctgaacaatttaagttgtgtaaagaatgacattcttccagcttttcttggagctagggaaaaggagctttccatgtctagaacatagggacgatgagcactataaatatatctgcaaaatttggactgggtttaaggtgaatataatgatcaaaaggtgaaaaatccaaagattttaggtttatcagcttcaaatggcccaaaatacatagagcataatggatgagatgaatggaaaagagaataatggaaaacagttttactgtttgttaaacttaactaaaaagtgaaatgggagacagaacttaagtgcaaggttcatcatcagaagtagaagatctctggataacaggctattaatattaatcagtaaactcttaactacagtactgatgaacacctccagaaaacacttcctttagccagtgtattatacgatgatgatgtgcaatggccatggcaaagggtttgtaggtccttcttgcccagatgcagccacttaagcagtaaaataatgaatggtataaattcagccatcaagccactgtacacacattaactcaatagaaagaagcacattagggtcacctcagcaaccagtatatgcagaaaataacagaagtgagaggtgtgtccaccctgcaatttctacaggacacctctccttcaggttacttaccactcagatacaaaatcaggcctcactattctctccctggccaagctgctcaactgacaccaagtccctaaaatatatctcagggtgccagaccgcatgccttccaaattatgtctggcaccgtctaccagatgtacctagaaaaccattcagggctaaggatccatgaatcacgtcaaagagcatggggctaacggatcacagacaatggcccacatgttacggggcccacaaccaccctcaaccctgctgcttacaccacaacacacttcaaatgtgctacacaaatctgcaatcctcaacaacttaatgaacaacttcaaagtaccatgtagccatccgatgtgcctgcactaagtaaggcatttcactgtctgtgttggcctcagccttcccccaagcacaaaaacagatgcaggattaacagtcaactcctctactctaactgaaatccctgccacactgtcagagactaagaattcagaaacttctttgcagatctgtagtctctctattccaaggttagagaagttgtcactgttccaccagcccaccaggctaaggtactgctcagcaagtacttaacggtgccactgttaaaaaaaaaactgatcaggagccacagaaataaacttgtgcctcatcagagaaaaacatctaaatatcaaaaagccaaagcactgtagaaaaaaatctataaaataaaaaatatattaaaaaggcacatgggccaggcatagcggcacacgcctatagtcccactactctggaggctgaggtgggaggattgcttgggctcagaggattgaggctgtagtgagctgtgatcgccccattataccccagcctggacgacagtttcaaaaggcacatggaacatactgagccttatgtatt

SEQ ID NO: 192 - DNA, 3007 bp, Homo Sapiens
aagaaccttttattaacacaacaatgatattttaaaaaggaagaataataatttccaagaaaaagtacaggaatttattttatgtctttttgaatttagacagagaattatttcatagacatcatttagacaaagttagactggcctgaatttaactgcaggtcctgagacttattattaagggtcatatttgccaatgtctggtgagaaatagactgggaagatgaaaagcatcaaaagatttctaagggctaccaagattattgaggggatactgaagaacatgttttttatttaaatatttcctaggactgaccttcactcttttttcagtgaatctaccattaaaaaggggcttgagttgcttcaaagactgagtcccttaaatggtacctcatctattacactcaggagcagctacagctagagtcaccaagaagggtcgctgacatggtagttgatgctagcaggtcagctgggaggtcagctgcggctttctggcagagtatctacatgtggtctctctctcaaggtgacttggacttcaaacaggatggtacccatgtcccactggagaacaactcaagcatcaatattccaaaatttgtgatgcttcaagattgattgaggatcaatcacagtttcccagaactggaaaggtcctacttttcccctgctctacttgttaagctgcctccacagcctgctcatgttcaagggcctggagaaataaaatgtttcttcatgaaagcatggcaatgtcacattgcagaagtgcatgtgggaataaacatattgttgtggccaactttggaaaatataaattctcaaaatcactttggaaagggtttctcttttgacagaaatcaaaaggtaaccatctaaaagcacttctcctttcattctgggcacagagctggataatatttctaatttctgtaactcttaggaatggctatatcacttacatttagccaatggaatgcacacacaaatgtgtattccaccccctggtctgagccatagttctccgcagtgatatccctcatattatttctcttttcactttactattgtgacaatgcctagggaaacctagggaggcatatgttaaagttggcagaatttctgtgaccctgagtctaatttgatcctcaatgactttcatccctgtgttgagtgtgagcaaaatctatcaataggatgagatagtacttccatgagtacgttatagtttatagcaaatgagatttttacagtgtaattagagttggaaatcactgctttttaactgtgtcaaatgagtcattaaacttgtcctctgtgtaatttttgttgttttttgaagaatctgtggccatcctggaaataaacagagtgacatggtgacaattgtggatcctctcctttgggataatgcactgtgtatcccattgcaagtgcttctcagacatcagtgcaacgacctcttcagtaatctgacctaaaatgtaagagacttgagagcaaagatcatgttttgttcattattttactcctagtacctaggacagtccccaccagcaaatgcctgttcagtgatggatatgctaaaatctcctttattatagatgcatttatttcatggaaaaaggaactgttgagcaactgatttttgattatttcctgagttgttctgcaggcttgaaaggatagtttcttgttggtcaaatcacagaaaagtcttatacaagaattatcatcgggtcaagttctcagacttacattgtaattaattgcttagcctcattacttccacactatataatagttttactctttgttctttctattaaactggttttactttagaattttgtttcactgtaatgaatgccataagaatattctttaattcgatcattattattattattattttgagacggagtctcacactatcgtcggggccggagtgcagtggtgtgcaatctcggctcactgcaacctctgcctcctaggtacaagggattctcctgcctcagcctcccgagtagctgggattacaggcgcctgccaccatgcttggctaattttttgtatttttgaagagacggggtttcaccatgttggccgggctagtccccaactcgtgacctcgtgatctgcccacctcggcctcccaaagtgctgggattacaggcatgagccaccgcgcccagcctcggtgtttatttttacaaacaagatagctcacatttccctccaacaccattttaaaataaagcttgtcatttctatttgaccttttgttatctcttcctgattttctgagaatgatttatactaaatattatatcttttatattgtgtacatatatatgttatttataatcccatatctgaatatctgaattccaaaatactccaaaatctgactttttgagcacagcactgacatgacactcaaaggaaatgctctttggagcactttggattttggattttcagattagggatactttacggtttcaaaatctgaaaatctctgaaatctgtaacatttctggtctccagtgttttggattgggaatagtcaatctgtaacatacatgcatattacactgtgttttctttaattaaagtaattgcattaatttgtctaagctagggatgtatcaaaagtacatatttcattttgatccttaaatcaattttgacatatttcttcttatgattaaatacacatgattcatagaagaaataaggtcctccactgggatctttttgttttgtaaaagactttcattatacagctctgttggctatttatccagacccagctcctgtcataaacctttatgctttatgttacagtaataatgaattatttgcaattcctaaaatatcacaattgcattatataattccaattgttggcattgaagccaaggactgtgatttttccatagttattgtctcagcaactagcagtatggtggcataaatatctgttgaaacaacaaac

SEQ ID NO: 193 - DNA, 3464 bp, Homo Sapiens
gaaccaaagcaggaatttattgaaaacaaaagtacactccacagtgtgggagtgggcctgagcagcagctcaggggcctggatacagaatcttcctggtccaaatacccaccagaattttcccatcggccacttcatgctcacctcatgtaactgaaatggtagccgcaatcagtctgattggttgcagaaagcagccaaccagaggctgaagtgaagttacaaaagtcacactcctgtgcaaacaatctgatgagttgcaaaaagcaaccaatcagaggctaggatgaagttacaaagttatacttctttgcaaatgaagacttgaccagcaatcagtcttacttgttgcagacagccaatttcccatctgcctcacagaaaaggtcagaggtagtagcctctggttctttgttacttagacatggaaagttagggttttcttttcattttggttctaggaagtcagagcgaaagagccttaggttccctgcctccagaccctattttcctgcctcatagaggtttatgtcactgtccttttgagagaatccagattcagactttcagttctgtggctgtgggccaaaaccaacaaagacccaaatcctctgtccttgggagcttgaggagagtttaccagttcatgatcctagtgggtctgagaactttgcctttaaaatccactcctggcccctgcctactgcttcatggcctggggaatagagtggagggggccacccttggtcaccttcctttgactctcccaaggaaacagcacaaccaagaaattgtggatcaactagaatcacactagtaatgtaatttctttgctcacagcatgactgctgggtttggggggcactcagatgtagaggtgctagtctcgtcttgctgacccccagcctgggaagaaggctcaccccccaggttccacctcatccccacagggtccctgataacctggtcccatgggtgggcctgtcctggggcattggtggaattctgggggcatgtctttgctgtgccatctctgcctccccctagtaagagctctgtcttcctcttcctataggaaaagcaagaaagccagcaaaaccagggaaccctaaagaggcagttagaggtgagtggagggtgtgaagttccctcctgtcctctggagaatgttgctttccttctctttcagcacttgcttggcttttctcccaaaggttcaaattcagagaaccaacaaactgatgtctgagaaaggaaaattaaatactgaactgtatcatatgcaacgtgctgccaggcactttgaaggtgggaatctgggcaccctgtcatccttcaacctggtgctttgataggcctttggaccccatctcaacctctctcatttcaggagagtccatggatctggccagcggcctgcagtattcccagcagtgtgtgggagagttgtaatggactctttgctgtctccatgcagcagaagaacatggacagtgtgagtcctaccgcctgccccatcccttggcagcccagcttcccaggtggaggagtgagggacctttaggtcccttctgcaggatggagtgtcctgcccagaaagcagcatgggccatttctcattgtttttgtgtgtggttgttagaggcagcctgcggctgagttggctgctgtggatgagttggggagtgctgtggggagcaagcagagcttggacgtggagcactggatgcagagcttagaggccaagtgcctaccctgccttcacttggctgtggccttagccaaatcctaggtgtgggatatggtacttgcactgtgaaagtacagaagagtatctttagtatgttaccatttgtggagagagaaggaccgtgtgtgtgtgtgtgtgtgtgtgtgtgtgtgtgtgtgttgtgtgtaagtactatgacaatatacataaaacatgcttgaaagtggtctcagagccagactgggtctggctgcgttttcttgaggctcaaaaatgagaagcaaactaggaaagaaggggatttattgctgtaactggatacagagagaaggctggagataactccaccagaccaactcgaaatgttacagtattcttagtgtttatataggttggggttatgtgtctacgtacagtatagcattcgcctaagtccactgataactaattttgtttcaactagaaggtcagaggcaaaaaatgcttgctaagtctgattaagctgtgagggccctggtaccttcaaggtctgtctactgtggtacctgaatgattatttctatcttacctcccttacagcttggtctggagactgccttagaccctccgatgaatctattcaaacagctgcctctgttaccttgactcgtctcagattccgtcgacccgagacaaggaatataagactgtctctattattttgacttgctccaggttagggagaagcctatgcaagggtcctactgaccatatgtttcatttttagctttgatacctgggcacggatttccctaggtttaactatttgctcaatgttaaggcagctctgtggaaatttgtttgtataactggagtgcggtgcagggctctctgtgtgactgtcatgaaggcctgtctgtgtgactatcagggagaattggcctgccacaaaaggattcatacaaaactcaggagagagaaacagggtggctgggagatatttcacttctgtaccttctgagtttgggactatgtgaatttatcattctttcaaaaagtgaacaaaaagttaatttcctccttcctttctgtgtcccgacccccagtgaaaaaaagggttagagaatcagatatacctgggtgttcaaatcccagctctgtctgagtgatcttaggcaagcaattaacctctaataccccatttttttaatctacgcaatagaggtaaaaatagtaactgtctcatatggtggttgtgagaattaaatgggattgctagcatggtgcctggtgaagcgctcaaagcttcaaacagtggtagtaataagggtaataacaatagcaatattctctgatctctctgggcctctggtagccagctataaatttgatctctttccccgtcgcttccacccttattgagttctttgagaaacaaatgagactataggcttggaaatgccatgaaaacatgtcagctgtgattgagagtaaggaattgttgactggggaatagttattatagctattgttactggccagccagctgctcctctgcctgttttgtcctgacttaacctttctgtatttgcagtatatcaaggaggtaaccaaagacagagatgccctcaggctggagtcatacaagaataggtaggatgggggagggtgggatgggaggtgtggggcccttagcgtgggtgatgtgctgggaggtgggaaggctgcaggtgagcatggtgaggtgatcatacagg

SEQ ID NO: 194 - DNA, 3382 bp, Homo Sapiens
aattgatagaggaaagaggtttaattgactcacagtttcacctggttgaggaggcctcacaatcatggaggaaggcaaggaggagcaaagccacatcttacatagtggcaggcaaagagagagcttgtgcaagggaactctcatttataaaaccatcagaactcttgagatttattcactaccatgagaacagcatgggaaagacccgtccccatgatttaattacctcccactgcatccctcccatgacaggcgggaattatgggagctacaattcaagatgagatttgggtagggacacagccaaaccatatcattctgcccccaacccctcccaaatttcatgttctcacattttaaaaccaatcataccttccccacagtcccccaaattcttaactcatttcagcataaacttaaaagtccatagtccaaagtctcatttaagacaaggtgagttccttccacctaggagcctgtaaaatcaaaagcaacttagttacttcccagatacaatgggggtacaggtatcgggtaaatacacccattccaaatgtgacagactggccaagatggaggggctacaggccccatgcaagttagaaatccagcagggcagccaaatcttaaagctctgaaattatctccatggacaccatttctcacatccaagttatgctgcaagaggtgggttcccatggtcttgggcagctctgcctctgtgtctttgtggctgctttcactcctggtgttgagtgtctatggctcttccaggtgcacagtgtaagctgttggtggatctaccattctggggtctggaggacgctggccctctcctcacagccccactaggcggtgcctcagtggggactctgtgtggggtttcaagcccacatttcccttcttcattgccctagcaaaggttctccatgagggcgctgttcctgaagcaaacttctgactggacatccaggcatttctctacatcctctgaaatctaggcggaggttcccaaacctcaattcttgacctctgtgcacccgcaggctcaacaccatgtggatgctgcctaggcttggagcttgcaccctttcaagccatggccccagctgtaccttggccccttttatccatggctagagcaactgggatgcaggatatcaagtccctaggctacacacagccaaatcatatcacaaggggtggattattcatgaattttccaggaagagtgggcaattcccagaactgggggttcctcccctttttagactatatagggtaattttctgatgttgctatggaatttgtaaactgttttggtgtgggtaggagtgtcttttagcatgctaatgcactgtaattagcatataatgagcagtgaggacaattagaagtcacttttgttgctatcttggttttggccggcttttcttactacaacctgttttatcggcaaggtctttataagctgtatcttgttctgacctcctatctcatccggtgagttagaatgccttaaccatctgggaatgcaacccagcagttctcagccttgttttacccagaccctattcaaggtggagttgttctgattcaaatgtctctgacatttcccccctcccttttacaaggcaactcttaatcctaagggttgtggaaggatgaagatccatattctgtaacttcttcaggctgaataggggcaatgctttcctgcctaactgttagggtctcttgtattcagggtagagaggagctcagaaagcataattatggtgagggtcacttgtaactccgagttctgacaaaaggtggtatctgtcttgtttattctgaactgcaaccagagatcactggttggctcacaggaataagcagtcagtctaaattgcagaagaaaaccctcaaaaacaactgatgagattagaatctaataacaggtgtaccatagttcttgaaacataatttttctctctccagtctcccattttttactaaagacaaatcatggcaaaaccaatttgctttattatacttggcctaattatttgtataaagtgcagcaataataattatttttcacagaggcttttaaaattgactttgatggaactgtgtttcataaaatgaatctcagataagactttttaaaagctgagcccagccgtgagtttgcaccctcaaatacctgagttgggtaaattcctctcctcttgaggtcccaagataacctggggctcctgggccaatcagaaagtgacattctttacttaccacaggtcgggaaccctgtacagggactgtgtagacaaggcatgaggccaggtttcccaaggggcttttattggctttataagtcaagtttgattccttaaaggaaaacataccattccaatcaaagctttggtaaaatcaccagtttctccaattgtgtctgtttgcaaaagaaaacagatccttattgtacttatgcaaataactatattgctataagttaagaatactcacaaatagtttccaaattttggagaaatcaggcagagagaaacaaatatgctccaaattttgttcacaggagttaagctgtcagtagctcaaaagaaaagtttccttgactctgaaaaacaaaacaaaggatccgcaacattttaagcaaaaagccgaaaaagatcacctcagtcctctattagttcagtccatacagataacttctgttctgtttgatattcaaagaagatccagtagttgtaagattgttcatttgccagtttgttaattggattactggcagggtggagcctttggaggaacagggccaggaaagcatgcagtttctacagcctaacaagcaggcacagctggaaggcaaaaacagatccccaaaaattaagggcctcatttttacaccaggtcctggatccccaaaagaaatgctatagaacaagacagtacaataattttaccatgcatttaattgctaggcaacccaaagtcaatcagcccattctgtgattaacccatcccccataggagtcttatgtctgggtggggggaaagggcatttccatactttttaggtggtcaagagcatgcttttctgttccaagaaaaagcaaagcgccatatattcccaaaccactgccattagttatttaccaaagtatatttcctatctagttattacacaccagagttctctcataatgcaaagtaatttctgatattcccccaaatcaaaaccatcacataacacaatgcgaaacagaacagagtcttcgatctgagcatccctcgatgagggctgttgcgtcttgatttcatctgggtagttacaggcatcatccaccacgaagtttccaacccagagtcaggatgcagc

SEQ ID NO: 195 - DNA, 1305 bp, Homo Sapiens
gtctcaaaaaaaaaaaaaaaaaggtgaggtcacccagggtatcagtggacaagctgagaacaaaaccaaagtttctaacaccgaaaatttgtcttctgctcatcccagcctgaaaggaaggtgaaccaagatgcaatccatgcccattcaagtggggtctgtgtgtccaggcagaggtgtctgccctctacaaagggcacaggggagagagtgatgcttaacccaaaggaggtctcgctgatggtggaatttcaggcaccgtgtttatgtttggcctaattagcttgagaccagtgtccttgacgggaactaagacgccccccacgcccatccccggctcccaggctctctccacccaagttctgcccaccagggcacactgcttccctctgccacctcctcttcccacgagccctggtacaccctagattctcagggctgtggctccttgctttacaaatgagtaagttggtggcagggaaggaagtgggctgggccatgaccaagagtcactatgattcacggggaaaaccctgccctcccgattcaactctgtgtgcaaaaaggttttgtgcgggttcctagggtctcagggtcaatggatgtagatagaccactagaggtatacacagccactgtccaccaactctcccaccccccgggtctgcctacagccctggatggggatcctgtaccgggggggcggttggggggttggacaggtgtgggttgaggtgttgtttacatgttgaacacactggggttccaggtaagtttccgtcagaagaaagcacttcactgctgaggcagaaatttcaaaatattgaaccacttttcgatcctggcagaagggaattttcccagggtgataaaagtgttctaaaattagatttgagtgatggctgcccaaaaggaattatgatattattcaagaaatcatggctttgctgaacaacagaaaactcgaacactgagcatttgaagatattaaggaattgttgatttttatgttcactgtttaggtgaaatgatagcattgtgagtgtgttatttttaaatgagtccttatcttttaaagatacaggcagaaatagctataaaatgatctgatggctgggatttgctttcaaataatacaggagagggccgtgggtgaggagagggaaccagattgcctatgagctgagtgatgggtatgtggttgcgagggcagacaccattcttctctctgctttcgatgggtgcgtagaatttcccataataaaaagtggtttttaaattgttttgaccattggcctcgcgcgg

SEQ ID NO: 196 - DNA, 2437 bp, Homo Sapiens
aagtggggctaagggcagcctggcatgagcctgcaggtgcccctcagcatgaacggcctgggtgctctgaatggtggccagaagcagaaaggctcctgggtggaaaggggcaggtccccagtgaaaccccaccttcaagccagggatgacctgaagtctgggggccaggctgccagttccgtggactggaatgagaacttaacggtgttttttctgggcctgcccatggccacccatggaccaatcagcacatacttcctcacctctgaagcctgtaacaaccctggactcagccaggctacagcagataacaggacaacctgcctgtagagaagagctacccactgtgggtctcctttccactgagggctgcacagacaacaggattacctgtctgtgcataggagctacctattctgggtctcccctcttctgagggctgcagagctattgggatgtcctgcctgcagataggagctacccactttgattctcttgagagctgtactgttgctcaataaagcacctcttcgccttgctcaccctccagttttctgtgtatctcattcttcatggacaagggacaagagcttgggacccaccaaatggcgggcctgaaagagctataacacaaacagggatgaaacacacccccctacttgccatattgcgggcaacgagaaaaagagaaaataggagagaagtgctgcagccctttggggaacccagacctaggagctccccaagctaggggtgtgacaccctctttggggctctgtggttcctggtgtctccaagcttctgggcaccaccacgttacccggtgcccacagtggaagctgcttgcagtatacctggtccagctgtagccctgcagggagccggtacccatgccagttcctggagctgcccaccccaccacagctggcatgctaggctgtgtgcagtagccagactgcatacttgctcactcacacacccattgctgctctgtgcctggcttgcccttgacaggtgtgggctctgggctggtagtgcaagctgagcacagcccaccaggccaagtgggtagaatgagcccagtaggcccaaggaaaactcagataaaggcgccactggccacagaggtttcctgctggcaaagtgacaccccaaggatcctgagacatatacatgagactgtgatagagctgcctggtctattctagtccatggtcaatttttttgtttctgcactaatgtcatattttcttaattatgagagctttataccaagtcttgatatctaaaaattaagttctcctactttttttcttttgaggttctcttggcttttcttggcccttcatgttatatatccgttaactttcatagtcaatggtatgttgatctaaataggcaagtttttcattagtggaagcagaacattcgtagtaaaaaacttttaaagattttgattgtcataacaaatggccctctggcataggtgataccaatgtgtactccataaggagattgtaataatatttgaaatggaaaatgactatatcagactatatgtgtgttttgtgatttaatttggggaaaaatatctatttcatgcctctagtatttctcaaaaaacatgttgaatatgagtcttattaggttttgcttgtttggtgagtaaaaatgccaagcctcatgagaagcagaatgtattttctcttttattgtaactgcatgtacaatacctgctatggactgaatcgtgtcccctccaaattcatatgttgaagtgctaacctccaatgtggtagtatttggagatagggcctctgggaggtaattagggttagctaagatcatgagggtgggcccccatgatggaattaatggctttataaggagggagggagaaagagatagatcgatcgatcgactgatagagaccgatcgattgatcaaccaagagagatctctttaccacctgaggacagagaaggtggctgcctacaagctgcaaaaagggctcttaccaggaactgaatcagtgagcagcttgatcttggacttcacagccttcagaactgtgagaaataagtgcctgttgttgaagccacctagctcatggtattttgttagagcagctcaagcagactaataatatagtacccatgtgactctgaatttagaaaataattgattataagttattctgaaaagaaggtctatatacacttaaaagcaaagcaaagtaagagtttttaaaagtcttaaaagcaaactgtatgcatatgtagtttacataagcatttcaaaagaattctcagttttgggtgcatagggattgctatcatattttgcaatgctcatgagccaggaatggaaatatttaacattaagttaataagaaaataacatgaaaaagttgtttagtgagctggagtcagagctc

SEQ ID NO: 197 - DNA, 1192 bp, Homo Sapiens
atctgacctctaccccacccccccgcaacttcatggaaaaatgactttctcagcgttcgttcctgaaattattgccaaacccagtgttttattcttcaccctgtttgcctcctctgagcattgaatgttacctacctctctccttgaatcctggctccagctatcctggttacgttctgaatgtgcctttgcacggtattttctgactcttcttttctgtactgataccttttctttctggatactttcttctatggcagtctcatacattctcaaggatttaacatttactccacttaaaagagttccaagatcatctactgaatcattaagcaaatatttgttaaatccaggctctatgcccttccaagttgaggcaacagcagtgggaaggaggcaggaaacaaactgcatctgttggaggaactgcaagaagctagtgtgattgggagggctgtggggagcagagggaagtggctggagtctgatctctaagtgtctagccccttcctttctcccaaggccccagtccacactatctggcatcttcacttcatggctaatttaacactgtcagtgctgtcaattgctcttcccccagaactgtatttttcacatctgaagttctgttaaaggacaacgtttcacaaataaaaatgataactaatatgtccctatatgtatcaggccctcttctatgcactttatgtagtaaccccatttcatcctgaaaactaccctgtaatctagacactattattagtcccattttacagatggaaaagccgaggcatcgaggtcaggtaacttgtctaagatcatagcgctagtaagtggaagaggtccagttgaacccaagcagtctggcttcaccattataatgcaccgccttaccaccaagatcttatttattcattcaacaaatatttattcagctagagaccagtagagatagtgacatgttacgcctatggcctcacaaagcttatcttctatttttgccacgttttaaaattgtatcatctttccccagtaccatcttgatttaggcatctattacccctaactaaatgggacttttgcaataacttcctaactgtactatcccctttctcaacatttccagagcaatcttctcaactgcaagctgaatcatttctcttcactgtttaaatgcctctgtttatactca

SEQ ID NO: 198 - DNA, 3262 bp, Homo Sapiens
agctgccggacaccaggagacgatggaaggtctatagtgttacagctctgacccaggaagtcccagggtcttgccttccagaagggtcgcggctcttccctccctcagtccaacgaacaggagcacgtcacctcccgcagctcggggagctggccaggaacgtgttacagcccgtttcgctcctgtccgcagctgggtgaggcagccaggaaaatattacagctcttctcacgcccgccattcagcaggtcctgacttcttgtgtgacatccagaagaaaggggttacacagacagctggagggtgagcaaagtggagaagttctcagcagagaggagactggagtgagttgcccctacccgcaggtgccaactgtaatacatcagtagctgaacagctcattgccctcaagtgttcttgctcatgcctggctgagttattgaagaaattgctcagatctcaagcccttgtagatcactggtcctggcagatgttgaggcagagcaagatggcagaatagaagtgttcaccaatcatccttctcacaaggacaccaatttaacaactatctacacaagaaaagctccttcataagaacaaaaatcaggtgagcactcataatacttggtttttaaactttgtatcactgaaagagatgctgaagaggtagaagaaaatagtctggaactactgacaaccccccagtttggccacaagatagggtactggtcagagttgcaagaccctctttccaggccctagctcctggacggccttttttagacatgccctgggccagaagagaacctgctgccttgaaagaaaggaccaagtcctggtagcattcattatctgctaattgaggagactttggttctggaataaagagcagtgatacccaggtactatgttgagggctgtgggtgaaattctgagacttgctggctttaggtgagactcagcacattcccagatttagtggctatggggcaagacttgttccacttgagaaaagcagaaagaagactaaaggggactttgccttgcaccttaggaccagaatggccacaacaggatagagcaccaaccaggctcttgggttccctgattttaaaacatggctcttggatggcatttctggacatgctttccaccagaggggagcccactgcccaggagggtgagtcccaggccagacagtattcaccacaagttaactgaaaagcccttgggacttacgggaacattggtgataggctggcaatactctgtgtgggtctgtggtggtggtggccatagagtgagctcctctgcctttggaaaggagaaggaaaagtgggaaggactgcatcctgtggagtgagtgccagctcaaccacagaacaatagaataccagatagacttctaagccttttgattctagtctctggctcccagagaggacctctggacccacccagcacctgggggtactcactgcatgaaaaggaaggacacaattctgactgactttgctacctgctgaatgtagagcctcagagccttgagcaaaaataagcaatagccagggagtgtttacagcaggacttgggtaagacccagcactgtactgacttctggtctgacccagtgcaggcatggtaatgatggccatagggttgcttgtgtcactcccctcctagcttcatatggttgagaacagagggagagactcttgtgtgtttgaaagaaaataagggaagagtacaagagtctttgcctggtaatctagagaattctcctggattatgagtagaactatcaaaatagtacctgtatgagtctacaagaaccatagcattgctgggcttggggtgcccagatacagcttcgatcacaacattcaagttttttttttttttaatatttggaaattcttcccaagaaagatgggtacaaacaagcccagacagcaaagactaaaataaataactcttcaatgcttggacacagacaaatatctgcaagtatcaaaacattccagaacaataagatctcaccaaatgaactaaataagacaccagggaccagttctagagaaaaagatatgtgaccttttagacagataattcaaagtatctattttgaggaaactcaaagaaattcaagataacacagagaaggtgttcagaattctatcaaagagattgaaataattaaaaagaaacaagtagaagttcttgagttgaaaaattacaattggcatgctgaaggaatgcatcagagtcttttaatatcagaattgattaagcagaagaaagaattagtgagcctgaacacaggctatttgaaaatatggggtcagaagagataaaagaaaaaataaacaatgaaatatgcctatatgatctagaaaatatccccgaaatggcaaatctaagagttactgggtgtaaagaggaggtagaggaagagataggagtagaaagtttatttaaagggataatatcagagaacttgtcaaacctagagaaatatatcaatattctaataccagaatgttatagagtaccaagcatatttaacccaaagaaagttacctcaagggatataataatcaaattcccaaagatcaaagataaagaaaggatcacagaagcagtaagaagaaaacaaaaacacacaatgaaactccaatactactaacatcagacttttcatagaaggcttacaggccagtagagagtggcatgacatatttatcatactgaaggaaaaacgttttaccctagactagtgtatctggtgaaaatatccttcaagcatgaaagagaaataaagaccttatctgacaaacaaaagctaagggatttcatcagcaccacacctgtcctacaagaaatgctaaagggagtttttcaatctggaaggaatgggtgttgatgagcaagaaatcttacagtgcaaaactcattggtaataggagacagaaaaacacagaatattagaacactgtaactgtggtatgtaaactactcttaacctaagtggaaagactaaatgagccaatcaaaaataataactacaatttttaagacatagtacaataacaaatagaaacaatgaaaaggtaagaagtgggggggggtgaagtaaaggcataattttttgttttctttttgttggttaggccaacagtgtggttatcagactaaaataagggttttaatatagtatttgaatgtttcatggtaaccataaaccaaataaaacatagagtgg

SEQ ID NO: 199 - DNA, 2703 bp, Homo Sapiens
gtgagccgagatcatgccactgccctccagcctgggtgacagagccagactccctctcaaaaaacaaacaaacaaaacacaaagataaataatgcacattctattctgggtctcatcagcctcaaggtggccaagtttctatgctgagactatagcccacagttacaccagccatgatcctcagcagcagaggtagtgatgatgaagtctgatgcccaaagacaagcagaacagatttaggtgggcagttatatcactgtgagttttcatggactatggtatgctgaactcctttacctgcctgtggactggagttggaggactgtcattactggcttgttctgcagtgctgggttccccattgcaggagcagtgtctgcccttactgaagagggaaggattgacccagcctcctgctggtggcagaaaggaaagagagaccacagctgtccccacacatcacccttttgtttcctgaccatgaatagatatttatcaagaaaagacatacatacaaatggccaagaagtttatgaaaaaatgctcagcatttattctgggaatgtaaggttggcttaacatttgaacatcataatcaaggtaaatcaccaaatcatagactaaaaaaaacatgaatagaggcaaaatgatcatttgataaaagtcaatatttattcaggatagaagctccagcaaacttggaatagaaggagacttccttctcttaggatggggatctgtaaaaagctacggctaacattatactcatgaagaaagactgaaaatttctccctagaggagcattgggaggatgtctgctctcatctcttctgttcaatattgtactggaagtttcagtcaatgaaataagatagaaataaaagacatatacattaaaaagaagcaaaatcatcttaacttccaatgcaatgcttacttatgcagaaaatccttagaaatataaataatgctactaaaacaaataagtttagcaaagtcaacaaagccagtacaaaagcaatatgatttttatatattagcaatgaaataattgaggagtaaaatttaacaatgcatttacatgtatagttaggggtgcatttaacaaattatgtgcaagacctatatgctgaaaactaccaacattgatgagagaaattagataagatataaatatatgaagagtttccatgctcatggattgggatactcaacatagctaagatatcaattcattcccattgatctataaatttagtgccattccaatcaaaatcccaatatatatttcatagatgttgaaatactgattctaaaattaatatgaaaatgcaaagaacctagaacattcaaacttattttgaaaaagcaaaaaatgggaagacttaacactactggattatgagatttagaataaaactacattaatcaaaatagtgaggtactggcaaaaggacagacatagcactcaatggaacaaaatgaagaggctatacctaaaccctcatttatatggtcaacagaccctcattaaatgttcatgatttttctagaagggtgctgcataatttaataaaggatactctttttaacaaatggtgctgaataattggatatctatttgcaaacaaagaaacaaaaaaagaaccatgatgttttgttcactttgtatgaaggattttaatggaaatggacaatagatctaaatgtaaaaagtaaaactatgaatcttctacaagaaaacataggagaaaatgtccacgatttggattagacaacaaatccttagatggacacaaaaagcccaaagccaaatacaaaaaaatggataaactgtacttcattaaagtaaaaaacttttgctcttcaaaacatattgtggaaaaggggaagggcaggccacatgctgaatgatatttgtaaaatataaagccaataaaagactgtatgtataaatatatagaagtcatatatttcagacaatctgacaaaaatatgggcaaaagatctaaatctacttactttatcaaaattaaatggaaccatagtgagatattgctacacaaccactagtctaattatttagtctaactaaaatgaaagagtgacaatatgaattgttgtgtaggatgtggaggaactagttagaaggttacttcagtgaacctggtgagaggtgacatggcttgttccaaagaaagcagtgcaggtggtgagaggtcatcacattttgaagataaagcaataggattttctaatggaagaagtgatagagaagagtcaaggacaattccagaattttttgcctgagcaaaagaatgtaaccacagagacatacatggttcagctatacatcatgtttacataacaataatgatacaaacatgaataattatctccacaagtgtataacgattttgagaaaatgggagagggaagtaaggtgtgagggtgtgtgtgtgtgtgtgtgtgtgtgtgtgtggctagtgaatttaagagctaaatcttcatcttccataataaaattcaatagaaatataaaattaaaaatcaagtcaaatctaacattttatataaaatatggaagcatatttaaaaagaaacaaagtagctgaaagtatttctgaagacagggaattgaggttagaagtctaacccaaaagatgacttcacttgtatttaaaaactcgtgcagcctagaca

SEQ ID NO: 200 - DNA, 1194 bp, Homo Sapiens
gaaaaatcaggattcccttataaagaaagtgcaatgtctgaggaaatttcaactgtgaaaactacaacatatttactaaaatgcatgaattttcttgtttttagaattattcctggactattcagtagccactcagatgccactgtgtgaaagggccataaatgttgcctgctgcttgaacatctatttttttctcttccagtgcttgataactctgggagataatacactgcagtcgtactagtggttaagatatttgggaataaaattaatacttttgactagaagcgtctaaggataaaccaacagaaattgaatctggatacatctttaagatgtaatcagaaatgaccagatgactctagttagaatttttgaaggagggattacattaatatttcaaaacccttactctgtagataagtgtattttaattttttcccctcgtatacttttatttacctggggaaggagcttttagggttggggggtggtttgctatctctttagctagcagaatagtgtgcctttgatcctcacacatcctgtattatggacacagtagccatgcttcacggggaggtcagagctggctaccagcagtcttgccctttactgagcttagtgtcatctttggatgctgtcatatgctgctttgagtgaaccagagaaacagccatttgcagcatgagaaagccccaaaagctctgggatttacctccacttcagtaataatgaatattttttagcattagaatgtgttatgtcatttgaattaattttgactacactttggcttgggagaggaattattttaaatagacattggtactttttgaacttgatagctaaagattctaaaatgcatgttttatactaagttttaaccagtcaggaaaattttatgtaactagtgatagtttatttttttgtatgaattttgtttaggctgcaatgtttagcttttgttaactcctcactcttgctgtcttaagttcattactatgtttaatggcctacttgccaagatatttagcatgtaaaaagcagggttttgattaaaaaaaaaaaacggcttcatattgaagctgagacttacaataacaagttgagtggcaagcctggtatgctgtgtcttattgccagaatcttagtaaatgtaatgttttaaaagtttgttgtctttgtatatta

SEQ ID NO: 201 - DNA, 2435 bp, Homo Sapiens
ttccagttcattgcctttgtggggtttttttgtttgttagtttgcctgtgtgttttatactttttttctgccttctctggttttaactaagcattttctataattctatctcctttgttagagtatctattacgtttcttttttactatttttaatgattgctctagagtttgcagtactgcagtataaatttgcaactaatttaaaccaatttttaaataacactatactacttcatgggtaatgaaagcatcttataacatattatctctagttttttccctttcttatttcataactgccatttcacttcacatattcatagccaaaaccactgagtatatggtgctattattattttgacaaaaatctgtaatctgttagatcaattaaaacaaaaaaaaaaaaagagtctattataccttcacttattccttctctgatgtttttcatttcttaacatagatctgagattctgacctatatcatttttttccccctctgaagaattctaacatttcttgcaaggcaggtctattggaaacaaatgcccctagttgttttgtgagaaggtttttgtttctttttcacttttgaaggataatttcacaggatacagaattctatgttggtaatttcttctttatttttctttggacactgtaagtatttcactctaccctcttcttgcttgcatgctttctgaaaaattggatggagtgtttacctttgcttttctttagctaagctctttatttcttctgacttctttaaacatttttttatctttgatttcctatagtttgaaaatgataggcctaactgtagactttttatatttatcctacttggtattctgtcattcatttcagaaaattctctgccctatgactatgacttcaaacattttctctatttctttatctctttcttctacttctggtattccaattacacatataacttttgtggttgtctcacagttttgaaatattttgttttatcctttttttctctttgcatttcagttatcaaagtttctattgcattttctcaagcttattgattctttcttagtcatatccagtctattgatgattccttcaaatttctgatacagcatcttttatttctagcattttcttttgattctttcttggggtttttatttatcttctttcagtttctgtatgttctttcatattgttagattgtttctactttttccaatatcgccctttgcatattaatcagagttgttttaaattcccattctgatagttccaacatggctgccgtacctgaatctcgttctgatgcttagtttttcccttcaaacactgttcttaaaaatatatatatatacatacatatatatatatatgccttgtaattactcgttgaaagctggccataagctagcaagtaaaagaaacttaggtatatatgcctttagtgtgagtgtgtatgtttattcagttaggagttaccttgtatttactgtttgctctaggtgtggtgtcagggctaattttctctgatgctcttgtttttgtcttttttgttgtagttttccctagtgactcttacatgatgtttgacattttcaattccttcatctgtattatcctattatcttctaggagctccattgaggtaatgatagggtgttgggggagaaaaaatgttctgtaaaattatgattaggtctctttcttttaccaagcctgtgtccttgggctgtgaccttcacaaatgcttctcacttttactttcttttatttttctatgaaggtgaggccttttggcctcatctaattggagctgggcgtttcctttttgccatgtagaagacgagagtgggcaagagttgtatatttcccttcatacagtttgcttaggttctggtaaaacaccagtcatttaggctctggtaaaatagtttcccttgtgggcaggttttgttaaggagaacagaatattctaaacatatttttaaatggctattttccctttcctctgctggaaatactaggggtttgtttttttctttttctgattttcactgtgagaacatggtagagctcctagaagtaagcttcagaaaagtgtggaggccttcctatgactgagtctccttggagttttaactcttaagcttgtctacctttatcttccagcaattcaattacaagtttaagttttcttaaccctgtgctggctccagcaatggtttctgctcctcaacctttaccccagtaagctatgattccctttaacttcctgtctctctctctccaatttgaggggcaatagattgctctgtgagctcacatttctctaaagaatcctagaggaattgctgattttcagtttgttcagcttttttgttgttgttgcaaagatggaagtgaggccttttaaggtcattacat

SEQ ID NO: 202 - DNA, 2525 bp, Homo Sapiens
cgcgcgtgcacgtgtgcgtgtgcctgccgggttgctgcgccgcgggctgcgagtgcttgtgacccgccgcaccctcacccccgggcgcgccatccctgctccgccgccagcgagggagccccggagcctaagacgcccggacccgccgcctcgcagacccacccttgcccctgcgcctcgtcatccgcccgccccagccagcccgcgcagggtccgcggcccgcttttccgcgagaagccccctgtggtctttcctcgtacccggggactcggaccgagaagccgactgagcgaggtcgccgcccggcctcacggacacagagcgactctgcacctttcgcctccaggagctgaaaacattttgtcacttgtgcagtgtactcaccagtgcccccaacatcttctcccccgaaagcgctttcagattcgcgccgagatggggcgacgcggcggctcttgagcggaataacccgaagggccacgcaaactggggcttccagccgcgagcatgcggcggggcgcccagggcctggggtcgcgcgctcagggcctgtgctgcgccacgcaggaggaggagagggctggccctgccgggcgcgggtgcgggcccgactggctgaaggaggagtggggactggcttggaagtctccgaagcagaaaagtggggccgacaggatggaattgggggaggccgattttggctcagagagatttctctattaaggaaagcagtccaagaataggccccctggaagaggaatgcgctcaaacccagagggattctccttagagctacctcttgagattctgtacttcgaggaaattagaggtttttttaaatctctatttttaataaggtgggaggaggctgttgctcctttctcctcaacaacatgaaatgatcctgtgcctctatccaacaactctacaacaaagcactgaatacttccctgactggcactttcatggctgttcatgggcatctcttggtctatgacgacgatgttggagagttcctactccgtgataactcagttctaagtgcaagcagtcacgtgaaatgagcctgatagtctgcgaatgaagaaactaaaacgaactatattatatacttcataacacaagacaacgtgctcgtttgttcattctgcaagtaaatgcttaatgcttcctaggtggcaggctaaagaatatgatcattttaaagcagtcatgctttgaaaataaacaacccatcccagctgtaagctttttgaaagtgtacaaaatatgtaattgatgactccctaaatggtttgcagctttggtatttgactgaattgtaaaccattagttaaactacatttcagttatgctttgtaggaaaaacactttcctatgcattgaatgttctataactaaggagcttagtaatctactgctaaaaatctcactgaaatctccagtttaagcgatttaagcaatttacagctcttggcaaatatttgttttgggttataaaacactttttttctgactagtaaattgttcatgttctttgtttccagtaaaatgggaataaaggtttcagtactcaaatactgcttattttttattggaaaaaaggaagcgtgggaggcttttaagagagtatcattatgagggtttcatagaaatactcagtctgtctcatttcagcatccattcctatatgaggtgacatggtaccagacttagttctgtatgttattcaacaaagtattttccactgtctggtaacatggcagcttctctcttcctcaccacccccccggattaccttggaagtgggaaggaaaatatttactttccagcagttttcattttgtgaaagatcacaaatgactgaaaatgctcacctatttggcagaacaaatttgatatttgtgagactaatcagttgagagtcataaataggtgcaaatgtttatgagttcccctcaaatttcaacatatttgtgaagatgcaaaataagcatgttagtaagttcaaacctaagacatacaagtgaaaaaaagggaacaacatactcaaaagcaggctcatcgtgttcccttaaaaccaacatatctgtaatgtggccacgcaagcttcatttgaagcctctccagtccctcatcccctggtttactcagcacacccaataccagcacagctgcaagactgcttagcatggggcaagctgttggggaaaatcttttaaatcatccttaggcaccgtaactccaaaagccggtgtgtggttggctccttccatactaataatcttgggttactgatgttcgtatctacccaaacctctttctcttccttaaagagctgtccttgaggccgggcatggtggctcacgcctgtaatcccagcactttgggaggcttaggcgggcggataacgaggtcaggagttcgagatcagcccgcccaacatggtgaaaccgggtctctactaaaaaaaaatacaaaaagccgggtgtggtagcgcatgcctgtaatcccagctactcag

SEQ ID NO: 203 - DNA, 1532 bp, Homo Sapiens
tttatagattcaatgccatccccatcaagctaccaatgactttcttcacagaattggaaaaaactactttaaagttcatatggaacaaaaaagagcccgcatcgccaagtcaatcctaagccaaaagaacaaagccagaggcatcatgctacctgacttcaaactatactacaaggctacaataaccaaaacagcatggtactggtaccaaaacagagatatagatcaatggaacagaacagagtcctcagaaataacaccacatatctacaaccatctgatctttgacaaacctgacaaaaacaagcagtggggaaaggattccctatttaataaatggtgctgggaaaactggctagtcatatgtagaaagctgaaactggatcccttccttacgccttatacaaaaattaattcaagatggattaaagacttacatgttagaactaaaaccataaaaaccctagaagaaaacctaggcaataccattcaggacataggcatgggcaaggacttcatgtctaaaacaccaaaagcaatggcaacaaaagccaaaattgacaaacgggatctaattaaactaaagagcttctgcacagcaaaagaaactaccatcagactgaacaggcaacctacaaaatgggagaaaattttcgcaacctactcacctgacacaggacaaatatccagaatctacaatgaactcaaataaatttacaagaaaaaaacaaacaaccccatcaaaaagtgggcggaggatatgaacagacacttctcaaaagaagacatttatgcagccaaaaaacacatgaaaaaatgctcatcatcactggccatcagagaaatgcaaatcaaaaccacaatgagataccatctcacaccagttagaatggcgatcattaaaaagtcaggaaacaacaggtgctggagaggatgtggagaaataggaacacttttacactgttgttgggactctaaactagttcaaccattgtggatgtcagtgtggcgattcctcagggatctagaactagaaataccatttgacccagccatcccattactgggtatatacccaaaggactataaatcatgctgctataaagacacatgcacacgtatgtttattgcggcaccattcacaatagcaaagacttgggaccaacccaaatgcccaacaacgatagactggattaagaaaatgtggcacttatacaccatggaatactatgcagccataaaacatgatgaaactggaaactatcattctcagcaaactatcacaaggacaaaaaaccaaacaccgcatgttctcactcataggtgggaattgaacaatgagaacacatggacactggaaggggaacatcacaccccggggactgttgtggggtggggggaggggggagggatagcatttggagatatacccaatgctaagtgacgagttaatgggtgcagcacaccaacatggcacatgtatacatatgtaacaaacctgcacattgtacacatgtaccctaaaacttaaa

SEQ ID NO: 204 - DNA, 1905 bp, Homo Sapiens
tttaactctccaggtgaccctaacgtgcagccactgctgcaatccacccccaatcaagccagtccccagtgaactgtgggcattcactcataactggcacagccatcccctgaaatctgttgcgaggaacaatactcaaaggctaactacgctgagaatgatggtttccagcttcatccatgtccctgcaaaggacatgaactcttccttttatggctgcatagtattccatggtgtatatgtgacacattttcattatccagtctatcattgatgggcatttgggttggttccaagtctttgcgactgtaaatagtgctgtaataaacatacatgtgcatgtgtctttatagtagaatgatttatattcctttgggtgtatacccagtaatgagattgctgggtcaaattgtatttctggttctagactgggactatgggcatgctaccatgcctggctaatttttaaatttattttgtagtagagacagtgtctcactatgttgcccaggctggccttgaactcctgccctcaagggatcccaaataaatatatttatttctaaattcattctaaatgtttgcaatgttaagtatgtgtggcaaaagaacagatacctttcattttttcaatcacctttcaaatattgttacaaaagcacatattactgtgaaatagtcgtaatttcagaaagaaattattcttcattcaacttctcttaagatttttaattaaactttttattttgaaaacattcagaacctacagtgcaattatcaaatttagaaaacttaacattgacacaatgctattatctaatatgtggtgaatattcaaattttgttgatggttacaaaattgccttaaaagcaactttttcccctcaacacaaaatccaatctagggtgatgcgtcgcatttaggtgtcatgtccccttagacttccttaatcaggagcagtccttagcctttctttgttccatgaggctgaaagttcgtttctgaagtgctcagggtctttttgttttgctgacgtctcagtttgggtatcacttggttaaggtggtgtcatccagagttatcttctggaaaggcaccttctatcttggataggaaggaatttaagagcaggcactaggcaactgtaaatatcaccccacaattccactgaatgatattaatattcagcgacgatctttgcccgggccaacaattattatggtggtttcaaagcacctgctcacaatgggggactagggagtgtctcaaagttatagtttcattttcaagaatgttctgatacctctgttactgtacctagatttgttttgagcctacgtttctttgaggtaattgaggggtgtcgactgagggcttcatgccccgctgctgtgagtgctgccagcaccatcccctgcctgccctctctctagacattgccctctgctgaagggacccaccctgaccatggtccctggagcagcctcagttgagtgatgtacttgtgataagagggccctgcccctctcaccccgattccgcacaaccttaaagggctgctcccactccagagatcttcctgtggggtggctgaggcttttcttttgaccacgtggaagcccagcctgtccctctgcccatctgccgctttccctccccacaggtgttggtcctgagagcattcccaaataaatttcctgaaccatcatcaccatagcaaagcagcttcctgggcaacctcacctacaacagccatttaagaataggaatttgaaagacattgagtgaaaacaatttataattcagaaaggaaagcttgccttataaataaaactattcattattacttagctaaaatagtcgtagttactttacaaatgtttacggctcccctggcttggaga

SEQ ID NO: 205 - DNA, 13030 bp, Homo Sapiens
agtcgtcgtaggtgaggcagtcggcgctggcaaagagctgctgcgcggggagccagttatcgggcacatagtcggtgccgcccctgatcagccatgtgaagaccatgattgctttcccttcagccttccacctttgtaagtttcctgaggcctccccagaagcagaatcctgcatagtctgcagaactgaaactctgccaatgtgtcagtggtggacctgacctgccgtctggaaaaacctgccaattatgatgacgtcaagaaggtggtgaaccaggcatcggagggccccctcaaggacattctgggctacactgagcaccaggttgtctcctccgacttcaacagtgacacccactcttccaccttcagtgagggggctggcattgctctcaacgaccactttgtcaagctcatttccttgtatgacaatgaatttggctacaccaacagggtggtggatcatggtccacatggcctccagaaagtaagacccctgcaccaccagccccagcaagagcacgagaggaagagagaggacctcattgctggggagtccctgccacactcagtcccccaccacactaagaatctcccctcttcacagtttccatgcagaccccctgaagacggaggggcctagggagcctgacctcgtcatgtaccatcaacaaagtcccttgtgctcagccaataataataatacaggtataaagtattattgaaaaatgctaagagagtggatgttgtttgtagcacaaaatgcaactctactaggtaacgcatatattaattggatagacttagtcatttcacaatctatagataaatcaaaaccttatgttgtacatgataaatgtgtataattttatctgtcaattaaaaataaacaaatttactaatggtaatctaataaagtaatgtttaagcaggacattcagcacttataatttctgtgtgtaaatatctaaaatttttcatcttgaatgatacagagttaccacgtcatactgaatgacatagaatatcttctgtactcctaatttccctgttatcctagtaatagatccaaatagatacaagagtggccctgtttcttacacctaaataaaacttattaaacacagataatattacatacatgaaaaaggagaaaaaataaaaatattgggaaatgtaaagaagagctagaaataagacattaaaaggccttgtattttattaaaaactcttgtgaatgcgggatggtctaaaattttgagtctgatccttctagtagatcaagttaccaagtgtatggtctgtggtatgaaattaatcaatttctaggaagaaatgctattatactctgaactaaatgcaaacagaaaatgtaggattctctcaaagagaacattctgtaattcaatgtatatgtttctcacgtgaattacaataataaaaaatgtggcaagttgcaaagggctgtttcttatgttcatcaataaagacctataatcaggcataaaaaagtattctatagcaattaaatataatgtggtccttcaatctgttgatttgacttcacctaggaatagactttgaattatctgaaaaaataaatgcactaaatatcctttgagtaaccctgactatatattctttctcttgaaagggatttttagtaaatatatatttgataaatacaattcttgacgaataatgagggtgaagctctcttactggaataagattgaaagctttttgtgtctgaaaataaaggccatttactttctatactcaagtgaattttaaaatgtattcccaagacaacgtttttcaaaactaatatatagatgaaaaaactaattgatgtttcaaagatatactcagagtagcatagttaacaactacaactatgacaaaaaaacaaaaaacaagcaaacaaacaaaaaacaaacccataaacacaccaaaggaaagaaaagaaatactaaaagcatcaatggaacccagaaaagctacttttggaatagcttccagaataaacatcttgtgacatttatgctggtgaggtttattattgtatagacttcaattgatttcaatccaaatcaaatatagatttaaaatatttgatgaaatatatgcctgtgttacagataatatatgcttatttattttccaatttaagcataactcttaataatttttaaaacaattttaacatgcctttgacctgtaatgaacaactacagaacctgaaagttgattaaagattcagtagtaacataagtaatatttgtggtaaaatattgatttaaaaataatgtaaactacattattaaagctatttaaataggccatgggagtcagggaagacaaaaggtctaaatacttttctcttcaatattttgttttatggaaatatttttatattgaaataattgtatttaaatttagattttgtgataaaagttaatttaaaggtatgaactataaaaccaccacaggaaagaggataatgtttcaacagttacttgttaatgtaacagtttatacaataaaaagtaacccacagtataggatttttcacatttacaaagtgtcaagtgtttacttcttcatcaatatcgcctacattttcattatttaacatctttgcccaattcccactgtaaccaagtgtatttccatgcagtcaagttactacccagcttagtttgaggttaaatgtaaaaagctttgacgttttctgttctcagagtcctcctgcagaagcctttgttctgacctttcacccacacccccaggacttctattcactaaaaatgtggaattatccatgctaatcctggaattctggtcattaaaagaaaaaaaattgtgtatatcattctctgcatcaatttcaaaagttattcttcacacctatatttagagatgcagctgaagcttaaaaatattcaattgggcatataattttataaaaatagagcgttctaaaaagaattgagaatcatgtaaaatttaacctgtttttactggatctataagtcaatataaaatatttatttttctgtgtacattcccatatctacttaatgacactgtatcatgttgattttgtcttttttctttcattagcctatatattcttcatgagagtaaataaaactaatcgtgtcttaaatatcgacttctattgttattttgaatcttcctaagggtataggtcaaggtttattcattcttaccttaccttctgttttagcatttaagacagctcatagtagacattggaagattggttaaattgctatttaaatgacctagaatacaattgtttaagtaatttaccaacctttgcaaagctgaattatatttgtgtattctgtcaatattacataatattaaggttctgagatgtgttctttatctttattcagcttttcctatattctagaaaatttcaccttcttcataataatttcttagaaacttgtgtttttttttctttttttcttttttttttttttttagatggagtcttgctctgtcaccaggctggggtgcagtggcgtgatctcggctcactgcaacctccgcctcccaggttcgagctatttcccctgcctcagcctcccaagtaggtgggattacaggcacgcaccaccacgtctggctaattttttttttttttttttttttttggtattttagtagagacgggtttcaccatgttggccaggatggtctcaatctcctgacctcatgatccacccgcctcggacttccaaagtgctgggattacaggcatgagccaccaggccctgctgatactatggactaaattgtgtctgcccccaaattatatatttaagttctaaccctcaatctggttatatttgggcatgacacctttaaaaagtgattacggttaatgaagtaataaatgcgtatccctaatctaatatgactgatgtcttcccaagaagaggaagagatgtcagggatatgcaaacacccctgtgaggatgcaataagaaggtgaccctctgcaaacagagaagagaggcctgaggagaatccacacctgccaacaccttgatcttggacttccagtttccagaactgttacaaaataaatttcagttgtctaaccttctagtctatggctttcattatggcagcccttgcaaattaatacagttagcttgggccagctcacagaacttaacaccaaagtgaaagctggcaaaaatttcgaaaattttataagtggaattttttaaattatctaattttaaacacttccttattattgagtaggccatttcatttttttcaaagataaaaacaaagaaatatattttaatttgcagaagagcaacttatgttaactgaagaaaatgcttactgaatatgaagttaaagtaaaatgtgttaaaagagcctcccttaaattattttagctagaagcataaatctgtctctaaacattctgtgatagcaaaatgaatataaatagcatattatgccattataaatagcagttttaagtgatatgattaataactgttagttctggagtcatatgctaatctttgtggaagcagaagctggctcatatactgacaacctctgtttgccctactaataattcaacccctagttgctattgtcacattgaactacaaattcctaacagaaattactccaaaacctaggaaatgaaacagatgctaacatttcaagaaagccttcaggacaagaacattaaaaaatcattttcatgtagtgcttgaagtaaatcaaatctgctggtatttcatgtgcttaagcgatcacagctttcccagccagtgagtatctttaaaagagaggtttctgtctttcatatcaagtattattttgattaaaataatcatttaatgaactagatctggaagaagtcaaaggtcttttataagattatgacataataatatcttagaaaaatctcttatttactgaaccactatttattttcaaagaataggaaaaacattatgataaagctcatcgaaggtataacttatataggctaatagttatacttagatttcttcttctttgatttttttttcaaaagaaaaaaattttttttaagttttttaaaagaatgcattaaaaccagttataaattcttgtccactactgccaggaaaaacaataaatcagtagggcctcatgcaacttatttggaagtccaaaattgatggtaaatattataatatgaatttacatttcagaaaaatatatgttcaagtgcattgtgagtgaaaaaataataattttgaaatatgcatgtaagagatgtactcttctgagagtagaggtgtagggaacactaggttcagaacagaggaagaaagagtaaatttttaatatctagtcttggtttattgatacacaaatacagtaataatccatatctagagttttactttcaaatagatttaacatatctgaatattggatactttgcatgagttttgtgaaaagattgagttaaaggtttcaaagccatttgagaatttcctttgaacacactaaagggtatctgtgaatactggcttattatatcatggctgatttacaataatttacgtgttgcctttcttagctggaactgtatgtgccaggaatagattaatccttatggttacatagatcagcagcaagacctcccacgtggaagtacctatattcatctttgtcatctgaaaataactttattagaaaatatcacatatcttcttattgccagccaggtgactcataggaaagtacaagataactgaaatcagctacataatcctatagttcatgcactattttcaaacactttgaaacttactgttggtaagtaaatgtttatcttaattatatctaaataatctcttccataattactcttgtgattgaaaccttgttaggcctcagaagcctctcgatatcaaaataactcataaattcctacttttatttgcacctcagaacatgagacttccagcatcctggaaagttcaaggtgtttcttaaactctctaaagggatggtttgcaagccagtctctttcataggaccaccataggccattctttctctaacagtccgatttaatttgtccatgacttctgcctttatagtcaactggaatgcctttactcttgctactatgtactattttatgctgacactatctcctgatgctctcaaagtcatcaactcttgggctgccagagtcctgctacattctgtgcacaactggtgaaaaatggccttcaattttaccctctgctgtgttgccatctgggccctacggcagcacaattcctgtcaagtgttttattaattccctcataaaaacaccattttcatcttcagctgtctagaagctccaaaccagttcagtgtccagtaagcatagacaccatgccaccctttgagcctttacattctcatcgtcgcaagttggatctcccaaacaaaagaaaaccatccaactttcttttccctcttcaacaaaattcaaagcttcttggcacattatttcaagcatacagatgctggtgggagtgtaataggaagtggacaaaaggaaagatatttggaccaagtattttatcctggctccaccttatgaataaaaggaaagtagacattgtcaggaattcactgatgtagcattaaaaaatctattaccaagagatcaaaggtagctagcaggaaataagataaaggactgacacccaattgtatccacagggcaagtgtttttattactaaaattccaataaaaaattagtgtttctagaaaatagatatttatatctgtgttcaggcagattaaaaaatcaatgagttttaaaaattacatttaatgaacagagtgatttatggtttgtttttgctttactaatgtgccagctcgatgtctctaataacaagtctggcttgatagccctgctaacaaatccagcttcatctagtacaatagaatatattttttctgaattcatttccatttactatctgctcagtttcttaaattagaaaataacttgactaattcaatggacaatggattggatatgaatctaaaatgaggcagtttcctgaagcccagacttaactgtatgtggcaatttgctttggggcattgtgcaagagaaggtttctcaaatttgtctaataatagtgaggctcttatagtaaatatcacagaatgctttgttaaatttgaagttcaacacataagaaaatgtccagaagaacacattaatgtccagaagacattacctaatcttgtcttttagaaattatcagcaacattgtgttgctgataacttctaagagacaagattaggttgtttgtggacatttatggaatagtcagtacaaatgtattgaagagaaatggtataattctgattgtgacactagattactattctgtttcttttaactttcttgcttctcaatttttagtgtaaaatatgaggggggtatattaaaaagataaaaggatctttgtaatcctaaggagctaggaagatagtctactagaagatataaatatagggattttgaaagctctgtgttcagaaatggcatcaaagtaataaagttccaatagagaaaaggaattacaattcacattacagtatttagataggactgtaagagaaataaatagctcttccttatttctcgtttaaaatttcagacaaatttgaccttcaaagatatgtctgaacaataacaatagaacataatagaaaaattgttctgactgcaaagaaatagacctttcccaacagtcacttcaaaatgcaaaccagaatgtatggtctatattgtttttaatttaatatatctatgtgaacaagcatacttcttcctcattttcattgcataaatttttacttggaatgcctttgaagttaaaccaatgtgcttcaaagttacatgtatgtatggtttttttttttttaccaactgtacatatgtctacaatttcccaccaaatatggtatcaaatatgtagaatctgagatgttataaaagcattcaaaatcatattttcctcataaaggaaacacaaaattgaccttaataggatattattgaggaatattttaattatctggttataaattctaaggtttcccaagatttagaaaacttactcttggatggcaaaatttactctaaagtattttgcaattgtgtgtgtgatagtgtttgaagtgacagggaaacctatgtatcctggaaacctatgtgtcaaggcattgttttctggatcatttattggcatatccaaaggcttgggaaaaaacttaggataaatagagaataatgaactttttcagaaataaataactaagattactccatgcaatagaatcccaaatgatttgaagttagactttattattagttatacagtaaatgtgataaacaagtttaccctgtgtgatacaaaaaataaaaaactgcagcatgaccataattttttctttatagataaggggctctcatgcttaaagtctgattaacatagccacatctgatttcaaaatatagatatgcccaatgaggtagttcttcacaatgggaatcgctggttaggtgttggttacccaatttcttttatttaaagtttaatggatatttgatgccatatagacaaaacatttggaaggagtttcaaattcccatctggagataggtgtcatataaaacagcctaaaaaaaataagaatggtttaaaaggcttgcttgagttaactaatggttggcaggtccatttgccaggcttattgaatcaagctttaccctcctttaaatgaggggtctgtttttccttggcaggaatgttttagattcagcatattaaaagctgcaaatatttgtgttgggttttcctttgtgagctatctacagcaatgtgagagagcgagtacatttagccacagcaggaacttcccataaaatcacagtaaatgactgtgcttttcttataagccacacccttcctaggcatttctcaaatactttacatagaaatgtgttcactttaacaaaaatcaataaatgcaaatattatttcatttgttttcattaactagtagaaatagcagtaatatattgttaattatattagcaggaccctatagcttaatgcaacaagtcaaaaggcatctggccattcctaagtattgtgactgatggagtaatatagacaaaaaaattggataaccttggaaaagtatgaagatgtgcagtttacaaagagctggctgaaaattaaggagaaatggcagatttgaaaccgtgataggtataaatgaattgtggtatggcctgattaaaaattttacttcatcatattcatactggagtctacataatttgggaagaagaaatattttgtcaaaactgatatatcccataaaatataactaacatactttgcagggaagcttaaggaaggcctgggagacaaaatggacaacaaatgtaacaataataatatttaagtgcaataaggttttttataatgtcattttttaaaaaataaagttttttataatgtctacataagggaaatcaacactgcattgactattagaattagtttgggggtctaatggactattcctgaaatttggactgaggggtcagattattaatggtagacctgaatttgtctcaaagaacaatgttttggaatctaataaaatctcttcagatactctctatttaactgattgcttgtttcaaaggtcaattcattttggaaaaagattatagatttttctcacattttatgacaacataaatgttgacaacttatgtttttgttaatgtatagtgttattcattatcaaaaacaaaaacaaaagcaagctatttgctaatagtcatgtcacaaatataattattatacatagaattatacagacccagttgcaatggacctttcttaacttccttataatttattatccttttaaaacacaagagaaacccatttggtatcttccacccatagcttgaaagtcttatatttatttgcttattagtagtacatttccatctgatacatgtaatattaggttgcattattctagatccaatttttccttctgtaagtgaagtttatgaaataaggttagttgttctagtcacaaatgcattgtacaatgaaaagcatggcattataactcactatattttcatgataagaaaaaagtatgcatatttattgataaacgtattttaagtgtattccttatagtgcgggaagtgcaaagatgaatgaaacactctagtaaagagcagtgtgcttcaagtttttctgttgacaccttgtgtaaaataattttgaaagaacttcagccatttcaactgacagatcagttgtaaagcatgtaacttttggcacattttaaatgttgacattctaaactataactgttatatcatttttaaaaattcacaatgaaacataaatataaaagcaattcaatatctaccacattcatttaaaataaatgagttcttcacagcggttggaaatggtacttcatttctttctctccttgaaatcatatcccagtccactacccacccttcctgttatagaattttattctattaaaatttatttttatactttaaattatttttagtgataccctgaaagagagccaggaaaactcattatatagaaaaaaaaaggaataaaggtagcacggagcaagaaagaagataaagtgacagggaaatagatcattagatgagcacgtaacactttaaaatctgtgaagttatggtgtctgtcatttattattttttttttttgcagacgtgtgcattgctgtgatgtaaatctcttctaatcttttctcgtgaaaatctttaccctgctctaaaatgttttgcaacaaaatttgtacacagattaacattttattttgaaagaatcctgtccaaatggcggcaaatgaatgtttttaaaaagttcttccagattgcattatcactacaacttttataaaaaataatggcaataattatcatgttgataataatagtggctaacacgtctggaaggcttactaagcttcaagcacgaatctatacattacctatttatacctctacttgtagctatctatttatatagagtgtccaccaggtctggaaacacaaacgatatataataaatgattcactgatatatattagattgtaatactttcaaaaagtaatatttgattttctagagttatgatcaccttacaacaatcatgtaaggtaggtactatgcttaacccagcttacctatgagggacctgaagctcagtcagtttattaactttaacatgtgattaaaaattgattaattcaagagttgaatcaggcaggctggttttaaagtttacactcaagatcaaaatgcattattatagactttgatatatattttgattcataattcatcttaaacaaaagtaaaattttatttaccctatattatttaatgagatgaagaaaggggaagctcacatgtccttttgaaaggaggcttggcaaacatcaatgtatccaccatccctgtccccttgtttgtggcctaagagattgttacaccttccaaaaatgctctctagtaagattcagaatgggtgatacaacacttgtgttttttgtgtggggagggagacgtaggtaaaagaggaaaaggaagattgtgaaaagagaagtggaaaaggataactagctggaagcttgtagcttcgaagttttctctggcagatcagttttaggaaggagatcaaatcgagtttgagaatcaggaaattgatttctgtaaaagaagctgtttctgcctatgtggtaagggtatggataactcacttcataggtccttggtctagggaaaagtgtaacacaaagtaaatgatgaaactcagttctatcaaaaatgaaaatgttgttgcatttgagaaccattatggtgggcaatgtagtaaaaaggataagacattcatcctactttaatgtaaaacaaatttgaaaagaaaaaatgataagtaaagaatttcatgaaggtattatcgtcactgcatataatatgctttctactaaatttcaatggcagtttatgtttacctaccatattaaataattgctattacattggtatcataattcctcttatgagaggaactgttctttctgataaaagaaattaaaaatccacttagagtagagcagactcttggtcataaatgttatcaggtgctcaaatatcaggggaagaattctcctctccatgaatcaaattagaaaatgcattacttttactcatgcaacagaagctggaaaatgagtgacaaaaagaaagaatggggtaaagacacaatgaagtcaaaaagagagaggccaaaatagattattgggagaaataagtgacatctaaaaatggtcatttctactatttgatttgaagttgtttgcattggtagtatgtgaacctctcccatatctgctatcatgtaaatctttaatgaagtctactgtctgtgtgagtgaaattttttacagagatcaacaccagggctgtttcagggatcaatgcaaagcagaacaactatatacactaaagaagagtctgattaagggcaaattaacaaggacattgcagggaagcatattcatgagggattccaccattttacagaaataataataatatgaaaatcttttagtgatgaagaagtactggtagactttcatggcacttaagatgagaccctcaaggcacatgatcaaggatgattaccagtacttacttatttaagccagtgtcatatttaagtcccagctttattttgctgtggaacatgtaagttaacataaatgacaagtcacactgacctcatttggttgaattttaattactttaattggagacactgctcattat

SEQ ID NO: 206 - DNA, 1365 bp, Homo Sapiens
tgcagtgagccgagatcatgccactgcactctggcctgggtgtcagagcaagactccgtctcaaaaaaaaaaaaaaaagattaaatgaatcataagaatggggccttaatctgatagaattgtggccttttaagaagaggaagaaagagaaaaagagaaacatctgtctctttctctctcttaaccgtgtgaggacgcagggagaacgtggccatctgcaaatcaaggagagagtcctcatcagacattgaccctgctgtcaccttgatcttggacttccagtgcccagaactgtgagaaaagaagtgtctgttgtttcagccactcagttgatggtgttttattatggcagcataaacagactactgtaggagcttagactctgggtcctgatacatatcggatcctgatgcttatcaaatccaggctccttccttgaatgtgtgacctttggccaggttctcgacttctctatgcctcagtttactcctcagtaaaatggagataataatattacttatcacctcagtaaaatggagacaataatattacttaccatctaggtttattttgagacttaaataacttaatgtatgtaaagtatttatattgtgagtgcaaaataaattaactattataatagtccctaatgtacttaatatctaactgcaaacattgccaagttttcttcttgtccaaagtcacaacagttttctttaggaaattttccatacaaagtggggcacattttcactgggttctttaagatgagataataaaaaatgatacgttagaaaattttccttatggcatcagtcttctctgacagattgcagcttcataaaggcaaaaactcttgattttctttttaacccacataagcccttaataaaatacccattacatgtagttgaagtaagaaaagctggaagtgaggaatggaggaaagaagaaaagaggggcacaaaatatttcattaaatgttttaaaaatccccagaaattcagaatacatgaatataggctgacattaaagcagatgtacgtctcgtgcagaacacacagtgaggaaacaaaatggcaagagcaaagctaaagaaaactaccaaatttgcattttcattaattcagccttaaatgtaactttgtgtcactgaataagtgacttacttcctaaacatgacggtcagacaggaaatcacttttcttgtgattagcataatgcttatattgtttttttagctacagtctaatcattacaaagaactactcgttgtgtccatattaaaattaaaagtaccttgccataacaaaagcacattctaagcctttcgaaatgtcaacatattaaaatatattaaagcaa

SEQ ID NO: 207 - DNA, 1266 bp, Homo Sapiens
tgacacgccgcgcggccccccagtctcccgcggccgctcccccaggcatggcacagggcctcgcctcactatggcagcagcacggcacagcacgctcgacttcatgctcagtgccaaagctgatggtgagaccattctaaaaggcctccagtccattttccaggagcaggggatggcggagtcggtgcacacctggcaggaccatggctatttagcaacctacacaaacaagaatggcagctttgccaatatgagaatttacccacatggattggtgttgctggaccttcagagttatgatggtgatgcgcaaggcaaagaagagatcgacagtattttgaacaaagtagaagaaagaatgaaagaattgagtcaggacagtactgggcgggtgaaacgattaccacccatagtgcgaggagagccatcgacagatattggcccaccgccgatgggcgcctggttgaatatgacatagatgaagtggtatatgatgaagattcaccttatcaaaatataaaaattctacactcgaagcagtttggaaatattctcattcttagtggggatgttaatttggcagagagtgatttggcatatacccgggccatcatgggcagtggcaaagaagattacactggcaaagatgtactcattctgggaggtggagacagaggcatattgtgtgaaatagtcaaactaaaaccaaagatggtcactatggtagagactgaccaaatgatgattgatgggtgtaagaaatacatgcgaaaaacgtgtggcgatgtcttagacaatcttaaaggagactgctatcaggttctaatagaagactgtatcccggtactgaagagatacaccaaagaagggagagaatttgattatgtgattaatgatttgacagctgttccaatctccacgtctccagaagaagattccacatgggagtttctcagactgattcttgacctctcaatgaaagtgttgaaacaggatgggaaatattttacacaggggaactgtgtcaatctgaaagaagcactgtcgctctatgaagaacagctggggcgcctgtattgtcctgtggaattttcaaaggagatcatctgtgtcccttcatacctggaattgtgggtattttacactgtttggaagaaagctaaaccctgaagatcagtagcccctaatcacatgtgctgcaaatagccttcctgacctccatatgctgtacatgacatcaaaatgagtcaggcaattgattgtgaa

SEQ ID NO: 208 - DNA, 3297 bp, Homo Sapiens
catcactcacgctcgggagtgagggagccatcgccaaacagcaaatcatcgtcaagtcaattggcctcgacgtgcctccaaaagggagagggatgctcccttggcttccatggaaaatattctccaagcaagctcccttgccccaggctccatcttcttcatctcctttttttttttttttctggttttagcgggaacgccgcgaacacacgtattctccagggtcctcacttggtgctggatttcaccaacagcagcaccacaggggaggtcagaggaccgtcagtcaacaggtgagccagtggaagtataaacattgccacatcctctcttcctcctgccctggagcccagagaggttttatgtccatgtcatttaaggaaaggagcccacgagcagaagagaccgtgtggtttctattcatgacgttctcatcattgtgaaatctctgcaagaacgacatggaatggaaacaggtattggagacgaaggcaacacgttgtcgtctgttctacttctgcgaaatgggcacattcatgtcttaaaatgatgcagactaaaacaaccgagcatcttccaaggaaatctaatcacctgctgttcacctgattgccacttcctagtgcttctgtgacacatcaccaccagccaggtgaccttcacctagtgtctgaatcagcaccacgctctcctgttgctattcagggagggccttggcacacgggagctttacagtaagtgttactttccatctttattttaacttcatattttctactttgaaaattactaacagccagcatgcatcatggacatcgtgttgcttctatgccctgatttgaattccttatgcattatggacatcgtgttgcttctatgccctgatttgaattcctagtgaatgaacgtgcggtcagctgtgcagaacaaggtggagtaggaaccaggagagggtgtggagctgggaggaaatcgcagggaccatgctgcccagggcctcctgaccccctcacaggatgctgtttctcccgcagggatatgaggcgctatttttattcctctcagcactattcatttacaaatattgtattgggttctgtgccaagtttaaacaattgatgaaatgtggggtctcaggggacccccgagacagaagccttcctaaggaaagacggcgtgaagctgagcggggcggcggctgtttctgggtgggggcttctccctcgtcggggtgaatgagccccgagaccctggggtgctccctgcattctgcttttccctccacgcctgtgttcatccaaaacgcggcagcagccttgacagatgggaagccacctgcgggccccgtgcagcgccgctgcctcccctttcccgaacctcctgcctcctgacccccaggggaacttttctgtgtcagcgtcagcacctcgcagggcgggaacgtttgcttgagtctatgtggctcctgagaggcgacctctgtgttgggcaggatggaggtgaagcacggaggtcttctctggcgaatctcatcactgccaggaaggcacagaggtcaggtcatgagcagggccccaggcagggctccctgtgctgtggagccacagagaaatgccacctcgctttaaaatgaggccaacctgtgttgcctcaagaaaagacctcattggttctcatgaccaaatccgtttgtaaatatttatggcatagtgtgggctgtatgaacacaaacctaattttagaagatattggaagcagggctgatcagtatttttgtcaccgcgcgggacttttttgaattcctaaagctatactttcgggtcagaagaacattgcaatgacacaggacaaaagcagtattttggcaaagattgatgaatgcgcacaactgaatttctacgaaaagaataaattgtgtaatgaaaacactgctaaaaattaaagggacgtggggaacttttccattttttaaaagtggtcatattttaagaaatattttatgaagtaaaatcacattttaagtccaaaggaatgtgtccttttaagtttaaaatcacattaaaaatgttaaatgaaaatgttgacagccacgtttacaccaagcacagggaaaaggccagcacctccccaccagctgtgcagacacttctttgtcaaaaatgtgccagagtcagaaaataatttgataattatttaggaatctgtttttcattttccttccatgtcaaaagtgtattttataataattatgccattttgactttaaaagtacattgtactttttgctgaaatgccagttcagggagcttagtcccattatgtatggtaactggtggctacaagtttatattcactttggaaaaaagttataattgtcttctagtatttggatttcagtttgtcagagataactgattgtgaacaaagtatacgctttgtcctctttatcaaactgccagcattctgcagagctgaacgcattttgcttggttgtgtgtttattgtcaaatgatggaagtggtttttctccccctagaatcaagcagatcctctcttgggctacccaagccccagtggtgaatgggcttcctttggcaggggtgtcgccaggagaagtggttcctctcagttcccggtcaggtaaacagtggctgccagggtgagcccaattattaatttaaaacacccaaaataacagcaatatgaaagatcagtaactgtcttaaagtggccaagtgtaggagtctgtgtgtaacatggtgaccacagggtgcttcgggacattctgtaggtactcatttgtcccacgacatttgtttagagctatcacggttattttttcaagtacattctctttccagttcaaacatatcatcactaattagtgtgtcttggatttgatttttaaaaggaatcttaacatctgaatatagacgtagaagccatacttcaaatacaaaaaaatcttgcattgtcaataagaccactggagtcaaggtccagagagaagccaacagaatcagagaccataatagacttcatgctgtgttctgtctcagtattaataatgctccttcagaaaccacacttccatagaatttgtctacaaatagcacatgctaaataattgtccatttgtattaaaaagagcatataaatatgtagtgtaatattatataagtgcatgtgtatgttgtgtgtgtctgtatacatatatatatttacatacatttccatcttctgatcaacttaaaataacgtgctatagaactgagctgataaaaatctgacaaaaac

SEQ ID NO: 209 - DNA, 3079 bp, Homo Sapiens
ttgttcattttagagtcttacgtttgaagctcaagccacttttctagccacggctataactaataagcacctgctgttcagctccactgctctgtacttccttatcggaaactgtctcatttcccaaacaggaggatgtaaattggcaccatggcttccaagacattttcaagaataagttgggctttgcacataaaaaaaaaaaaagctccctttataaattttattttgcatttctccacctagaggaagtactctgtttcttctttggaaggtgggtttttagctgaaaaagatctgacctccacaaattgcccatagcatccttcagccaccatcccaaggccggggaaccactgatctgctttctgcctatctctataaattagtttattttctttagaatttataaaaatggaataatgtgctatgtgctctttttttttcttgcttcattcactcagcataattattttgagatctatcaaagttgttgcctgtatcaactgttccttccttttaatgtctgagtagtgttccacaatatgtttacacccagcttgtttatccatttacctattgacagacatttgggatatttccactttttggctatcacaaattaagtactcatgaacttttgtttacaaggatttgtattgcatctatactttcatttatcttgagtaaatgtctagaagcagaataactagatcatatggtaggtataggtttaactttttttttttttttttttttttttgaggcagtgtctcactctgtcatccaggctggagtgcagtggagtgatctcggctcactgcaagctcggcctcctgggttcacgccattctcctgcctcagcctctcaagtagctgggaccacaggcgcccaccaccatgcctggctaattttttgtatttttagtagagatagggttttaccgtggtctcgatctcctggcctcgtgatccacctgcctcggcctcccaaagtgctgggattacaggtgtgaggtttaactttttaaaaaagagaaaaattatcttccaaaatggtcacacaattttatattccaatcagctgtgccacacatccatatcttactactcattttaatgggaaagcatttcatctttcaccataactgtgatattacttgttgcatgttttttttcacaaatacatattaccagggtgaggaggaagccttctactcctagcttgctgaaagcttttatgagaaaatggatgctgggttttgtgaagggctttttctacttttactcagatgttcatgggacttttcacttttagtttgtcacatttattttggattgttaaactcaccttgtattcctggggtaaatctcacttgctcacttgttcatgatgtatttttaaatgttgaatttaactggtaagatttagcttaggatttttgttcttccatgctcccgaagtctgtagttttctcttcttataatgtcattaatttttttttttttttaagtcagggtaatgtcagttcactgaatgagaaacctcttcagttttctacttgagtttctatgtaaatagtatactctcttttattactgttagtagaatttactagtgaagctatctgtctctaatataatcattgaagggaggtgatcagctacaaattcactggccacatcctcactcctgtgacaacaaaacagaagattccacttcagcccctgattgactgggggccaagtcttcacttcaccctctgatgggtcatgggccaatccttcctagggtgtaaccaactggacgcctctaaagggcacttagggatgttaccaaattcttttatcttaataaaaccctaaagaacattgtaattcggggggttcttcaggcacttgcttgagcctgttcccactctgtgaaatgcacttttgcttcaataaatctgtgcttttgttactctgttcttttgttgctttgtttatctttcattgtttcattcttttgttgctttgtttatctcttggttatcagttttctatgacaatatatatgtttctgatctcatccaattctgtgtagacagcaagaccacattgttctcagcatgcatctgaaaccctgagcttggcttttctgagacatggtgtacacgtgcagttactcctcttgcccacctttggtttcttatcaaaagtgtgacatggcattggtcttgttcttgaagctcatctttgcacacaaccaatgtggatgctctctgctttaagtgtctctgaatccaaagagaacatttaaggagactacagactgattccctgtgtccttcaagttaccttcattctgttgtaaaacctatggcctctttatccactgacagaaaccctaaggacaacccaggtatttctagaaagtctgtggttcctaagtgaggatgaaaggaagaggttgtgaaaggtgagggccagcctgcggctgttgttcagagaccctactcaaggccaccacgttctggagcgccctccccattcaaaaacagcccatgcacacgactatgcactagcttgtctcagtgcctggaattttccccatgctttgcaattgcaaatgctttcctgagggagtggcagccaggcagagggggaacggcagcctttgtgtctgaaaagcaaagttttaactggaacttcacttccaattacctgatgatgaaaaataaacacaatgaaatacttaagtataaatcaaaccaaacatgaaggggatgtgagtgctaagaacatctcagagtcactaattctggcatctccttcaagttctttcctcccatgtttccagtctaacacagggtctccttgctcaacaagtcagatgctgagagactgccagcacagcctccaacatatcttgtgattcacaagaccttctgaggacatggagaagaagtaaatgcagctcccagttgtggctgtcagaaccatgggatctcaaggcactgagtatgctttccttcagaagccgaggaactactcagtgtgtctcaggactctttgatatgacaattaactcacatag

SEQ ID NO: 210 - DNA, 774 bp, Homo Sapiens
ggcgcgggtgttcgcctacgtcactggggcgctacggtgcctggagctgggcggtcttctcgtcagagtggggactggtgagagcgacctccccgccaggtcctgtgtgttgccggctgaagaagggtagctgaaaaattcagacccagcacagtgtttatgttggtcaaaaatagaaaactatggcgcggccgaggcgggaggacccttcaggccaagagcagcctagcaacatggcgcaaccccatctctgtagtcctacctcagccccccagctacttgaacccaaagattcaaggctccagtgagctatgatcccaccacagcattccagcctgcgagattgagatgatgattattccccaccttctaagagacaaagaccaacgagccaccacagccaccagtcccagaacccgccaatgctggggaacggaaaatgagggagttcaactctggtaagttctcagcgaaatccatgaccttttcctttatcttctggactctcaatgtgactgatgaaagttaccacatgctctgcagggggaaatggtttagcatgtgttactacatcttaatcacatctttgtaaagccaggagcattttacaagtcatgttacagacattgtttaaacatagtctgtatttaccaaagtataggacgttgtatcatctcatattaattagttagttggctcaaaatgagtgctaatgacttagtaattcagtgatttctgttagctttaaaacctttatttcagaactatttcacc

SEQ ID NO: 211 - DNA, 1860 bp, Homo Sapiens
ggttttgtatcctacaactttactgaatttgtttatcagttctaataggttttttgtggagtctttaggtttttccaaatacaagatcatatcatctgcaaacaaggataatttgactacttccattccaaattgcatgccctttatttctcctgtctgatttctctagctagaactttcagtactatgttgaataacagtggtgaaagtgggcctccttgccattagcattttttctgattttattttcatttgtaataaagtgttattattagtagtagtagtagacttaaaataggcatggttaggattggttgactttcactttcagtttccagcctctgttatggtctcatttagtagtatgtcagatgcatttgcagtaaatagacttctcactttaacttgtagttaagtctggaagataaccggcaatcaccctctctctccttgtgttctactaacacaaggaatgaattcttgtgttcattcttattaaaaaaaataatgagacagtttaagcaaggggccaagtgatatagatttatttttgaaattctataattgctctttgaagggcaaactacaggatgggagaaaattttttgcaagctattcatctgacgaaggtataatatccagcctctaaagggaacttaaacaaatttataagaaaaaaaatcccattaaaaaatgggcaaaggacatgaactgacattttttaaaagaagacatacatgtagctaacaagcatgtgaaaaaaagctcaacatcactagtcattagagaaatgcaaatcaaaaccacaatgagataccatctcacaccagtccaaatagcaaatagctattattaaaaggtcagaaaataataggtactggcaaggttgcagagaaaaaggaatgcttataacactgttggtgggaatgtaaatttattcaaccattgtggaaaacagtgtggcaattcctcaaagagctaaaaatagagctaccattttacccaggaatcccattactgggtatatacccaaaggaatataaatcattctgtcataaagacgcatgcacacatatgttcattgcagcactattcacaacagcaaagacatgtaatcaacctaaatacccatcaatggtagactggaaaaagaaaatgtggtatatatgcaccatagaatacaatgcaaccataaaaaagaacaagatcatgttctttgcagggatatgtatggaactggagaacattatccttagcaaactaacacaggaacagaaaaccaaatactgcatgttctcacttacaagtgggagctaaattatgagaacacatggacacatagaggggaacagcagatactgggacctatcagagggtggagggtaggatgaaggagagaattaggaaaaataactaatagatactaggtttaatccctgggtgatgaaatctgtacaacaaacccttatgacacaagtttacctatattacaaacctgcacatgtacctctgaacttaaaataaacttaaaaaaaaaaagaattactaagcatgctttcctgggtcaggttttctagagacataccctgaaacaaggatttacatgcaagtaatttattaaagaaatacttctaggatgaactagtaaaggagtggaaaaataggatatggaagaggaaaaaaattaagtgtagtagatgctgttagtggctgtatcactcagggttcttcaacaggaacagaaccaacagggtgtggtgtgtgtgtgtgtgtatatgtgtgtgtgtgtgtgtgtgtgtgtgtgtgtgtgtgtgtgtgtgtgtatacacaaagagtgagagagggattagttttaaggaa

SEQ ID NO: 212 - DNA, 2135 bp, Homo Sapiens
tcttaaatgatttgtgcaattgcaaggcacggcagtgtattttcagtgtctaaaatgtgcttgtaaagtttagcacacgttaggtctccttggcccgaccttactggccaaagacattacagacaaaatctctgtgtcaaattaaagactacaaatgtaagaatgctttgtcagatgcccacatgttagtaaatgcttgctcagtctctgcttactctgtttgactacatttcgtttttgtacagacaccatcaatcacggaccctgtttatttaaccagggtgagatagcttcttagcctcagttactaagtctcagcagctgggccttggagacccaggtgaaatctcttctgttggttaaaacaaggagacaattaagacacttgcttctcttctaaattagataataaatttccatcaggttagtgtttcagggtttcactcaagttttttagactctaagcatcttcagtttttcagcggatggacagacaggaccagaacctggaggagaccactggggtgggttaggtggtgactgaggacccagagaggaggagctgaggggtggtccaccatcccgcggctcctgctgtgtgtgtgggcgtgtaggtacaagtagatgccaaccagctacacagtcttggaaatgaaaagagccacttctgacacacacaggaagtgacttgggagcttggaaatgtccttaatgaaaaccccaagaagcttgttgggggtgcaggcatacgcttgggtaccactgggcaacacaaacacagagcaaggaggtgggagtcaccccacagggcgtcaggcaaggcgaccattggaccccgtgacctcaccctgtactcacagactccaacactcaacaccaaaagcagctttaaatagtatagattttatggaagtcttcacgaggacgggagtacagagcttgaagcatgagatggattaactcaagtatgaaggacaaagaagaaagagtgactgatagaaatacagaagagacaccatttttttgagccttttacatgagaaaaaaatattctgggaagattccatttccccttccagaattttgttttcagaacagaaatccagaagttatcttttactcatcctacttcctcactcacaattctgtttcatttctgtcccgcaggcttctttcacgaggctgtaattactggcagggacaccttacctacctcctcctctctctccaaatactgtccttcgaggcctaattgaaggcctctctcctccaggaagtcttttctgaatgttggaggctctgataaccttccgggtttttccctccctaactctgcacctacagcagttcggcattacacaccatcctgcgttcttcatttgtttattcaaccacgttttagggattttgaaggtgaattactgttgctgtttccatcagcaataaacagacatatagacacatagttggacacatttggacacgtcaaataagtcttaaaggccgtggaatgagtctagttatatatgtttttccattctagatggcatgaaatttaatgtctattcaaaagtcgaaactataaaactccactaagtataagctttccagataactagtttattttctccctggaacttaaaataggaggaggaaagggaagtctaattctgagaaagtaggatctctttcggatgttttgtccattaaatagtgaatattttattacactaaaaaattctatgcatgtagacttacagtaagtactccatatacattttaggctgataaattggaataactggtattctaaggggcataatttcctaacataaggacacagttacctgtgctacaatgaagagattaaaaattggttattgaatgctttatcttaaaggagtgctgtgtagtaaagaagattcatatttgctaagctctttaaaaactgtaatgcatggtgcaaatgttacatatatagacgtacattctctttgcaaagagctttcacaaaggacaatgtactatgaagatggccacttggaagtaaataggactttgaggcgtttctgatgccactgtagagaatgtcaacaatggcagtattaaatttgctgttttttattatttatttc

SEQ ID NO: 213 - DNA, 3879 bp, Homo Sapiens
gtaaaagcctcagccttttcccactcattttagaagggaaagggaagctggagtgtgcagaaatcacacagtgaaatagaaagcaggaatgagaaatgggaggtgccaggctctttttaacaaccagttctcatggaactaataaagtgagaatgcactcccctggaaagtaatcaaaaatgccccagtgaagaaaagttctgaaccagatagttttactggtgatttctaccaaacatttaaagacaatcaacagttgacttaataagcccatttcattaacagatgcacattgcatctattaatgaatcacttcacccatggaatggcaggctccagaggggctatgaaatggtggtgcctcaggcaatcacctgccgtcatgtcacccttgaaaggttgaatgttttgtccatctggtggaggtgagaattgaacttaaagcctagtgaagctatgtatttaccttgcccctctttgcagggacagagtcaatctctggttccccctatatttctcaggatgggaggaaatggggatccttcttcctatatcatggaagggagaatgaggacctcacaaaggaaagaaactcactacatctgtcagaagtaaggcctgcctgaaatcagtgaggctcatcgcagcccaaaattcaggcagtgagaaattcaccaaagtggcctttctgaggagaattagagaaatgtttgaggctcatagataggcacctagaaacgccatgaagaaagtcacaaataatgcctcaaatgatgtgctcaaatcacgctagagtgaaaaaattggaaacaccacctttaccatgaatttctctttttttttttttttcgagacggagtcttgctctgtcacccaggctggagtgcagcagcacaatcatggctcacagcaagctccacctcccgggttcatgccattctcctgcatcagcctcccgagcagctgggactacaggtgaccaccaccacgcctggttaatttttttgtattttcagtagagacggggtttcaccatgttagccaggatggtcttgatctcctgacctcgtgatctgcctgccttggcctcccaaagtgctgggattataggcgtgagccaccacggccagcctttaccacgaatttctaatagctccctaggccaaggtgttttttctctcctctgtctcctctctcgtagcaaattcctaccgcacacaaacagggaagaagagcccttgtcacttgtccagaacagtgtgggagctgttgggtgctggctgtgggaaggtacacaccttgacaggtttctggcctggagaacgaggggagaaagttccctccagggtgcccctcagtttgggcccttaaggtaatcagagccagcggatgttgagagtttgagaggttcagtaaggttcctagagccacaggacaggagggagctgttggtggttggggagacagttggagaaagttccaggggagttccagggaggagccgatatgtagggcaggagagaataggaaaaaaaagaatgggtgggtttgccagcattcctccttccaaggattctaaggaaaagagtggaaactgcggagacaattctcttaccgtttctcctttcaagatgcacagagagtcaggcagaagggacactagagtgcaggaaaagaaggccgcagagacaggtgcagaaggttggagggaggaaccactgagaccagcgtccgtggaaagatgtccaacgtttgaccacggagagcaacaggccctcagccacagacaggagagatcgggattgacaactatcttcagagctcccagtctgcgggcattgattgactgattaaggcggagtttcactcctgttgtccaggctggagtgcaatggctcgatctgggctcactgcaagctgtgcctcccgggttcaagcgattctcatgcctcagcctcctgagaagctggtattacaggcacccaccaccatgcccagctaattttttttgtagttttagtagaggcggggtttcaccacattggccagtctggtctcaaacccctgacctcaggtgatccactggccctggcctcccaaagtgctgtgattataggtgtgagccacccaccgcacctggccatcacggggatttagaatcatccccttccccaacaagtgtggcctggagcctgcagaataatggagaccaccaccacctggctcagacccaggtcttccaggctggctcacacttgggtaaggttctgccaatcaggtaactaagcccagggcaagtacgtggttttcaggtcctgggtttcctgctgtgttttaaatgaccacacctggaaccatctccttactttctttctagagaattcctcccaggaaaatcaacaaatcaatgagaagtcaaacacttacccagtagttttgcacagtagagcacctgaggaattcgtgaaaaacaccaatgcctggccccaccccaggtgaattagaccagaatttcggagggtgaagcctagacatggagggtttcaaatgcttcccaggtgactcgcatatgcagccaggctggggagtccttgtattcaatctagataaatagcaggcatgcggcaggtgctgaaggtgcaaagatgaacaaggtgaggatcccgctcttgataaactcacagcttagaagggagatgagcatccaaacaaacaaacagccaggtgtggtggctcaaacctgtaatcccaacataatgggaggctgaggcaggaggattgcttgaatcaaggagttcaagaccagcctgggcaacatagtgagaacccccaccaccccaccccccaccacccccaccatctctacaaaaagaaagaaagaaagaaagaaaaaaattagccatgtgtggtagtgcacaccttgaggctgaggagggaggaatgcttgagcctgggaggtagaggctacagtgagccatgtttgtgccactgcacttcagcctagagtgagactctgtctaaagaaaacaaaacaaaacaaaaaaacacagaaaacaaaatcaccaactgtgggccgggtgtagtggctcatgcctgtaatcctaacactttgggagtccatggtgggcggatcacttgaggtcaggagtttgaaaccagcctggccaacatggtgaaaccccgtctctgctaaaacttcaaaaaaagtagccaggtgtggtggcacacacctataatcccagctacttgggaggctgaggcaggggaattgcttgaacctgggaggtggaggttgcagtgagccaagatcacaccactgcactccagcctaggcaacagagtgagactccatctcaaaaaaaaaacaaaatcaccaactgtgtgctgagttcagtcatagaagcactcccagattaaagaggagggtgcgttaatcatgttttttaaaaaaatttttttagaggatagggtcttactctgttgcccaggctggagtgcagtggtgcaatcatagctcacttcagccttgacctcttgaactcccgacctcaggtgatcccccccgcctcggcctccctaagtgctgggattacaggcatgagccactgtgcctgcctatgtttttaattttctgtattttatgatggtttgacatcttgagggccctgctggcctggaagagactgtccctcccagggctagctaattcctaagatagtaaataacttgcctgtgaacttgcctttcatgtgcacatcagccaattcattccccaacccccaaccacctcctttatctactgtcacaccgagccagtattacccctgccctaaatcaccccagaccaacatcatacaaaccagccaatcctcaaccagc

SEQ ID NO: 214 - DNA, 2336 bp, Homo Sapiens
aaaaattagctgggcgtggtggcgggtgcctgtagtcccagctattcaggagtctgaggcaggagaatggcgtgaacccaggaggcagagcttgcagtgagctgagattgtgccactgcactccagcttgggcgacagagctagactccgtctcagaaaaaaaaaaaaaaaaaaaaaaaaaagacaatctagtctgggctcagtctaggagagcgaatcacttgtcaggagttcaagaccagccaggccaacatggtgaaaccctgtctctactaaaaatacaaaaatcagtcgggtgtggtagcatgtgcctgtaatatcccagctactccggaggctgagggaggagaacatcgtgaacctgggaggcagaggttgcagtgagccgagatggcccactgcactccaacctgggtgtcagagcaaggttccatctcaaaaaaaaaaaaaaaaaatgaaagaaggaaaaggcaaggccaggtgcgatggctcacacctgtaatcccagcactttgggaggccgaggcaggtgaatcacgaggtcaggagctcaagactagctgtccaacatggtgaaactccatctctactaaaaatacaaaaaattagctgggcataatggcaggcgcctgtaatcccagctgctctggaggctgaggcaggagaatcgcttaaacctgggaggcggaggttgcaattagtcccagaggttgcagtgagccgagatcatgccactgcactccagcctgggcgatggagcgagactctgtctcaaaaaaaaaaaaaagaaagaaaagaaaagacagtctacagtctagtttatggaataacagaaatctttagggccttgcaaggtttttggtgaataaagtttttttaaacatgaaaaaaataaagaaatctttatggccctgtcaacctcaattataagcagagaggctctctaacggaaaatgttaatctgggaatacagtgtgcaatgggaataggcatgcttggtaaactatgtatttggggaggaaaaggaagacaaaggtttttaaaggaaagaatgaggaggattatgtaattgttttgagataattacctttgactacaaagatcaataacaagggtgacatcagtccaagctcagatagacagttgctgggcaaatgtccttgtagtagtatctttttgtataaggtttgagatggtctttgtgcaaggttgtgttttttgtagtcttttttgttattaggcataatacatgagacttctctctctctccttctctctctctctttttgtagacacagggttttgccatgttggccaggctgcgtttgaactcctggcctcaagtgatccacctgccttggcctcccaaagtgctgagattacggcctgagccaccgtgcccgcctgagaactctctctctctctctttttttttttttttttttgagacagagtctcactctgtctcccaggctggagtgcagtggcacgatctcagcctcactgcaacttccgcctcccaggttcaagggattctcctgcctcagcctcctgagtagctgggattacaggcacgtgtcaccacgtccagctattttttgcattttcagtagagacggggttttaccatgttggcctggctggtctcgaactcctgacctcaggtgatccacccacctcggcctcccaaagtcctgagaatacgggcatgagccaccgcgccccgccaagaattctctctttatagctttccctcactccctttatcagtgttttcttaatgttaatgactccattttgattctgataactttcacagccttcatgtgtgctttagggtaagaagcagccatacccagatcacaatagcaatgttcctttatcaaatgagtgtataagctaaaagcttttcatcattgcaacatcattcaaaattcgctcttcaatttaggcaattgctaccactccccatcagtaaaataatgtatagtctataataagtagtaaattgtgatcaatgtttgttttgagatactatctgttgactttacctgggcctctttcttttcttttctttttttgagacaagatctcactctgttacccagactagagtgcagtggcacaatctgggatccctgcattttcaacctccctggctcaagggatcctcctacctcagcctctcaagcagctaggaccacaggcacgtgccaccatgcccagctaatcttctttactttttgtagagatggggcctcactgtgttgtccaggctagtctcaaattcctgggctcaagtgatcctcccaccttggcctcccaaaatgctggga

SEQ ID NO: 215 - DNA, 1495 bp, Homo Sapiens
cttgagtcatcagtaccttcagatggagattttgctagatttcagtgagaatttatttaccatgctaactccaggcagagtaaattagaaaaagaatccattatcaaatgtaatatttagacataattggcaccttacaaattgtattatctggtttcttgatgccttgtgcattggagatgagaatatatagtatcttctaaaatgtttacattttaaagcctactttttcctattatctttgcaacttggaggctaacatatgagtgaaaataattctcaggttgagttcttagttagttgttgctgctgttgttgttttgagatggagtctcaccctgtcgccaggctggagtgcagtggcacattcttggctcactgcaacctccgcctcccgggtagctgggattacaggcatgcatcaccatatctggctaatttttgtggttttagtagagacagggtttcaccttgttggccaggctggtctcgaactcctaacctcgtgatttgcccgcctgggcctcccaaagtgctgggattacaggcttgagccaccacacccagcccttacttactcagttttgtctgtagagttgtcccaaaaattatggagatgagccaggcatggtggctaacacctagcactttcgaagtttgaggtggaccgattgcttgagcccaggagttggagaccacactgggcaacatagggagaccctgtctctgtgaaaaataaaattagccacttgtggtgatacgtgcctgtggtcgtagctatttgggaggttgaggcaggaggattgcttgagcccaggaagtcaaggttgctatgatttatgagctctgatcacaccactgcactccaggctgggcaacagaacgagacctttactaaaaaaaaaaaaaaaaaagctatggaagtgtaaggcagcttggtggttgcaaggggctgaaggagggaaagtaaggagtgactgcttaacgggtgtaggatttcctttttgggacaatgaagttttagaattagatagtggtattgattgtacaacatggtgaatacactagatggcactgaattgcaaactaaaatggtttaaaagttgaatgttattacttatattttaccagaatagaaaaaagtatgattctctaaacataagtgaagttagtgcccagacatatttgcaagtgaggggccttagtaactagtatagagaaagtagctgttctctgtggaagctatcacttgatactaatcactaggcaggtatagaatgtcctagagttgagcaagcctcaaaaactcacttcagtttagtcctcctgaatctcagtggaacagagctagaatagtttaaaagacatagaggcagctggtgggtgggccatgcctgtaatcccagcactttgggaggccaaggtgggtggatcacgaggtcaggagttcgagaccagcttggccaacatagtgaaaccccgtctctactaaaaa

SEQ ID NO: 216 - DNA, 1535 bp, Homo Sapiens
aaaaaaaaaaaaaactactacaaaagactgtaaaaacacaaccttgcacaaaggccactgcaaccttatatacatacaaaaatatttctgcaaggacttctgcttgttcaacctcagactggtgccaccaggacttgttattaatccctggagttagggatagttatcccaagacaattacataatccttgtttttccttttaatctgtcttcctttacctccctgaatacgcatagtatggcacatggactcccactgcaatgccccattcatgaataggtatcattttcttttacggcctccgtttatttaggttgacagtatataccacaatttgtttatccattatatgttgaatattttgggttgtttccacctttgggctgttatgaataattctgctaaaaccagttgtatacaagtttctgtgtatcaaactacctttgcaaaagtgacagtaagagaaatctgacatggctgactccatcttgcttctgaactcaacaggcctacgtcttggtagaattcaggcccctctcatcctcttcacttgagggtctttcactagttttataagggcagtttagcttttgggaagagctcatcaaatcttattgttgacgagtttttatagagctttatctccagccacctctgctccaggaggctggtgggtgggagtgaaagttccaaccctctcatcacttggtctttctggtggctggccccatcctgaggctagctaggggtcccactctaagtcatgaactcacgtattatcccattacacaggaaattccaagtgtttttcagttgctgtgataagaaccaggaaaaaaggctaaatatatttcatattaccacagatacatatatctaggagtggaattgccatatagtaattctgttcagctttcaggaactgccactgttttccataggggctacaccattttacgttctcaccagcaatgcatgagggttcctgtttctccacaccctcaccaagagttatttttttcataaataagccatcctcgtgggtatgaaccggcatctcattgtagttttgatttgcatttctttaataaccaatgatgttgaaccagttttcatgtgctttttggccatttgtgtatcttctttggagaaatatctgttcaattcctctcatttttgaaaaaggttatcttttttattaagaattttttatagttcaaatagcaaactacagatatcagactatcatatcgtttgcaaaaatattctccccttccataagtttttttttcattcttcaccattcttggatgtacaagtttttaattttgatgaagtcccatttacatattttttcttctgttgcttgttttcaatgtccaatgcaataatccattgccaaatccaaggtgatgaggacttactcattttcttctagatctagctcttacagattgtttaccaattttgagttaatgagtgataaatgaaggcatatgaggtagagttccaacttcattcttttacatgtggt

SEQ ID NO: 217 - DNA, 1417 bp, Homo Sapiens
agcagctgcaggctctgcggggctagcggcggcgagctgggcccctgggcgagggccattcccggggggcttgggcacgcgggcgagcgactgcgcaaggagcgcgcccggtccgcagtctcctcgtccccggcgcgactccccgccccctcgtctgccaagggtgggcctggggcagccccttccacacctgcaactcggcaacttccttccccgcccgactgaccgtctgctctttctggtccgcaccctgtgctctgattccccgctcgtacctttcccaggctctccggctgcccctctgtgctgtgcaggggacgcgcgaccatcccgcgtctgctccggccgccgctgtgcaacgcacggtttagcggatcttgcacctttctagacgggggagggggcggggaggaggttgcttcaccgtctcgcccagcaaacaccagggatccgtgatcacctgctcgccaagacccgcggcgtggccagacctcctcttctaccgaaaatattagtcacatgaaaaagaatccttggagccaaaaatgagaaccattgaaaacaatgccctgaatcctagatttatgaggcaagagtgccagaaaacagaaattacgtcttaattcgtcctggttttgatgtggattacttttgtctagataacttcaacccagttaagctcaatgaaactgaacacttcgtttagtaaccggcaccaaaaataatctgacaaagaaatttcgaaatagaactattagtgtgttttcacaaacttactcgtttgcaacgttatttctagggtttcttcccagtgtcacttctctgactgagaaatgtctcccaggccggtgatttcagtcatcatctaaaaccaatctcatgtctgcacctgggaaggtagtgtgtgtcctggttaaccgcaagggcgccagagtcagataaccaaggctggatatccgcttgctaactggtgaggagaccacgggcatgttacttatcctgtgcatcaagaggagactacatgtgatagatagttcgtatttaaatgtgacaatacatatgaagccctttaaataggaccgggtatgtagtacctctcctggtacaatgttagctacagctatatttttcctcccagaactctttcctatgctcctttccccccttttcacctctgccagttccctcggatttaacatgttgcatcctccctaaatttgctgtgctccttctagcggcttacgcacccagtcagcattctaatacagtcatgccttacctagccacaaggatatgttctgaggaacgtgtcattaagcgatttttgttgttttgcgcacatcatagcgtgttcttacgcaaacctaggtagtctagccaactacttgctttggctatatggtatatagctattgcg

SEQ ID NO: 218 - DNA, 1269 bp, Homo Sapiens
cagaggatttgattattgagttatctttctattctgctgctgtcagtagatttgccataaatgtttcctgagagtctctctcttgaagagattcaggccccagttaagttcatcccaattaaaaatagaaccctgagatgcagcagctgtagcacctcttaaacctcttcaaataacattgtttaggctgccaaatctcttttataaacatttcgttagctaggtaggatttttatatactttcccaaagggccaagttgacagacatgggctttcactttatttccatagagatctggatccaaatccctgggtccaaatatatgccattcacttcccatatttagtcctgttatctctctgaagactggcccaagagaggcctttctgatgagacatttagcacagcgattaatcactagataaacatgtgaatgggtccatttgcaaagtgaaagctccctaaacagaggcttgtcctttacaaaaagagcaggtccaattttccttaaaagttcatggttgcctatgtggtgtgatttgagaaatcctgaaccttctgttcccattactttccctgttgagctctacatttcatagtgtatcactcctgtggatgaaacctggcctctccagggcagtttctctaataaatggccatagtcctgggaaaggtcctgatgccttagtgtgcagtgtgcttgacaccataagatcctttcttctttgataaaaaaaaaaaaaaaaaagactaagacaagaaaactggtggctgttggggaaaggtgtggaaagaatgaaagaagaaaaccgatgcatggaaagatggtaaagtaccaatggaccggtgtgagtcaggttctgaatttaggagtgaggactcaaatatgcctgtttactgggttagcttttggaacgatcctatggaacatatatcctatgaacattatagaagtcactaaagctgactgcaaattgagtgtaagttgagagtatctttctggaaaaacaaattggaaatatttatcaaagggataaagaacttacatatatttagaaccaaaaatttcaattgcaggactctatcctaagaaaaacaattagcaatgaacacgtttcaacccaaagatgttcactgggacattatttaaaatagcaaaaatattagaacaagttacatgtttattaatagagaaatgaatactatggaaataaatttatgctgtaaaagtgaccaaataaagcttggctcaggggctcatgcctgta

SEQ ID NO: 219 - DNA, 2470 bp, Homo Sapiens
atgggggttcaccgggttagtccggatggtcccaagctcctgacctcgtgatacagctgcctcagcctcccaaagtgctgggattacaggcgtgagcccccgcgcctggtcccgagaacatctttatactgtttggataaccctcctaccagcatcttccagtggttaatgataaggatcaagaagggcctcctaagctagtagctattaataattgtaaacatgtattatatacttaatgctcacactgtgttgagtactttacatgattatctcatttagtcctcacaacaaatctttgaggtaagtattactattaattgcatttggcagaaaagcaaactgaagtttagtgaaggcaaataacttgctcaagatgacactgctggtaagtagcagagctagaaggaacctggaaacctgacttcccagctcaagtgctaatgatggcattactttgagtattgttactgggacatcctcctgatctactctaaaaatctagatcaccaacatatatattcctggatgcagtattgctaagaactggttttaacctctagatctgtgtttgaggactcacagattcattactggtccacatataccagcagggcttctgcatgatacccagtaggactttcttaaaattgtggaaagcattcagtgtatcttgagatgtactagtcttatggataattcatctcttcagttctatccagaccacctcataaaggagaatatattaagcattgccaggctgcatcatcaagctatgaaaaatagcttgcctctcaagccttccctacttccccatatcattggaagctttacttctatccctgtggtatcagggaatatcttactcctagaggagccagacaacagtgacttccacaatagcctcatgtgggagtgagagttaataacttgaaagatggccgggtacggtggctcacacctgtaatcccagcactttgggaggctgaggcgggcagatcacgaggtcaagaccatcctggcccacatggtgaaaccctgtctctactaaaaatacaaaaattagctgggcatggtggcgcgcatctgtagtcccagctactcgggaggctgaggcaaggacaattgcttgaatccggaaggcagaggttgcagttagctgagatcacaccactgcactccagcctggcgacagagcaagattccatctcaacaaaacaaaacaaaacaaaacaaaacaaaacaaaaacttgaaagactgcccaagaaaggtgaaggttagatctcaggggatgatcttgaagcaactgagacagacctagaaacttgcctcatatgatacaagaagacccagcttctttgtctctaccctgtaggcactgggtagacaggtaggtgatattttacttcacaaacaagggaactaaaagtatgaacatttctctgttcctcattatctctgccctaaaatattttggctatctagccccagttagagcggactggcactgtctggtacaggaggtatgcagcagatgttctgcatctgagctccattatgactgtcccccaacaaatcatcccccagccagcccaagggaacgtggaattcagaggggaactgttctaaccaggagcagccaattagatccaggccagagaaacccatatccaggcactttatctttgtcctaaaatgaacctagctaacctcttcaggctatccaaaaccctgaccactccacatagagagacatttgctagccttacatgtcactttccactgtacacataccaatgacacctgaaccagatataaagacagacccacaaaggttctgctgagcctaaggatctgctcacctatttctgatcccgaatgcccctgggacatcttccagaatgtgtgcctccaaataaagtctagaaaattggaggaaaatttaaatgcagatgaatcgagaaggaataaaagccattagaaattctgggaaaacaagaaatatagaagaaagtcacggggctgggtgtggtagctcacgcctgtaatcccagcactttaggaggccaagtcgggcggatcacctgaggtcaggagttcgaggccagcctggccaacatggagaaaccctgcctctactaaaaatacaaagattagccaggcgtggtggcacatgcctgtaatcccagctactcaggaggctgagcaggagaatcgcttgaactggagaggtggaggttgcggtaagctgagatcgcaccactgcactccagcatgggtaacaagagcaaaactccatctcaaaaaaaaacaaacaaaaaaaaacaaaagtcacaacccaaatatgaagcaaacaaactttcagatgatgatggtacagtgtgtttataacactaacaactcacttttctccccacacatagcaatcgtaaaaataaaaacagccaggcacagtggctcatgcctata

SEQ ID NO: 220 - DNA, 3396 bp, Homo Sapiens
gcttggcgggccccgcacgcgaagcagccggccggccctgccggccccgggcaatgaggggcttagcacccgggccagcggctgcggagggtgtactgggtcccccagcagtgccggcccaccggcgctgcgctctatttctcgccgggccttagctgccttcccgcggggcagggctcgggacctgcagaccgccatgcctgagcctcccaccccctccgtgggctcctgtgcggcccgagcctccccgatgagcgccgccccctgctccacggagcccagtcccatcgaccacccaagggctgcggagtgcgggcgcacggcgcgggactggcaggcagctccacctgcagccccggtgaggtatctactgggtgaagccagctgggctcctgaatttgatggggacatggagaagcttggtgtctaactcaggcattgtaaatgcaccaatcagcgccctgtcaaaacagaccactcggctctaccaatcagcaggatgtggtggggccagataagagaataacagcaggctgcccgagcagcagtgacaacccgctccggtccccttccgcagtgtggaagctttgttcttttgctctttgcagtaaatcttgccactgctcactctttgggtccacactgcctttatgagctgtaacaccgcgaaggtctgcagcttcactcctgaagccagcgagaccacgagcccaccgggaggaaggaacaactccagacgcgccaccttaagagctataacactcaccgcgaaggtctgcagcttcactcctgagccagcgagaccacgaacccaccagaaggaagaaactccgaacacatctgaacatcagaaggaacaaactccggacacgccgcctttaagaactgtaacactcaccgcgagggtcagcggcttctattctttaagtcagtaagaccaagaacccaccaagtccggacacaatattttctattatctatgtttgattcttgtcataaacatctgaactgttaaggtaattcactaatggatcacaatctgcacttcgaaaattactggacacttcttattcacacgtaatacattctgccttaacacagtgcactctaagagaattaatgaaatgcagaaaagactataggtttgtaaaattcactcagcaaagtcattcattgtgttgcttaggtacataatatttcaaaaactaagcttcactgagcatctgtattgaccactttgaagtgatagttttatagctggatcttcctacatcatgtactatctgaacacatcacactagttttgatcgtttggtctcattaactccaattatccaaattggtatgtagggaaatatacaatacggtgttgacagttcataagtatttgactattaatgtgttgtctataaaatactcaacctactcaggaaacacaattcttcaaagaaataataaaagaatgatccagcatgatctagattgtgttacattcaaataaagaaaaataatgcaaaacaatgcaacctaacctaccattaaatttctaagtaatgaccaaaatccttagctttatacatgcattatttaaaattatgaaacccaggagacttatttacaattcatccttaaatagtggaataaaaatcaatataactgttttgtcaatgcatttgacttcctgagcatattttccaacagaagcatgcttatgcaaatccagaaatgaaatgttaaaaattcagaaatcaaaatatttctttaaataaacttgttgagaaattttttactcagtaaacatttttaacatccactgagttttcttaattccactatttttctgaattgtcatttcttcatataaaaatatttgaataagtaaaactttatgttaggagtatatgtaagtatgtgtggctaccatttcaactaaaacttagggtgggaacctatctgaggatcttttttaaagctggataccttatagaacttgtaaaataaaaatctttttttcttttacaatcttttacaatttttcttttacaatcttttaaaaagggatctatatcacttaaatcctcaaaaaaaggttatatcatgagggaatagaagaaatactttctgttgacataaacagtaattgataaggttttcttgaatacttttatagaaatgctgatgtattacacttaagattactagttagctctcatttcctttcaacttttgcctctggataagctcaactattcccaggaagaaacagtgatcaagtacatttgtcatgcgagcagctataataaggtaattcatcataatctgtcagagttttattctagaaagactgctacattttttttcttacttaaaaatctgctgtcactcctgttgaaaatttggtagacattttggacatgtttaaaagcccttccaaactgatagttgcagataattaagttattggctatcaaagattctttttctctttttctttttctttttttttaacaatatatatgacactatgaacccttctagctagtttaatctgacctgttcacagagcatgatccctcattccctttcctttttcctccttaagagtagccaacgaccaaagtaattcacaatgacaaatgaagcctttctcaagagtctaattgagcaattttgttttcctttgcaagacctgaaatctacagcattctgaactccattcactgaagtggcaagagatagtggtcagaaggaaactaggtggattaaggggtttctagaaaacaagtaaataaactctacctaggtgtgacatcttacatctcagtaatatttcaattcatctactcaattacttactccgtgtatcctttactttaagccatttttaataaagtttcattgtgatgtgtactttattgaatcctaaagtctcagtcactactctctcattcttttgtaatacttcctgcattttttcagcgtttaaattcatgctttcttagaagaagaattatattagtcttttctctagccaattgtgtgatatccttttgtactaccttagagatagactgtgtttggcttaaggacaagaaaggagatataataaatgttttaattggcttttcaaaaaatttacattattctcatacaatgtacattttatacattaactgattatcaaacccaagagcatgttctcattggtagcaaccactggcaaagtattaaacgaagatatacatatatgtgcatattcaaatatatatgtgcgtatatatacatgtatgtaatgttttaatgactgctaaatacaaaagaatatgtaaatacatattgaagtataaattatgatataaatatattgttattctcttctagtaatttgaatttaag

SEQ ID NO: 221 - DNA, 1549 bp, Homo Sapiens
ccccagttcccaccaccactcccagcctctggtaaccatccttctactctccagctccctgagtccagttgttttattttttagatcccacaaataagtgagaacatgaatgtttgtcattctgttcctggccggcaaattcttgatatctaatagcaaagcttcctaccttccctccttcaattttgtatgaatcaaaattaatatctttattatatcttcaaatctgtgtgcttggtatattctccatttaagttttctttaatggctttcataaagttttatgatttttcttgtacatcttttgttagatttattcctagacacttgtattctaaatgttatctttaaatttatttattttaccactgttatcagtgtatttaaggagattctaacactatgtctttcatccaacatatttcattgctaaagttatgaaatctgtcacattttaagtactacaaaatattagctgatattaatagtaattaaattgaagacaatttatctcaagaagtatagttgaaaattagagaaacacttgtaatgccctgcactttcaaagaagtcttttaagttgaccaaggttttgaaaaactgcagatgttacaaatgaaacctttagaatgttaacaaagtcaattatatttatatttactgcttccttaattctctctgtataattaaataaattgtagcgtcaaataaattttaaatgagggcattaaagtttccctgatttttttttcccccaaagaaaaagtaggaagcaatgtagcaatttgtttacagattctccttcatttgattattttggattatcaggtcttttcgtggttaaagtttcaaaggtgtcaggagaggttatttttttttctcttttgaaattctgaatttagtctgtttcctgttcctgacttagtacacttttaaatttggagggcccttagatggttgtccctctgccttccctctggtgcaaggccccagcatctcagtagatactgccaaaatgtttcccaagacaggacgtttactgctccttaatagggtagaattctaattttaattattggtccaggaggaattttaaaagttatgggactggctttagagttttaaatttgctgaaaacagcagtcttagagttgtgttcaaaatgctttgaagtttgttaggcaatattttaaatattgaatttctgatttccaaacttcatgaatgtgtggaagaaaattggaagtttaaattgcattcaggtgaagatttagataattagaacgctagaagaagactatgagtgatttcatagtactcataaaaaagtgagttcaacttgcccacttcaaactgtagactaagatctgtttcctttgaaaactaaattttattttaggaaaaaatgccatagacagtgtcagattgaaggactaccacccctgggctcagtggctcacacctgtaattcctgcactttgggaggctgaggcaggtgaatcacttgaagtcaggagtttgagaccagcctggctaacatggtgaaatc

SEQ ID NO: 222 - DNA, 837 bp, Homo Sapiens
aaaaattgtgcgagaaggcaaaggaaattttaacaaaaggatcagatgtgcaagaggttcgttgccctgatactgtctgtggagatgtgcatggtcaattacatgatcttatggaactctttagaattggtggaaaatcaccagatacaaactacttattaatgggtgactatgtagacagaggatattattcagtggagactgtgactcttcttgtagcattcattatccagaatgcattacaatattgagaggaaatcacaaaagccaacaaattacccaagtatatggcttttatgatgaatgtccgcgaaagtatgggaatgccaatgtttgaaaatactttacagatctctttgattatcttccacttataactttagtagatggacagatattctgcctccatggtggcctgtctccatccacatacacactggatcatataagagccctgggtcatttacaagaagttccacatgagggcccaatgtatgatctattacggtcagatccagatgatcgtggtggatggggtatttcaccctgtgtgctggctacacatttggacaagacatttctgaaacctttaaccatgccaatggtctcacactggtttctcgtgcccaccagcttgtaatggagggataccattggtgtcatgatcagaatgtggttactattttcagtgcacccaattactgttattgttgtggtaaccaggctgcgatcatggaactagatgacgctttaagatattccttccttcagtttgacccagcactttgttgtggcgagcctcatgttacacagcacaccccagactacttcctataa

SEQ ID NO: 223 - DNA, 13939 bp, Homo Sapiens
gccttcagactcaaactaaacgtcagcttttcccggctctcaagcctgctggtccctgaactaaaactcacattatcaactctactggttcttaggcctttggagtcagactggaactacagcattgactcttccggaactccagcttactgactacagatcttggaacttttcagcttccacaaccataatgaaagccaagcatattccatcatttcctaaaaccaagatagagcacatatgggaacttgtgaaataaggatgccctgcggttgttttcaggactgaagacaacagctccacgatgtatctttgcataagaatacacttgtataataagtttttttttttagagaaattgcatgtatctgccttataaactttttcattcattcattttctttcttcctaatctgttccataaagcaaatttctaacttattgttaatcaaaataattattgaaataattagtactttcatatgataaagattattttaatctgcagctacaaaatatgtaactcattaatatttaaacaatcacaattttctattaacattatagcattttatctactactagatcaggaattagctattttttgtaaaatttctttgtaaggcaaagcaatagtattgtatatactttcctaaagattgtcaagttcagttttgcttaaatttaacagtacatgtgacactttctgtttgaagaataagttggttttaagtttataccaaacaaaagcatctcttttgttttgcaaaatctgaaactttgatctttctagttgtgacttcttgtaaatatgttttatataaatattctatgaattggttattaacaaggtaaagaaagattgatatgtaagctgattcttaaacattaattttctggagataaacttttttaaaattatgctttaaaaatattttaacacatgttatcaaaaaggaactgaaatatcttaggcataaaagacatctctagaggtcattattcagtttccagaaagtactgaaactatctctgacagattgatacgttttctgcatttatagctctctggagagaggttctgtatatttaacaattctcactgtgagggatattttaagtatttcaaatttaaagtgctcatgtttcagattcagattattattatcatcatcattattttggttctggcttcagtaaaaatgtgaaaaacacttttccatcttctgataatatttcatatttataaaattattattaagttataactcagctttttcatttatgctttaaatccttttattatctcatcacaaccatctttgactgtttatcagaaatggttctcttttgtacattgaccattattttatagatcacatttaagttaatataaatcatgcctataaatttcagcctgcttattttttataatctagtcagatatcagctagacatattgttaccaagtttggagagccttgggataagctagtttcaaaactggctgttagcatccctcagttgtgttttgggagcaaaggacacccttaaaaaagggaggcagttatattttgtgagcattataaaataaacttaaattctcataaaattagtgaatatgtttggaacagtgtgaattacgtgtgtgctacatgaagtatatagaattcatttgaagtaggaagtctggccttacctcaaaagacagtcattcaattaagcagttaaacataagccaccataagaagtttttttgatacttagagagagaaaggcaacgtgtattaaaattccgggaccattatctcaggagtgctgtgttattattgactgggggcctgctgggaagctagaaatatatctaaaatgtggcaggtggttaattagagcatatgaataaatatatataaatttgttaaagcgttcacttatggtaaactatacctcaattaaaaagaaaaaatatgcacaaagaaaataaataatgaatggaaatatgagcctctaaaatcaaagttagaaaagcagatattcaaatttgcagagctgattgtcaactggaatgattgtgatagaatcaagtctcactagctcattggaaataggatttgttaaggtaatgatggttaatgatttttcagcataataacagccaagttaatgtatgggtgcgtgtgtgtatccataggtgtatgtttttacatgcgtatttttattgtaaaattaacatgtttattgaaaacaagaaagcacagaaaatatcaacttaagtaaagatcaacataatttagttcaaaattatattcaacagtgcattatttcaatgttttttatcttaatccatttgcttgaaagcattgatatatgctccaaatttcctcccagattccacttggggaaatatttagtatattggattatgaaatgatttatctttacctatattattagtaaagttcttaaaatttttagcctgttactgtctatgtgattagtgatattgttcacatgactaaaattcaaagataaaatatgattatattttatgggtgaaagttaggaagcaaaatagcatattaatacatttaactaaagtagtattcatttggataatcaaggtcaaacacttcaaaaataataattttaaagttaatgctttcaaaaaataaattagcaaaaattatttactttgtttcttaaaaagaagaattattgaaaaaaattctaccatcaaaaaatagttgttctatgcctagtttattttagtcactgaataagactgagcccttgacctcatattttttcctgcctcaccattagcagttaggtttagctatgcaaacctttatttattcaacatatataaaatacttagtatgcagtagatgttattctaagtgcttggtagatatcaacacatttaataatcaaaacaactctaagaggtaattagtactattatctccattttattactgaggaaaccaaagcacaaagagagaaagaaaagaaagagaaaaaaggaagaaagaaaagaaagatgaaagaaagaaagagaaagaagagagagggagagagagaaagaaagagaaggaaagaaagaaggaagaagaaagaaagaaagaaagaaagaaagaaagaaagaaagaaagaaagaaagaaagaaagaaagaaagaaagaaaaaaggaaggaaggaaaagaaacacatggaaagtgcttctttggaccttttaagttgcattatcccataaaatgtggtggattcaatgttgtatggcctgtaaaactaagtaatgaaggctgatatgtacccacctggctctgtcttgggatcacacaacttgggagccaaaacagtgagacttataagaatctcaaggatggtgtcccaaggcaaactcatggcaagatcaagaaagagaatggcctgtcttgacaagatttgtggttttggctttcgtctgatggaatgaattgtacacaaatacacagaaatcccacaaatattaaaataattgtatcaacttgtaagaaaaagggaaagaaatagcttaaaatggaatattgctaagccctcaaacctttacaagcaggaaataggtgtaaacaggcttaggaaaatggaaggtggactcagggcagattgaggagatcttggagtgcagcaaagagccatagagagcaatttccagggagtaggactgaactctaaccaaataattggcagcatgtgcctggcatttcaggattgacatggaccggtgactactgtgttccttcccattccccacccttttgtgtaggattgtctgtagcagtttcccaatgcctgttcctccacttgacgttgggtatttggagaacaagaaaaattctctttttaggtcagatgtgtgacatgtatcacattgtaaaaaagagtgctcaatgagctgtatttcaggaattgcacttaaggggaattatttttacctatattggattaatatgataagattttgaactttgagcttatgtaattatgaagtgagacctttagtcttggggaatgactgtattttatatgcgagaggtatataaatcactgtggcctgaagatagactgtggcagattgtatttttcaaagatttcctgtcacactttttttttattctttatttttctctttctttctctttcctctttctctttcccttcctcccttccttccttctttccttccttccttccttccttccttccttccttccttccttccttccttcttttctttctttctttctgagagggtctcactctgtttcctggctagagtggtgtcacattcatagctcactgtagctcaaactcctgagtgcaaacaatcctcctacatcagcctcccaagtagcttggaccacaggtgtgcatccactcctggctaattttttaattttaatttttgtagagacggggtctcactttgttgctcagactgatcttgaattcctggcttcaagagatcctgctgcctcaacctctaaacttgctgggattgcaggtgtgaaccaccatgcccagctactttctttttcttacaatatgcctttgatgctcttcccatcaagaggtattcctttcccttgaatatgggcaaggctgtgattattaatgctatatgacttttgagagtaggtcatgaagcatgatacattttcctagttcatttaggatgcttgctcttaatacctagcccctatgcttgtataagtccaagagacctgttgtggggaggctcacatgaagaagaacgcaggcacctagcctacagtctgattgagctctcatctgataacccataagaacttgagagccttgtgagtaaaccatcttgaatctttcaggacccagttgaaacacttcagctgatgctgcatggatcattgcggatttgtgagcaaaataaattaatatagctttttgttttaattaaacaatattttttgagacaagatctcattttgtcacccaggtgggagtacagtggcacattcacagatcactgtagcctcaaattcctaagcacaggaggtcctcccacctcagcctccccagtagctgagaccacagcatgtgccactgtgtctggctaattttttatttttttgtagaaacggagtcttgctatgttgcccaggctggcctcatgtgatccacttgcctcagtcttccaaattgttgggattacaagtgtgaggcactgcactgagcccaatattcctttttaagctactaagttttggactgatttgcttcccagcagtatacgattgataaaacacagaatatagaataaaattaatctcttatgttgtcctatgaggctttgtgagatttagtttctaccaacaccccaaagtcatgtcataccatttttcactgtgcttactttgcttcactgacttttctcctgttttctaaaactagctagttcttatcttcaggctttgtcattgtcattccctgctgagaatattgtctgtccaaatcttgtaattcagactcaaaaatagtctgtggccactcaatctaaagtaacccaccacaaactctagcccatctccctatttattttcatcatgatatttatatctatctcatctaaattttatctatttgtcatctatctaattgaaatttcatgtttctttactactaatacgcaagctctgttaagacagaagtatttagtttaattagatcccatttgtcaattttggtttttgttgccattgctcttggtgttttagacatgaagtctttgcccatgcctatgttctgaatggtattgcctaggtttttgtctaggatttttatggttttaggtctaacatttaagtctttaatccatcttgaattaatttttgtataaggcgtaaggaagggatccagtttcagctttctacatatggctagtcagttttcccagcactatttcttaaacagggaatcctttccccgtttcttgtttttgtcaggtttgtcaaagatcagatagttgtagatatgtggcattatttctgagggctctgttctattccattggcctatatctctgttatagggacacttttacactgttggtgggactgtaaactagttcaaccactgtagaagtcagtgtggcgattcctcagggatctagaactagaaataccatttgacccagccatctcattactgggtacatacccaaaggattataaaccatgttgctataaagacacatgcacacgtatgtttattgtggcactattcataatagcaaagacttggaaccaacccaaatgtccaacaatgatagactggattaagaaaatgtggcacatatacaccatggaatactatgcagccataaaaaatgatgagttcatgtcctttgtagagacatggatgaagctggaaaccatcattctcagcaaactattgcaaggacaaaaaactgaacaccacatgttctcacttgtaggtaggaattgaacaatgagaacacatggacacaggaaggagaacatcacacaccggggcctgttgtgaggtggggggagcggggagggatagcatttggagatatacctaatgtaaatgacgagttaatgggtgcagcaccccaacatggcacatgtatacatatgtaacaaacctgcacgttgtgcacatgtaccctagaacttaaagtataataaaaaaaaaagaaaaaaaagaaagacagaagtattgttcatcttgttttcttccctaatcacgttacctagaacagtgcctatcagatagtaggcactccacaaatatttgttgacttaatgaaccagtggaaataaatattaattcagttttacattacacagcaaaatagaaatccaatatttaatccagttcatattacaaaataataccttctttttaaaaattaaatccattaaattgacatagaaaaatcttcaccatctcatgactttataaaaacaaaattggtttctataccacttggattatttctacaaattctatttatatggtttgtgtcaataaaccatagaaaataaaattttcaaataaaacttatatatttgttatttgatcttgttctacttatatgaatcttttatttcatgcaaataaaacccaaaatatgattcagcaactttcagtctgtttttagaggcagagtcttgatatttcacccaggctggagtgcagtgtcacaatcatggctcacttcaggctcaacctcctaggcccaaaagatttattcacctcaacctcctgagtagctgggattacaggtgtgcaccaccatgcctggataagttttatagtttttgtagacacaaggtctcgctatactgcccaggctggtctggaactcctggactcaactaatccttccacctcagcctcccaaagtattggaattacaggtgtaatccaccatgcttggccaattttcattctttaatgttaggctttgagtttagtatcaaactttaaaacaaaagcaacaacaacaaaaaacaaaaaacatttccaaaaaagaaaaaaagtactggtagcagtcaataaaagaaaagactccaatttccaggaatttggaatgtggaatcctggcattatagagatacagctttttcatctaattaatgtataaaatagtcaatactttcattttattttcttggagtttactccttttcaccctgaagcctgggtaacaaagcaagtgcacaaaaatcgttagaataacacttttcaacaagaagcagtcccaaagtaagtgaaaggaatttctttagtgattttctccctgagggggagcagtagtctgaaatctcactggtatctattctgaaagaatcaggggatttatttatgtcataatctagtatttgcagcctgctttgattttcctcgggatttccttggatatattttactgagagaagtgtgaaaagtacttctgatttgagaagcatgaaaagaaagcctcaggccaggagaccatcttctactctgagtcatccatttgcctgttctgaacaacctctactattggctcttgcacaaagatctcctgagagtagttgttggtagactctaattgcctactatttttaactcattcccttactcctttgataagagttgagagcccaagactttaatggattttgcacgtatgtcttattctatttacctaatcataatgcaatttcacttcagcacaaacacagccatagcaatcatgacttaattttaattcctaactcactgtaagtaagccagcttatgcttttactaaccaatttccaatgcatataaataataacacatatttggcatatcacagtgcttagctctttctgatgagcaaaagattatatatttattggtgcttatcttgatgtttcacaagatttttcatttatttctatactgttcccttaggttactaggtgcagtcactttccctaccacctgctttccactatctgctccttatctttttctttagaaccttgcttcaccttcttcctctatttgtgaccgctctgcaggtgatcaggcttcctccactttccttaccttctgattgtctcataccatcttccatcattttccacacatattacttgctttataccatactgtatttgtaaaacacataaaagattgctagtatttttattttatagatgatgaaactgaagtatgaaagataaatgactcaccagaggctatgatttgtgggccttttagtgggtttaataggaggaaagcaaaggtgaaatgccagaatagcgaaggtggagaaatttgagatgagtgatagagacctaagaaagtggcagttaaaatggtccagggcataaaatgatgtgaggaatagtagaaagaaaaggagaaaaataccttaaaattgatgactcttctgtcctaataacttcaaagtgcatttcaatttgaaacctttatcacctcattgcgtggaggagacaaaggaaagaaaacatacagagcatttgtctcttcctgaagtttcctcaattcataaaatccctaagacactaagagaagaaaatactgtgaacatgtttagtttgatattggttattgtcatttcttttcattccttcaaatacattttataaattcaatttcacatattatttaacctcatctacctgacatgatattgttctcctgacacatcctgtttattaaatattaatcacatattttactggttccaaattatgcttttattatacttgcttatttgcaggcgggggctggggaaagggggagtgactttcaatagaatcgggatctctagtatgatcacccgcatgatgacatcatcaacagtagacttaagaatcctgttggctccacttgctctaaatttatcagtttcctctggttctctctatcagccttaaggttgggttcctgttcaatactttctttcttttttttttttttcttacttgtagggccaatgtgtagagctgccgactttcttaataatgcaaatccaaggggtgcccctagcattctgaaatacgcaaacttcaaaaacatatctaataaccctgcatcagctccatataacagttttaattagggcccttagcagggcatacactaattactgcaaagagcaaacaaaactaaaatgagtaataaacagaaaatttatttgatgagtatctacaatggggcaggttcaaggtgtgttataaatgttgtgaactcaaaagtggatagtaaagagccagccccactctcatggagcttacattttagtatgggtaggggccaataataatcaaatcaaaccaaatcaaacaagatgttgaaaagtaataaatgctatgaagaaaaataaaatagtataatatcatagaatagagagacatggacgctgttttagggaaaaaatgttacgggtatataagcagaaaagcagatactctgataagaggatatatgaactgaaatctgaatgaagcgaattaagtgagcctgccatgtaagaagtaggattttgggacaggggaatagcaagtgcaaatatcctgagacaacagtgtgctgagagtgcttaagaaatagcaagggggctctgtggcaggggtgaagtgggcaacaagtagaatgataagaaatgatgacacagaggaagccagagataagaccgagttctgacattcttataagccataataagaattttattcaatgtatgataggaaatcattgaaagattttaagcaagagtaacactatctgatttgccatttagaagtcattaagaggtcaagaaattctataattgctggtatgttcagaatagactgagtgatacaatagaggaagcaatgaggcaagttaggaggctacagaagttgtccaggttagaaatgatggtgtgacttcaatggtagtggaggtagggagaagggtgcaataagaacatatgcttaaggtagctcttgttacctttactctgactgctattcactgagggattagttatgaggtaggagagaaagagggatgaaatgtgattgtaaggttctaaccctgagcaactagatgaatggtgataccattttctatgatgggtaacattgaaagacgaaagtttgaaagcagatgataataggaatcaatatattatgcctggagatgttgagttgagtttgaggtgcttacaagacaatttaattagagataattgtggtttgtaacagggaaagaggtacttttgcaatgtgcatgtggtcacttatctgctgactcaacttgctggtgtgaggaagcagctaactctcagaaatttaggtagtgtgaaagagaaggcaagtatctagtagtagagactattttcactgtttgaattattatggatagactgacagtgggaatattattaaaatatgtgacaaggaattccagtcataattaaagtaaatattttgccagaaatgataacaaatacctttgcacagagttcccattggtcccgaaacctgaaggtgctggcagtgcctttaagaggctatagaatatgatctgctgtagttttgctgagcttgttaaaaataacccttggccagacacatgccatccttcagaattaagtagatccctcagcacctgcttcctgtaccctgtcttctgttaccatgtgctttctcagatactaatgggttcttggcttttgcttctaggtataattgtgatctcttcccaggaaaaaggtaatgatcctggaacaagatatatatgcctggtatatatttattatcttacaattgagctttcattaccaataagagttctcttaccttgagtcctcaccctgtgctaagctcttgcaaaacacatcccagattttatctcatttaatcctggcaacagtggtacaaggcaaaacctggtattattctcattttttatttagagaaatataattgtaaagaaattaagtaaattgtgcaaggcctcacagtaagttgtaggacaataaagacgcaacaggtgccatctacctctaatggctgaccacttactatattaaattgttcttgtgagcatgggagaatcttggggaaactattatacagactgctggaggtatgtgactggttactttgaaattgaactctaatgtggtcccaagaatttttgaaatcttgaaagagagtagaacttccagtaacccttcagatgtttcagagaaaatatcaggtttctgttttaaaatagaggtaataaacacatttttaagacaggctcttttattctagaaaaatctcttgagatatataactaaacaaataaaagacagactccgatatcagaaaagcaattacagacccttcattataagaagtaaaaattgctctatacaatagtagaaaatatggtcactgtggtacatctctgcagcctgacatctgatttttgttgctgttaatagaatgagacttggctgttctaaaaaactacagcttgtcctgtggagaactgtgattacttctgatggaaaatgacaggctgaatgccagaaggcaaagcaactgttttcctaagagtcttaagaccctgaaggacttgtgcctcctttggtgatctaggggataaagaagtggaatggaaatggagaggaatagctggaacaaaaaggcaaagaggtataatctatcataaatatgccgcctttataagcatgtgtgtaccaaaaaaaagccacaaaccatataaagtgagcctatattagaaatagaagtattttatgaaataatatatttaaaatttccagtaaacagaatataaatttttcccaaatacccataatatatttacaatattagaaaaaaatgcaagcagaatttatgtaaattatattaatggaattaacggaataaaattagaagttaaaattaaaaatagccaaaattaatatttgaaaataaaaatattttgttatttgtgttaaaggggaaatcaaaactaaaattagatattatttaaaaatgaatcttactatatatcaaatcacataatatcaaaatcatactctaaagaaattttgtagccacagatgtatatttttagtctgataaatgaaatctgcattcacctcaagaagctagcgaaacaacaaaacattaagaactaaaatcaacataatttctggtcactttgttaaataaaattgaaaccagaatatttccttgtacctctattaagttaataccaagaacaagcaaaaataaagcaattacttgttctagaaaatattttctctttggaaataagacgaataaccagctaaaataggtttttaatcaaaactaacaaaagtgttgatcaatactcatttcaagatcctggcttcatggtgcccatcaatccaaaactacttcctagaccctgttgaatctcaaccaacttcccccctgtcaagactagctttaaaatcactcatgaaggtatgagattctaataaacatctccctttccctctgacttctccttcttgagacactacacttgtactctattaaggtgatagtttttcttcctgcaataggtcacataaacttagctgtcttcatcaatatttctgaaggtattttgtgaagttaacagcaatggaagagaaataaatcataaatatttgaaaaccagttattttaataaaaaaagaagtgtctttttttttaacagaattgcaaataacatatggagatactgtgctcccaggaggtggagatgaattattatcctttcttcacaccttcccattgagattgggctagatttgctgatatttttcaaaaaaatagtgcagtgaaaaaaaaaaaggtgcattgttttagtacaagaaacttggcacattctacctcaaccaaatgatgaaagttaacatcacagattccatgtggacattactacctccctggtatgatgtgatgagaaaggcatttccctctgtggtattatttcaaatgactgataattctggtctaatcaggagaaaaacaacacagatccattggagactttcaacaggacacctgcccagtatgcctcaagactttcaaggtcatgaaaaccagaaaggagagataaacaatcacagattaagacattgtggaaattgaacaatcagaagcaatgatgtagcctagattaaatcctaaatctgtaagaggacattgatggaaaaactggtgacatccaaagaagtcttgaatttagttacagtaatatcctaaaagaaaaaaaattgaaattgaaagcaaaataaagtacttcacaaataaatgagaaatacatcagataattcagattataaacaaagagaaaaaatcaattag

SEQ ID NO: 224 - DNA, 1490 bp, Homo Sapiens
gtaaaaggcagggaactaggatgacctacagtggaatcagtgactccagccaggtgaatcagtctagctaataacagctcatgttcgttaaacaagtcctatgtgccaagcattttgccattacttaggtacaatattacatttattcctcaaaataaacccttagagttaggcaatgttataattattttactgttgaagtcttctgaggtttaagaaagttaaagtcctttggacgtgattaccaggtaagaagtagaatttgggtttaagaagtctgattccagatcctaagctctggccccacaccagggactagaaggaaaaagatgagacatcagtctggagccaggcatctaaagatctcatatacccatctaaagggcattgattctttttatttttagttgatatgcaataattgtacatatttatgggacacagagtgatattttgatacatgtgtacaatgtataatgatccaatcagggtaattagcatatccatcacctcaaacatttatcatttttttgtgttgcagacaatcaaaatcctctcttttaggctgagcacagtggctcatgcctataatcccagcactttgggaggccgaggtgggagatcacgaggtcaggagctcacaaggtcaggagatcaagaccatcctggccaacatggtgaaacctgtctctattgaaatacaaaaaattagccaggcatggtggtgcaagcctgcagtctcagctactcaggaggctgagacacgggaatctcttgaacccaggaggtggagattgcagtgagccaagatcatgccactgcactccagcctgggcaacagagcaagactctgtctcaaaaaataaaaaaaaaaagaatcgctacagagctgcagaggcacaagaggctgaggcacaagaattgcttaaactcaggaggcagaggttgcagtaagctgagatcactccacttcactccagcctgggtgacagggtaagactctatctcaaaaaaaaaaaaacctctcttccagctttttgaacatgtacatttaattattgttaaccatattcaccctaaaatgccgtagaacactagaacttatccctcccatcttactgtaacttgtatctattaaccaatctttcctttttcctccctagaggactagaatatttatgtaaaaaatcatccaatcaccttttattattattataaatatttcaaacatatagaatataatagcaagtaacagaattaactcacaggtatctaccacttggttctatcatttcatcatatttgctttatattgtttccttttttaacctatgtcatatttaaattagctttttgtagacagcttatatttgagtcttcttttttatccaatctgacaatctctgtttttttagtggtatgtttagctcatttacatttaatgtaattattggtatggttgaatttatgtctattattgtattatgtgg

SEQ ID NO: 225 - DNA, 8078 bp, Homo Sapiens
ctctctctctgtacatgaagggatcatgagagctcacagcaagatggcggctgcctacaagccaggaaaagaggccttggggtgaaacttaccttgcagtaccttgatcttgaacttcttaccctccaaaactggcttttggagtcccctactcatacaccttctcatacatgagactacactgcttgaaaaccacaatgggctccataaacacttttgcaatagtgaagaagaagaaaaaataatgccacacatgaatgctcctgagatgcctctgcctattctggtgtgattgaattctgtccccagcaaagggaggaatggggtgaatgttgctatgtttctctttgcctccatggaaagaagtatttggagtaaccagcatcatggagacaacagccttactccccaagaaaccagagttgggggagaagagggatctgccttctctgtgaaaggcccggaggcactgaaaaggagcagtttcggaagaatgctggccttggaattatctacccacctatctatccatctgatcatccatccatccatccatccttttatccaatctcctatctgtccatctgtccagctagccaaccctcattcaccaaatatttattgagcatttgctatgcacactcactagggataaagtggtaaacaaaatggacatcagatcaattcaggctggtgtcctagctcagccatttaactgtcaccttgggaaacttgcttgctgtctttgagctgctttctttatctgcacattagggattctaatctctacagtgaaaaaggttacaataaatattgtccatatatggacataacttagcacagtagcaagaccacagtaggtgcaccacaaacagtagttttggcagttctctatctcccccaaagacccctgcctaccacccttctgctgcataggacagcatttctgcatgatcttcatacaaggcagcaacaaggacctgtgggacgacgtttgtctgggagtggagatgaggcccaatgagagtcggtggcgtgtctgaggcttaccggtccttgaagagcaggagctccttccccagcattgtcacagcgtcaaaggatgagctggagtcacagaggcatccaggaaaaactgagcgagttcttgtgaaactgaagtacactgaaggtgtttgctatttaaaggtatcttctggtggatcgtcttggaaaacatggacccaaatcttgcgagagctatcagtgagtctcctctcctgctctgcatctctcaggactgtgtcccagctccagaagaatgagcctgcacagcttggactgtcacctctggcaggttcctgctctttgatgaagcctcgtcataattacaggtgtttgaaagttcctccattgatcttctctctcctgctgccttgtcaagaaggtgcctgcttcccctttgccttgcaccatgattctaagtttcctgaggcctccccagccatgtaaaactagccttatcttcaacagctgctaaaattgaagaacaaaaagaatctttgaaacttcccttcaactggtcatcctcttccctttttctctcctttaaacactgttccaattcattatgatggccccaaagcaaagacagacatggaagtgaacattggagtggaaggaatgacgagcccaaggatgaaaacagagaagtaattaatggcagctttcctgggccagaagaataaataaggaattatcttacaaacaggtgcttcccattcccctgaccagctacatagtcatgtcaggcatcatgattcgagaccagcctgacctacatggtgaaaccctgtctctactaaaaatacaaaagttagcagggcatggtggcaacgtgcctgtaatcccagctactcaggaggttgaggcaggagaattgcttgaacccgggaggtggaggttgcagtgagctgagatcgtgccactggactccagcctgggtgacagagtaagactcggtctcaaaaaaaaaaaaagaaaagaaaaatgttttttctgtccttagatgattcttgtaagcaaattctctttccaagtagtttgccaaattgatttaatgaaagtccatatgcttcaaacagattcctaaagcctcagatgccaggtgggtgttggccttttctgggaaagatgtttcacaactggctataacctctcattccagtgtcccaaacccttggcccagccaagggaggtgactgttttctttaggaactgagtgactgcttctgaggaagcttgagtaaatgtgaggttggcttctgtttgataaacacgtggcactcaatggggacttttggacagaggagactgcatgggtgacagctggtggccttcaccaaatcctgaagttaaatttagggaatcagacccaagaacactaaaaggattaggggctctccacctgtcttccttggtcttgctctctatgctctcaggtcttcactgttgtagccacagtggtgttagaaggacgaaaatgctagggtagggatggggcaggggtagtgtgaactatagtggttttcaaaatgggcaacatcaatataacctgggagcttgttagaaatgcacattctcaggtctgctgaagaccgactgaatcaggaaatctaggggtggggcccaagacctccaggtaattttgatgcatgctaacatatgtgaaccagcattttagaaagtttatgctacttaaagaaagtctgtgaagcaacaccccctgggaacttgttagaaatgcagaatctcaggccccacccttctgagattcaggtttcattggtctagggtggaggagcccagttattggtcatttaaaaaacctcccgtgtgattctaactttgcatccagaatagagaattactgctctaaggaagaaattgttaaatgcattttatgttttccaggagaaaagatggtcccttccacagagacagtaaaagatatgaatgatttttctttgtagattcactggagttccactagaatagtgcagttatcacatcttcctccaaagaggggtaggtttcagagtttcagcagtagaagaaatctgggaggaatcaagccagtgtgcaacatcaacatcagttatattaggctgttcttgcattgctataaagatatatgagacagggtactttttataaagaaaagaggtttaattggctcacggttctgcaggctttacaagaagcatagtgctggcatctgctcagtttccacggaggcctcaggaagcttacaagcatggcagaaggcaaagggggagcagggacgtcacatggccagagaaggagcaagagagagagtaggaggagggtggcggggtgaggtgccacacacttttaaacaaccagatcttgcactaactcagtatcacgaagacagcaccaaagtataaggatccgcccccatgatccaaacacctcccaccaggccccacctcaagcaccgtggattacaattcaacatgagatttggacgtggctttattgagcaaataaaccacagcaaccatgaaattagaagtttggtaaaacatgttgcagaagaaccaggaaacacattgcaattgagcctgctgggtgctgctgcaagtttgggggtgaacaggagaatcaggttcttataggggtgaagtctgcaaagtaggatgttttcctaatttgaatgcaatgactgaagtggaaaatggtcaaaactgggcagagtggctcacacctacaatcccctaggagggaaggacaaaggcatccatatcacctcgccacagtggttgtggtggaagctgtagcactgaagagatgcagccccatggaagatgctgccaagagagggagacagagctacgtctggtgtctcccttcctccttacctggtgcctccctcctcctgtcctcctgtctcccttcagatgaaggaactgatgctgagacttgcactctaccataggcggaagcacccaccaccctgttcccagccctggaagggcaaggaatgaatctgaggcaaatagggccagcactggcagtctgctcgattttccctcagagcatttatcttccttgacatatttacaattttttgtctatttttggtttctctaacttgactagaatgtaagatccacaaggcttgggctttgctcttttgttcactatgtccatagctcctgtaacagtgcctaaaacatagtaggcaatcaatagatattctttggataaacaaatatgcctcaacattgagtctaacttacagcagacattgaataaatatctattgaatgaatgagactaacaatttactacaaaagcagttcttatgtgaaatatgacagggttgacatcttaactgaaatccatcttgagagattttttttaacccaccgagatttctgagaacacatttatttgaagaaccttatattttatgatgcatttttatatgtgaattttttgaaaccctactatcttatttcctgaggggttttagactcagctattcttcatttcatttttatacatttgtgcagctgaacacttcctactttattctttttgtttctaagttcctaaaaatagttcagaaaatccaaaattatgaactcgattcatccaaaaaaatgaacaaatcaaataactttgaaaataaatgctttcactatttattactaacaaaattgaacagtataatccagaaaaattgagcaaaaataatttataaatctcaagattaaaaccaaatatggctttatgattgtattagtccattttcacactgctataaagatactacccaagactgggtaatttacaaacaaagaaggtttaattgactcacaattctgcagggctggggaggcctcaggaaacttacaatcatggtggaatggaaagcaggcaccgtctttacaaggtgtcaggagagagggagagcaggggaaaccaccacttataaaaccataagatctcgtgggaacacactcactctcatgagaatagcatggagaaagccgcccccatgatccaatcacctcccatcaggtccctccgttgacatgtgggcattatgattctgattacaattggagatgagatttgggtggggacacagccaaaccatattggtcaattaagcgataaatactataaaaattataaatagtggtcaaactgaaacatttctctgtttcagaaacttttcactttaagaaagtcttaaattcattgttgattaccttgttcacattttctcgatctctcctagagatcaaattaggactgatttgtatcaataaatctggattttgatttcctttatgactttggatagatttctggatggtgagtgaatacagacttaaactttaagaaagtgcctgcttccagcttctggctggaggctacacttcccagcctgtcagaacagccaccctgaaaactgcaatccattatgagaaataaagctctcttttttaaattaaaaagaaaaaggaattaaaatgtaggatttggtgaccaatttaagtatgttaaagatatgttttggctactgagcttcctctgagattctttatactcaaacacaaacaaagcactgaatttcaacctgaaaatatgtcatgtgtttcaaataacttgaagaacaaaaacaacaacaaaaatcctgttattttctgggaaaaatgattcatttcaggtaaaacccatgacatatttttaggtcaccaaatcccacgttttaattcctttttcattaggagagtccacccatgataaacaataggaaggttgtaatgagtttctgtctttgtcctcaggcaagaagaaattcaaatacattctttctgtgtgaattcatttcttttccacctcagctgttcaaatctccaaaatgaataactattgccagcactgtcttgttcatgcttgtttttaaagctgtttctttcttttgagacgtaatcgcaggcccttaagaaaaccagaagggacaagccaagtgtcaattatgtttgttgttccagctagtctgtttctgtaagtgtatgatataggacagaaagaattggcccatatttttttccaattttgagaaactctgagcttaatttttagttttcccaattgtttttactttagaataaattgcttagtatatctaattataataatgatggctcacatttactgcgcattaactacatcaagtacttattgtaagtgacgcatgtgaccagttgccaattgttcaggctacagcttggatctgttagcatcctcatttaacaaatggagaaattgtagcacagagaaggaactttccccaggttccatggtgaataaatagaggaagtgctcaatgagcctaactaatctgggttgaaagctcatactcttacccagcctccaagctagcagatggaaatcaaaatatcttattttaaagctcttttctaggagaaaagataccttgataagctgtttttccaaggaatgggaggccataatgacatgtttaaatgagacaataaacaggtttacataactagtttacatttaaaaagaaagataaagaaacaggaacttgggttcctcccagaggtcaaagaagggaggggtcagacagaagagcagaaggttggcatctgtggggaggtcactgtggggagacgattttggaggtgggtttgccaaaggatattaataagatttttccctctaattgtttgatggggagcattagaaactccataagattttggattttggaaatcaagtttatttaaatcttaaaggatgagtgatatcacctactttttgagttataaatctttaatataattctaatattcaacatatatgctttgaaaactgtgtttttagattttccactgaatttgaaataggattatttttatagttgaatcttgtcctctcctacaggtcaatttttaagaatatatatccaggaaaaagtaactgcccataagcaaaaatgagtgcaatttctggtgctctcctaactgtaatatcacacgtatttgtgctacagaacaagaatagggacaaggaaagaaaacaaacttgaccaacatttgagaatctactacatgttaagtagtaagtcatactactttttaaaatccactttatcgaagtagagtaaacatatacaattcactaattttatttgcacagcctatatatatatacactagtgtcaccactgcaacaatcatgatatagaacatttctatcaccccagaaagtttactcatgatcctttgtagtcaatccctcctcccacttcccacctttggcaatcagtgacctgctttctgttactatagttttgtctcctctaatttttcatataaatggaatcatatatcatgaagtcttttgtatctggtttcattcactttccatattgcttttgggattcatccatattgtttcatgtgtcagtcatttcttcctttttgttgttgagtatggacattccagtttgtctattcatcaactgatagatatttgggttgtttctagattttagctatcataaataaaactttcatgaacatttatgtgcaaatacttatttgggcaggttttcattcttcttgggtaaacatttagagtaggatcattgggtcacaggagaagtgtgggtttaattttataataaattgccaaactgagtgaggaaggaagaaaccagtcaggcaggcagttagggtggatgctccattgatttctttcaaacaaaagaacggcatgcaagcactgataagggaactttcacaggggggcttgcctaagatatgcccacagctgcatacataagaaagtctacacaggagacttacccagacttatctgcaatggaaaatgctatcccctgacacatgcacggtaagggaaacaaagacaatatggagtaactcaagctaagggcctgcatgcacactaggaggactgggtggagcgaccagaaatttgctccttatgcaaatgagacacccaac

SEQ ID NO: 226 - DNA, 1212 bp, Homo Sapiens
ttaatgaatccatcatggtccggagaatgaacctcatccttttggggtcagagattatctcatcattgactccgagttgattggatggatgcagacagtatacagaagagcctttagagcttcatacaattgtcctgggatacatgtacagaacgcaggattgttacataaggaaacgtatgccgtggtggtttgctgcacctatcaacccatcgccaaggacatctaataactgctctgattggatttaaacatttgcagtggggtacttctggctttgtgtatgtagaagtggtgtctaaaagagtcaactgcttcaccacaggacttttatacttctcatgaaatacagtccttcaaaaggcaaattctctatttcccccactttgattatctgcttatgctcctaaaataatgtaaatatggtcattaatcatctacaacattgtcaattaggagagtaaagccagtaatgaactctacatccctgacctcatatggtatgttgcattttaagggagctgtttttatcaatgacaatcgtattatttgtgctcataacctgggctctacatccagtgaaaggattttgatacagaatctttatttgaagagaactacacaaaaacaccatcaccatcatacctgatgtctgctattgttgaaataggcttcagcactgtagctggtggaaaccaggtcaccaaagacactgcccttgtacctggaaggcccgtccctgcccccattcacacagtgaattcatttagaagagaggaatgctgtagacagagtcattagaaaacccttcatgactgtggcgtggaaaagggctggcaaggatcacaaacagctttcctgggtttggtcttacagcatggacttcttcaccctcatctacacgtaaaatttattaacttcaaggagaggagatcagggttgcctctaccttgcattcctatgtagccatgaattaattcccaaatgccagtgtgagcctgttttccttttcatacatcgtatttgaggaaacagctggaaatattactctgtgtgccacacatcccgattcagcacagtctcttgttcccagagtggagtaaatgagtaaagaaattattcatccgccttttacctaacttggtgtgtgaccaataaattctctcaagattgattcaggttcctatattcatggaaacaaaaaaagaaaat

SEQ ID NO: 227 - DNA, 1079 bp, Homo Sapiens
acatgcatggcaagtgtcacacaaaaataaactcagaaaattttcattctccagtgatgtggcttgacacaaaggtgcattcagagctaagaaatgaaaatagtggtaaaagtcaattatgagaaagcaaagtgggttagtagaatgcagggcgtgtacgccaagtgcctaatcccagcttgcctgcttagtagccatggaacctatttagatatttttaggtccacctgcttcgtgtatcaaatgtggggatatacaagatcaaggatgtcaaataggttttcaatgcaagtgtcaactcgagaggtttattggaaaagataatgaggccttatgtcggccatgagaaatagtgatgtgattctttactgatattctccatcagtacaggatcagggaggagcccagctctgggacatgttggccattcgtgggctaggagattatctgtgttcctctcaattttattttcctatgattgattatcatcttgaaatgagtccaatctgagacttggacacttagggcattaggaatcagcagagaagtgttctttgctgtttagctgtaggacaggcaggatagtggttaaaacaatggactctgtagccagattgccaggatttggatgcttagatgttttgaaagcttatttcaggtctctgtgccactgttttcctatcagcaaaataggtgtgaattaaactagttgacacaggaaaagggcattgaaaagtgaggtgttagcatatggtaagtatttaataaactcattgttatagatattgatagtgagaatatagtgatcagaggatgctaaacagagacccaggatgtggactattgaagaaggactcccttaattgtcttcatgcattcagatgaagacatgtgatagagatggaccttcaggaatgcctgtgctgtaaataaggaaataaaaagagtctcccggaaacagggaagcaagagaccccaggatcttcacatcagccagaggtgcaggatgctctggaccccagaaagaataggagaaagatcccaggtatgacacatacccagagacaccatgctcatgt

SEQ ID NO: 228 - DNA, 3121 bp, Homo Sapiens
ataatgcaagcccttgcatggcaatccaaatttattgaactactgatgctaagttatacaaaattgcaccactttaattaaggcttttagtttacatttggccacctcaaagtagttgtaacattaggttggtcaatttaaatactgtggctccctgttggatagacacacaatctttacatccaaacattaatgcatacaaagcaacaaggcattgttaaataaaacagcaatagttactgcaaattaggccttgtgaccaattacatatgattaaaattacttcccacattcacatccacagtactcgtccaccatttaacatctcaaccaaaacgttacacatgtgaaacaatcactaacaggcaaaaatactaaacctgtatatttggtattgcaaatacacttatgcatgagcaagcaagggattcacagtgagaatctacagctgcagaagcctgaaaatgatttacaaaaattgttaaatcattaaaaaattgtttgaaaatatacacttcttgttgtagacccccactgtacacacgactataaacattgttccctatgtaaacaaaaaaaggaaacatataataagagatttgaaaagtctggacatttccttcccaacagatattaaaggcaacgtctttaatctaagacattatactgaaaggactatcatgttttaaagacaagatcaccgtctccacaggttttttaaaaattaaaaaaactatatagctgtgttaatcaaagcgcttattttgtacaataataatgaccttgaatttcttaaaaaaaattacaataagctacaagtatcaaagaagcgaagttatctggagtagtctatataggagctctttggactttcttttattatgctaaaatagtggtgcttttaggatttacattattgtactctccaatacaaagtatggggcatgttaaagtatacagtacaccattttcatacatgtacaacattggtggatgaagaatgtctcttagcagtaatactggatgtagcctctggttttaccagctgcaaactctaggactattatataagtaaaaatctctcttgtgatactggaaagtgattagaatgtgcaaactgatatagtagctttcatccgcctcttaaagggtaccaccacaggaaagtccatttaagatgttggtaggtttaacaaagttggaatgctggcactgttgaattgggcaacagttcttcagacctgtcaaaaggaaaaaaattaattaaaaacatgggctagaaaaagtaaagacccaaaagcaaacagttaagaaaacagtcttaaaagtgttagaaatgaatataatctaggctcttgttctaggcattacattagtggcaacataccacaattcacggcagaccttttcattccaaaaagatgaagtctattctgctgccctcttgaaagtcagttaaatgaaaatcttaggaacagaaagggaaagtacctttgtgcaaatttttgtgcattaccttccaaggattaaaaaggaaaaaaatcacattaaaattgttagtcaagtcaaccttattagaattaggattgaaaagtcagatagcaatattaacaaactgggtgatcctgtgtttacacaatcgtaatgtactcctagaattagatcataagtatagaatgcacatctaaccaaggtttctagtatcagataatcaagttcttcctcactctttcaatgaaagtggctaaaaagctcgttcagagcagacaaatagaatttatttcatgatggtgttttacagatttacaatcacgttatataatttctaattccatatttaaacattctattaagactgatgtcagaaaaaggtggtattacactaaaatcacatgtaattaaagattttaaaaagtaaacttagaattgttaaatatgtactttgaatagttttctgcatacatgcctcggctaaaaaaatgttccctattatatttttctggtgatcagacttgttacaagctccagaagagttgttaatacatatgtggctgttgaaataattttcacaaatgcctagaactttaggtcctcattctgagtctgaatgaggtttgcaatcaagttttctaaatcctggcagactgttgcaaattaaaaaggacagatggaagtgtgtgagctcaagcacatgtgtgctgctaagaatgggcatgtggtcaggaattataggatattagaatgagaggatataccactaaacagaaagccctagatggaaggcaggaataaaaactctgaaaagatgcagaatcaaagtgctatggcagcactgagtcaattaacataggaagaaataagagtcaggaatgtcaaaggttcttaagaataaattaacagtttaacaataaacagtttaatgacagctgaagaggaaaccattatcattggcaaacagcagcagctaatagttgagtgttaactatgtgccaggtaccgatgcaagatctgtgcagcaaaccccatggtacacctttacctatgtaacaaacctgcacatcctgcacatgtatcctggaacttaaaagttgaaggaaaaaaaaaaaagtggcacatgatgaacatgtcaggggtgtgtgtgtgtgtgtgactggcacatgatgaacatgtcaggggtgtgtgtgtgtgtgtgtgttttaaattagggacggttggctgggagcggtggctcacgcgcacgcgcgcacgtgtgtgtgtgtgtgtgtgtgtgtgtgtgtgtgtgtgtgtgtgtgtgttttaaattagggacggggttggctgggagtggtggctcacgcctgtaatctcagcactttgtttcagtcttaagagcttaaatttgatttttaaattagaaattgactaattgttatgtatacacacatacatgcaggatcaactgacctccccatcactttggatacaaatgaaaaagcagttcatttcacattgtatgtacttctcagtttgttccaagcatgacacttctcagctaggtggcctttctaagtggccaagatggtttatcttatgagtgagacagaaggtcaatctatttgcttgtgaggctttgctaagctct

SEQ ID NO: 229 - DNA, 1433 bp, Homo Sapiens
gcttagcaactgtttaatcaggggggagatgcaaggtactagttcatttattaacgggaaaataatcgcgggtcctaatgagtcactcagcatcaaaatgcatcaaattcatcatctgtttcagtctttgaaaatgattaaacatcactttctttccctttatagcaagatccaagtgataaccaataaatcaggaacacagtcctattcacaattgccacaaaaagaatgaaatacctaagaatacagctaactatggaggtgaaagaggtctacaatgagaattacaaaacactgctcaaagaaatcagagctgacacaaacaaagggaaaaacattccacactcatggataggaataattacccatgtctgtgtccaaatttctcccttttttaagacaccagtcatcttggattaggtcccacccaactccagtgtaacctcttcttaaataattacaactcccatgagcctgtttccaaataagcctgtgtgtgtggtacaggggaagaggtacgattccataacaggaagagagcatggcaaacagtgaggctgagatggactgagcacctggtgtgctgggcttgtagcttccacactcactcccttggccatcccaagacacctgtggtgcagccattaggatcctaattttaacaatgagcttcatacaatgtgctcatgctcacacagttagctgagaatgcagttcagacagttggactccggagcccaaaccctttctactttccactggaacatgaccacgcacagggaccagatggaaagaggcaaagaccgcaacgcccaccagatgctttgcctcggaacagaagggaggaaaggatgtcttcaaagctcataggagactgttgttagggaagcagaggacctccctgtggggcaccgaggggcaggatggagaggcagacatcagcaccgagaccctctgacactacctctgctccatctgctctagctccacaggcctccctgctgccctggttaggagaggtcccctccatttagctcctcctgccccggggagtccacttgtcccttccctcccatctctcaggcctccagtccagcacctcttcacagtgagctcatccctgacttcctgcccccaaatcagggatttccctacaccggcattctccattcttatctcctgctttatttttctccctgacactttcttccatctgttagtaaatctttatcattgtctgtttcctcccactagaatataaacttcatggaggacattgaccattttgttcagtgcggtaaattcagcacctatactagtgcctggctcttgggagggctctgtaatacgcgctgaaggaataaatgtttccaagcagtcctggatgctggggctggtatgtccttgcttggcgaccagggaggatgtgtcta

SEQ ID NO: 230 - DNA, 5163 bp, Homo Sapiens
agatagagtcttacagtgttggctagcaggctggtcttgagctcctgtgttcaagcaatcctacgtcagcctcccaaatagctgggcctacaggcatgtgccactacaccctatgctgctgctttttaatggaatgtttaatgcataagttttaggctccaatacaatattagtaagacttattaacttagcagatcaatgtggcaatattatttatcccaggaatgttcaggtgttcgtgtgtggtgtgtctatatgattggaaacccatcaactggctgtgaaagcagcagtttaggattgcccaaaagacaaagatttggaaaagctttaaaaagttttgaccacaaaggtcataaattttagtctagtgatgcagatttactggatcctgatgagcaacaggagtgaaaagcattttctagaagaaaaacctgtggtgatttctaggtaaaggacttcagatgagatcctgaagtaataacatattggcagctttagtagactcacaaacatgaggttaggcagcgatctaaggtgatagacagatgacatcagaaacaaaataagtactaggcaaggccatagccttgaatttttattagagttaggaattgaggatattctgaaccccgaggatttcaaccaagagaaagagtagcaaggcaatttagtttaaaaaataattctgatgtatattgggaaggattttattcaacttaaaatcagaaaaacaaccactaatagtttatgtgatgcttcttctaattcttacctggtattttagttctaggttcctattaaggttcaataaaccgcgacaattgaccaagggctgggctgtgataaagtcttccattttaaacaaatacaaataacattgaaccagaaagagacatcaagtccatttaaggcattggtgtgtttgtacaagacctgggttatgtaggaatagcagtaaagaacaaagcctcagacatctgatagacattgcttttacttcctttttatgtgactttaagtgggcctatgacttaatctatttgacctttactaggcctatagttatctttagtacatattgccagttttctaagtggttttaccattttacattcccaccagcaattttttagagttttagtgtctccacatcctcaccaacattcagatgaggggatggtggtttctcattgtgattttagtttgtatttctgtgatgacaaacggtatatatcaccttttcatatgtttattggattcttagatatcatatattgtaaggtgccttttccgatttcttgcctattttttaaaatgaggttaggtttttgagggttggttggttgtttttttgttttttgtttttttttgtctcttttattgattagtagtttaaaagaaagtatattctagaatatgagttctttactggatatgcatcatgcaaatatcttcttccagtctgtggcttgctgttttactctcttaatggtgtcttttgatgaacataagtttctaattttaatatagtcacatttatcagtttttccctttatgtttagcacttgtatgtctttagcacttgtattttaaaaacttttgtctaccctaaggtattttataatatttcagcagctttatttcaaagtttaaatctttaatccattgagaatttgttttagtaagagatatgaggtagggacccaattttatttttttccaaatgcttttaaacttctctgaaaacattcctcaattaatattttaaactccacctttagggtgttttcaatcacaataatcataagtttatgatataaaacactccaatacttagcaatgttcaatgaaatattaaaacaccaaaagacacaatctcagaaacagataaatctctcagtgaaccaaatatagaacagaaaagcaaaacaatgagtggagctgaagtcaaagggcttctgtgttgtgggtttcttgtttttttaaggggcagtatttgctgggagtttagctgctatgagataaggagtacttaaagtatatgaacaaggggcatgaatcctgatttccatatgaaaccaggggccggggaaaaggatcttcttctcatgaaaaaaggcaaaaaggctaggggaaaacaaagtttctggtcactacactgggctgtgactttagaaaacttcagggtacatttgaaggaaggtacatcctcgtaatcagaacagaagtggttgtctgtgagctttgtgacagcatcaggtttatctccattgtcaccctgggacaagaatcttaatatacctttatcagacctcatctggattggagtgatcatgacttgcgtagatataaacacaagactacctggccaaggtctgggttgaataccgaggaagagagaggaggaaaaacaatacacaacaggccaaaattccatgcctgtcgatcaggtattccttaaatccctggttagtggtgctggctgaggccctgaggaaaggaaaggcaaacctacatctggaatggataccaattgctgtgaggaaaaaaaccaaaacaaaacaaaacaccgtggacccttcgaggataaaaggagcccaacataatcaactttccatctaatggctggttgtcacattggaggctcagcactgatatgtgttgctggcaagtgggacactcagagacaaccgtagctatatcaaccttggtgagtgaaagcccatgccactgagtccatgtatagcctccatttctgcctctctggtcacttcattcatgggccattgtgctggggtggccagtgacaaaaactggctaatattaactcaccaagtcattttgtttacttgattgtttaatgctccttccatgataataatttcattttaatgacgttttcaggggccaggtgttgtggctcaggcctgtaatgtcagtgctttgagaggccaaggtaagagaattgcttcaggccaggagtttaagaccagcctgggcaacatgccaagacccttgtacctttgtaatgagcattagtgtgtgatacaacaatctttgtacttcattcatgtcaattctcataggcctatctacatgctggtaccccagaagtccttgtctctgtatctttcagtcctccgtgtttctgactagtaggccaagccatttgtcactgcccatgaatccatacatactctcgtcacaagcccactccttccacacaaggtggatgaccattgcctgaactgggaccatcagaaagattttccctctccactgtctttcaaggccacccgtcaatgaagttgtaatgcagctgccattcatttttggcttgagtaacctattcattacctcaaaacccaggctttgtctacctccttcacatggttgtacatatgtgtgtatatataaatgtgtgtacataggttatggtatgtaggccataggtgtgacttagggaagaattctgggtgaactgtggtggatgatgggggggtccgctcatgcagcttacatgtgccccgtggtcctgctcgtgattatcctgtatgtagtatttctattttataatagattattggcaagccatcttaactttatgacttactgagttcagcagttctggacatacggtcactaagtgtcacatggtcaaatttccatctctgtcaggtcccagtatcatatcagaagctgtttttgttttgttttgtttttgagatgaagttttgctcttgttgtccaggctggagtacagtggcacaatcttggctcactgcaacctctgcctctggggttcaagcgattctcctgcctcagcctgcccagtagcttggattacaggcatacaccaccatgcccagctaattttgtatttttagtagagacagggtttcaccatgttgaccaagctgctcttgaactcctgacctcaggtgatccacccacatagtcctcccaaagtgctcggattacaggcgtgagccaccacctggcccagaagctgttttttaaaagtcatataattttatgctatagatgtcacagaccccaggttctgcactgtgattcttcctctagagtttactataaacacactgccctttttatcaaaactgatacatataataccatagggtctgctggattgtatgactcaagtggctgggcgacttgcatcacagcctgtaccttctaaagagctcttgttcccagccccactcaaagctggcagcctcttatattgcctgatacgtacgtaggtgagctcagtatacctagttgtggaatgtgtggcctccagaacataaggaggcttaataggcatgtgtctcctacaaataatgaaagtattgcctcttcctttccaatttaagaccccatttttctttctcttccctaatcgcatttgctattccttccatgacagtgctaagtaatagtagtgaaagtgaactactaaaaatttattggcctggtgcattttgaggtgtagctttctgacgatcaaaattttttttgtatcataatttgtccatttagatttgctgtcttctctggagctagatttttattatttatattttcctaaaaatacatccattttaataatggtttcaggggccaggagctatggcttatgcctgaaatctcagtgctctgaaaggccaagataggataatctccagaggccaggagctgaagacgagtttgggcaacatagcaagactctgtctctacaaaacaatttaaaaattagctgggcgtgatggtacacatgtgtagtttcagctacttgggaggctgaggcaagaggatcacttgagcccaggagttcaaggctgcagtgagctatgatcatgctgttgcaccccagtctacgtgacagagactctgtcttaaaataaataaatatgtagagttgagaaaagcaatcagttataatttgttttatattttatctgaatctgttctctccacattctaatttttttttgtttatttatgtttcttttttcttgtttaaactacttattagctaaatggtttgttggtgccctccaatttcttgaattggaaacttaaacttttattcctatgtgaataacataaatgaacataaatatttaactaatgttacatattatcctctgg

SEQ ID NO: 231 - DNA, 6399 bp, Homo Sapiens
attgaggcgtgtcttccctggttctgcgtccgtgaagcctagagattcccgagcctgggtcacccgggcggtgtcgcatgtcgtctgcggggaggttggggctgctcgcgcgaggcgctctgggtctcatttccgaggccgaaaatgctggctccaaagtggtgccctgggagatgagggcgactcgcagattccaccctattctctgaatgggcttcgagtctccatggttggatgtattggatgttacgaccactaaactttcttctgagcacacacgagcagtggtgttgttctctctgagaaatactacaggctttggtgttaagacactggaattccggaaacctgtccctgtcataccagttgctgtgtgacctccgtcaatcatggttctttactgagccctgagactccgcacgtgaaaatggatggggatgaacttccagtccaggcagtgccactgactttgcttggggacctggggcaagctctgtggcccagcattgcaccatctgtaacaacataaccaaggggtgcgcaattgagctttgaggttaatttcggtgctaaaatcccggtcagtagttccgtcatcttcacagacctcaccctacccaatgcccttattgtgctccacatcccaatcaacacttactgattccagatttgtaatttttgccattgtagtgagaagtaattaactattttatggttttttaaatttgaatttttgactatcaggattagcatattttttttttcttcgttaaagactagtcaagtgcattagtgaggaggggggaaagagtagaccaaggaatttggtctgtaactgactgtggacaatacattggtagaactcactacctttgagccagccagaatctttttattattcactggatattcaggttttgcctctgtaaattttctttcattgccatttttttcaaatagttcattcaatctttgttttcagatgtgctttccacaatcaggttacaaattctctgccactaatgatcattacaattcctcttctcagcctgtttattgtttggtctgtttatggtttctcaggcttcttatttatttatttagacagagtcatgctctgttttccaggctagagtgcagtggtgtgatcttggctcactgtagccttgacctcctgggcttaagcaatcctcccacctccgccacctgagtagctgggactacaggcgcatgccaccacctgcagctaatttctgtatattttgtagagatggggttttgccacattgcccaggctggtctcgaactcctgggctcaagcgatccagccgccttggcctccagagtgctgggattacaggtgtgagccaccatgcctggactaggcttctttaaacattgaatagtgttcctttctagatgaaggaggatcacatagcacttgggagcaaagatgcagccaagtaacccagtgctggagcccacgatggagaagatctcacggccactctggccttgccctgggtgctttagtaactcgggaggaaggccacccagacactgcaggacaccagcatgctgaaggtcaggaacttggcttcgttgaaagcatcaggcaggttccttgccagaaaggctacagcaagggaccctaaaaccaagaagcccaagtagcccaagacagagtagaaggcagtgacggagccctcattacactggataatgatgtagccaggcatgaactgagggtccttgtttacgaagggaggctctgtccccagccagattccacagagggtcacttgggtaaaggagcaaaggaagacaacagaatttgttttttggggacccatccactttcggatcctgctttctggccttatagcctggaaggccctgcagaaaacacagccactgtgaacacagctgcaaaggtggtctgtgagaggaggcaggtggcagggctggggcggccgatgaagagcgaggaagagagaaagcagagtgtgagggagacaaggagggtgtagctcagagtctggttgctggccttgactatgggagtgttttggtgccacacaaactccacaaggatcagaacagagaggacagagtagaacaaggctgtgcatgccagagtcaggcccaaagtttcatcataggccaggaaggtctcctatttgagaaggtatgttcccttttcttgtttggataatgatattcaggacaaagcctgcattgttttatatctgaaataaacaaaaagggtgtcactgtctccaaaacagagcactgcacgtttggtaagattccattgcccagagctctcaccaccacagcgccatttaggtggactgtttggctggtgtgtgtgtgtgtgtgagagttgtgtgtgtgagttgtgtgtgtgcgtgcacgcaagcatgcgtatatgtgttctgcatgtgttttaaaggaaaacataaatacttcaccagcttttttttttgaccattttaatcagttttattgattcatgcttccggttcttattcagttcaaaacaaggcacattaaatacatcctcttattgctttataaatgcacgtagctcattctctatatcaaaagtaataaataatggccataaaacaccaagacctttataaaaatgacaacccagccttgaacatagtatttaacagtccaatctagaacaataacccaacacggtacatcaaagtgccacatatgaaaacatgcagtgtgtgtagtcactctagtactgagcttgcactggctattctttaaaaacatactagggctttttcactccttaaaaaaggtggacatgatgcaaacattgcaagttatagcatcactgactttaatattacatttatgtgccaaaaatctttacagatacataagagaaaataaaatcaatgataacaccgtatatttaataaaagtgaaaatgagttttttgttgtgccaaagaggaagctacatattttgaaacagacaaagccaagccagaaactgaagcagaagagggatcacgcatttaatagcagaaatcctaatacactcagtataaattgattgaaagcaggaatattgcaaacagcatgatggatatgaggcagaccaccgtggctaaacaaataatccagcattatcattattgttatgactgtggtggggctatttaaaggagtatccaactctctagcacagatgggggttccttcacctgactccccttaaaggctcttgaaataaatcacttgataataaaaggcaatccctgcatacccaccccaaccccaacagaatcaactaatgtcaagtttatatgcaaatggaaaattttttcttttgttcttggaacgaatttcaaagaagctcattcccccctatttcttgtctccctttcttaaatcaggtaaggaagctgtacaggcttaattcagaacttatggctgggtgcagtggctcacgactgtaatcccagcactttgggaggctgaggtgggtggatcacgaggtcaggagtttgagaccagcctgaccaacatggtgaaaccccatctctactaaaaatacaaaaattagccagatgtggtggcgggtgcctgtaatcctcactacccggggggctgaagcaaaagaattgcttgaacctgggaggcagaggttgcagtgagccgagattgcaccaccgcactccagcctgggcgacagaccaaggctccatctcgggaaaaaaaaaaaaaaaaaaaaagaatttacacaaaatgctggggtgctttattcacagtaatggcttgaaatcagttcatttccaaacgagtctctgggattggtgaaggaccgtgtgttttagcatttagcagattttaagtaaaagcagatatgctcaaaagaagaaaagtgtgcttttctttgtccttaaaggaacttcattcatagcaaaatatgcacaaacaagacctgtttaacaaacacagatctgctcgggccagtcgcatcctaagcccggtccctcctgtaactatggtccactggaattgggactcttctgtcgaggttctcttctgcagttttcattagtataaagagccggcttccagacacccttcctttttgaatagcactcatcagctgcaaaaattcattgagttcaacctgtccatttttattcaaatcgacttcatttagaatttcatggagtgtattttcatccatttggacattgatactctctaatacacatggaacatcaacaatggtaataaagcctttctggtctgcatcagacttacaaaatctcttcttatacctgtcactgtctgaaggcagtaggctaatttcagagccatctgttaactgttctgatcaaagtttagtctgtttcataatatagaaacttcctggttgtttcaagttgttcctgtttcttataatcatctcaattctgttctctgcccattagttcaacaatcctgagtagggcttgctctgctgcccggacatttagaaaggccaggcgaggctgaggcaggcagatcacctgaggtcaggagtttgagaccagcctgaccaacatggagaaacccaatctctactaaaaatacaaaattagccaggcgtggtgatgtcctgaccaacatggagaaacctaatctctactaaaaatacaaaattagccagggtggagacccaatctctactaaaaatacaaaattagcctgtaactccaggtactcgggaggatgaggcaggagaatcgcttgaacccaggaggcggtgattgcagtgagccgagatcataccattgcactccagcctgggtgacaagagcgaaattctgtctcaaaaataataataataataataataagccaggcgagtacaacgtgaaatcatatccacggtggtgcaggaatactccttaatcccatagttcacctctgcttcaatatatggaaattctgacacaagacgtactccaacaataggccaccttttgctagtcacacttgccattgtggccacctcaaaagccttatcaccataggtggcagcaagatgctgtgccccctcgctttcaagtccataatcctggacaagcttcatgtagagtgtggggttccaatctttacccccttgaaggaaaagcccagctgttctacttggtcctgctttcaaattgtgggttttgatagcagcatttagggtatcttcgccacagaccggtaagttgtccactttccacctgctgtagtaataagacttctctcactgacatggacaacatgatttcaggagatagactgagtatctgcagatttgggatctgtaacaaggggacggatactgctccacgctgctaggatgtcgcccctcttctcacctcaacatcacagctcaggtaattacgtgcttcattcaaaatgaagttaatatcttcttctgaaggacttggatggtgtgtaatatcagttggggtatcagtagtgccagcaatcatcatcttttgccagggtaagaagaaaataactcgcccatcactggtcaagaagtcccatgccctctgggctgtaataaccaggcatcacaatgtggacaccagcagttggctggcagatagctgcagcatccttatcatctattttgcacacagagtctgtgaaatgtccaacggcattgataacacacttggctttcatgtcaaattcctgccctgtgaggacatccttgcaccatgcaccactcacacgcactttcgctgtctgtctgggtgtctgtcttcttaagcaagctcactacctccctgtcattgactgtggcatccccatatctggcagcagtcagcacaatggcaaggttcatccatgcatcgttatgtcgtccatcatagtagacaattcctcctaccagtttgtccttctggagcattgggaaatgttcaagggctcttgatttgctgaggacataactgcttttcaggcaattacttcctgcaaccaaatcatacagcttgattcctacccagtagtaaggtaactgccaccacttgtaaactggaagcatgataggcaatggagctgataaatggggagaaatttctggcaggttggcacgctcatcaagggcttctgttaccatccggtactgctcaatatccaacttcatcatggccttctgaagatatctcacaccaccatggatcaaattagtgcttctgctgctggtccctggcattgaagactgttcctttctgggtgaaggagaatcacgtagcaattgggagcaagatgcatccatgtaacccagtactggaggtcaagatggagacaatctccacagccaccatggcctttccctgagtgctactataactcaggaggaaag

SEQ ID NO: 232 - DNA, 961 bp, Homo Sapiens
catgactgtaaaagctggattaaatgggcttgtctatattgggtgcctagttaccaggctgcttccaaagtggatactgtggccatcagtgactccttccttgacctcagcaatagggactacgtgtccagaaatgattctacccatggcaagttcaacggcatcatcaaggctgagaacagtaagtgcagtcaattgaaatcctaccttcattttccaagttcaagatccccccaacatcaaatggggtaacatgatgttgaatacatcatagagcccaccgcactctttaccgtcttagacaaggctagcaatcacttgaaaggtggaagcaaagggttattattcctatcacctgcgccaatgctgctgtgctcagaatgggagagaactgtgaagatgacaactccttcgaaattgtcagcaatgtcacctgcataccaagtgcttgactctcctggcagaagtcatcgatgatgactgtgctaacgtggaggaatctcagaccacagtccacgccatcactgctccccacagatcatgattactcctccagcaagctgtagtgtcatgtcagtggtcattatctctcaatccctggccctgccaaaactgtgtgcaagacaacccctgagttgaacggagagttcactgatttggctttccaagtccccaccgctggtgtggaaagtgtgttgagaatgagatttgccatctggagaaaggtgccaaatataatgacatcaaggaggcaatgaagcaagcatcaagggcccctggaagagcatcccgggctacattcaggaccagttggttgcctttgtgacaaccactatcccatttttgatctggggagggtattgctctcaatgatcacttaatcaagctgtttttttggtatgaccataaatctggccataggaattgactggggggatctatcttatggtctgtgtgacct

SEQ ID NO: 233 - DNA, 1796 bp, Homo Sapiens
ggtgacacgcacctgtaatcccaggtactcgggaggctgaggcaggagaatcacttgaatctaggaagcggaggctgcagtgagatgagattgcgccactgcactctggcctggcgacagagtaagatgccgtctcaaaaaaaaaaaaaaattggtgttttcttggtttgttttgtgttttagtttaaggagacacatttcctcatcttaaggacttttttgctgctctgatgctggtcatctagtccattcttttgctctaaactgagccttgcctcccagttcttcattgcacttcagattgtgtcttactacaaagagaaaattagtctgtgatcagtttggatcagaagaactgaaaatgtacatttagaatagaagccagggatgtgatgcacacccgtgatcccagctactcaggaggctgagatgggaggatcacttgagcctgggagttagaggctgcagtgagccgagatcgtgccactgcattccggcctgggtgacagaacaagaccctgtctctaaaaaataaaaagaagaaaagaaagaaatttaaagtaggaagggctaccgtttgcttctggccaagcttcacctctaaccataggatcttttaaaagactagttctgaggtcctttactctgagtaggtatttatggaataagccattatgtattgacattagaatcagttaaacataaatttttttctctttttatgcactacttgacatcaaaagcaaaaagaggtaagttggctataaacctgtaggtgaacctaatttttcttagtagatttgttcctgagtagctttgcttcaattaaatttctgtgaatcaaatacttttacattaggaagattgtcattggaaattcttattcttttctttgaaaatgaataagcatcttctgtaaacttagattttcaagatatctagtatttaaacattttgcttttcctttaatcaagttatacttacggtttaatttgcttgtgaagacaaggcattttcaaacacttggtttagttttgagataactgaattgtttctcccaccagaaatgtggattacatgttataagtctttcctattttcttaaaaatgaaaaaaaaagccaagaaacaactgacattggtgaaagtctgtaattttcagatccattgatttacagaagaagatgccctgaacctctcagaatattttctagtgtgattttttttaatgattaaaaaaaatgaagaaaatattaaacaagaagatcaaacacatttcattgagtggtgtctcatatgtttttcttgtttgggatctatttttataattgatctttttagtggattcttgattgtagtttaacttatttctcttttgtttctttttgatgatgcatcaattctgacatttcaaaggtacagctggtcttcattagatatgtgctgttattgactttgcttaacaagaacagaccatcatcgtaccaccttgagttaactctgtgccagctggccttgctcttgagaaggtcatttctaaacagaaggttattttttgaaagatttttaactggtgtaagaatctggcagcagaatgtacttttacctcttggtgccactgtatttaattaccctctccccatttatcctccatgtctttcctaccataagctattgataacacacatgctcatggtttaattgtaagttgttcagaaatagaaagctgactgtactgcagggcgtttttatatttctcttttgcaagatttgaaataaaaatagatttttgcatga

SEQ ID NO: 234 - DNA, 3666 bp, Homo Sapiens
cttttggatctctactcccatctccccctgagttcagacttgcaccacctactggctcttcactgaccggctaactgatgctcaaattcgacgtatcgaaagcagaactcacagtgtgcccttacagacaaagtatgggcactatttcatcagcgggaagaaagagaagtatggtgccctaatataaatccatcagtgtgcccttccaggattcctcaaggaatgaacattttccagaagcaaaacatcgcatctttccattttataggacaatgccaactcctgaagatcttgctctaagtggtcaaagggtgagcatactgcaggcaacaaaagatcgagcatactacaggcaaccaagggtcaagacaaatttacaggatccctccctaccgtggccactacccagcttcccagtagtgccttcctaatttgctgcccatggtaatggagacaaatacctgcagaagaacataatcaaaactcaaaggaaagttgagcaagcactggaacattcacaaaggcagacagcagacgtgctcatcaaaagcatttttgctgcatattgggttatcaggatggacatgcatggactaatcaatgtgcttcaatgagagctgtagaaaaatggaatgagcaacaaatggagtcatcatacagccagcatcatatagaagaatgacaaagagagaaaaaataaaactttctgggaaagaaggaataagaagctggattggcagaaagatcaatgtggttttccctagagcttcctgggcagagcacagaaaaggctggttgcctatggagaactacaaattgaagagtttcttaatcagtccactgttcacttgattcccagacacagacaacatgagtttaattatccggagacatttcaaaggatgttgatgtttcatgatgggaaaacggctacttctacaaagaattgatctttctgaatagaaagaaggtcattcctgtgagcactgtatattttgccaacagaattagactggtcagttaagaagtatgccttaattattaagagcataggatcaggcagtctgagctctgagttcaaaatcctaaccttacccttaccaaccaagtgcctattgggtacagaatcataacacttcggtaaaatgattcccgtgaacacaaaatatacggtactctcatgagcaccatatatttttccaacagaattagactggtcagttaggaattagactgttttaattgttaagagtacaggatcaggaagtctgagttctgagttcaaaatcctaaccttgcttttaccaaccaagtgcccattgagtacagaatcataacaattggatgaaatgattagcatgacagtgcctagatgatatggtgttgtatatattcaatatgatgtaattttccaatatccattgaatgtgtaccatgtggatacaaggagaacaagaagatgaagtctttctcattgggaagctcacatcttagtgaccctccagaattaatatatctaaagactaaggacagtaccaaacacaaagtaattgctatctatgctgttattcatgcaaatgattaaatcagtgcaccccctcccaatcatggattgctctaatattacatatcactcttatattataccttcctccagacagtaaatggaaatctgcactcctagagttttgtgttgttattcttaatgatgatatggcaagagactgcaaacatcctgatttgcaaggctagggagcttggaaatgccaggaaatatgggaaaaatcaaaccccattctttcaactcactggcgattttttcctggctacactgtcttcatttaatctacatttccctaccagcaggtgctcaccaactaccattggtgaaggcaccagtgagtttctggtaaggatctgagttgttcctgaccacagattggaggaaccatgtgggaaaaggtgtagcattgcattctcttggaacacagactttcgtcatttggcaaagagattcatcttgcattttttagtatgatggcaagcaatacatgatggcaagcaatacttaacttcataaccttgattcatatccttccccctaatgctcctaacaggacaactgaaatttatattgcctgattgaaaagaggctttatttgacccagacacaaagttagctttccaatacttccctagcttccaagccataaaaaattaaatgcctggaatgtgtaccttacaagataaaataaatgagataactttttactggtaaacaatcaatagcctattaaaataaaactagcatacaattctctgatttttgtagagggacattttattttggtcctgtaagtttccctagtagagctggaataattgtagaatagattttggaagtagtatgttcaggcataaaataatgcaatatgcaataactcaagttgataaacaggttaattgcaatgatgcttggcacgtagatctttttctgctaagactttgaaagttagaaaaactcataatatttatgtttgtcatttgaagaatttaaggggttattaatattcagaaacatgtactaatttcctttgaagggagataacttactggctgtaaaataaatattggccttggaactggacaaactgagcttaaatcctggctccttcacttatttgctatgtgactttagataaatgatttaatcttgattttttaaatctgaaaaatagggttaatgatacctgatgctttagtagtacaatgaggtattccacaaagatagtggaaaacagggaaattaggttgcatgtaactactatcttaggagctttaacaaaataataaaatacctgggttctcaaccccagaattctgatataattagacttgaatgaggttgaggcacagtatttttgtcaaaatccagacagacatggtccctatctctcatgaattgcacaatacagtagaagttactgacgttataggtgaagaactaaattgaatatgagttttagagccaggaagatctgtgatattttgctagctgtgtggccttgggcaataacttaattttcctgagtctcagtttccccatgtataaacactaacgttaatgcatttgtatctcttagtatagtgatttaggactgccacatagtaggtgcgtcctaaatatcattattcattataatttcacaagtattattggtaatattttacctcaaaaagatactatgactgatcgtttaggtctacaagtatctaattgctcagttgtaatatttcactttaaagtgaataaggtctccaaaaggttaaaaaaaaaatcacagttctatcttattagtgttgaaatgggggcagttacagcctcttttccatgccacttcactagtactagtactgtcaatacatttcttcataaaatatatccatcagacatggaatattaggtattcagagttgatctgtactttcatatacatattgatttaaacaacataattttgtgattttgttttcaatttccatcttgcatgttttagaatttcatcttctatcttggtatatggaacaatgtgtcaataaacatcagtgagcataaaggaaggatgactcaacaaattcttgcatccagttcaatttcaattcagg

SEQ ID NO: 235 - DNA, 971 bp, Homo Sapiens
taagtctaattttactagatagagtaatggaaaatgaaaatctaaccctttattccgataatctcatgaagcaaacctaactatttaacatcagctggaaagaagggaacatttatattgcccgtctcctgtgtcttcaaaggtgtgagagttgaggaatatgtgttcctacgggaactatgtttgaatatgtgcagttttcaacattttggcaaatgaaagcctgacaagtttttaaaagggcagaagctttattttttgaacagaaaaatctattttttaaattcacatgtttgtatgagtacttctgggaagcaagggatgaactgctaggtattattaagaatgaatgatttttgcatttaagttgtttgaaggcatgtattttgaaaaatatctgttacaaatttataatttcaagacatactaaatcttataatacttttggaatttcattaataaggctaaaatctgaggaatgtaactaattttcagccttaagacacttaagtttggaagtccttgctattcaacagaataacaagaaaccttcagaatgtatcactctcccaaaaagaagatattaataagcccttttcttttattcatggttatagtttttttatagtctcaaaattcctaaagcaatgctgacagccattgaatttgccatattttgtattcagtgctgttaatgtgctgttgcctcaagaaaaagtgctttttctccattgatgaggctagaccctaagaggtaattaagtcaatgtaaatcaaatggaagtttttcacttttttgatcttggaaattataggtatacatttccctcttactactgctttttgctgtatcccataggttttggtatgttgtgttgccgtttttatctgcttcaataaatttttcaatttcttctgaatttctttgttgaaattgtaaggatcattagaggctactatgagcaaccata

SEQ ID NO: 236 - DNA, 1096 bp, Homo Sapiens
ttgtaaggtgacaatactttgagcaatgttatccaggctttccataaaatccttggacaagcgttggtaataggatagggaagttgcaatcccgctaactcccattcctacccctgctgttattcctagccgttgtgtctggtggttgcagttaaaggtataatgagggattggttgttgggagctatattaatttagggacatacaatatttctgtctccagtctaccacttccaccaaagacaaatcacagcagaaccgacctaacttcaaaataaacttcagtcccgtatactgggcctgattacccacacaaagtgcaacaagaatcattgtccatatagactctcctagattggctttgctagaacatttcacaaggccatttcagtcaaagtcctgagaaagtaaccggtttcaattgtgccctattacaaaagaaaacgtggttattaactttatacagacaaatgccatgaattaagaatattcataaatagtttacaaattctggagaaattagaatactcaatacacttaaagtgtatttcaaggctataaatagctcaaaataaaaagattattcagactctgaaaaaacaaaaagaagtagcaatatttcaaacaacaaaagccatacaaattatttcagtcttccattagttcatttcagtccatgtaatcaactcctgctctacttcatattcatctttatgaacacatcagcctttcaattagtgccttggaagttttctgtctaatccaatggcacactctccaaagttaccagaaacctgcattcaagagttcttttcatgaactccaaagaagtaagccttggactgtagctgattataagtcactttttttttttgagaaggatcacagcaaaacatcaattatggatgacaaaagtcttaagacagccataaagacacagttgacaaatgtggctatttctgtggcttacaacaatttaacataatcattacaacatatattaagacatatcagaattttagaactctcatacaatcctggaacacatattaacaacaaatctctatcagtataacccaaaggaagctaaacacca

SEQ ID NO: 237 - DNA, 1489 bp, Homo Sapiens
ctctgtaaacttcagcattgatgatgaacattatttcaaggaaatatcccactactttatctctgtaaagacatccatagagaatgtaagttataatttccttattcatttttctggttagagaaggcatttctattttaatggtcaattattatattctgaatttgccacaagtctccttttcatatttaaacactagggtttttttttgtttgttttttaaattcttaagataaatagaaaagttaaggttagaaaatgttcaaaacaattgctcaccttataaaatcttgttagggaagtaattttgctcatttcatactgttgacatttctgaatttcagtaatcattaatttttttaaagctgccagcagatatgtacaatactccttttagatattattcccatcaaagacagatttcacctctttcactctttgtgtcatttctctattattttgaaaatattactaatgccttcaagttcatttgtattctgtaagattctccttgtatccaagcaactccatctgaaaaaataatttgttttttttaatgagagatatattcaaaacaaaaccctgcatatatttatgattttttggtaataattttcatgatactaatttcctggaaagggatttgcacttcacgaacaaacagtgatttcctttgaaaccttctctggtctatgtcaccacagttatctaaacaatttagatgtccctttcttgactaaacttttaaaaaatgttgattctgttctgtttttagaaatgatacacatcatcagataatttgtaaaacagaaaatatattaaaaaataaaaacttccttaaataaccatgggataatcaaggttgtagtagactgccaagtgagttataaaaactccagaattatgtcagaattagacagataaccaaagaatctgtggggcactttgatgaactcaagtgaatccttatattcatctttactgagaaaactgttgggaatgatttcacttccatttttttaaaaatataaagcatatccttcagagtggcacatgcagaaatattttttatgcgtgtatatttactgttaagtacacaatacgcctatgagaacaaccatagctaatagctttaagaactgtgcttggggcgaagggaaggaatgtgtggctggagacttagtttggcatgactgagaagcacccaagcggagtaaggacgggtgtgtcggctgcagccaggcggcagttctggtacttctcagtcatgacatttggggtcaggtaactgaatcctcatcagcaaaaaggggataatagtagtaatatagctctcataatattgttacaagaattgcatatacttatattcacaaaataagtaaaatgttttgaacagtgtcgtgaagttatgtcctatgcaggtattttactgtaattgactttatttttgttttagagcagttttgggtccacaggaaagttgagt

SEQ ID NO: 238 - DNA, 5651 bp, Homo Sapiens
ttagtagagacggggtttcactatgttggccaggatggtctcgatctcttgaccttgtgatccgctgtctcttcttgccacgcagttctgcaacccgtcctacacagagtgacagcagcaaaactgtggtggtggtggtgattgttttcctttttcttgctaagttttatgactgaaacccattaacattgatctcaaccatttgagttgtttgggggtacactaggggttccagaaaatgagttaccatcagatttcatctatttctggttgatctataagtgttggactttcatagacctccatccaactgactgaaaattttcaaacaggcagcaaagatagaagcatagtacaatgaacacctgtagactgtctccctggctctaaccattgtttatattttgtcatatacagttttctctctctctctctgtacacacacacacacacacacacacacattttgttttgattttttcttaaccatttgaaagtaaattgtaggctgagtgtggtggctcatgccagtaatcccagcaccttgggaggctgaagcaggcagatcactaggtcaggagttcgagaccagcttgaccaacatggtgaaaccccgtctttactaaaaatacaaaaattagtcaggcgtggaggcacgcacctgtaacgccagctacttgggaggctgaggcaggggaattgcttgaacccaggaagtggaggtggcagtgagccaagatcacaccattgcactccagcctgggtgacagagcgagactccgtctcaaaaaaaaaaagaaaagaaaagaaaaacaaagaaaaaagaaggtaaattgtaaattgtaaatgatcatgatacttgactataaatatttcattagatgtctaccaaggacattctcctatgtatctgcgacaccattatcatacctcataacattaatttttaaaaaaattaactctagcgtcatctactatccagttcatattcacgttttcccaattgcatccaaaacatcttttatagcttttttaaaaaaataaaaaataaagcaggatctaatcaaagatcagtatgttcattgttacgtctttttatcaacttcaatctagaacagtctcccagactttttgttatgactgactttctgaagggcctagctgagttgtcttatagacaaccccacagcctggatttttttttctctctctctctctgcagatttgtttttgtgtgttttttgttttttgtttgtttgctgcaacctccacctcccgggttcaagcgatcctcctgccttagcctcacgagtagctgaaattacaggcatgcgccaccacacccagctaattttgtatttttagtagagacgaggtctctccatgttggtcagggtggtcttgaactcccagcctcaggtgatccacctgcctcggcctcccaaagtgctgggattacaggtgtgagccaccaagcctggcccaggtttttttagttgagcaatgttactaccttgttgaaggtaagaaagtgtgtctctgccaataggcaatttcctcaagatatgttgccatgcaggtttattgacatcttatctactcctaaaaagaatttgaggcagtttataataaaagagaaagtctgttgaaaaaaagagaaaatattttcttaacatgtagaaggatggtgggtgggaggaaggaggggaatagaggtgctataaacacattagtgtcgttcgtataactaaacgcaaaatttcactttaaaatgagttcagtcgaggtaacttgatttctgcatctaacacgagggagaactgaggatgggtgggctgcctggctcccactcttgtcctcagtcccctactgtctccctcggccttccctgggcaggtcctcaggtacaggcagatgtcagctggaccccagatgaggaaacagagcaggtgcaaggctggacctcaaggatgaagctaagcctgagtcaggggctgtcccagacagacagctcctcatccaacaacctccccacagagctgggctgcagctgaacttgcattttatgataattgctttttcagtctgcttaagtgctgaacagcacagcagggctgcgttctcctcccctggagaacgtttacagatggtgttgcagtgaggatggattcctgtactttccgagggtgggggagcaccgtgttgtcctttcatgccactttgcctcctgtcagtcccatggggtgggtttgctctaaggtgtacctgtggctaacccgaagggtttcatatggccatttgaactgcagaaagtgctgccaaaacatacaaaattcatgtgctttgagataataatttttcagttgcttatacatgacgttacagaaattgttggccacagagaaaaaattccccatgatctcaccactcctgaaaccaactaagtcacctgctcagagccactctctgtggactcccttctgcattaaaggaaatgcacctgttcatctcctttctagaataaaacatgactatacatgtcatttagatgtgtatgtgtatgcatacctatatatttgtattcttttgtggtctttaaatgtatttttatagttataattcacataccattttgtacagtactttttctcacttaattttatagctcatgcttttttccattaccatgtggtctttataaatcatttttatttgtattttattttttacttttatttatttatgtatttatttttgagagagtctcactctgtcacctaggctggagtgcagtggtgcaatttcagcccaccacaacctccacctcccaggttcaagtgattctcgtgcctcagcctcccaagtagatgggactataggcacctgccaccacccccagctaatttttgtatttttagtagagacagcgtttcgccatgttgtccagactggtctcaaactcctgacctcaggtgatccgccccctcagcctcccaaagggctgggattacaggcatgagccaccacacccagcccacaaagcatttttaaaaatggataaatgattttctattgaatcaatgcactgtaatttaactcatcccattttcaggcaaagtctgttgtttccacctctccttttcatccattatcattcacacttccctagccataattacacaataagatcaatggcttgccacaacccttcctggcttgtgatggttagattacgctggcctcagggagggagatggttgcatttcctcttggtatggctgggaaagatgcaacccactcaatatttaaatataaggggcggggacacagcctctttacacagcctgagactgacaccttgcccaggggaatgagcaagagcaggattgaacccagagctgggtggcatcgtgaaaatgggacactcagggtatcagtgacaaataatttagaggctgcttgcccctggagtagaatgtctggcacataaggccaggtgtgcgcctcgctgaggagtctgtgcgtcatcttgatgggatggtgccatggtgattgtcagccagcctctccttattgcccgctcaccccacacacaaggcatgttgatatggaagagagacttgaaggattgccaggcatcggccacacagaagatgtgacggggagttgtcctaaacccatatgtttttatcatcctgtacttgtcaaagagctttgaagttcacgaccttgctctggttcccacggggggatcgtcctgggcttccatcatccctttttcctgtcaaccgtgtgttgcatgcagatgccacccccatgccttgccggagactcccctaaaaagctgggattatgtctttgaaattattaattttcatgaatagcatgaaaaaatttttttgtaatcccagctactcgggaggctgaggcaggagaatcgcttgaacccgggaggcggagtttgcagtgagctgagatcgcgccattgccctccagcctgggcaacaagagtgaaactctgtctcaaaaagaaaaaaaaaaatttaaagccacttcactccagtgaactaagctattgcaatttttctgtgttcagttctagtcctcagctgcacaggcacgtcagatcttaccaatttatttaagttttattttaagttcaggggtacatgtgcaggtcggttatataggtaaacttgtgccgtggaggtttattgtatagattatttcatcacccaggtattaagcctagtacacattagttatttttcctgatcctctccctcctcccacccttcacccccaggtaggccccagtgtgtgtggttcccctctatgtgtccatgtgttctcatcatttagctcccacttataagtgagaacatgcagtttctggttttctgttcctgcattagtttgctaaagataatggcctccagctccacccacgttcctacaaaggacatgatctggctcttttttatggctgcatagtgttccaggaggtcttaccaatttattaccatggtgacgttgccaccctgcattctgtttgctcattttctctaatgtggtctcatcatcaatattttcccacgtggtacaatgtctacgtaatcaccattttaacagctctgtgcccatccagagaatgggcgcgccccactttaaactctcgatgctggacacagaaactgagttcacaattgtaagccggaagcatcttcaggcacatggagtatttggcctacagaggacattaacagatggagtttagtggttaacagttggtcacacccaatgtcaccaacctggcacctaagggtgcactgtggggagcaccctcctggccatgtgtccagagcatcccctgcccgtgcagaccatccagccactctctgcctggctggaccctggcattcccaggtcctcttcccacacttgcggagggaaggcacagccagatgtgcagccccacccgagctaagccctgctccattaccgaccggccccaccgaatgtgttttctgtgtagttcgtggctacgctctggaatttcagaccacgctgaatttacttgttttatggctaggaatttcaggaggagcaccacagatgttaaacgcaggagtctcttggtgctagtaaaataaaccttactcaaacaggggtgtcgtgactcaaagggttagatagcccatgatacaggatgtcggtcaccaatgcagatgttgtaagttgagtcatttgacagcatggtaactttatatggccagagagccagctgtgactatttaaagggatggggggtcagggggaatgcatttttatttctagacaaatatatttctgatcgtaacttaaatactttcttttagtcaaaatactgatttttctttctccccgcattctcgaaagagaagcccttcctatccttttggcgttcaaccccaccaaactggcttcacattagagaccctgcaaggcttaaattagaacctcacttttgaaacctgttggaaggactttttttttaattttattattattatactttaagttttagggtacatgtgcacaacatgcaggtttgttacgtatctatacatgtgccatgttggtgtgctgcacccgttaactcgtcatttagc

SEQ ID NO: 239 - DNA, 1126 bp, Homo Sapiens
gttggtcaggctggtctcgaaatccagacctcaggtgatctgcccgcctcagccccacaaagtgctgggattagaggcgtgagccactgcaccctgcctcatctcattcttatctcttgtttcagtgagccaatatgttattttattttattgagagccaagcgaatgtactctaaaatataccagagaaatataccataaaatgtcatttggaaaattttatttttctctgtttatagtgtccttaaacatatatttccttttactcatgcatgcatgatgagacttctatctaggaattatatttgatttctagtggattgagtaagttcttcttgaattcctttgaactttacctatatgcgtgattgcagtctctgacacatcatcctcataatcaataaatatggagactataaaaagattctctaacataaagagaaacaaggcaaacaaaacaaatttaaacttagctttcttatctacttaaaggagataataacacttaggtcacaggaaatattgcaagattaaatgcctaagatgtttgacatactccctgagaaatacttaacagatatagctcttattattacatcagtggagaatctagttattatccagaatattaaattggcatggaaaaagcatctggttattgaaactttggatatgtaaaaatagcattcatggatagtactcatttcttaccacatcattgcaaaattacaaacagcctgggagtccttcatttttattcttcaccttgagaagcgtgtggacaatctaactaccaatatcatcctttacgtaactccttaactccctttaaacattatacttcgggctgggcgcgggggctcatgcctgtaatcccaggactttggaaggctgaggcgggcagatcacgaggccaggagattgagaccgtcctggctaacacggtgaagccccgtctctactaaaaatgcaaaaaattagctgggcgtggtggcaggtgcctgtagtcccagctactcgggaggctgaggcaggaggatggcatgagcccgggaggcggaggttgcagtgagccgagattgcgccactgcactccagcctgggtgacagagcaagactctgtctc

SEQ ID NO: 240 - DNA, 3265 bp, Homo Sapiens
gtgtttcagcaccgactatgtggtcaccgggtatcatgcctgagagctagttccggggtccagaagtcagaatcaagacatcagtaggaccttgttcctcctgaagactctaggagaatctccttccttgcttctttcagcttctagtgaccccaggtatcctttggcttttgactacgtaactccaatctctgcctccatcttcacatggccttctctgtgtctctcttctcctccactgcctcttttttaaaaaattaatcataataattgtacacatttggacgtacatgtgatattttgatacatgcatatactatgtagcaatcaaatcagggcaattggggtatccatcacctaaaacatttatcatttcttcatattgagcacatcccaaatcttctcttctagatatttttaactatacaataaattattgctaaccatagtcacctgactgtgctaacactagagcctatttcttctctataaccataattttgtacccattaaccaacctctcttcatccctccttccccctacactttccagcctgtggtagccatcattctactctctacctccatgagatcaacttttaaagctcccacgtatgagtgagaacatgcaatatttgtctttctgtacctagctttttgcacttcacataatgagctccaggctcatccatgttgccatgaacgacagggttttcttttttgtggctgaataatattccatcctgtatatataccactattcatcagttgatggacacttagtttgcttccacatcttggctattgttctgtctcttataaggatacattttgatggatttagaagctactcaggaaatccaggtgatcttgtctcaaattccttaactttattagacctgtaaagactctttctcaaataaggtcatattcacagattctggggattaggatgtgggcatatcttttggggaccatcattcaatccaacacagtagttttcactatcaccattgctacataattcatgagatcattatgcaagtatgaggagaatgggcggggaggctgactgacatctagagagtgagttatcatctatcctgaaccttaagagactcttgataagcattcaaatggtacactaatatttttccactctgagagcattcagatggaaaaagatatccactaccctctaccaaaatattcttgttacttctaagcttctgactacctgctcaaattattaatcattacccactggtccactggtttttgttattacttaactcaatctatgacttcttccaggcaaattagacaacaggattacttctctttaggaccagcattgaattaagaagtacaatcatttaccataagtccaccagtgctggccccaggaaatcaggaagaagcatctgtaaaccaagagctatctatctatctacgtatctatccatttattgatttatttggcatctcaggctactaattagtcacaggaatccttccatgaggccactggggttgagagagaacagcagcgtagcaggatgataccaggaagatgagaatcctccttgtgcaatttaacatgtgcatttaagattggcttggaaccattcctgtgcatatgtgtgtgtgtatatgtgcacgtggatgcatgggtatgtgtgcatttcacttgagggagtactgctgtggattcctcactttattttttggtgaatgagcttgtgactcattcataatgggaaattcagatcataatgccaggtatttagtcctaccaaggtccagtagcatttcaagagttgtttctcaaaataggactagttacttactggagaggtcataactttgattttttaaatgatattagaggtcttgactgagaatttactactggagctccataaagcatcccaatctgctacaaactcttcaagcttcattggatccgctggatcaaatgggctgccaggtagagttgattgcactgcagcctggactgattgccaggagctctgttgatatgagttagtgaggagacaacatctggaacagcagctgcacttggaggcaccgcctaattaagcttacgataatccacactcattctccaagacccatctgtcttccccatcaaactaattggagagttgaatggagctgcgatagaaatgaccacaacctaccatttcagtcattgatggtagcactaatctctcagattctatgggaatatcctactgctcttggtttttcttttagtaaggaaggtgagatccaggacttccatccttgttctttcctttcataataactcttattcctgagttaagaagtaaatgtgagtatttagccagttgtctagagtatcttttccaagaacacacaggaaatgaagggaaaaagaagaggatgtgtctgtaggtcccactatgcctacagtgagatgggcttgggtcaagactctatcacctgaacatcatacatttctactctgaccattgaaccacagtgccattcttctataacagacatgtgtaatttgggagccattatcttaaaacaactgaaaggtctacttatattcttttcttcagaatatatttacaccagaaaacgaccacaggtctagaaatagagtaatgactctgtttttcctttggtgagcttcatcctgagacatggggattttatgcaaatttattaggaactttgtgattgcccatatatctcagatctatagactcaatgatcaataaatcagtgttaaatatctatgtgtctctattagggaaagcacgaataaatggcctctggaggttaagtgcctgacttctgcacctgcccttctcaatcataggatctttccaatctccactgtaatcaggcagactatttcaatattagtccctcccatcaatatccccaactgacaagagaagccacaatcacatttttgtagatactagtagttccctcataagtatttctcaaggccttagtaaaaatggtcatctatgtctacttaggcaacatagttaggaagtagatgagattcatgttataaattcggtcattttatttctttctaggtactattgtaaataatttatggcatcttaattttctttagcatgatcaataatctatacagcttcctgtattaaaagtagcttgccctctctatgaattcagataattgcactatatgaaaaaaaaatagactaacctaagactacatttattc

SEQ ID NO: 241 - DNA, 2222 bp, Homo Sapiens
agtttcttgaaacagctccatattctttcttctggcctcccacatattccttgggctagaaatctctttcttgattttaatcttggcagccaccctccatgacagccttaggtctgcacattcatcgagagagccttgcttccttcccagcaccctgcacacgggtgtacatgggtacacatacatgcacacacacatgcacacacatatgcacacacatgtacacacatgcacgcgcacacacacacacacatatacacacacgcatcctttgttaggagtgagtttactactacattctggcctgtctcccacgttcgagtcaggcgaaggggaacagcagctttgaagatgaatttaaccagttcttcctgagggcggattgcggtctccttatctgacccttgctgagagagaaggagcagcgtggaggaggcggcagtcagggaagccttgtctcagtccaagagcaaagtgactaccgtgtgctgagcactggagcttggtgacccaaagatgaataagactcgactcttatccttaaggagcctgcagtctgatcaagtcattactgagaagagaggaaggaaaagatacccttggcctttccaacttgtcaagggtcaactgaattcctgagccggtccccctgagagggcagtgggcgagattccagcaggtaatggatgagcacagctatgccctgacagggacattgcctgcaattggttccagtcatatatggagccaaactgctttgaaaattgggggggatggtgacagaagagagcaggcccacccctcccccatcccctaggagcctagggccctgtcttgatcccccttctgggagatgaaacgtgtggtttcccaaagctaggagcagagcaaatatcttctgcctcggaggggttggtctctgcacaggctgggaacccccagggaagcagcactgagggccctaggagagagggcagaggccagaggcagggtactgcctgctcagaaggtcagattccagagcaaacagcaagctgtctgccttttcagactctgaaaggatgggggtaggggcaggaagggagggtgaaagtttagagcccctgtgggtagggaaggggcctctagggtctgacaggcacccccaggacactgtgtctgcccaagtgtttgctgagaaagtggaggccagtgcagccaccggttgagtgcagccactgggtcagcgcagcggccgggtgagtgcagccctcggattttgccccaataaccagagtcccattagcacagtctgagcagggggcctggcagagcacttcgccctcctctgtcatttagcggggaaacagttcacacagggacaactaccatcttgagtctcttctgtcaactgccctgtggtctctctggccacactgggacagagcatcactccagtaaaccctctgagctcatttccctagctgagcaggttcccgcctctgttcctagagcaccagcatgagtgagcctcaggaaccaccccagattttaggagttaggagtgggtctagctgtgctgatggccacctggggctctggtgaactctagcctcctcccatccgcccatcgagggcatcgtcaggcctctgtgctgagccatttgcctcctgctctgccccaaacctgttcagcccccaacattctcactttcctgtccccttcatgcttcttaggtcatttctctctgcttctgcaaacctccctgccaaatgttcccccaccccaaaccgacccttttcatctctatgtccccccgtgtacacctctctcaaaatgcagggccacggggccctccttcttagggactaggccatgcctaggggtagggctgctgtggcattagtgacaaaaactgctatgtctacccacgtaaatcacataaatatacaagcaggggccaggcgtggtggctcatgcctataatcccaacactttgggaggctgaggcgggtggataacttgaggccaggagttcaagaccagcctggccaacatagtgaaaccccgtctctactaaaaatacaaaaattagctgggggggtggtggtgcacgcctgtaatcccagctactcaggaggctgaggcaggagaatcgcttgaacccaggaggtagaggttacagtgagccgagatcttgccattgcactccagcctgggcaacagagtgagactctgtctc

SEQ ID NO: 242 - DNA, 13810 bp, Homo Sapiens
aaacagccagcggcgaaacagccaagcaaggcctaacagggccccacgaggacgcaccaggaagtaatgaagtcacccgtgcctgtcaagaggcacggcgctaacagaaggctcccaggagcttaaccggatgctcatctggcaacaacggcaagaatcaggcccggcgttccctgcgcagcccggtcggagcccagacaaccggcccgcgggccaagctccggccttcggtgcacgcggcaaagcgcggaaaataaggcggctcggtgccgcctggggactggccgcccacgcccccggactcaccccggaggtccagctcccggtcgcgcaccgcgttggtgtactgcgccgcctgctcgatcagctccgccgtcagcttgaccatcctgcagcctcccgttcccccgcgctgtggaaagcccgtggcctcccgccagcgagacgtcccagcgtgccccgcgccccgccgccaggcagcaccaatcgcagccgccgagtgcgcgcgcagctcgaccgccaggccgaagcaatcgaagagccacgcctccgggggcgttcttgccggaagtcgtggcgcgcgcacaggggatgtgtctcgttctgggttgtttcctagggtgtgtttcggagtctggaggacccctgattccagacgttggtgtttaaaagttaaggcgaatgtggaaacacccgaggggaactttctcatgcattagcgcacctcgaggtgggaggggaagcggtgactgtcctccctccaccagccgtcgcgggaacccgtggggttcagtgaagggtccagcagttcaggtgcccgccccgggcctgggccttggctccgggctacagtgtgagatcccgggctaggtggcccgcctggggcaggtcgccgggacaaccccaccgccccgcaagtccagcccggcctcgggcacggtagggtttgcggttaagcttgtgacctttagacttctgaatattcatatgtatgaaatgtgatatacataaaagtgtgcatatcaggaatttacagtgattaatgaccagagtgaacacagctgcgtagccgacaccgggatccaaaacaccgctattctgaaagcctccctctttcccaaaaggcaaccgcgaactcaacactacaaattcggtttgcttgcttttgctataaatagaatcatgcagtatgcttttttttttggcctagtttcatggagtctatattatgtctggagtccatccaggttgcatacagagatggtttgtttgcttttgctgctgaagagaattccattgtatatattataccataaattacttattctgctgttgatagacatcaaagttgttttcagttagggctattctgagtaatgctactatgaattttctggtacgtggttctgatgcacgtttgcatgagtttgtcctggagtgggactgctgggacatagggtatatctatcatcaataagtaatgcccaacagttatgctaagaggctgaaataatatacacactccagcggtgtgtaagggttttcatggcttccagcttcagccttcttggcattttaactctataacttcagctattctgatgggtgtgtggtggtattgcactactgctttgctttgcttttctctaataactaatgaagctgagaaccttctcatgtgtatggtgcccattctgatagcttccttggttaagtgttctttcgagtccctggctcattttttttttttccttatggagttgtctgccttttttcttattgatttgtggaatttctttatatattagggatatgaacacactctgtggcttgccttttcactcttaatggtgttgatgattagattttttttttttttttttttttttttttttagacagggtctcactctgtcacctaggccggagtgcagtggtgccatcaggactcactgcagccttgacctctcaggctcaagagatcctcccacctcagcctcccaaatagccgggactataggcacaggtcaacaggcctggctaacttttgtattttttgtagagacaaggttttgatatgtggcccaggctggtctccaactcctgagctcaagtgatccacctgcctcagactcccacagtgctgggattacaggcgtgagccgcctcgcctggctgagaagtttccaagttttatgtagttcaattattttctttaggttagtggattgggtgtgtgtgcatgtgcatgtgccttaggaaatcttcccttacccccatcatattttcctatgtggtctactagacgattgttttgcttttcacatttagttctgcaatccacccggagatgattctccttgaacttttattgaagtatgatatacatatagaagaatgcaaactgaacacacccaaccaactagcatcctcgtaagaacaggacattgccacattccagaagccctcctcctgtcttcatctagtcaccacccttgccccaagggtaaccattatcctgccatcttgtatagatttgctttatctagttttgtatttatgcaaatgaagtaccttgcatattttttgctaaacattatgtttgtgtgtagatgtagttaatctattctcactgtaatatggtatttcattgtggatgttttacaatttacttatccattctgctgttgatgaacatttgggtaattttcactcttttatattataaatagtgtacctacaaactcaataatatatatctttatgtgaacacatatactgatatactcccagggatggaattactgggtcatagggcttacttatgttcagcttaagtaggacatagttttccaaagtggttgccaacttaaactccttgctaacgtttagtattgtctttttaatcttagccattctggtagataggtaatggtatgaaattgtggttttaactgtatttccctaattactaacacaattgagaactttaaaaaatatatttatgtttgtttggataacctctttaatgaagtgtctgcttaggtgttttgcccatttttctattgggctttatttttaaactgatttgtaggagctctttatattttttcaataggaaccttgtgagctatgtctgtagtgagtatcttccccctgtggcttgggttttcactctcttaatggtatcttttgatgaatagaggttcttcattttaatacagtctgatttatgaaccgttccctatacagctaatagttttcgagtacgctgtgagaaacttttgcctactccaaaattatattttcttctaaaagctttcttcttccaccttgtccatttagatctgcagtctctctggcctagatttttgtgcatagtctaaggtagggaagaagatatatttttccccatatggatatttggtggacccagcaccatttattgaaaagaccatcttctcccccactgctctgcagagcagctcttttcaaaaatcaagtgtccaaatatgtgagggcctctgcttctgaactagctgttcttttccatgggtttagtcagctatccttgcagaatacaagctttagaaaaagacttggtatttgtccctcaaaaaaagctcccatttttttctcagattatctagtagttatctgattattctaatcctttgcatgtgaacataaattatagatatatgtgaaaaagcacccatgatttgatttgtagtgtgttggatctgtagaagaatttggagagaattaatatctttacaatatgaagtattccaatcaatgggcatattatagccctacatttattgaggcactctttaatttcagcagcatcctgcagattttgtgtcaaggccttgtatatcctttactagattgtctagatatttgatagattttgatgctactgtaaatagtaccttttgtttaaaaactccattttctaatcattagtttgatatatttaaatacagcagatttttgtatattggcgttacatccagcgatcttgtgaaatttacttaagtttatctgtaaccattcttgtggattttctacatacataaccatgctatttgagaataatgatagttggctgggcgtggtggctcacgcctgtaatcccagcactatgggaggctgaggtgggtgggtcacctgaggtcaggagtttgagaccagcctggccaacatggtgaaaccccgcctctactaaaaatacaaaaattagccgggtgtggtggcacgtacctgtaatcccagctacttgggaggctgaggcacgagaatcacttgaatcagggaggcggaggttgcagtgagtgaagatcatgccattgcactccagcctgggcaacagagtgagactcggtctcaaaaaaaaaaaaaaaaaaaaaaaaaaaagatagttttatttcctcctttccaattattatactggttctgtattttttgccctgttacactggctgggatctttagcacaatgttgaacagcggtggtagtggatatgctttggcaggcatcacttcatagcccggaagaaaactctaaccaatgatcgttaacatcaccaataatggaacagatcgtgtactccctgctagaatgcagacagaacacagaatcagcctgtgagattcgtgtcaaagatgcatgacttgactcaaaacgtgaggaaccctcagacaagtgcacagcgaagggcagcctacaaataactggcctatagtctttaaaagcttccacatcatgaggcaaggagactgaggaactgttccagatggaagaacattaaagagacatgatgactaagtgaaaagtgtgtttctaaaccagaccattttgctaagaactttattgggacaactggcagaactagaattcagtcagagggttgatggtaataacataccgatgttaatttcctgagtctgatggctgtgccggagaatgtcgttgttcataggaaatacccactgaagtattggcggggggggggcggtcatagggtatatcggcaacttactctcaaattgggagggaatttctttgtattgtacttggaacttctttgttttctgagatggagtctcgctctgttgcccaggctggagtacagtggcggaatctcggctcactgcaacctccgcctcatgaggaataacatgaggttcaagtgattctcgtgcctcagcctctcaagtagctgggattacaggcgctcgccaccatgcctggctgatttttatatttttagtagagacggggttttgtcatgtttgccaggctggtcttgagctcctgacctaagaagtgatttcccctgccccctgtccctgcctcggcctcccaaagtgctgggattacaggcctgagccatcacacctgccccggtcactgcaacttttgtttaactaaaaaaactaaaaaagttaaacaaaataactaaagaattaaaataactttaaaaagttaaaataactaaaaaaattaaaataacaagttaaaataactaagaaataaaataacttaaaagttaaaataactaaaaatttaaacaaaataactaaaaatgttaaacaaaataactgaataatgaaaaaattaaacaaaataaaacctcaacttcatttaattccagagaggaccaccaggtggagtccttaggctggagagctggttttaacttggggcccttctgttgctgtgtttaaaaaaaaaaaagagtggggtggtatctctttactttaaaaagggaaagttgtacaagtttcccttcagcataggaacagggacagaagtcaaaccatatgtggttttattcattgagggtatctctatgaagttgcaaacaattttcttttttgattccatttcttttggccggaatttctcaacctcggcactattgacattttggtctggacagttctttgtcatgggggctgctgtgcattgcagggtgcttagcagcattcctggcctccacccactggatgtgagtacatccttccagttgtgacaacccaaaatgtctccagacgttgccaaatgtcccctggaagacaaaagtcatccctggttgagaaccactattttggcaacaggatgttctctgccctgggcactttggttcctgttgtttcaaaagggagtctaagatatctggtcacccttagtgtggctggtctgtagtggtgaggggctttggatggtgggactgaatcctaggatctaaggtgggtgctcagtgctgtaccatctaaggatgctgttctgtgctcagataagccacaaagcctggggtgtcaggaaaggacttaaacagccaaccaggaaggatagagtctggggttcgtgcgaggaaagcaacagtgaaggctggggtaggggagcagattcttcctttccccccagcagccagtgcccagtggcctcccagctggctgggcagaaccttaagatgctagagaatggccttggtgtatactttccatcacccctgcttgttcttattaaaatgtttttctttcctgttctccacctcctttttccatcctctgatctgaacctctggccctcacctgctctcgggggccccaacatactccaagcttttaggcaaaaggccctctccagccatagtatcaataatgcaaatgcagtggagggtggtctccccaagttcaaggacactccactcctagactcatttagaccatgttgctatctatctatctatctatctatctatctatctatctatcatctatcaatctatcatctatctatctatctctgtcgtttttgattgattgattgagacagggtctcgctctatttctcaggctggctgcaaatgcctgggctcaagccatcctcttgcttctaacctctcagaatgttaggattacaggtgtgagccactgtggctggcccttttatttttttaagttctgtccaccccccctcccatttcaggtgtgtcttctgtacaaagtgccattctcaccagtcctttgaagagtcgcaagatacaaagtcagtagtggcctgggagggatggggatgtacacatggggtccactgtgaggtgccaaagaatttggggataaggtcaggtaaacatcaccccctgaaaataaagctagtttaaaacaaatgcatcatggctgcatttgggcagctgcagaacgacgcccctcctgcagccagccagcttccttccctgggcccggtggggagcaactttgccaatgtgcagccccaggcaaggcattcacttctgtgggtctcagtgtccttgtctgggaaatgacaggtttagaggaggtgatccatgatcctgtcacttaaaatccatacacatatcctgccagagtccagacaattttaacctcaaggtcggaccacttgtgagcagacattatatgtagttggtctctttcaacaaggtggagtttagtcattaggactttgtgaacaacttctcaactccccacccgacttgtcagccccaagctgggcttgcctggcttagccactcgacgaggctgcctggttggctttcctgtagttgtatctccctttgggagataaagggagtttcttcccttttttttttttttttttttttgagacgcagcttcgttcttgttgcccaggctggagtacagtggtgcaatcttggctcactgcagcttcacctcctgggttcaagcgattctcctgcctcagcctcccgagtagctgggattacaggtgtcaccaccacgcatggctaatttttgtatttttagtagagatggggtttcactgtgttggccaggctggtctcgaactcctgacctcaggtgatccgcctgcctcggcctcccaaaatgctgggattacaggtgtgagccaccatgcccggccaggagtttatttctgattcagctgcaaacatggtagactgtaagctctcagtgggcagctcggatttgctggtatctgggctctagggtctaaaaggctgcctggcaccagcagcacttaacaagttacttttaattcaaggtcggtctcatgggcggggcaaggggttgaatgttcatcccaaacacacttattccttcactgcctcacacgcacaactctggtcaattggtgcttgtggtggccagctgttgggttgtgtgacttgccctgccttctgagagctgcacactgctcccctcctctgctgcagagctccctgcagccatattctgctgcacaagcctgtccttgtagccacagctgatgacacagggagagtacccatgtaaggcaggctgaccaagtcctgtccctgggaaaagaagagccaagaaacagacccagaaagttggcctgaggggttggatttgtaccagttttacctggaagatgctggaggtcttgtcatttgtcccatcaactggagaaggcggccatggagagaagggcagtgctgccgtacagagagggtccaggtgacatttaatgccggctccagctttcccaaggctctgctgcacccctccctgaaattctgaatccactctggattctcaaaacaacgcccctcacccactcttgttttcacctaagtcatttctagttggtgcgtttcctttacttgcagccaaaggattcctagcaagtacaagcttctgacttcacagagaggccatggtaaacatcccaaggagtgcatcagccatgggttcagggatttcagccactgcatagaagacaagctgtaacctaattcaatcacacttggcagcaaccggtgaagaggcagtctgggctctggggagctcccccgtgacagatggaaggggcccctacatctggagaggctctagaacctcctcccagtgaggctaacgtggtctgaaggggtctctttgcccagtgacattctggggttgggatctgggatttcctccattgcttccttacatcaacatttgctaaagctcaaaagaagaccttccacgtaatgacatcaaacagatctgaaaccacagttaaagtaacgtccacttaacacttggtcagcactcatgtttcattttgtgtgccgtggaaagaaatacaggctcctgtgccatgggatgttaactcttttattaatttagggttaacattgtacttgcttcattgatttctctttcagagttgtagattcaataaacaacatctgggttctctccagctcacaggtgacaaggcaaatgcactgtcgtcaaacaggggagcaggacaatatggagaaagacgaggtcgaaaaaatttaaggcaaatgttacttccctattcaagggaattgatcaagcagatctgtgcatttcaatgaaaatatatgaaatatttgtcaaaataattaacatcggtaaaaattagaacatgtagcttataaaatgcctacacaggtttggcagaataaatccaactgtgtcatgtaggcttgtaatatacacagacacaggagtttccaccttaaaaacgagtcttctgaagggcagaggccaaatgtattttaaaagcaattccataaaatgggaagtgatggatgattaacaatgcatggctggctttacattttgttcagaggaattgcttggccatcggggtaccttttggctggccacagaatgcctcctgttgcctctcctcagaaggctctgcatcaggtcgaggtggtcgttcaggccatgagactcctgaagacacagacagaacacggtaacaaggagagctcggcttgctcaaaggagagcgctgcgggggatagaatcttctggtctggctttggaattggactttctaagccactgctgcagtttcagaagtagctgactatgtagaaatagatactccggccccagtggtcatacattttatgccctcaaacctatcttatttatagtctgaccaaaccgtccccagactgctcagtggcaggcaacgagcaggtagactgctggccctttgtcacatgtgaggatggcccagggttcgccagctgggccggggagatttactacacagccgcagaaaagcacggggagaagagtgatgtgtgatgccaagcgcctttcttttctgctttggtcttgaagattcagtaaacttatggtcccagaagctgctccaaagccagagctgtggattcccagaattcattttgttcctgttagtttgtcggaagactggagccaacaagcagcatttgagaggatatcaccattttaggaacacctccttaagagccaccacccacctggcttgggtgctcagagatgctgctcctggggagataaagctgtcaggtgcagggcgccgctcctgaaacagactctggccgacagtctggaggaaggtggacggatggatggatgggagtgcctgccctctgtgggcagctaggcacccttacccggccaggaggcacgtgcggcagcagaactgaatgaagagcttccgttcgcacagccggttggacttcaccatctcgcagaatgtctcgtcagctggggccccgcatcaggaaaggcaaaagagggaaaggtcagtcttcggtgcctgtgaagattgtttcaaggccgggcgcggtgcctcatgcctgtaatcccagcactttgggaggccgaggtgggtggatcacctgaggtcaggagcttgagaccagtctaaccaacatggtgaaaccccgtctctactaataatataaaaattagctgggcatggtggtgggcacctgtaatccaagctactcgggaggctaaagcaggagaaccacctgaacccaggaggcagaggttgcagtgagctgagatcatgccactgcactccagcctgggcaagaagaacaaaactccgtctcaaaaataaataaataaatacataaataaatattgtttcaatcattccacatatgctgggcatcagtggtgccctgggcaagagggacacagacagaggtgggcagcaggatggcagcccttgaagcccctctcctgcaatgcacttgactctgggagccctgtgtggcgggagggcactggtatatggggctcttgctgagtctcagtgacaaggggattcatgagcaggatgtgggggtggtgtgggagggatctcaggagaacacccagcctgggcctgtggggcacatgtgcacctgtctttctggacaactgctggcagtggagcttaggaggaagactgtaggggaggccggaggacgggcctggaggcaggagggaatggaagctgcttccagggtggagggggcggacagggaggagtggggatggggggaagggagccgccgtggacaggacttgctgaggacaccgctgcagcaaggggaagaggcctttgaggatgcatcatccgtggacctgggaggccctccagtggcaaccacacttttttgggctagatacataacctgggcaggtgacttcccaaagaagtagtttctgggcctttgaagggacataattagacaaccctcccgccaccccccaaaaataataaccagtaacaaggcaaggaggcatcccagggccctccacaagctccatgctctgcctggacagggccagtgccagcttcatacccaaggaccacctgccctgaccctggacactggagcagagagccttcctctcctggctgtcagaatgtggctccaccctgctgcttgctgggccagagcccccttccctgcccgtgtgtctacaatgactcctgcactgcacctccaggcccgagtcctgccaaccctccttggtgcctggaattcccaaactgggcacttagctttggtgcccttttaagtttctgtttttacaacttgtccttgtcccccatcctatggcagagccagggctctcctgcagcacagatgcaggtccatgctggatccctgcagagctgggattgctgctgctgagcgtgtgctctactctgggctctgtccccctcgtcctgagcagagaccctccaggcttcctggctttgaccccccaggtcaggcttcttttatggtatgtcgtcacatccgggccaccggcggcctatggcatggcagtgggaccagtacaaggacaaaatcatttttaggagtcactcaataaacagatcagcagtggctgggatgcctctctgatcgatgtgagaggcctagagggaagctgggagacagggcagctgtcttccatatcagctagaggaatcccagacagtcaatcggatcaggggcacgaacgcctgtctgtggagccgccatgcctatgtggctttgcttttctctttggagcacgagctggccagctgagctcctccacaggcagccccagggtaacccagctgctgctcaccgttgctgcacgtgtggttggtgatgcaggaggtccccagctgtgtgaagcccgtcttacacctgctacagttcctgctggagcctgcacagctcaagcagttctcgtcacacctgtgggaagataccgttcctgctgaagtctggggaagaggctccaccactccgggctcccttcccagaaccctcacctccctgcacctccttcccaccccctcagcctcggtcctctgtggagaggctgtgtcgcccaccattccctgacacaggggctgagtgtctgcatgtcttttctcctgtctgacctcactattgccctgggagggcagagacagccatggccagttggcaggagcaagcccaggatcaggggccaggcctccgaggcttcccgcagctcacctggacaccctcctgggccctggcacccagcccccaccccaccacacggctcccagagctgtgtcagtcttctctctccagcggctgccgggctgcgatggctgtaggcttggggtccaggccagactccacccagggatgtgacacacctgactcgagctgaccagaaggctgctgtcacctatatgtggccatgcctgcttaccctcggggagtgggagagatgccccacaattcctgcccctctcggacggtcctggcccagcctgcgcagagatggacaccagccagggctatttctaatgcagggtaaacgtgacctcaggggacggttggtgcactacagcccaagggccacatccagcatttatcctggaccacagtcacactcattcattgacaatcttttgtgtagcagtggctgagctgagtagctgtgacagaggcagtgtggccccaaaagcctgaacgactgaccattgtgccctctacagaaagcacttgccgatgcgggccgagtgcttgaaggagcacgtttcccatcctggggccgtgagtgcaccccggctatgctgctgcctgtcctgagtccagagcccggtgactcggtctccacagtgcttgcatcagctgcccacctccccattgttgccagttaagggtggaacaggccccataggcagggcttggagctttgttgtgctcatgcctgggcctccctggggggcagttctttgctttatacagatgtcccctccctgctgtgtgaagccttcccacgctcagacaccaggcctcctcgtggggctctttgcagagcagccctctgatggggtctggtctcaccacggactccgctgctctggagccccaggtgcagcatcgcttcagcctgggtgggaggtgggttttattcctagtgtgtctgaggatgctgagcctagagctcaagcccttggtctgtaattgtaaatgtgtaaaccccac

SEQ ID NO: 243 - DNA, 2415 bp, Homo Sapiens
aaataattggtgatccacaaaaagaaaataaagtgagagacaaattcctgactcttttaatgtcatactggttaaatattcggggggaaaatttttattaaaaatatgtgtacaaaatactttctaaaacaggcataattcatcacaattaattacagagggttgttcaaacaaatggatctacttctatagatatacatgcatatacagacatagatatagataaatatcaactttccttttagcatgaaaagacaagaaatttaaacaatagtgaactaataaaaatatacctccgttaaactgctcagactcaagaaaattagggtgaataatcatacatcacagatgatgaaagaagtactgtgttctcataccttgcatattacgattataaagtgttccacatttaggggttggcaaccaaacaatatctattaacaactaaaatatagaaaagcaaaatgcagcaatgctggtcctgagaatctccccagagtaataaacgcaggtataattacaagagcaaaatgcaggacaccaatacttctatgatatgacctgtatttggtgttgggctttacaggagctctttctcagacacatatgcattatctgtatcttttctgagattctactaactttatggtgaaatcaacaataaaaggttttcattttgataaattggttttcaaaagagaaagatgttacaagaccctttcaacttgtcttgcaagtgaaggctatatctgaggctgccaagaaaagttattgacaaaggcatggcaaaatgttaatgtggttttgttgaccactgtgtttgcagcacagtggagaaacagcgtggttttctgtccttgctgagttttatgcattttaaggaatcatatttgttcattccacattgcagaatgtttcttgcattttcatttcctaatgcagactaaatatcttatgtggtttgcaataattctctccttttaaaggtatttctggagtaactgcctggtctgtaacatgtttgatggatacctaacccttaaatattacaaaattttatgcacaatcactacttgattttgatggacataaaaacacgtttttaagttacagtagcaagatattatcgttgcctgtgttaactcattactgatactcggtttataatcatagccaccctttgtgaaaaggttagcttgttacattatggttatgctgagggaagaacaggctatcctggatgcttgagggcctctcgtggtgactgagtgttggcactagtgtcagttcatatctaaatattcctacatatgtaatgtactttcatattttttttgacaacacttgtctagggaatatttcaactctactctgtgcttttgggattcaatgggaatcccctttcagatggtcaacagtgtgagccttattgattgacctttttgccctcttccctgaaatatattctctaggtttaatctgtggaattagattttaagtcacattttcttgcgtaaatgtatgaaagcaggaaaaccggctgttgctcatattaacagcatttttttcacatagtgtaagaaaaacagtggtcttattcaccagaccaatcttgtattcccgctggtctcacagttcaagactcccttccccaggctttttgttctgaggtctggccatacaagcatcctagctgagtgggtggaaacgacatttacctggtacaggcctgacctgtgaaaacaccctctgtgaagccccaaatattttttgccatacaactgcatgaaattttcccaagcaccatagccagatttgaagacacaggttagcaatgagaaatacaccaatagaaggtatgggggtccctaaatccatatttggaggaaaatccacaagcagagtcacatgacatttgaaagcctgtgttgaggtggtatatgccagcaatgataaatattacatgatgatcaaactgctgataaattcaggtttgtctattacaacagctaattttacgttaactgtaacaaaaatatattgaagaaaagtttgcatggaaatttttatttttatatttatttatttgataaatatcaactttccttttagcatgaaaagacaagaaatttaaacaatagtgaactaataaaaatatacctccgttaaactgctcagactcaagaaaattagggtgaataatcatacatcacagatgatgaaagaagtactgtgttctcataccttgcatattacgattataaagtgttccacatttaggggttggcaaccaaacaatatctattaacaactaaaatatagaaaagcaaaatgcagcaatgctggtcctgagaatctccccagagtaataaacgcaggtataattacaagagcaaaatgcaggacaccaatact

SEQ ID NO: 244 - DNA, 4042 bp, Homo Sapiens
actggacatcaccaccctgtccagacacccagagcagagtgggggatggggaaggtggcaggtgggggacaaatgggttgatatttatagcagacaaattaataaagctacagataatgcatttagacaacaataaaaacacttgatatcaaaacctaggaaacatctaaagaaatacttagtggtccatttatagccctaaatacctgttaccaaaaggagaaggtttaaaaattaattacctaagcattcaacaaaggaagctgaaaaagaatcacagggtaaatccaaagaaaatggaaaaaaaataaaagcataaattaaggaaacatgaagcaaagaaacagtagagatgcttttatttttaaatagttctcaaaaaacaaccctctggcaaactgatcaagaaaaaacaggagtgaagtcacaaataaagactggcagatagcagtgaagttgtaaaaattctaaatgaatgtaagaaactactgtgagtattgtactgataaatgtgaaaccaaaaagcaagaacaattttctagaaaaataatattgcctactgtaactcagtaagaaattaaatgcctgagtagacttaaaacattaaataaattggatttgtagttctttttaaagccatgcacagccactcacacttacataaaaattaccagaacagatggttttaccttctgccaaaccttcaaagaaagatactccttacatgacacaaattgttctagaagacagaggaaaagggtaatctctccaactcattttataaagccagtatcaccttttagctttgaaataaaaaacaggcaaggatagtaccagaaaggaaaattatgggccaatttcagttataaacatggatgaaaatgttctaaataaaatcagagcaaaaacccctcagaactaactaaatggtttatcttagaaatagaaggttgaataaatgccagaaaatctatcaatgtatattcaccacataagtagacagagggagaaaaaaagaaaattattatcttggtagatgcagaaaaaaagtttatgacaaatttcaccatgcatttatgataaaaactctcagaagactaggaaggaaatcttcttactttgataaaagataatatcaaaaactgagagtaaacatcatatctaatggagaaactttagacacgtgctctttaaaattaggcagaagatggccgggcacagtggctcacgcctggaatcccagcactttgggaggctgaggtgggcggatcacaaggtcaggagttcgagaccagcctggccaatatggtgaaaccccatctctactaaaaatacaaaaattagccgggcatggtggtgcatgcctgtagtcccagctagttgagaggctgaggcatgagaattgcttaaacctaggaggcagaggttgcagtgacccgagatcacgccagtgcactccagcctgggtgacagagcgagactctgtctcaaaaaaacatataaataaataaaataaaaaataaaaaaattaggcagaagataagcatacctgattccaggcattgttcagtatagtactagatgatctggaccatgctctaagacatgaaaaaaagtaaaggtataaggatagttgcatagaaaataaaaatattcaacagataaactgatagacatggtaaaataaatcataacattcacctgattggtaaaaactacagaaatcaacagtgctcctatacatcagcaaaaatcaacaggaaatataacagagacacttttgtctctggccatgatggactaactggtattggaccagccctaccactgtaaacaactagaaaactggagaaaacatatgaaacaactgttggcatatattggacaagaggcagcccaggactaagatcttgagagaagagaaatgtaagaggcaagtcctatgattaccctggctttctgcctacagatactttctggacagtggcacagaagtgggggaaaccaagcagaccatggtgctctctctgagtcagagctcaggagaattaagtggttggaatttgtgaaatggagcaccagagagaaagaagggaactcctcaaggaaacaactccaaaatcctgcatagaccctttgagtctttggctgaaaactaagctgtgcacaagatgaaactaactctttgaaactgggcaaagaacaactactgattatctgtctgctgaacaagtctcagagttcacacagggctagaggggttcaagttctgataagctaaagtagaatgacttcgttggaaacttgggacgttcagtagaaagcccaaaaaggtctctcctatagctactctagacctgctctaacaaagttcaaaacaagtcttgaaaggatcaaatttatctgtaaattaaatgtccaccagaagaaggcctaccactgtttaacaaaaaattaaaaattcagacattcaacaatgtaaaactcacaatgtccatcatctaaggaagtattactagacatgtgacaaagcagaaaaatgggacccctaaccaggagtaaaattagtaaattgaaagagaccaagaaatgacagagataaaattagcaggcaagaaattttaaatgcctgtcagaaatgctcaaagatttcaaggaaaacatgaacacaatgaaaagaaaaacatgaggtatagataagaaccaaatgcaacttctagagctgaaaatatagtgtgtggaacaaaaaaaaatttactgaatgggattaagaacaagattacacactgcagaagaaaagatcagacaacttgaaagcaaggcaatagaaactatttaaaatgaagcacagagaaaaaaaaactcagagctttagtaatctgtgagacaatatcaagcaatataacatgtgtctaattcaaattccaagaaagggggcagaaaatatttaaataaaatggccaaaagtttccagactcataataaaattataaaataaaaattacaggccaggcgcagtggctcatttctgtaatcccagcactttgggaggctgaagcgggcggatcacgaggtcaggagattgagaccatcctggctaacacagtgaaatcccaggttactaaaaatatgaaaaattagctgggcgtggtggtgcgcacttatagtcccagctactcgggaggctgaggcaggagaattgcttgaacctgggagtcagaggttgcagtgagctgagatggtgccactgcactccagcctgggcggcagagcaagactctgtctcattaaataaataaataaataaataaataaataaataaaaattataaacccttagatccaagaacctcaatgaatataatgaacaccaaaataaactataccaaagaatatcatatctacacttttgaaaaccaatgataaagagaagaccttaaaaacagccagagatggccaggtgcagtggctcatgcctgtaatcccagcactttgggaggctgtggtaggtggattgcttgagctcacgagtttgagaccagcctgggcaacatggtgaattcccatctctacaaaaaatacaaaaattagccgggcatggtggcatgcacctgtagtcccagctacatgggaggctgaggtgggaggatggcttgagcccaggagatgaagattgcagtgagtcgaaatcatgccactgcattccagcctgggtgacagagccagaccctgtatcaaaaaaaaaaaaaaaagacagagagaaaaggatgagaattattacagacctcttttcagaagttaagcaagacaaaagaccacagaatgacatctttaaaattttaaaagataaattttaaaactgtcaacctagaattcttcatccagagaaaatatccttcaaaaaatgaaggtgacacattacccacaaaaattaacttaaaatgaatcaatgacttaaatataagagctaaagcctcaaaatccttagaaaagaacacagaggtaaatcgccaatctccatgaacttggatttggcagtgga

SEQ ID NO: 245 - DNA, 8030 bp, Homo Sapiens
agtccttggccgtctcgcggccgctgacgaactggaactcgttgggcgtgagccactcgccgcggtggcggatggacgggcccttgctgccctggcagagtttgcgcacgtagagcagcgcgcggttggcgccgcactccacctcgatgcacggctcgccgttgtccagcagcggctggaaatccggggccgcggccgcggtggccgagaagcgctcgagggccagcgggtccctgggcaggtggaggtgcggggcggcctcgtgcaggctgaggagtgagttcgcccgagccacggagttcctgttcagtcttttgcagaagacgctgagacagaaaggtcaagtaactctcctgaagtcacacagctgtttcaaatgcaggatgtctcacaccaggaccgcgccaggaccatggtgtggggcaagagcttcctgtcaccccacacctcccagcaggaaggtggtgtggatccgaggcagggtgagggtgggggatagcgggttggcagagtgcacggcctcccactaggaggagcaaggctagtgaagcaggaccggccacaccacgtccaccttggtgccttctgacaggtcagtctgggccccagtccctggttcctggtgagcttcccatcaccccccacctccctgcgtgcccagatcggcattgcatctggagcgttccgaagagaaacacaacctgggggcgttggtaacagcagccaacccgcggagtgaggtctgggccaggagtgctctgctcaggcaaggaacatgcccagaagcctcccccgctatcctggccctgttctgtgggggctcgttggacaccagcacatccctgaccccagctgtggctgccagtgagttcctgtgccttcctctcctgaagtctgtgtcttctcccaggtctgataccatgtggaaagtctgctcctggggccagctggaggccatgtggactggccctgagtgcccactgtctggatgcagccctgaccctactgcccgtgtgtgggctactaggttcacctgcacctgaccctccttctaggttcgcctgcacctgactccctgatgttcacacagtgatttggagagggaggctggggaggcgcaggtctgcatggcagtgcctctcagggtctgaggcccttgggccaggcctctcctctgacctgggccagcagaggggcctcctttcccttccaagagccctcccctgttcaccagcatctcatcatgctcaggcccacagtgtggttaaggaggggcatggggctggccctgggtttctggctgggtgtgggggcctacccggggcccatggtgtcttccagaaaagaccctgactgggtccaaagctggaggcacccctctatcctcactgtccactccctgatgttctggaggtccctccaggggctgggtgaggaggccttccccaccacctccttgtcttcctgggaagcaggcacccgttcagaggccacgttcccacaggaccaggctcctcacccccagcatcacccttttccacggggttgtgccccttccttggtcctgtccactcacacacacccgtgtccgtgtccatgttcacacctgttctgtgtccactcccacacacctgtgtccactcccacacctgtgtctcgtgtccactcgctcacacctgtactgtccgtgcccactcacacgtgtcccgtgtccactcgctcacacccgtgtctcatgcccgctggcttacaccagtcccgtgttcactggcgcacctgtgtcccatgtcttgtgtctgctcgcacatctgtgtgatgtgttcacttgctcacacgtgtcctccactaccacacctgtgtcccatgtccactcacacacctgtcttggtctgggacacctgggccccactctcccctgcactcctcaggctggcggcagaggccagaggaacggagttctggcgctggaatcatcctgagcgaggcagggacctggcggtgtggactccaccgcccctcctccggcccaccgagccccgcctgcctgggccttggtgcctctgtcgctgctccgggtccccctgctggggcccctccgccgctgggctgaggctggagcctgcctcccgccgccagagggaggaggtcataaataaccctggggctgccatggagcagacggtgaccccagacgtcctgggggagtgtgggggcgccaggggccgctgccccagcccgcatgccgcctccgccatccgggagtgcctgcccaggctccccagcatttctcttagagcccttctcatccatcccctcatcaatcaatcaaccatttattgagcccagatgtggtacagccccagccggagatgacccagaggtggggtggggaggagagagatggggaagctgagtccggggccacaggtgcagccaggaggtgcaggtgagcagcgctcagaccagcctgtcagcctcagtcctgagcttacttctggtgatggagggagatatacagaaaagatcctgcagcctgcaggtgtggcacagctgatcttgggccaaggatgcacagctgtgtgtgtgcctggccaccggcaagggcacgtgggctcagaagcacaggtgtgcccacaccctgcgtgcctgtgtgtggcgcagcagctcccgacgcgcgcaggacacacacacagcacagacagaccctcccatggccacacggacaaagatggcttcactatagacaccggtgcagacaggatgtgcactgctttccaaggcctgtgcgcaacacagactcagggcctgtgggcatcagcaccgcccagacccaggcacacgtgatcctcagccaaggtggcctgtccagtcctggtgctgttggatggaaaggctaacctgggaggtcaggggctgtggtatatcagctgggctccctcggacgctcctgcagaagtggccaggacctcaggaacgcacctgctcctggtcagacaggaggggctgccgtgatgcaacttgcccgtgcctttgggtgctgtgagctggctgcgtgccacgtcgtttcgaggacgcaagaaggtgtttccaagtccagtctgtccaccgacctgaacctttaccattgaaagaacaaaggggtggggcccgagggacccttccctgccgtcccgtggtgtgtagtcagggatgctcctgcagacacacaggtgggctctgactgccagatcgcaggggcggtgccgtggtcctcacctgccatgtcactagcgtgctgacgcagacaccggcgagagctacagtgctcggcccggcacatcccagacaattcctctgtaaatgctgcagcagccagaggccccagcaccttgaggttaagcaaagagaaggaatagagttctccagagccccaaggagcgggagggtctgtcccaatggatgggctcagccaatttcaccctctcctccccctgccaacactgcggcctgcagcctggacctggcccgggttgtggaggggaccggggatgcagctgccacctgctgggcggacgtgggcctaggtggtcctcagccctcatgacaggagcccccgaagcactgttgcggcaccctctctgacattgggtgggagactctgggagccgagtgcagagccagggcccagcacgaaggccttgggctccagtccgtgtgccccacatccctacatgagtgagggtggagggatggtgcctctgccacggccacggtgccgccgtccacgtcagctcactctcagcacaggtgctgtgtgacggcctcgggccacaccgcttgttctgaggcccctagcaggtcgggcttgtgctggctgcacattggctggtgagcttggcgggtctgtgggcacggagagaccagaacgtgcgtaacaggcccgatgagggtgccaggctgtggcgacccccgagcttcagaggagaggggcaccagccgggggccctgcacaggcagcctcagagagaggaaagctcacgatctgggagaactccaggcctggcccagtgaagacgtccttatcttcagcagacattgcccagtgcaaggggaggtcagtctcaggagacagtctcctggacagtggcgtggcatctgtcctaaggccttgcctgcagcacagggtgccacagaggtcccctgtgacagagcctcatggctggggcaggcgggggtcgcacctgctcctgcatgaagaggcagataaagacccacagcatggtctctggggtcccacatcccaggtagagaatgacccaggtcgctggcgtctgtgccatctctgctccactgaccactcatgggggtcctggagatcctgacaccggtggccggggagcagcagcccaggcacaggccccagtgcacatgcagatcccaccgtgtctgcacaaggccttgccccaacgaggcctgggtgccgtgtgagggccgggacgctaacacagcggagggtacccacgcgtgagctgctctggggtccctccccgtgtttcttcctgtaatgaaacttgtacccaaatgggatatgcagggttgcactgtgcagtcgctgtgtgttttagggtctcatacccgtgtgcgccagcaggaccacagctgtgaccggctgctccagaagaagtgggtgggttgagaccccaccggcagggtcactgggggtagcaggccctctgtcagcactgacttctgtatcatgtcagggatttttagggcggcaagctcaggtggacaggcagttttattctgtttcccatgtcaagtccagccccagactgactttctgaggtcacagacggagcctcaccccatccaaggcggtgtcctggactcccactgtgctccccagagggcagggtgagtgcgtggcatccttttggcgggcgtgggtgcctctgtggacctggcgtgaggcttctctgtttctgagtctcctatggaccatctgtcttctgtgtggctgctgaggaatcacactggggtggccgtgccggtggctgaatgagaacaggacccccatgctgcacagccctgcttaacgcgggggtggccccagaagcgggtgggcgaggctgggcagcagggattggctgaaatcatatgcagagcccaagaggcaggggaaaggcggcaatttcagggtccctttgttcgccaggtacctggggcccagcccgggcggcaggagggactcagcccctcgcccaggcaggaagggtcccaagcagaggcccctccctcaggcactccccagcccacacctgcagcactgggaccaagactaataaaacaccagcctcacggaagacagctttatcttgttgatcggaagtctgccagcccaatttatgatggaacataagatctctaaatctgaatttacgctctgtagcgtaacgagaggtcaataagattaaacgggggctcaggagaggaccagcgtcaggctcactgcgaggtgctgcacagaaaacccacagccagagcccctgggcccagcccaggcaagaccagaaaaggagggggcaggtgggagaccagcctggggctcccgggaagcccacgggatggaggcgggagagccaggaggcctggggcaaccctgggacggttcctggatcgaggagagcaggggggtgatgagggttccctcagggctggggagccttctcctggtctcagacccaccccccttcagctcccaagccctgggtgcccctggctctgaggacagttgggaatcttccctgaggcaggttcaaggacagagctctgaccctggcccagggctgctttgggtgcctatgaactcggcttctggctcagagcagttccctgcaccccttcctgagccctctgtcctctggaacccgtgggcagggtgagggacgggtgttccttctgggtgggggcctgggcgcccagccagcacgacgctggcttgctgagcttagggcagaccccgacttcagaatttatacaaataaatgcaatgaaaagtgctggcaacctgatctgattacagagtcattcattctctggtcgttaataatttgtgcaataaaggactgcagccgctcagtgcgggggaggctgtggcccaaccttccctcggcgccggccccgggagctggaagcataaattattagtttcttatcgctgggcctgccatcgctcatgctgccagggcctggcgggagctggtggctgttctgctgcccgccctggccggctcagggccggctctcagccgtcgcctggggccctttgtcacccccaccctggccccccaggtgtgggagccccagagcctgctcaggcctggaggctgctgctggagccggcaactctggaagccagaaaggtggggctttagtgcctgtcctcagaccctcaggtaaccaaagccaaattactccctgttggaaacacaacctcacataccgggccacagcacggacacccacgacagcaggccacagcacggacacccacggcagtggcccacagcacggacactcacagcatggacagcagcccagagggacccttgcccagaccctgaccagggggaagagacagttgtgtctgggtttgtcagtcctctggttgtggcagggcccctctgggtgggactcggcacctgtacctgggagcacctgctcagatgagggagtgggagcaggaacagcgctcatgctctctccctgtgtccagggctggggccctggtctggcgggtaggcatagggcacctcctgccctctcatgccctcatacacctgctgctggggttccctgtcccaccccaaaagggagaagccaaggctgaggcaaggttggaaaatcagggtggggactctggaatccagacatcccgacagaggatgcaggaggaatcggcgtgagcgcagggtaaactcacggacccgaactctcagatgtgcttcctgggctcagcttcccctttctggagggctgggggttccagaaccttgccttgaatttgtgaggatggtgggacctggagggcaggtggcgcagatggtgtgagccctcaccccaggacgctgtgcccacttctggctgtgcagccttgggaaggcttctgacttctctgaacctcaatctgtaaaatgggaatgagaatgaaacaagatgaaattaacatgcattgagcgtgtggggtggggcagagacagccaccttgcagctggtgaggcccttacagcatctggtcctgccacctcgcagctggtgaggccctcacagcatctggtcccggagcccacacagccctttgcagagactgccctacccacgtgcaagcgtttcgccctcttcccacgggcgaccccagcttggccgcatgcgtttttgctcagaacgtccccacctatgtcccacctgccctctggcttcgggagtgctgggcgcagtggtggcaggtgcctcggtgcccttggacttgcccggtcgtctgttgcttctgaggcggccccgttgatgggtgctccttctcttctgggtgcattttccttttcctgcttcctcgcatgcctggtgatttttgaatgggtgacagggattgtgaattttgctgggtgctgactatttttgtagcaaagctgagaaaagcttactttgctcaggactccaggaagttacttggaagctgtttggtcctttggggtcttgcttttaagccctgctgggaggaccaaggcagcttgtagtctggggctgactgtgccctcctttaccagggcacggccctgcttggtgctctgcccaggggctgaggtgccccagcctggctggtggaccacggaccttccacggttccctctggtgatctcgggtggttctcctcaccttctgtagttgcctttctttttttctttttctttcttcttttttttttttttttgagacggagttttactcttgttgcccaggctggggtgcagtggtgcgatcttggctctcca

SEQ ID NO: 246 - DNA, 1723 bp, Homo Sapiens
cttcccaagtgagaagcagcagggtggtgcaagatttcatcatgcttctcagaatgacatgcaatttaagtcatataaattgtttatttctggaattttttatttaatatttttgtacagcagttgactgaggttgaaggaaaattaccctggatggaagatcagaggtatagaaagaaatggagagcaaagaaagagtttgatgattccctccttggagatcttcacctgcagttcctggaatgagtgatgctgcttccacatggtcaatttcaccccttcatatctcttctgcatctatgacacacctttatcttcttgttgctgaggctgcctcacccttagcagaagcttttggtggcacttatggccagctaatcaacttgactatcaggcagcaccattccgcagagttgtatgtgatctatggaaaatcgacccctctgccctgctttcaatgaacttgtaacttactactgacaagaggcttcttattcttctataggcagctctaggtacacttacctttgcttttttgttcagccatgggtcaagtaacttgctctcatgtctctgaaattccagagaatgcatattagcctcccaaatggttcttttgaggcccccttcaattgatttgagatgaaaggggagtttcctttccctcccatgtaagagagagataatttataatgctctgacaatagtctccaaaaaaaaatcctcattagcagcctcttcaccctttcagtggatatttagctatctcttagtctggaggcgaatgatagtcttcaaatatccactggaatgtaagcagcaataaagcagacattttttatgtgttttgattatttctgtgtcatttggttttagagaaaagcctgacacatagtaggctgtcaatagatatatgttcaacatatgaatgaatgaatgaaaaagcaatcaggcactttgatttagaatgtgtgtatacacacacacacatcatatatatatttatatataaaacaacagatgtcatacatatacatatatacacacatcatatatatatttatatataaaacaacagatgtcatacatatacatatatacacgcatgtatgtatatatgtatgcgtaatgatatacatgcatgtatatacatatatacatacatatatgtgtacatgcacacatatatgtgtatatatatatatggcacttctattgttttcagattttgggatgtctgctgaaacaaaaaaatagaaaccccaaaacaaaaaatccaagaaatatcaaatttaatattctatcatacttatttaattttaaaattatctttacaaagataacaaaatccaaagtttgtgaataatctttcaatggtgatatccaaaaatacatgtgtttttcagggaccaaaggctataaatccaaagccagaaatttagctaatcttaggcagtccagaataaataagaaatttagtttattttagtaatttgaatcatccattttaagattataaatcctagttaaaagcttgagaatctatgaagaatgtgcaaaagtagaatttactagactctggctcacagaataaggtacattttagggtcagcatctggaaatacccctttctcatatttctctgttacgtgtctatgcctttaaaacagaagttttaaaacttgttgtatggatcatgttggaaataaagactatgaatcaa

SEQ ID NO: 247 - DNA, 1332 bp, Homo Sapiens
gagaaataataaagaccagagtagaaataaatgaaattgaaattaaaaaatacaaaggattcatgaaacaaaaagttggtttttttgaaaagttaaacaaaattgacaagcctttagtcagactaagaaaaaagagagaagattcaaataaataaaattggaaatgaaaaagaagacattagaactgacactgcagagaatgaaaggatcatcagtggctaataggaggaactatataccaataaattggaaactctagaagaaatggacaaattcctagatacatacaaccaaccaaattgaatcagaagaaatccaaaacctgaacagaccaataagtaatgaaatcaacatttttactactgaattctaccaaacatttaaagaactaataccaatcctactcaaactattccaaaaaatagtggaggagggaatacatccaaactcattctatgaggccagtattatcctgataccaaaccagagaaagacatatcagaaaaacaaaactactggctcacatatctgatgaatatttataaaaaaaaacttcaagaaaatgctagcaaactgaattcaacaacacattaaaatatcattgatcatgactgatatggtttggctgtgtctccaccgaaatcttatcttgaattgtagttcccataatcaccacgtgttgtgggaggtacccagtgggaggtaactgaatcatgggggcagttacctccatgctgttctcatgatagtgagttatcctgaggtctgatggttttataaggggctttttccccgcttcagtctgcacttttccttgttgccatcacacaaagaaggagaagaagaacctgtttgcttccccttctgccatgattgtaagtttcctgaggctgatcagccctgcagaactgtgagtcaattaaatctctttcctttgtaaattacccagtctcaggtatgtctttattagcagcatgagaacagactaacatagtaaattggtgccaggtagtgaggcattgctgtaaagatacccaaaaatgtggaagcgactttggaattgggtaacaggcagagtttagaacagtttggagggctcagaagaaggcaggaaaatgtggtaaagtttggaacttcctagagacttggagggctcagaaggcaggaagatgtgggaaagtttggaacttcctagagacttgttaaatggctttgatcaaaatgctgatagggatatggacaataaagtccaggctgaagtagtctcagatggagatgagaaacttgtgggaactggagtaaaagtcactcttgctatacaaagagactggc

SEQ ID NO: 248 - DNA, 1458 bp, Homo Sapiens
ccctgttaactgggcatggaaggaaggccaagtctgccattaagtctctttttgagcctgtatatatttgcataaggtccattaactatattaagtggtcatagataaaccagatacttataggcaactctaataaactacatgcagctttgtagattatttgcaataaaattttaattttaacaatcctttaattgttaaattaaagcctgcctaagctctcttgtagtattttgcatatgtctggggtggatctctttattggcttttggcatatgcgtttggtttaaagcagtccaagcaaaacataagtagaaaggtaggcttactgattatatatggtatatatatttacacacacacacacacagagtaaacagccataagaactatgtccagctctttctaatatagctaagtaactgtaacagtcagttagtccacctgaggaccccagctttattttttaagtaaaaataaaaatcttacttgttatcaaaacaatatgttccttatagtaaaacagaagcaaaatttttaaataggaaatttggaacacaataatcataactccaccatccagggataaccactgttaatatctaaggttgtattcttccagatcattgtatatatactgtagagtttggagtcatactattcattttaatttaaaataaacttaaaaaaaacttagcaatgtattgtgactatctttctttctttcttttctttttctttttttcttttttttttttttggagacaggatcttattctgtcacccaggctggagtgtagtggcacaatcatagctcactgcagcctcaacctcctgggctcaggtgttcctcccacctcagcgtgtcaggcagctgggattacaggtgtgcgccaccatacccagctaagttttgtttttgtttttgtttttttgttttttgttttttttgagagatggcatttcaccatgttgccaaggggggtctcacactcctgggctcaagtaatctgcctgtctcagcctcccaaagtgctgggattacatgagtgagccactgcacccagtccctatctttccttccttcctccctccctctctccctccctctctctctctctctttctttctttcgacagagtctcactctgtcacttaggctggagtgcagtggcccgatttctgctcactggaacctccacctcccgggttcaagtgattctcctgcctcagccccctgagtagctgagatcacaggcatacaccaccatgcccagctaatttttgtatttttagtggagatggggtttcaccatgttggccaggctggtctcaaactcctggcctcaagtgatccacctgccttggcatcccaaagtgctgggattataggcgtgagccaacgtgcccagctgggcccctatcttttaataataataaatattcttcaagactttc

SEQ ID NO: 249 - DNA, 1941 bp, Homo Sapiens
tcttacctacggatgacactcctgtgcaagaagatggagaggcagaatttcaaatggtggcagtgaaacctaaagccaccgggggctttggatgtgagcctatcagaggctcaaaatggaaatgtgtcagaagaaacagtggggcatggaaaagttaaaaaaatccctaaaacatgttatgattgtgggcttgtcagaagccccaaatggagacatgtctaaagaaatagtagaaaatgtaaaagttaaagaaaactagaaatctatcatactaaccagtgcagaagcagcaattcagtctctagattcgaaatcaaaaaagaaaagaagaacaagagaaaaatagtgactaatgctgggcgtgatacaaaaaaagcaaaaactgaaaacaaaggggaatccgaagaagatggtatcgaggctcctgaagaaacagaaaactggggggaagccagacaatgagagagatgagaatacttcatttcttctctaattttgtcagtgaaaacactttgaaggcaataaaagaaatgggctttaccaacatgactgaaatttagcataaaaatgatgggccacttatggaaggcaggatcttccagcagctacacaaaccagcagtggcaaaaaccctggcatttctcatccctgcatttgaactaattgttaagttaaaattcatgtccagaaatggaacaggagtctttattctctcactaattaaacagcttgtcctgagactcttggtgttcttaaggagctaatgactcaccatatgcacatgcatgggttgataatgggtggcagtaacagatctgctgaagtacagaagcttgcaaatgggatcagcactggtggtcacaccaggccatctcctgggctgtatgcagaattctgcaggatttaagtataaaaacctatggcgtctggttatggatgaggctaatgatatcttggatgctgggtttgaagagaaattaaagcaaattattaaacttctttgaacatggagactatgcccttttccgccacacaaactcaaaaacttgaagacctggcaaggatttctccaaaaaaaaaaaaaaaggaacaaatgtatgctggtgttgataatgataaagctactgcaacagtggatagtctcaagcggggatatgttgttcgtccctctgaaaaaggattccttttgctctttatattccttaagaactgaaagaagaaactgatggtcttcttttcatcctgtaggtccataaaataccactatgagttgcggaactacattgacttgcctacctcagccattcatttccagaagcaaaattacgtgtagaattacattttttccagttctgtaatgcagattcagggatattgtgtacagatgaggcagggagagagctagatattcctggctggattgttcagtattatcctccagatgaccctaaggaatatgttcatcgtcgggggacaatagccagggacctaaacgaaagagggcatgccttgctcagtttttgcccagaagaattgggttttgtttgttacctgaagcaacccaaggttccattaagtgaatttgacttttcctggcctaaaatttctgacattcagtcttggtttgtaaaattaatgaaaaagaactactttcttcataagtcagcccaggaagcatataagtcatacatacgagtaaatgattctcattctctgagacagatttttaatgttaataacttaaatttgcctcaagttgctctgtcattcggtttcaaggtgcctccttctgttgatgtgaatgtgaacagcaatgaaggcaagcataaaaagagaggaggcgagagtagattcagctaccagaaaaccaagaaagttaagtccataatctttaaaaacattagcacgaaatcatctgatagcaggcagttctgtcactga

SEQ ID NO: 250 - DNA, 2811 bp, Homo Sapiens
ccgatgccacaccaaatggctagagggtgtgtttgggatgacctgagtctggtaggcaacttccagtggaccccacggtgcgaccacctccctttgagtgtgggggagatgtagcgactggcttctagcagtaggatagggcagaagtgacagtaggttagtcttgtggttaggttacaaaactgacctctgtgatggtagcgtccctcgtcagccctcttgtcttgccctctcgctggctggtggtgatggagccggctgccatggtgagcggccctgtggagaagccagggaggaatggagacaatctggagaaacagaatcacaccaacaaccacgtgcgtgagcttgctgtgtgctcttgcttgggagcaagttacaggttcagcccaagaggagcggaccactccagggtgtaaataccaggagggggaattggaagactaccctaagcatgccgaccggagactgtgtgtgtgtagtaggtatttcttactgggagatcacggaaaagcaagtttgagaaacactcccatcagatgggtgggccgaggataacctcaaagcctttggttctccgaataggtgcgtaggactcacccaggcactctttccttttttaaattgtggtaaaaactacataacagtggccaggcgtgatggtgcacgcctgtaatcccagctattagggaggctgaggcagaagaactgcttgaaccaagggggcaccgctcctggctgtaacatgttttcaatatcccccctcttcggtggcacaggggctggccccatatacatgtgcgatggcaactgacagggtccctgataaaccggagtgctccagaaacaccccattgcgtgggacggaggatgttaggtggccctcctagcgtttgagtttgataaatgagcaaaggaagtggtttttactagaaagccagctttccttttttttttttttttttttccagccagcaaaccccaaacaggaacctatggttggtgatggatgtgcgttcagaaagcagggagggagggggagtcagaggtgagggggtcatcagccatagctgtccgctgcatcaccccctcgctatctccaggaagcgttctgggcttttcctgttgtgcagtgtggaagtgctctatcttcattcatatcaaggaaagtcaaaggacaaactaaagccggcagcgtctttctggcttcctagtcaggctgttcggtagcggagtgtcaccctgatttccagccccgcagcacacacagtgagagcctgcctggcgtgattcagaggcaacgtatttcccaaggtggctgtgaaggaaccagggggataaacacagcccgtgaaccgcacgccagaggacaggtccggctgcctgccgcggagtcgtcacggcgtgtcgcgtctgagcgcttctccaaagcacccaagtggcacccggggtgacagttacatcatcttgagtacagttctctcaaggaaaaagcaagcccagcatcttctgccatggcaaccctggcttggagcctccataagagagaaggccctaagaataataccattttcttgctctaagttgctcttacgggaaagaagtgataatattcttcctaaacgccatcattcgtgcatccttcccacctatatgtgtcaccggatcattctccgcctgggcggggccgtcctgtgcactgcagaatgctgagcagtgtccttggcttcgaccgaccacatgccaggagcaccccaatttctgccatcgggtgattgacttcactgttgcatttgattttttatgtatcttttaaaaggacccaatagggccaggcacagtggctcacacttgtaatcccagcactttgggaggctgaggtcggtggattgcttgagcccaggaggagttcaagaccagcctgggcaacatagtgaaaccccaactctacaaaaaacaaatgttttatttttatttattttagatggagtttcactcttgttgcccaggctggagtgcagtggcgcaatctcggctcactgcaacttctgcctcccgggttcaagcgattctcctgcctcagcctcctgagtatctgggattacaggcatgcgccaccacacccagctaattttgtatttttagtagagatggcgtttctccatgttggtcaggctggtctcaaactcccgacctcaggtgatctgcctgcctcggcctcccagagtgttgggattacaggcgtgagccaccacgcccagccgggtttatagttttataacccttatgacaaatctcatagtattctgcagggataagcatgaaaccactcgttcaataagtgcaaacaaaaacgccaacaattcttaagacatttctaatcttattttaccaataattttaaagccagcttatgtattaaagatttataactacttttattaacacgtttaaaattctatgcagcttaaagcatttataatggataaaactgccaatactgagtgcctgacataatatttgaaaggtggcaggcattcaaccatggtcactgaatgagagatgtagggaagatgatggcagggaggtttttagatatcaacaccctgatagttctcattttaaccacctgtaagtgcacatacaagtcaacgccactgtgcctggctgatttttattcttttagttaaggctggttgatattaccttgtgtgtatataccacatgttgtttatccattgttgttgatggacatgtgggtggtttcaccttttggctattgtgaataaagctgctatgaacactgtgtac

SEQ ID NO: 251 - DNA, 3875 bp, Homo Sapiens
caagacctaagtcctaaacacaaggagatctgatgctataaattttcatccaagctcaggagaagacctgtgtctcagctcaaccagtgcttttacagctagggattaagtaacctacttcactttaaacccgaattcagtaagtggggaacccattatttgtacctaagtggtttaatttcagagcactcgtagaaattatactctataatttcttcttatttgcctagtgatccacccaaattctacagaaaactgagtcccccttgatatctccttctcccttgctttttcctcccacctgttaaaacatcctcttgagtctaatccaaaatatattttgagtcatctccttctccctgcaactctagcaattatctctttagcctcttatctatttttcttgattccactgttacttttctctaatccgttccttatacagaaagcattctcttgtttaaattgtttgatagttccacattgtcattggtgtaagattttttttttcttaatttctactaggcttaaaagtcatatatctggcccctgcctacctctagatttatctagttccattcatctcttcactcagtacactccaagtatactagctttattgcaattctgcacatattccattacacctgaagccataactatattttcattcctcctgaagctataactatactttctggtttatctgagtaactagccttgtatataaggccttagtcctcaggacttttctttgggagaatagctggccctgaattatgattattataaatgcacagacaatttcatggaagcagaaaagaataagcctcagaagcttcctttgtcaagaaatgaaagtacttgcaattagcattcaaatagatgataaatgtagagtatctgtagggtatacaatgattctaaatttaattgacaattagctgtgattgtgtgaccctataaataaaattgtaataaattgtattgcataaattaaatttattaaacactatttttgctgtatcctaatatttattagtctatttaatcactctctgaaattagaaaaaaaagacagtctccatataacttctcaatttgataaatgctcacttaaaaataggtacatgagggaaacagagattggatgtattataattcaataggcctatactttttaaacgtaattacttatattggtaatatgtggaatatgtgcaaagtttaaatggttattaagattttaatattaagggagaagagtaggagatgttattagaatacataacacattagatattagaatacataacacattaagaatactagtcatatccttaatagatggaatatatctgtcagacatagaagagaatcaccagcactgtaaacaataataagctaatttcaaaataacaagaattaatttgtcagtttttcagaagtggtcaacagatttctctcatagaaattcgtctgttacaatatgttagaaactgtgaagaatagaagctgtgaagaatagaagcacctgaaaagctgtgttattcacatttgctgttgtagcctcaatgtttgtgtccccccaaattcatagattgacacctaatggccaatgtgatgattcggaggtgggccattgggaagtgattaggtcataggtggggcccacatgaatgagattagtacctttatgaaagaggccccagagggctgctttgcccttttccactatatataggcatagcaagaaggcactacttatgaaccggaaaatagacatcaccagagaccaaatctgctggtccttgatcttgaccttctcagtctgtaaaaccatgagaaataaatttttgttgttgataagccacccggtctaaggtatttattgtgttacagcagccttagcagaataagacaatatcttatgacaatatagtacaaggattaatgattatgctttaaaaagtagttttaggccgggtgcagtggctcacgcctgtaataccagcactttgggaggcggagacgagtggatcatgaggtcaggagatccagaccatcctggctaacacaatgaaaccccatctctactaaaaatacaaaaaattagccgggcgtggtgacgggcttctgtagtcccggctactccggaggctgaggcaggagaatggcatgaatccgggaggtggagcttgcagtgagccgagatcacgccactgcactccagcctgggcaacagagggagactccatctcaaaaaaaaaaaaacatgtagttttaaagatattttaataaaaataaacacgatttcctgagaaaaaggttaaaatgcgaagtttttatttctaaaaaaatactctgaataataaatcatagaagaaatgttacatagaacaggcttaaagttcagaatggaaactagtgggtacatgaaagatagtaaataagagagccaataaagtagtaattctccatcaccccacttggtacccaggatatataactgaaggacagaaaaaatataattttaaaatgacaggtttatcagacattcatgtgggattactgaatttaaaatgtgtaggcaaatcaaaactttaaaataggctaataaataattcaataagccaaaatgatttctaacaatgaattaaagttggaattggatatcatctataaaataataataaagacaatctttcttaaaagtatgttttaaaaataaaagtgcaaagaggtaaaattctttggtattttctattagaagtataggaaagacatagcaaagaaacaaaataaaagcagaatccctattattaccaaaaaatgcaacccttgtgaaaatgaaatgaacacactaataataaaagatataaaaatgtttatgatttagaagaaaaaggtgaagggagtttcattaagatcaagaaatgttgggtgttattttgtatttgtttctaataacagggcatatatttacctgttctctcactaatttatttaatatatatttattgagcactatccattgtcaatattgcttgatgataaggtcacagagatggaacacaaaatttgcacggtcaaggactcatagcccagtaagtaatagtgaaaggtgaagccgactgggcatctgggtcagctggggacttggagaacttttctgtctagctaaaggattgtaaacacaccaatcagcactctgtaaaaacgcaccaatcagcactctgtgtgtagctaaaggtttgcaaatgtaccaatcagcactctgtaaaaatgaaccaatcagcactctgtaaaatggaccaatcagcgctctgtaaaatggaccaatcagcaggatgtgggcggggccaaataagggaataaaagctggtcacctgagccagcagcagcaaccttctcagatccttttctacactgtggaagctttgttcttttgctcttcacaataaatcatgctgccgctcactctttgggtccacactaccttaatgagttgtaacacacactgcaaagatctgcggcttcacttctgaagtcagtgagaacaggaacccaccgggaggaacaaacaactccagacatgcgaactttaagagctgtaacactcactgcaaaggtctgcagcttcactcctgaagtcaagcaagaccagaaacccaccagaaggaagaaactagagacacatctgaaggaacaaactccagacacaccatctttaagaactgtaacactcaccgtgaaggtccgcggcttcattattgaagtcagccagaccaagaacccacaggaaggaatcaattccggacacaatagagttcaggatggagaaaaatacacaatttaaaaaatattatgagagg

SEQ ID NO: 252 - DNA, 20130 bp, Homo Sapiens
agtgctgtcgggaaggccactggagtcatacgcaagtaggtctgatgctgattctcctgcccccctcacagggcagtgatgtggaaccaagtgagacagtgcacagaaaagcattttattggctgaacagccctgtgataactacgagagggtcctccaggcctgggcctccagccacctcctgtcagagctaatcaagccagcaccaactcagcaactccctggacagaccctccaggagcaactgaaagcctctcagtagagaactgcccttgctaccctcagactaataaaggaggaaagaccctaagtgccttatccacacctccaacaagctgcagttaatccaaggagaggccagtctgtctcccacgggtcccacaccatcctccctccatggctagtcaccagacagggaatctctggcttgggctcacagcacagaccctccatcttgggctgactgtactgagtgattgctaacctgcatcttcctggggtggagcccccaggagtcaataaaatgacccttggccacaccaccactaagatctcttcctctatggcctctaagctgaggaaggaatataaacactgagattgccccagagctgcagtgagcagcccagaagtgccaagtcacgaactacagccagaactaaagggtggagaggtatccacactttcagagcactaagaggtaaaacagctccaactgtgaggaaacatagggaaaccacccaaccaagcaagagtctaccaactgaccaataggcctaagtgtcaccttctggatcacactccaaagcttcaacaccaaaaatatctcactaacataaccccttctgaaaccagagacaagaagtcagcttcaaataaagaccctcacaaagccttggcctagtgaaaacatccagaaaagaagtctatttgactgtattcatctacactacagttaaaggaacacccacatgcagagatgagaaagaatcaatgcaagaactctagtaactcaaatggccagagcgtcctacatcctccaaataacagcaccagttctccaacaagagctcttaaccaagcaagctcgaacttgctggaatgacagaaatagaattcagaatatggataggaatgaagatcatcaagattcaggaggatggcaaaacccaatccaaggaaaataagaatcacattaaagtgatacagaagttgaaggataaaacagccagtataagaaaagaacctaatgagtctgaaagagctaaataacacaatacaagacattcacaattcaatcacaagtattaacagcagaataaaccaagctaagggaagaatctcagaacttgaagactggctttctgaaacaagacagtcaaaaataaggaaaaaaaaaaaactaaaaaggaatgaacaaaacctccaaaaaagtatgagattatataaagaggcaaaatccacaaatcaatggcatccctgaaagggaggaggagaaagcaaacaacttggaaaacatatttcaggatatcatccatgaaaatttccccaaccttgctaaagaggccaacagtcaaattcaggaaatacagagaactcctgcaagattctacacaagaagatcattcccaagacacataattgttagattttcaaaggtcaaaatgaaagactgttaaaggcagctagagagaaagggcaggttacctacaaagggatccccatcaggctaacagtggacctctcagctgaaaccctacaagccagagagattgagggcctatatttaacattcttaaagaaaaaaatcttcaaccaagaacttcatatgcagccaaactaaactccctaagtgatggagaaataagatccttttcagataagaaaatgttgaaggacttcattaccaccagatctgtcttacaagagatcttgagagaagcactaaatataaaaaggaaagatcactaccagctaatccaaaaatacatgtaaacacacagaccagtgtcactgtaaagcagccacacagtaagccaacataataaccagctaacagcacaatgacaggatcaaatccacacatattaatatgaacctggaaagtaaacaagctaaatgccccacttaacaggcatagagtgagaaactggataaaaaagaaacatctatggtatgtatgctgtcttcaagagacccatctcacatgtaatgacaaaataaagggatggagaaaaatctaccgagcaaatgaaaaacagaaaaaagcaggggttgcaatcttactttcagacaaaactcatttcagatcacaaagatcaaaaaagacaaggaagggcattacataatgataaaggtttcaattcgacaagaaggcctaactatcctaaatatatatgcacccaacacaggagcacccagttttataaagcaagctcttagagacctacaaagagacataggctcccacacagtaatagtgggagacttcagcagtccactgacagcattagatggaacatccaggcagaaaattaacaaagacattcaggatggtaactcagcattggaccaaacggatccaatagacctttacagaaggttctacccaaaacaacagaatatacatttatctcatcaccacatgacacatactttaaagtcaaccacataattggacataaaacaatcctcaacaaatagaaccaaaatcataccaaacacattctcagaccacagtgcaataaaaatacaagtcaacacactgaaaattgctcaaaatcatacaattacatggaaattaaacaacgtgctactgaatgacttctgggtaaataatgaagttaaggcagaaatcaataagctcttttaaaataatgagaacaaagatacaacatatcagaatctctgggacacagctaaggcagggttaagagagaaatttatagcactaaatgcccacatcaaaaagctaaaaaaaaaatctcaaattaacaacttaacaactgaaagaatcaaagaagcgagaacaaattaaccccaaagctagcagaagatgagaaataacaaaaatcagagttgaactggaggaaatcaagacagaaaaatattcaaaagatcaacaaatccaggagttgtttttttgaaaaaaaatcaataaaataggccactacctagcctacttaagaagaaaagagagaagattcaaataaacacaattagaagtaatgaagcaaatgttacaactgaccccacagaaatgcaaacaatcatcagaaactactatgaacatttctaaacacacaaactagaaaacctagaagagatggataaattcctgaacacatacaccctcccaagactgagccaggaagaaattgattccctgaacagaccaataatgagctctgaaattgaatcagtaatagcctaccaacaaaaaaaaaagcccaggacctgatagattcacagccgatttctataaggtgtacaaggaagagctggtactattcctacagaaaccattccaaaaaattgaggagaaggaacttctctgcaactatttctatgaggccagcatcatttgataccaaaacccagcagaacacaacaaataaagaaaacttcaggtcagtacccttgatgaacatcagtgcaaaaattctcaataaaacacttgcaaaccaaatccagcagcacatcaaaaagctaattcaccacaatcaagtaggcttaatccccaggatggaaggtgggtttgacacacaaatcaataaatgtgatccatcacataaacagaactaaagacaaaaaccacatgattatctcaatatatgcagaaaaggcttttgataaaatctaacatcccttcatgttaaaaaaactctcaacaaactaggtattgaaggaccaaacctcaaaataataagagccatctatgacaaacccacaaccaacattatacaaaataaacataaggtggaagggttcaccttgaaaactggcgcaagacaaggatgccttctctcaccacttctattcaacgtagtattgggagtcctagtcagagtaatcaggccagagaaagaaataaaggacatccaaataggaagagagaaagtcaaactatctctgtttgcagatgacattattctatatctaaaaagccccatagtctcagcccaaaaagctctttcaactgataaacaacttcagcaaagttgcaggataaaaaaatcaatgtacaaaaattactattattcctatacaactacaacaaccaaacagaaccaaatcagaatggcaatcccattcacaattgccatacacacacacaaaataaaatacctaggaatacacctaaccaggaaaatgaaagatctctacaatgaaacttacaaaacactgttcaaataaatcagagaagacacaagcaaatgtaaaagcatccccttctcatggatagaaagaatcaatagtattaaaatgtctacagtgcccaaagcaatttacagattcaatgctattcctataaaaataccaatgacattcttcatagaactagtaaaaatattttaaaatttatatggaaccaaaaaagagcctgaatagccaaggcaagcctaagcagaggaggaatcacattacctgacttcaaactataccacaaagctacaatgaccaaaacagcacgttactggtacaaaaacagacacacagaccaatggaacagaatagagagcccagaaataaggctgaacatctacaaccatttgatctttaacaaagctgacaaaaacaagcaatggaggaaagaccttattcaataaatggtgctgggataaccagctagccatatgcagaagattgaagatggacgcattccttatgccatatacaaaaatcatctcaagatggattaaagacttaaatgtgaaacccaaaactataaaaaccctgaaagacaacctaggcaatggcatactggactcaggaataggcaaagatttcacgacaaagacaccaaaagaaatcacaacaaaagcaaaaattgacaaatgggatctaattaaatttaagagcttctgcattgcaaaagaaactatcagcagagtaaacagacaacctacagaatgggagaaaaatatttgcaaactatgcatctgacaaaggtctaatatccagcatctttaaaaaacttaatgatatttacaagagaaaaacaaacaaccccattaaaaagtgagcaaaggacatgaacagacacttctcaaaagaagacatacatgcaaacaacaaacatatgaaaaaaagctcaatatcactcatcattagagaaatgcacataaaaaccacaatgaactaccatctcacaccagtcagaacggctattgttaaaaagtcaaaacataacagatgctggtgaggttgtggagaaaagggaacctttacacactgttgatgggagtgtaaattagttcaaccattgtggaaagcagtatggtgattcctcaaagagctaaaagcagaactaccatttaacccagcagtcccattacagggtatataccctgaggaatataaagcattccaccataaagacacatgcatgcaaatgttcattgctgcactgttcacaagagcaaagacatggaatcaacctaaatgctcatcaatgacaaattggataaagaaaatgtggtagatatacaccatggaatattatgcagccataaaaaagaatgagattatgtcctttgagggaacatggatggagctggaagctatcatccttagcaaactaatgcagcaagagaaaaccaaatactgcatgttctcacttataagtaggagctaaatgataagaacttgtgaacacaaagaaggaaacaacaaatactggggtctacttgaggagggagaagagcagaaaagagaactattaggtgctaagcataatataatacctgagtgacataacaacaacaaacaaacccctgtgacatgtgtttatctatgtaactgtgaaccccaaaaacctgagacaggtctcatttaattttaaaaagtttattttgccaaggttgaggccacacacctgtgacacagcctcaggaggtcctgacaccatacgcccaagatggtcagagcacagtttggttttacacattctagggagacatgagacaacaatcaacatattcaagatggacattgattcgatctggaaagatgggacaactcaaaggcaggaaaactcaaatcagggaggaggctaggtcataggtagctaagagacaaatggttgcattcttttgagtttctgattagcctgtccaaaggaggcaataagatatgcatttatctcagtgagcagaggggtgactttgaatagaatggggggcaggttggccctaagcagttcccagcttgacttttccctttagcttagtgatgtgggggcccaaagatctattttcctttcacatagcaaaccttcatatgtacctccaaaccttaaatattttgaaaaaaaatttagaggtctcttccgcaattctgggaccacaaatgccagaaaacttccaaatacttcaccctcacaaaagtatgagctttaagatctggactttgccctactggatatctccattccattctaagaaataggaaggaattgctaaaatatgaggggtttctgacaataaacctcaatataatcagtgaatacttcctgagcacctgccttttgtcatgctctggtcaaggaactgagtgtagagatgaatataaaatgtaatctctgacatcagtgatttcattaggtagcacaggacactaagccagtatctgccactttatcagccttccagctatgtctgctctagcctttaaatcagagtgtgtccagataataaatcaaatgtttacacgtgtggaaggaaagagtaccagtagggattttttttactcttaatcactcatttgagcacacatagtacctggaaagaaaaaagaaatctcttttctgtctttgcatcaccagaaatttgccttgcaggatctggtatagtctagctggccaggggataatggtggtttgggttggaagaggaggaagggtttcctccgtagtttaggtttgcttcagtttcaccagtgattgttctcaaaggtcccgataacagaacctctcaacatctttcccctaaagaaactatgataaccttgtatctttatgacatgaccacttacgcatcccaataaaactgagagaaataatagctttctttaacgcttctctaagagaactcttgtctactctcattgactcccagatatacatctctatcccagatccttctcctgatcaccagacctataatgactggtggacacctctatgtgactgtcatgtggctgcttaaagttcaccatgccatagactgaactcactgtttctaccccaccttgatctttctattctcggtgactagccgcattgttcactggttccatcctcttcctcattctttattcagtactcttcatttcctatgaaataaccccataatgccctactgacttcttgtattcatccacttctttcaatcaccactagcactactttggttcagtccactgctctcttttggattgttgctattctcccaattagtgtctccacttctagtcttacctgctctagtccagtctccaaagtcatttttataatttaaaaatctgagtatgtatcctccatttgaagcactttaataggaccccctttatcttcaaataaagtccttcacataaatcaccacgctttcattatatgacctgttcatctctccagcttcacatagtgacactccccaccttattgtccataatccatactattccaattgtagttctcccagtggaaaaaaaaaattctattgcctctggaatttttcacatgctggccaaaatatttattctttgtcttttttatctgtgctctctcccagttccactttccttttttcctgcttactcttgcaaaaaaaatcctccctgatacctagaggactacatctgtgttggtgtctctgaaatttactcccatagggtgcttgacttacccaatattgtagcccaaacccactgaactgactgtaaatgctttggaaggtgaaccatgacatgtttgttgttaatttcctgatgactaacatacaggatggcacagaatcagacatcaagaaagatgaatcaaaagagaatgacatcagtaagatggcagagtaggaagccctggaccctccttctacctacaaacacaaattcagcaacaatttatggacaaattccctttgtgagaaatcaaaaactaattaaaaagctcctgcactctggaacagcataaaaacagacatagcaaagcctgtggacagattcaggatactgtcttgtcagagacccttgcccccagtgcagggccatacattcaggaagaaaccctgtagcttccagcttcatgcagtcgaggtaaggagctggttgcacattcagcaccccaacatttccaagggagtccccagaggtttgccttctttcttgctagacctggtgctctaatgggtctggtatagtctagctggccaggggataatggaggtggtggcttgggttggtagacaacattgatttccttctcccccaactccagttggcacagagtgagcagatgaaaactttcagccctcagcttcccccagggaggaaaagagctgatctgtgcaaccagagctccaacttctccagggctgctcaaactattggcatctgtttcaccagtcttgaagctctgatgtgtgcagtacagtctaactacccaggagagaacaaatatgccaatttgggttggtagatgctatagtttgaccaccccactccactctccagctcagcacagaaagagtgaacaaagccatagctcctgcttctccctggggaagtaaagaggtagtagatgtccataagaatcactggctgggctgatggggggttgggggtgtattttcctgtatgaagccagttcatgaagactgtgatagctgcctgttttgtctaataaccctcggatatcaacacagggagtcaaggaaattaaataattgggcaaagatatttttaaaaagggaattaagatacatttccaaagactaaccctaatgaactggagttacaacttcatgaagatgtggactgagtcagtaaaacatgcatttaaaaagtgaggatttcaacagagagataaaacatattttaaagtgccaaatagaaatagaaatgcataatagatgagccaaatattcactggaggggttcaacagcagactagatcatgcagcagaaaggatcagtgaacccaagcacaggtcactagaaataattcagtcaaagaaacaataagaattaaaagaaaaaatggagaaacttaagggacttatggatcaccatcaagtgggccaacatacatattagggatattttagaaggaggagagagaaaggaccagaaagattgttcaaagaaataatggctgaaaacttaccaaatcttgggaagaaaatggacattcagatctaagaaattcaaaagacaccaaataagataaacccaaagaaatacatacaaatttgtaatcaagttgttaaaagtcaaagacaaagagaactttaaaaacagcaagagaaaagtgacttgtcacgtacaagagaactctataagactaccggtgggtttttaagcagaaagttttcaggtcagaagggagtgggatcatatattcaatatgctgaaaaaaaactgtcagtgaagaatactatactcaaaaaatttttctataaaagtgacacagagtaggaggattctggaaaggtggtagagtaggaagcactaggaatagtaatctgtttccccatctacacaaaaattaccctggactaatctgtctaatgtaattattttggaactccaaagttcattgaaggcttgcaacttccagcagaaggtttggatgataaatatggttaatgtcagtcaatttcagctcttaacacagtaacagctacccatctccacccatactctctccccgtgggaggtagccagcacatgatcctggagtaactttcacaaagcttttgggagtcatggtaccaaatatctggtatctgtgctgtgatttctgattgctgcttctgatcacaacagcgtagacaaggaggtagtggctattgttggacttccctccattgttgcaagccccatcctttctggataaagtgacttccagggcatgtcactaatcatctgggaagtgcatactaaaccacattaaaatgtcacctcacacctgctagaatgactattatccaaaaaaaaaaaaaatatatatatatatatatatgtatatacacacatatatataaaacaagtgttggtgaggatgtggaaaaattggaaccattttacatggttggtggaaacaaattaatacaggcattatgaaaacaatatggagacctaaaaaaattaaaaacagagcgatcacatgtttcagcaatcccactactgagtacatgtccaaaggaaagaaaatcagtatgtcaaaggagtatctgcattcccatgttcattgccgcactattcacaatagccaaggtataaaatttacctaagtgttcatcagtagataaatggataatgaaaatatggtgtatatacacaatggaatattattcagccttaaaaagaagaaaattacatcatttgtaataaaatggaggaagctggaagacattacattaagtgaaataagccagtcacagaaagacaaacactgcatgatattacttatatgtagagtgtaagaaagtcaaactcatagaaacggagagtaaaatggtggtttccagaggctgaggggtggagaaaattaggaagatgttagtcaaaacacacaaaatttcagtgagacagcaggaataagttcaagagatttatcatacatcacagagactacagttaataacaatatattgtatacttgaaaattgctaagagattaaagtgttctcatcacaaaaaaaattataagtatgtgaggtaatgcatatgttcaatagcttgatttagccattccctaatgaatacatatatcaaaacatagtgttgtacaccataaatatttataatttttacttgttaattaaaatattttttaaaagaaaagacattctgacatatgctacaaaataaatcaacctgaaaacgttatgctaagtgaaataaaccagtcacaaagacaactattgtaggtttcaatttatatggagtatttaaagtagtcaaaatcatagagacataaagtagaatggtggttgccaggggctagggagtgaagggaatggggagttattgtttaatgggtatagagtttcagttttgcaagattaaaagtgttctggaaatgaatagatgatgatagatgtacaacaatatgagtgtacttaataccactgaatgtacactaaaaatggttaagaaggtaaattttatgttacatggattttaacacaataaaaaattgaaaaaaataaaagtaggtataaagactttcccagacaaacaaaagttcagagagttcatcttcagtagacctgccttacaagaaatggtagagttcttagagttgaaacaaaaggacactaaccagtaacatgatagcataagaaaaagtagaaaactcattggtaaaggtaaatatgtagacaaatacagaatactgcattactgtaatggggtggaaaatcaccccattaattctagcataaaagctaaaagacaaagtatgaaaaataaatataactaaaaccatgataaaagatatacaatatgaatacacataaattgtgacaagaataatatatgaggggttaaagtgtagagtatgtgattgaacttaagttgttatcagcttaaaatagactgctataaccatattttatgtaagccccaaagtatgtatgtaaccacaaagaagattttttatgtaaccacaataaagtccctatagaaattacacaaagaaaataaagaataaaatcaagcatattatcttagtttatttgggctgctataacaaaataccttagacttggcaatttacaaataacagaaatttattgctcacagttctgcggactagaaagtctgagatcaaggcatcagcagattcagtgtctggtgatgtgtcagtctctgcttcaaagatgatgcttgctcactgcaccctcacatagtagaaggggtgaataagctcccttaggcctcttttacaaaggcactaatccattcattagggtggagccctcattatccaatcatctcccaaaggctccacactttaatattattgaattgggtattaggattcaacatataaattttggagggaaacaaacattcagatcatagcacatattaatgcaaaaactttacaaaacataaagaaagacagcaagagagaaaaagaaaagggaactacaagactgagagaaaacaactagtaaatgcctatagtaaatcctttcctatcaatattactttaaatgtaaattgattaaattcccccaatcaaaagacaaacagtgagtaatggactttttttaaagacccaactatgtgctgcctacaagaaactcactttagatataaaaacacacataagttgaaactgaagccaagaaaaaagtattccatgcatatggtaatcaaaagagagtaggagtggctgtacttatatcagaaaaatagacttgaagtcaaaaattgtcaaaagagacaaagaaggacattatatgatgaaaagggtcagtccataggctgtaataccaatataagagcacttaaatatataaaatattgacaaaactgaagggaaaaacagacagcaatacaataatagtagaattcagtaccctactttcaataatgaacagaatatccacacagaagatcaataaacagaggacctcaatcgcattataaaacaaatggacctaacagacatgtacagaacattccatccaacagcagcataatacacattattttcaagtacacatgattctttctgcagagcaggtcacatgttaggtcacaaaataagtcaacaaatttaaaaagattgaaatcttaccaaagattgaccattatggtcaaccttttctgaccacgatggaatgaaacgagaaatcagtagcagaaggaaaactgaaaaattcacagatatatggaaactaaacaacatacttataaacaacaattgagttacgaggaaatcaaaaggaaattagaaaatatctcaatacaaataaaaatgaaaacacaacataccactgcctatagggtatagcaaaagcagtagtaagagagaagtttatggtgatgaacatctacattacaaaagacaaaatgtctcaaataaacaacctaactttatacctcaaggaactaggaaaaaacaataaattagttccaaagttagcagaaggtaggaaataacagattattacccagaaataaatgagagagaaaatataaaaacaatagaaaaaaatcaatgaaactgagagttggttttttaaaagataaataaaagtgacaaacttgtagctagactaagaaaaaacactcaaataaataaaatcagaactggaaagaggaaacattacaactcttgccacagaaataaaaaggatcctaacagactgctatgaacaatatccaacaaactggataacctagaagaaatgataaattcctagaaacatataacctaccaatactaaaccataaggaaatataaagtcaaaaccgacacataactagtatggagattgaatcagtaatcaaaaacctccccaaaaatcaagctcaatacctgtagagtcactggtaaactctatcaaacatttaaagaagaattaatgccactccttctcaaactcttccaaaaaattaaagaggagagaacacttccaaacttattttatgaggctagcattaccttgattccaaagccagacaaagacaacacaagaaagaaaacctacaggccaatattctcaatgaatatagatgcaaaaaagcctcaacaaaatactagcaaactgaattcaatggcacattaaagggattatacaccatgaccatatgagacttatcccagagatgtaaggatggcttaatgtcgaaaaagcaagtaatttaatatactacattgacataataaaaaataaaatcacatcatcattttaatagatgcaggaaaggcatgtgacaaaatttgacattgtttcatgaaaaaaactgtcaacatactaggtataggaggaatctacttcaacattataaaggtcatatataaaaagtccatagctcacattatactcaatggtgaaaaactgaaagcttttcctctaagatgagaaacatggcaaggatgcccactcttgccagttctattcaacatagcactagaagtcctagccagagaaattagacaagaaaaaataaacataaagattcaaactggaaaggaagaagtaaaattattcctatttgcagatgacattatgttatatagagaaaactttaaagactcaattttaaaaaaaaaactgttagaataagcagttaataataataaataaattcagtaaagttgcagttaacatacaaaacttagtagtattcctatataccaacaacaaaataaattgttagaataaacagttaacagtaataaattcagtaaagttgtagtcaacatacaaaacttaatagcattctgatacactaacaacaaatatctgaaaagaaatttaagaaaacaatttcactcataatagtgtcaaaaagaataaaatacataaagataaacttaactacaaggtggaaaacttatactgaaaactacaaaatattgatgaaagaaaactaaacaagacacaaacaactggaaagcactccatgtttatggattagaagagttaatattgttaaaatattcatactacccaaggcaaactacacattcaatgcactccctatcaaaatcccaatggcatttttacagcaatagaaaattttttttattcatgtggaactacaaaagaccataaacagctaaatcattcttgagaaagaaaaacaaagctggaggcatcatagtttttgacttcaaaatatgttacaatgctacagtaatcaaaacagtatggtactggaataaaaaaagacatataaaccaatggaacacaatagggaatccagaaataaatatatgcatatacagtgaaatgatcttcaacaagagtgccaagatacacaatagggaaaagacagtctcttcaatggtgtgggaaaactggatatccacaatcgaaagaagaaaatgagactcctattatatgccatacacaaaaatcaacccaaaatacattaaaggtaaaaccccaaactgtaaaactctcagaagaaaacataggaggaaaagtctctagacattagtcttggcaataatttcatggatataacaccaaaactacaggcaacaaaaacaaaaataaacagcacaccaaactaaaaagcttctgcatatctgaggaaacaatcaacagaggaaaaaaggcaacctacagaacaaccaacctacagagtgctatttgcaaaccatatatctgataagtagttaatatccaaaatacataaggaattcctacaactcaaaattcaagagtaaaacaaaaacaaacaaacaaaaaccccaactaataacccaattttttaaatgggctgaggacttgaatagacattgctccacagaagacttaaaaatggccattaggtataaaaaaagttttcaatgtcactaaacatcagggaaatgcaaatcaaaagaacaatgactatcacctcacacctgttagagtggttattatgaaaaaacaagactacaaataatggtgaggtcgtggagaaactgaaactcttgcacaccactggtggaacgcaaggtggtacagctgctgtagaaaaccatatggaagttgctcaaaaaaataaaaatagagctaccacatgatccagaaatcccacttctgggtattttacctttgagaaatttaggagtgctaatatattgtttgtttgtttttgagacagagtttcgctcttgttgcccaggctggagtgcaatggtgcaatcttggctcaccacaacctccgcctcccgggttcaagcagttctcatgcctcggcctcccaagtagctgggattacaggaatgagccaccatgcccagctaattttgtatttttaatagagacggagtttctccatgttggtcaggctggtctcgaactcccgagctcagggggtctgaccacctcagcctcccaaagtgctgggattacaggtgtgagcaaccatgcctggccaatatatccttgagatcctaatttcacttcttttggctgggtatttttgccaaaagaattgaaattaggatttcaaagatatattagcacgcctatgttcactgcagcactattcacaatacccatgatgtggaaacagcctaaatgtttattgacagatgaatggataaagaaaatgtggtatatatacacaatggaaaactattcaatctataaataaaggaaattcaacaatgtgaaacaacatgggtaagccttaaagatattatgctcagtgaaataagccagccacagaaaaacaaacactgcatgattccatttatatgaggtatctaaaaatagtcaaattcatagaatcagagagcagaattgtggtgccaaggactgggggttgtgggaaatagggagttactaatcaatgggcatgaagtgtcagtcaagcatgatgaataagctctagaaatctgctgtacaatattttacttatcgtcaacagtaatgtattgcacacacttaaaaatgttttaagagggtagttctcatattaagtgttcttaccatgataaaataaaatgaaaatgaaagaaagataaatcaattcagtgaataaattaacaagtactcttgagtccccatgggtgaagccaaggacacatatagattggggttttgttgtcacggggcattttgacttgtatatgtgtttacctactcaatatgtgttacagtatatgctatttctcatttcctacatttctattccaatgacttcatggtaagcttctgacgaaatggcgtggctatgctagtgaagataatattccttgaaactacttacttgatattgcaataatttctccctacaaacatgctaactatagctcctgaatgtataagaaaccatgaggtttttttattatgtatgtgtgcatgtgtataaacatttcatgtagaacttggaagctataatttctaaattcattaacatggtggctgcccagctatagtaaattatatgccttcttcctcttcgggccaagcccacaatggtatgtgctacatgatcgttagtgcccctctcaccatagctctttgatccaaagtgacccacattggctcaatcagactttctcctagaagaattgggaatctgctgctaaaagacccagcacccctagagctgagtcatttgacatggtctgtacatttccatggcatctcacgttcccaagacctacctattcaactctttcttagatcctatgagagtcttccagatcattttaataaattccctatttttaaggtcactttctgtgacttctcaccaaaagaaactctttaactaacgtagcagcagtgttatagaaaactatcagtattatactttccttattggttcaaatttctcaaaggtaaaggaagacaatacaccttgaagtcccactttaatgattttcttaggtaccatgctgttggatctaacaaaactgtagaagaagaaagtagactgaaggaactacaggatctttcatgccaatagagcaattctatatatatatatccgtaacatacaacctagtcctaagtgaaaagcctatgatgcagttcatcaggttcttccagcagtggccagccatgctttgaataccaaccattttctcagaatcctttctagattgagaaacaatatatactgtcatgtgtcccttaatgacagggatatatggtaataagtgctttgttaggcaatcttgtcattgtaagaacatcatagagcatatttacacaaatatagatggtatggcctactatacacctatgctacatggtatggcctattgcttctaggttttaaatctgtacagcatgttactgtattgaatactgtaggcaattgtaacacaatgctaatgatttgtgtatctaaacagatataaacatagaaaaagtatagtaaaagaaatctaaaagattaaaaatggaagccgggggcagtagctcacacctgtaatcccagcattttgggaggccaaggcgggtggatcacaaggtcaggagatcgagactatcctggctaacacagtgaaaccccatctctactaaaaatacaaaaaaaattagccgggcatggtggcgcatgcctgtagtcccagctacttgggaggctgaggcaggagaatggtatgtacccgggaggctgagcttgcagtgagctgagatggcgccactgcactccagcttgggagacacagccagactccgtctcagaaataaataaataaataaataaaataagtaaaataaagattaaaaatggtacacctgtatagggcatttaccatgaatggcgcttgcaggactagaagttactctgggtaagtcagtgagtgaacatgaaggcctaggacattactgcacaccactgtagacttcataaacactgtacacctaggctacactaaatttattaaacaacagttttcctttttcaataataagttaactttagctaactgtaacatttttactttttaattgttttaactttttgacttgtaataacacttagcttaaaacacaaacatattacatacctatacaaaaatattttttatttacattctcattctataagcttttttctattttaaattttttaacttattaaacttttttgttaaaaactaagcacaaacacacacattagcccatgcctacacagggacaggatcatcaatatccctgtcttccagctccacaccttatcccctggagagtcttcaggggaataacacgcatggagttgtcaccttctatgttaacaatgccttcttctggaatacctcctgaggacctgcctgagactgttttacagctaactttttttaaataagcaggagtacatcctaaaataacaataaaaagtatagtttactaaatatataatccagtaacatagttgcttattatcattataaagtattatgcactatatgtaatcgcattgctatacttttatacaactgtagcacagtaggtttgtttataccagcatcaccacaaacacatgagtaatgcattacattatgatgttaccaccactaggccacaggaattttttagctccattataatctaaaagaccaccatcatataatatgcagactgactttaactgaaacattattatgtagcacgactctctctctctctctctctctctctctatatatatatatatatatgtatattttgttttgttttgtttttgtatttgtttttgttttttttgagacagtctcgctctgttgcccaggctggagtgcaatggtgcaatcttggctcactgcaacctccgcctcctagttcaagcaattctcatgcctcagcctcccaagtagctgagattacaggcacccacaagcacacctggctaattttttgtagagatggggtttcactatgttggccaggctagtcctgaactcctgaactcaggtatttcacctgccttggcctcccaaagtgctgggattacaggcatgagccactgcacccagcagcacatgac

SEQ ID NO: 253 - DNA, 5037 bp, Homo Sapiens
tggttattcttcttgttctttttctaacttcttgagttcatattaagttagttagcttttagtccttctaagtcaattactgaatgttttgaagttttcactttgtgttactttatattttttaggctacttattaaactaaaccacgttctgaactgttactgctactggaaaccagtcccgatccagaccccaaaagaggattcttggatcttgcacaagaaagaaaggagagggacctgtagtcattaccttcaaggaacctaaatcctggtgtctttatggttatgggtggcatataatatacagacacagtgaaggagtgagatgtgaaggtgctctgtcattgcctcagtcaagactttcatggtacattggaagaaagagaagcgtgaacaaattgcatgatacttgaggtcatgctgtgtacctgtattgaacaagaataagggaagaaagctgggaacctggatctcccatatattggaagttttgtaaaaaccttgagggtcccttccactacatatggggattatgggaactgcaattcaagatgagatttgagtgaggacacagccaaaccacatggttttagaacattgacgaagagagaagacaacccactttgccatatatgcccatggtcttaccaaggctagagtacagtggcacagtcatagctcactgcagccttaaactcccagactcaggcaatggatccgatcctcccacctcagccagcctcccaagtagctgagactacaggaagatctggcaagagttagcatgcaggtctacattgtgacaatccatgagagctaaggactggctgtctcttgggacaaataggctttcttgagtctggatgtccgctctgcttgtcttaccgcatgagagagtgcagatgttcctgaaagcatctttgcgtggatttgcttgaagcgagatgtgagagaaggggcaaagctcgaagggagctgctagagagagaggaaagcagctggacagggctttcctgatgactgaaatcttattgtggataatggagatcaggtcctgtggtggtggatctaatggaaggatcctaggtctctgaatcacaacgtggaagaaaatcagtcaccacccctagctggaacaccaacatttcaaataagtgaaaaataaactcttattatgtcaagccactgcaattttggggtttgtcttagtgttagtgtcacctacatttatgcaatagctgagtaacattttagaagaagaggatgtttgtagccattttggactacaagaaatgtcaaagatactttttattttcctaatttttaatttctaggtttattcttaaaagagtaagatctttttttgaaaaatcagtactattattttgacttttggatatacaaacaggtctctccttaaccactcaaaagagccaagtgagaggaatttgtggataaagacatttaaaggtagtatgaaatctttaatcacgccaaatcaacactcatcaccacgacattctgtcagtgcctccagggattaaggacatatgaatgtctttccctgaaatgtgattgtgacattggacttagctatttgggttttcatgaaacccattgtcaggttaaataatgatagagtagtagatgttctgcacaattgcttttgttataaaacttgaaaaaaagtatattaattttttatgccttgcctttcagtgcattattacttatctttgtgcagagtagattaagtaggtccattgaataagaaagcattaatttggtagattctctgtgttaagatgctcagtattttttatggaataaaggtgtggaaggtttctactcctggtcaaggagtagaaacaggtagaaaatatttatatttcagccctgcttctcctttgtcatatccttcaccacaaggatctactttcacttctgccttggttttaaacagcagccagtatatgaaggtctagctaactacactatctccctaggagagttggtacaatgttgtttccaaaaattagacaaagcatgtttaatggctccctttcactaagtaaataaataaaagcaagaaagggaggaagcaagctggctaaagaagaaatgaactagacatctgtatgtttcattttgttagtgatcaagctcgtctttcatgattattactttgatacatacaagatatatcacaactattttcctaagcaatatgaagatacaaagttattataaaaactaatggatctaaaaatacatattgaaaggtatatttatcttttgcacacctcgatgaatttttcacaaactgaacagatctctgaaactgacaaccatataaaacaaacagacaaaacaaacaagcaaacaaacataaccaacaccctagaaaccctcctaggctcctttctagtcaaaggattagtcattattttgatttctaacagtatagctcaattttataaattaattaagcaaattactctttgtgtaatttacatgaatacattaggtattcttttgtgcctgacattttttgttgaatattttgtttgcaagatttatcctattgttgcatatgcttgtagactgttcattctcacagatgtattataaaatctattgagcaaatatggcacagtttatttatacactctactgttggtagacatcttgatagtttccagttttgtttggagctattacaaaagtgctgctataaacattccagttaagtcttttggtaaactcaaatatgtatttttgttgaatatatatgtatatatacctaaagaaagattcgttgatactgccagttttccaacatggttgtatcaatccacatcactaccagttgtgcataaagatttgagttgccttgtatctttgccaacacttgaaattttttgtctttattgttttagccagactagaggttgtttagtggtatttcactgtggtttaatttgcatttccttgatggctaatgaacttgagaatatggaaatatgtttattggccatttgaatgtctttctttatgaagtacctgttcaagtattttacctattcctctattgagttgcctgcatttttcctattgatttgcaggagttctttatatgtgctagataagagtgtttttggtactctacatgtaacattatatgtatgtgtatatatatatatatatatatatatatatatatataaaatttcccactttgtagtttgccctttcattcttttaatgtcttttgatgaacggatgtttttagtttatttaggcaaagctataaggtaagaacaatgttagattaagctttaaaaggtgattcagttccatgaacagaaagattgggattcccagcactattgagctgtttgaatcaaactcctagaagccttaatatattttttcaactttccctttgtaattgtagtgttggaaaaacaatagttaccctcagagtgttgtagaaattaccatctgttgattgaaacaatgagaaaatattaccaaaatggttagaacaataagagtactatataatatccatgaaaaattgacactagccacaggttccttcaggaaaccatcagtgttctgaaaataataaatcagaaaatcaatgttcagttttcaacagcacggtgaggatggcagtgaaaggtattattttaagaattttctcaggccctgagttgtaagagtctgtaatcagtgatatttttatttaaagaaaatcagagcatgaaagagcattattttaatatctaatatttaatgctagaattaaaaatctagtgtaagatttatgttggaaaaagcaaacaagcaaacaaagtaaattacagctctctgtgtaataacgtgaatgaatggagattcctcggcaaattgaatttactatgtgaaatcttgtaaatgaggcatattttaaaaaatcttggctctaaagtgatttggtgaaatgattattttcctcattaagacaaaataaatttctgtcatattattaaacatttcacaacctcaaagtgctgttttatggtagaccagctagaagtaaagattaaagtggactgtatttgtggtctggtcagagtttaagcagaggacacagtttctggaagcttttccttcagcctggatgtcaagggtccttttgctgcttagcacctccagcagcctccacccaggttcatcatctagctgtgttgtctccactgtttcctggagaaaggtccaattacccaaaatacagttgtgccctttttatgttttcatcatagttaattatagaaaaacttggttatatgcgaagtcctactaaaacaaaagtatcataggaaatatttctaagaatcatgcaaaatcatgattttgtattaagaaattctaaattaagaaccatgtaaaaatgagagtttgaaatgttactctgtcagacactgaagaatttaagaaccgttaattgtttgtatactagctcctcgaaggtaggtctgtttttattcatctttacggccttcgttgtccctgacatattgctgcacgtagagtatatgcacagtgtatacttgtggactaagtgaatgccaactttagcttttgaaaatgtaatatatgagtttaacagatgttgtctcttcactttctaagtacttggaactttgaaaatggctctttcaatagtaaagtttttttctctagatatgttcttaaataaaaagtgatgtaaagaaaggaaaacaaacttaaaccattaaaatgttttaaattactaaatctgcctccaggaatgtgtaaagagataatgactacctaacataattttttatgggttaaattttctctaaatgtgatctattctattttgaactacaaatattttaaaagtataaattgtaagcaactggaaaattggttttaggcacgtgatatgcaatttcacaaatgttcaggatcctggtgttatttctatgactatgagatttcataaacaaattatatagcc

SEQ ID NO: 254 - DNA, 3140 bp, Homo Sapiens
agcctccgggatctgcaagtctggaaaggccacgttgtggaccttggcgcagaggttatgggggcgacccggagcggatggtttcaggaaaactagaacccaccctcatggcctgaacaactggagagaagaggatcgcagcaatttaaagccagcggcaaggatcacagtcctggggtcaggtgaccaaagccagtttttcagcccttaacaagaacctggcttcacccagccaaacatgagttaacgtatccattttacacacgaacaaactgaggcgcagagatgatcacagcttgttggtggcaaactccgctagggccttctctgctaccctaaggaggtccgaccgtatgttttggaccccttaactcgggataccgataaacgaaaattaatagggtgttggatgttttaaatgtgtgcgggaatgtcattatattggctagaatcaaaccttatttagacttgttttgcacttttgtacactttagtaatttttagttttaatcataagggagttaaaggcgaacacaactggtatttttttttttttttttttttttttgagacagggtctcgctcggtcacccaggctggagtgtaatgctgcgatctcggctcactgcaacgtccgcctcccgggttcaagagattctcctgcctcagcctcccgaatagctgggcgtgccaccacgcccggctgatttttgtatttttagtagagacggggtttcaccatgttggccaggttggtctcgaactcctgacctcaaatgatccgcccgccttggcctcccagaatgctgggattacaggcgtgagccaccgcgccaggccgacaactggtatcttaaggcttagggcctctggtagaagtgagctccacctcccttcctgtgtagaaggtaaatgcattcattcattcagtgaatcgagcatgcatgaaatcgtttgcgcacacccagaagcccacctgcgagccacaggagcagccattccaggaagccaagctataatgggagacgcaaggaatggaggcggaactcctgtttttaagtcctagctccaacactagccttgtcagcctgtaattctgaattactgggcgcctctgaggcttcttgtctcatctgcaaatcaggaacaacggcatagagtggtgaatgcatcaagtgggatgatgtctgcaagtacgcaacccgcttacacaaagaattatctttccataaccttccctggacccctagggccagcagggaatcatagcctccctttgtttctagagcccggaaatcactgggttttccctctgtctggagcagagctgggtgcgaatttgaccaacgggtggcaggaacagccggagcaggatattaaggagcgggcgagcttgccaagcatgcgcagtagcggcgggttggtttgagaagccgccagggagccagcgcggcgacctagctggctggggcaggggaggggcccgccttatatgggagctgcgtggggacaaactgttcgggcccaacgcgcgggtctgagagacagccacgcctgctccgggtcactccggccacctggggggcgtcggcgcgcagactctggccagttcagtattcaaactcttcaggagtgctaacttactcatgacagcgattttctgtatcggggtttcattggtcggtggtttagaaggttttgctcattcattcgttaatgtaattccaacaacctacacgtgtttataagccccctttccatccacgactttgctgtctgacacaaaacggaccatcgcagcccggcagacgctttagacaacaaacagcatgcctggagcttttcaataggaagcagtaaggcttgatcatcacagacgatacggaacgggcactttcttagcagaaaatatttctattggggcgtgaaggaagtttctgaaagggaagattattataagataaggggtttgctcatctcagactttagtgtgcctgctttaaagtgttttgcaaacttgaatgtttaaaggaatcacctggcggtcttgtgaaactgcagcttctaatgggcaagtcagaggggaagcctgagacatggcatttccagcacgttcggggagtgaagatgctgtcggctgccaccctccctgcaaggagccaggggatagatgacctctacgcaaactgtgagagcttaaaataactgatagtgaaaaacagttacagaagctctaggccgggcacggtggctaatgcctgtaatcccagcactttgggaggccgaggaggatggattgccagaactcaggagtttgagaccagcctgggcaacacggtaaaaccctgtctctacgacaaaataaaacaaacaaaaataaaagccacgcatggtggcgtgtgcttgtagtcccagctactcaggaggctcaggtgggacaatcgcttgagcatggaaggaggaggttgcagtgagccaagatcgcaccactgtactccaacctgagtgacagagtgagacccaatctcaaaaaaaaaaaaaagcagtaaatccagggcccaaaaggtcagtaagaattcagggatccaaatcagttatgtactgatgcataaaaataatggccaaaaatgtggaggcttaaaacaaaaaccggttattatttctctcaattctttgggttgctggtgtcacccgggctttgtggctgggctctaggctcacctggggtgaggaaaagttggtgcattttgctttttcatcctcaaaaagtttagaccaggttccagatttcttgcggcggcgagacacctcgccaggagagcaccgcactatgcacaagcctttgctggacttccattgaccaaaggcagtcacatggtcacgcccaggcaatgtgggagggccccgcaaaggaggggtgggtactcaagagagccactaaataacaaacctaccttaagatcacatttatttctaacattttaatagttatagttcagtataattgattttcctggtaatcccatttattttattttatgcattttaaaatgttattctgaaaatgttactctcaccaaacaaccaaaagggtccacggcataaaaaaggtttaagaatctatgattttaaaattcaat

SEQ ID NO: 255 - DNA, 2077 bp, Homo Sapiens
ttacaaatattgattgatgttctcatgactccctaaaatgtataaaaccaagctgtgcctcgaccaccttgtgcacatgtcatcaggatctcctgaggctgtgtcacaggcgcatcctcaactttggcaaaataaactttctaaattaactgacatctgtctcagattttctgggtccacacactggacaaaacagaagtgaacaaaatagccgaagttcccaattgtgttcctatggtgggagtagggcagcaatggagacggaaagcaaacaagtaaatgaagaaagaaaatatcactgagatgtgctaaggggagaattgaaagagggtgatgaggttgagtataaggagctacttcagataggtggtgtagcaaccctggttccaggaagaaaaacagaggcaagtcaagtattccaggaatattgggtggtgtgaatgtgggaggagttggagagtgaaggcctgaaaagcttcagctctagaatcagagaaactctctgcactttcacctggaaaagctggaactcaaagcgaagttcaagaagtagcacaatactagctctttgagttggattgtgaagtgtgtccgtgagagtggccttgtcttacactcacgacctcccaataatagtgacttctgccttccatatcttgcttgaactcctgtccttggcaaaccctaatctagaagcatacagaaaaggggactctgggaaacatagttctcatcctcagatgggccttgtggcttggtgctgagctgatagctgacaatttaacactgatgatcagaatgacatttaagctgaggtctaaataacaagaaggggtcagctttccaaagatcacagggaggaacattccagacagagagagtaaccagcacaaagtccctgaagctagaaagagcatcttgagttctccagaaacatcaagaaggccagtatgcgtggagctgagtgcatgagaggaagactgatgggagatgctgttggagaggtaagcagaggctgagtcatacggggtcctataagatctagtaggtccattagggatttatgtgcctgactggcttgtgtctgtgtctgagccccgtggataaggtgtttgtggacagaaagctcactgagctgtttagaaagaggggcttggtgagatttagggacccagacttttctgcctcaggcagtagacagtgctatgaagcagagaggggcactcaccttatactccccagaacacaacagagttttgcagcatggagaggttaggggacacagtgctgccctggagcctggaggaaaggacatttgggagcatccagagacatttaccctgggaaggatgtccactcttgtccagtggtgaagagccacagtgtaagaatagaggtgctctagtaggtttgagttgtcaactgacagatgaattcaggaacagatgtgagaccctcatcctgcagccagaaataacaggatgaacaatagaacagacttggagaggggacatgaaggtgaaatatgagtcagtaaatgttaaggtgatcctatttcccttgaagcctgggtgaaaaccatgtggaacctcagattgcattggctaggcccttgcttgaatgcattcagaaagttaagggatattcattttctttggggaatccatacagttagtgatttcattcccaatgtacatacatgctttactgaaatgactaggttgcttggaattttttatcaggcatactttcaaacccaaaagctataattttaggcatttcaggtctcccaacaaaagtactggccaaggttgatcaaatacaggttggtctatgccctgtggtgacatttgtgggataacaagatgattctaatgtcccttgaacatgtctccttcgcattgtctgaatgccatgatggagagttggttggcctgttagtgtgactgaaccaagtgcccgcagtgatagctgctctggatgctccctaagttaatttctttacattttgatctcacttccacagttccctgcaggtgcttcttgagatcacctcccaaataaattacttgcacag

SEQ ID NO: 256 - DNA, 1075 bp, Homo Sapiens
agaagacctgaaaggagagtcaccaaaagaagaaaaacaatgtccccaagagtccacctccaagagaacaagcaacttcctagcagatgctgaggcttgcaagactaatctgggcttggaagtgttaaaagaaaagattttaatttaaaaagcaaagaaagggccgggctcagtggctcatgcctgtaatcccaccacattggaagccaaggcaggcagactgcttaaagccaggagtttgagaccagcttgaccaacatggcgaaaccccgtctctactaaaaattggctgggcatggtggcctgtccatgtggtcccagctacttgggaggctgagatgggagaatcacttgaactggggacccagaggttgcagtgacttgagatcgcaccactgcacttcagcctaggcaacagagcaagactgtctcaaaataaaataaaataaaaagcaaagaaagtccttgaacccattggaaacatctttcaaggagcatgaaaccaacccttttatcacgtaacaagtattaatggaaagacatgagacgttgcaaagtattactagatgctggagtctagagattatctatttgacatttaggcagagagcaaggaaaaaacacaaagtactaaggaagcagggagcctctctaaatgctgataagacgatgaactgcgttagtcggggaacactttgggagactgaggtgggtggatcatttgaggccaggagttcaagaccagcctggttaacatggggaaacccatctctactaaaaatatctctcaaggcagcctcttggtgagcgaaagttctgaggcaacccggtggagggttagagttccccgatgggcaggctttggtttgcaaatcaactggtaaccctcaagaagagatccgtctaggagaacatataattagatgaacttgccttgtaggcatctgctgaactgcgaggtaaaaggttatatttgcatgtctaaaggaatgagtaggaagtgggaaactggggaaccggggagtgagaaaagaagagagaaaaaaataattaaaccatctcttagaaaaacggg

SEQ ID NO: 257 - DNA, 1913 bp, Homo Sapiens
catgtctcctgacacccagttgcctctaccactcagatgatgtcaggcccagtccctcagtgccctgcgcaaggaacaggactcatcttctgagaaggatggacgcagccccaacaaatgggacaaggaccacatccagtggcccatgagtggcggtcatgatcttcagcaagcggcaccaggccctggcagggcacaccagggtcaccccaaccaggataaccggactgtcagccagatgctgaacgagtggtggtacaccctggggcccaatgagacacagaaataccacgacctggccttccaggtgaaggtggcccacttgcaacaaggaccgaaagaagtccagctcagaggccaagctcacaagccaggggctagcaggagtgtaacaagggctcgtgggagtggagcatatcagagacgggcactgccactgcccctggggtgtcctctgaattcctgtcagttgcagcccaaacactccagagctcggataccaaggagcagcttctgtggggcagaacggctgcacacagtcagggaacctagctcagcctggcccaagccttctcccacaggggggtacacagcctggatggcagggaaatagatcatcaggcactacaggaactgacacaggtggtgtctggcaatgcatcatactctggcccaaagccttctactcagtatggagctccaggccactttgcagcccctggtgagggaggtgaccagtgggcagccctgctgctgcccacctgagctgctcattcccagcacatggccagtgaggacatagcgagtgatgaggcgcacacgatcatccatgaggaggagggggtgatgatgtcattgctgatgatggctttagcaccactgacaccgatctcaagttcaaggagtgagtgaccgacagagtggggacaactctggggaggagccacagggcaacaagggctttggtgggaaggtatttgcacctgtcattccttcctcctttactcctgctgccccttgctggatcctgagcccccagggtcccccgatccacctgcagcttttggcaaagtctatggtcccaccctgtcctcctcctacacatactcggatgcttcctcctcaaccttggcacccacctccttcttactgggcccgggagccttcgaagcccaggagtctggtcaaggcagcagagtgggccccctacggcccctacccctggggatgggggcccagggatgccttccaaggcgacctgtttcctcccaatggatcccgccaccttctggtgcaagagacctgaaagtgtgggcgacctggagctaccaggctcctcagtcatcagggtccctccgcagatcctgaagagaaactgactggtctttcggggtcggggcagagggaaccccacggacatggatcccacactggaagaccccaccacgcccaaacgcaagatgagaagatgctccagctgcagcccaaagcccaacacccccaagtgtgccatgtgtgatggggacagcttcccctttgcctgtacaggtggagaagccgaggacaggctcagggaaccggagaccgagaaggcactgtcctcttcactgcacgcgccctggaccagtgccggccctgatcatgcagctcttccaggcccactgcttcttcctgtccactaggccacagccaccctccaggcccactatgcacacatcttccactccaaggtttgttctgcccctgccctgactcccagccctgtgggggtcctgaccggacctcacctggctcaggcaaccctggctgccctgccactgcctctgccccagagttggggccttgacagcctggttggaaggggacaccccagccctgcctcaacacctgggggtctccataactaccacagg

SEQ ID NO: 258 - DNA, 3556 bp, Homo Sapiens
gtctttcgctccaggtagagcttggggttagtacatcactggcctgcgtgctccgctccaggaggtctcggtgattctgccacagcctcatcctccgtcgccctgtgacctactggtattggaacattcatagctaagactccaggacacccacaaagccgagaaatgctgagtttgcgggtcagggcgtccggagactggggaggcctcatcggagtcggccggaaatggcggtggcgggaccgagtctgtgagcctgagcccccctcagctcagccctcagtctcctctggtgcagggtacccaggcgtcctgtaccgtttcagcacagcggctttggccccagcctgtagccctctttgcgcagctctgcgcccgcatcttccccagcttgtgaggtgatgaggagaggttcaccagggaaagacgccgacttggtgtgcagggcttctgcgtggaaggagctctggtctgtggggtcaccagtccctactttaacctattcagacataaacggaggcaccattaaaacattaaagaatttatatgagcaaacagtgatgaaccagtgggacagccccagacatggtttgtcgtttgggggctaccagcgggtcttgaagaaaaggctttaagtctgcacatgtctccaaggagtctgaggacaagtgcaaagtcaacaacaagcaatgatggtggtggtgatcctagtcaataaaaagggggaagatgtgggtggcaagccacccaggtgccaaagcaagagactgagggcacaagctattccagtataataaagaaaatatatagtataagaatagttctactagaaatagattatggatatgattatatatgaatgtcattaatcattagtttgtagcattattctttattctaatattataataatctttgttctacaattataacctaggaaaaaccaggccctacagagataggaggtgaagggacatggtgagaagtgaccagaagtcaagaatgttagccctctgttacgcccagacagggccactagtgggctccctggtctagcagtaatgccagcacccattacctagcagaccttggtctagcagtagcatcagtgcctagggaaggcacccattacttagcagaccaggaaagggagtctccctttccccgggggagttagagaagactctgctccaccacctcttgtggaaggcctgacatcagtcaggcccgcctgcagccatctggaggcctaaccgtctccctgtgatgctgtgcttcaatagtcacgctcctggtccactttcatgttccactctgtatacctggctctgccttctagatagcagtagcagaattagtgaaagtactaaaagtctttgaaatgcataaaagaaatagtggtgtaatctgtcctctctctctctccacctcggctgccaaacagggaagggccccctgtccagtggacacgtgactcgtgtgaccttacctatcattggagatggctcacactccttaccctgcccccttgtcttgtatccaacaaataacagcatggccaggcattcagggccactaccagtctccacaccttggtggtagtggtcctccgggcccagctgtcttttcttctatctctgtcttgtgtctttatttctatgatctctcatctccgcacatgaggagaaaaaacccacagaccctgtagggctgggccctacataactgtgtagaggtattagactcagtttattctagtgggcccaacctccgagaccatcttgagtatcaggagactgtgagctatacttggatgggagcagctttgccaacctctgcaaagtgactctgaaaaagatggcaagccctgctccagtcacacctggaagctgactggttcccgcatcaccaaagcatgaggaaattaatcacaggactcatttccctgaaaatttggacttgtacagtaaggacttcaactgaccttcctcagactgaggactgttcccaatatatacatcaagtcactgaggtaggacaaaagtttgctacagtcctattattttatggttattttaagtgtaccaggactctaaaaggaacttgtttgtataatgctattctatacaaggtatgtagcccacgaaatgaccagcctgatgtgtgctataacccatcttttttcctactgcccataaaaacaggcgaacttctaggtttcctggtctatgcttcccgagaaaagagaagcatagctataggcgactgaaaagatgacaagtggccccctgaaagaatcatacagtactatgggcctgccacttaggcacaagacagctcatggggataccgaatccccatttatatgctcaactgaatcatacgattacaagctgtcttagaaataatcactaataaaactggcagagcttcaactgttttagcccagcaagaaacccagatgagaaatgctatctataaatatagactagccctagactacttgctaacagctaaaggaggggtctgtgggaaatttaaccttactaattgctgtctacacatagatgaccaagggcaagtagttgaagacatagttagagacatgacaaaactggcacatgtgcctgcgcaagtgtggcatggatttaatcctggggccatgtttgaaaaatggttcccagcactaggaggatttaaaactcttatagtaggagttataatagtaataaaaacatgcttactgctcccttgtttgctatgtacttcttcaaatgataaaaagcttcatcgctaccttagttcaccaaaatgcttcagcacaagtgtactatatgaatcactatcgatctgtcttacaggaagacatgagtagtgaggataaaggtgagaacttccactaatgagagaggttctcaaacggggggaaaaagggaggagaccacccctcatattgtcttatgcctagtttctgcctccaaagaaagaagaagtgaaaactgaaaggcagaaatggaatccacaggcagatagcccagcatcatgccctgggcctgctagttaaaaatccacccctgacctaactgcttgtgttatctatagatttcagacattgtatggaaaagcatcatgaaaatccctatcctgttctgttctgttctgactagtggtacatgcagcccccagtcacataccctctgcttgctcaatcaatcatgaccttttcaggcggaccccgttatagttgtaagcccttgaaagggacaggaattgctcactcagggagctcagtttttggagatgtgagtcttccaatgctgccagctgaataaagccctttccttctgcaactcggtgtctgaggggttcttgtctgtgtctcatcctgctacaacagaggtgggcagatcacgaggtcaggagttccagaccagcctgaccaacatggtgaaaccccgtctctagtaaaaatacaaaaattagccaggcgtggtggtgcaagcctttaatcccagctactcagggggctgaggcaggagaatcacttgaacccggg

SEQ ID NO: 259 - DNA, 1864 bp, Homo Sapiens
atttggctgggcctttgtctctcgctcccaccagagcttggaatccgtctctgctcttctgcattctccacctcgggagcccctggggactctgtgacggcctctgttgccctgtgatctgcaggtccggagagacgcacagctaagatgtcaggacatcctggaagctgggaaagggtcttgccatctctaagctggacctggtgacctttttggagggaaagaaagagccctggactgtgaagagtgaggagaccatagctgcacagccagtccagatgtataatctcatccctgaacatttctgatggtgtgattatgacatgtgactttatctggcaacagagtgagttgttgctcccgcctgagcccagcccccagaaaggattgtgacatatcgttggacccagaattgaggtggaattgtgacatataacttggccaagcacacagatgtaatggtgtggtgactctcatacctagaactgggacctgtgcaggattgttaattcattactggacattcctgtgggtgtgattgttacatatgcctatgttcagcacccgagtgatttgattttgctgcctggtctcagtccaaatgtaagattgtgatttatcgctgaatccagcacctcggtgatttgactctccctttttttgtgggagggatcctgcaaattttgggtattgtcaattattgctgaatcctgtacccatgttatgactctcccaaatgtgccttacctgttgtggcacaatatatcacattagacattgttaaatattgttgggttcaacacctgggtgatggatgtaactttttttctgggcctgcctacaggggaccttgtgacataactcaatgcccatcatcatggtaatgttactctcttctcctgcctgatctctgctcacagagaaattgtgacacatcactggcctagcatctaggtgatgtgactctcctctttttttcaggctctgcatatttgggtattgtgacatattgctgaactcaacacctaagggatgggagtctcctacctaggcccttcctacaggggacattgtgacatgtctctgcattcctcatccaggagatgtgactctccttttctgcctacaccctgcctacacagaaagttgtggcatattgctgtggtcagcaaccagatgatatatttctcctgcctgggtctttattacaggaaagatgattgacatattactgggcccagcatccagatgatgtgactctcttcttctgttggtccttgcttacagggaaactgtagcatattgctacacccaacacctagcttatgtgattcttcttttaggtttgccttcagggaacattgtgacatattgctgggccctgcactgataatttgtgactcttctgcctgtgatttgcccacttggggcattgtgacatattgctgggtttaacactcaggtgatgtaacttttatgcctaggccttgcttacaggaggcattttgaaatgtctttgtggctgggcatggtggctcatgtctgtaatcccagcgcttggggaggccaaggtgggcagatcacaaagtcaggagttcgagaccagcctggtcaacatggtgaaaacctgtctctactaaaacaaaacaaaacaaaacaaaacaaaacaaaacaaaacaaaacaaaacaaataaaaccacaaaaatcagccaggtgtggtgattggtgcctgtagttgcagctactcaggaggctgaggcaggataatcgcttaagtccaggaggtggaggttgcagtgagctgagattgcaccactgcactccatcctgggcaacagagtgagactccatctccaaaaaaaat

SEQ ID NO: 260 - DNA, 10240 bp, Homo Sapiens
gcacggcacccacctcggggcagcggcttcacctccccgttctcctcccgggaggccccgccggcctctcgggccccaccgagaccgtgcctcctcctctccttctcccgcttctccttaggtctgcgcgacttggcgttagccgaggcagcggcggcggcggcgggcaggaggagatggtgaggctgagcgtgcagcagcgtaggagggaccagcagtttgcgcggcaccggctgagacaaggaagcggaggctgaggagggaacggccgtgccagcggagaaagagaaactgctccgagaagaggacggggagggagcagcagacagaggggcaaagctccaagacgcggggctgccatagctctgaggcgaaggtgctgccggcggctgcagctgcctgctgttcccgccgctgcccccttctccgttcactctccgcgacggtggcggtgggggccgcggcagcgacacagtgcacggggctcggcggttccgccattttgcgctcctgttgtatttactctcctccgctagccggcgcggggcagggggcgggccctccgcgaggggtagggaaggggcggagcggccaggccaccagccggcattgctccattgggcaagccacgctgagggatccacctaagagccaatcaaaggcacaaacatcagacgaaggggcgggatcgccacagggaccctcttcggaggtcagagctcggcggggtgcggctagtggcggagcgcgctgcgaggggagggctttccactgtcgctggcgtgaactcgcgtgcccggcttcaccaggtactgccttctaacgagctggccatttccacatgtcagataggaccaacttgccttttaactacccgtgtgatacttaaacactgttgccggtatcacagcttttcttcaaaacaggatcttgctctgtcacccaggctggagtacagtagcaccatcactgctcactgtagcctcgacctgctgggctcaagtgatcctcccatctcagcctcctgagtaggggactacacacaggcaccaccatgatccggtatcaccagtctgtgggtacaaaaggagagtaacatgaacgattcaaattccactggctcttgttcccatggattcacagaagttcagccccatttcaaaacttcacatttgcttctgggaagcccattctggaaagtttctctgtggccctctccagaaggcagcgcgacttccacccagcaacacaagtctctgcagcacctgccccagcagcgccagctgagccccggaagctgggaaggcttaagctgactcttctgctgcacatagcaaaaaatggtcatttctgtagttgcagctccagatctacaataatcaatctatatccatattttatggggtttttttgagacaaagtcttgctctgttactcaggctggagtgcagtggcattatcatcattcacttgtagccttgacctccctggctcaggtgatcctgtcacctcagccttccaagtagctgagaccacaggcatgcaccactaagcctggctaatttttcaatttttatttttcgtagagacagggtctccctgggttgcccaaactggtcttgaattcctgggctcaagcaatcctcctgtcccggcaccccgaagtgttgggactacaggcatgagccactgtgcacagccctttttgtttttgtttttgtttttttttaaaggtaatttcccagtggaatcctcgagatttcttcacgtttttggaaaaatgagttacattttagattgttttcctttttggaatttaatggtatacattatattacatagctatgttgagctctatttctattacactaaaaagtaggctaattgtcttaactttcatcagtaatgacattaaatgtgtgaagattatacttggaataaagcacttggattcattcatttcttcagtaaatatttattgagcactagtatgttccaacgagtgtctgtctacattctggggacaagtgataactaaatccctgtcctcgtggagagttaacaatcaacaaactaacaaacatttaatttatgtcatcaactcatttccacaaatataacaacatcttgacttcaagtttcctgagtttctggtctaaagaattgctaccttcaagagctcaaatcatttgttggggagagaggcctgtgatatattttctcctttacaatgaaagtagctgtaaaaagaggaagagaaattctgagggtaaagataaaaaatgttgaaatcttctttctggatttcagattgagtctcttgccctaattgatgcaatttacactccatgcatctccttccctggaccttctccagttcttggggactacagatgaacttacttttaatgcattttatggcatttggaggccctccagtggacaaatactatacctgaaaaaaatccttttgctgtgctaaagtgttcaggtgtgaagtgtactcatgtttgcaaatcactttgaaatatataaacaaaaatgaattaatggatgaatagagtgatgcatagatcattagacatgtgataaaaataactgttaattgtagaatctagatgatgagtatattatatgatatggcccactgtataattctttcaacttttctgtttgaatgtttgataataaaatattgaataaaaatctttttgctaaagatttatgccttgtagttcacattattgaaaattttgctgagataacgtaaattacctttcaaaaatcatcttaaaaattgtcttaataaacatggattaatttttatttttatttttgagacaaggtcttactctgtcacccaggctggaatgcagtggcatgatcatggctcactgcagccttgagcttccaagctcaagagatcctcccatctcagccttctgagtagctgggactagagactaattaaaaaattaacccagctaattaaaaaacattttttttttttgagatggagtctcgttctgttgcccaggctggagtggagtgcagtggtgtgatcttggctcactgcaacctctacctcctgcctcagcctcctagtagctgggattacagatgtgcgccaccacgcctggctaacttttttattttctgtaaagatggggttttgccatgttggccaggctgcccttgaactcctgacctcaagtgattcacctgcatcagcctcccagagtgttgggaatccaggcataagccactgcaccaagccttaaaaatgttttcgtagagacagggtctcactatcttgccaatgctggtcttgaactcctgggctcaagcaatcctcttgccccagactcccaaagtgctgggattacaggcacaagcccctacaccctgcctggattaatttttaaatgtctgaaaaacacttatttttagaaagtttagacaatgtaaatgtgaaatagctctatgaattctttgtttgaaaaaaggcttatcttcctggaatatgtgttttatgaactcaggaaattgttaacaagttaactgaatttactttgctttttaaattagagaggcgattgtttgagaattattgacaataatttttcttagaggagatgcattggtctgggttcaacgcagaggtaaaatctacccttagctggtttaagccaaaagggacttattacatggtatatcataaaatttgtcagattaaagaaacagcgtataagcactttgggaggccgaggtgggcagatcacaaggtcaggagtttgagaccagcctggccaatatggtgaaaccctgtctctactaaaaatacaaaaattagctgggtgtggtggccctcgcctgtagtcccagctacccaggaggctgaggcaggagaattgcttgaacccgggaggcggaggttgcagtgagccaagatcgtgccactatactcctgcctgggcggcagagagagactccatctcaaaaaaaaaaaaaaagaaaaaagaaacagtgtacaggctgagcttcaggagtgactcacaaatccactttatagacctgggctatcaaaacatgctgttgatgccaggatccggaagccagcccctacagccgctagttccagagccacattacctttcctataaaacactccatcaggaaggatgcctcataatctgtctctctgccactcaattatgaattcttcactatatgcaagtgcttctagaagtggttggttggtttgttttcagacagggtctcattctgttgctcaggctggactgcattgcacaatcatgacgccctgcggtcttgacctcctgggctcaagtgattattttgcctcagcctcctgactagctgggactacaggtgcacgccaccatgtcccactaatttttttttctttttcagagatggagtctcgctatgttgcccaggctggtcttgaacttctgggttcaagtgatcctcccacctcagctgcccaaagtgttggaatttaaaattcatgtaacagtctgaaaagggtaccttcttcactctgactgacggccacctcctttcagacaatttctttgcaagttatgtgcatctgggtccacctgtaagcagaaaatcaggttaggccctcaaggagcttgcaagcaaatgtggaagacatattttataaacagctaattttaaatgatgtggaaaaactgcacagaatacaagagctaaggaagcctgatggagaaagcagctgattctgccagaggtcaagggagtggtacatggagaagtaggaaggctttataaacaaagtaaacttggtggactttgaaaggtatgtcactctacttttgcttttggagaaagtggtcagggtggggccaaaggagcaaagcacagagttggaaaattccaaggtatatttgggggctaaatttctggttgaaggttagggtggaggagcggtgggagtgacagataaggtagaaagcttggagctacataatagatgtcaaatgctaaggcctttatgctctcatggttaatttcctgggaagaattacttaaacagagctgttacttcaatatataatatcacctaactccagtcccgcctcctctcccacatccttcatctagtatagagggaacaaatcttccctgcattgtaacctaggacaagttacttaacttctctctttaacttgatgtccaaatctataaatggagattgaagatagtgcctatatggttagttaaatgatttacttaaaacagtatgtggacacagtgagcaccatatggacgcttgctacataagtaagttgtaggcagtggatacagcattgcctattagaaattctcaaataattgttttgagacatttaaataaaaaggaggctgggcacggtggctcacacctctaatcccagcactttgggataccgaggtgggtggattatttgaggtcaggagtttgagaccagcctggccaagatggtgaaatcctgtctctacaaaaaaaaaaaacaaaaaaatgagccaggcatggtggcacgtgcctgtaatcccagctactcgggaggctgaggcaggagaatcacttgaacccaggaagtggaagttgcagtgagccgagactgggccactgcatgccagcctgggtgacagagtgagaccctgtctcaaaaaaaaaaaaaaaagaaggatttttagacttgtgctaactcccaatcatgggcttaagactttcacaataaaaatcattatgtgtatatatcattctagccttaaaaaacataattgctaaaaggactattagaatgcctttctattttacagtctgggtaaatgctttcccagacttaagagcttcttagagagttttatcaaacatgcaggcacatttctgattatttaaggcttaagactttggaaattctttggcatttagctacagccttttgacatttttgctgttcattaccagtaccgtgctgtggaaaggaaaagagaagggacacacaaggtgattttatacacctacaaacagtggaaaagtgatagtggataggaaaaaagtagaatctacatgaaatatttgtagatttaacttatgttctgttctccattattgtaattgtttgtgtcatacattgctgcataataaactaccgtaggccaggtgcagtggctcgtgcctgtaatcctagcacgatgagggggtgaaatgggaacattgcttgaggccaggagttcaagaccgacctgggcaacatagcaaggccccatctctacatctgaaaaaataataaattagaaacctactataaaacataactttaaaagaacacttaatgatttctcaccattctgcatgagggcgctgctgtatgactttcttccatgtgatgtgggttgggacttgttgggaatctccccacgtggtctctcatccgtccatggcttagcctgagcttctttacatgccagcaggaccccaagagactgaagcagaaggtctcttaaggtctcagaaccagcccagaaacacatctgctcattttattggttaaagcaaggcacaaggccagctcaaatactagggctgggaaaacaaacactaccttgatgggaggagctgcaaaatattgtggctatgacttccaacacacctcagtagctgatcaagttgactgtaaaattaaattggacaaaattggtaaaaattccagattctgacttctgccagacatttattccattttgcatttatcccatttgcatttattccatttgcagatctgcagattaggaagtagacagaaacagtaagaaaaaacacgtggatagtcttaatcacttttcaagttttttttttttggagatacaggttcttgctaggatgcccagtttgtagtgcagtggctattgacagatgatataccacactgtggcctcaaatttctgggcgcaaataatcctcccacttcagcctcctgagtagctgggacgataggcacatgccactgcgcccagcttcaagaagtttgttttttttttttttttgagacatagtcttgctctcttgcccaggctgaagtgcaatgccgcgatctcgtctcactgcaacctccgcatcccgggttcaagcgattcttttgcctcagcctcccaagtagctgggattacaggggactgccaccacacccagctaatatttgtatttttagtagagatggaatttcaccatgttagccaggctggtctttaactcctgacttcaggtgatccacccgcctcggcctgccaaaatgctgggattacaggtgtgagccaccatgcctggcgaactcataggctttaaaacatatgtcttggggactgggcgtgatgttgtttttaaccactctgcttatgaactgactccaggagcagggataagagtgtaaacaacctacattaagctttactccatgggtatctttatgtaagtgttttaaatagatcaagaggtattaagtttgaaaataaagatttattaataggagtctattaatagacttctactgggaatataaatcaaaaccaggtacggactagctaccttaacatgtactatggtcttggatttaagtcatctattcagtagacatttatttatttatttgtttgtttgtttgccaggctggagtgcagtggtgcaatctcggctcactgcaacctccaactcctgggttcaagtgattcttgtgcctcagcctcccaagtagctgggattacagccacgtgccatcacacccagctaatttttggattgttagtagacgcagggtttcaccatgttggccaggatgatcttgatctcctgacctcgtgatccgcccgcctcggcctcccaaagtgttgggattacaggcgtgagccaccacgagtggccaatactttttcttttacggatggagtctcactttgggaagtcggggcaggaggatcacctgcatccaagaaaccagcctgggtgatatggcaagaccccatctctataaaaaaatcaaaaattagtcatgcatggtggcatgcacctgtagtcccagctactcggagtctgaggtaggaggatcgcttgagcctgggaggtcaagggggcagtgagctgtgattgcaccactgtactctagcctgggtgaaagagaaagactgtgtctcacaaaaaaaaaaaaaaaaaaaaaaaaaaagaggcagggcgcagtggctcacgcctgtaatcctagcactttgggaggttgaagcggatggttcacgaggtcaggagttcaagaccagcctggccaagacggtgaaaccccatctctactaaaaatacaaaaaaaattagccaggcatgatggcagacacctgtaatcccagcgactcaggaggctgaggcagggaattgcttgaatgcgggaggtggaggttgcagtgagctgagatggcgccactgcactccagcctgggtgacggagcgagactccatcttaaaaaaaaaaaaagggatggagtttcattttgcccaggctggagtgctggggtgtgatcatagctcactgcaacctttaactcctgtcctcaagtgatcctcccgaagtgttggggttacaggtatgagccaccacacctggactcaggaccatatttaagaaaatacttacattcaggctacacctgtaatcccagcactttgggaagccgaggtgggcagatcgcttgaggccaggagttcaagacaagcttggccaacatggcaaaaccctgtctctactaaaaaattacaaaaagtagccgggtgtggtgtgcatacctgtaatcccagctactcgggaggctgaggcacaagaatcgcttcaacctgggagccaaaggttgcagtgagccaagattgcgccacggcgctctagcctgggcgacagtgaaactctgcctcaaaaaacaaaaacaaaaacaaaaacgctgggcgcagtggctgatgcctgtaatcccaacactttgggagaccaaggcgggtggatcacctgagatcggagttcgagaccagcctggccaacatagcaaaacctcgtctctactgaaaaaaaaaaaaaaaaaaaaaaaaattagccaggcatggtggcgtgtgcctgtagtcccagctactcaggaggctgaggcaggagaatcgcttgaacccgggaggcagaggctgcagtgagctgagatcgcaccactgtactccagcctgggtgacagagtgagactccgtctcaaaaaaataataataaaaaaaaggccgggcacagtgactcatgcctgtaatcccagcagtttgggaggcctaagcaggagaatcacaaggccaggagatggagaccatcctggccaacatggtgaaaccccatctctactaaaagaaaagaaaaaaaattagccaggtgtggtgacgcgtacctgtagtcccagctactcaggaggctgaggcaggagaatcgcttgaacccaggaggcggaagttgcagtgagccaagatcgcgccactgcactccagcctggcgacagagcaagactccatctcaaaaaacaaacaaacaaacaaaaaagaaaatacttatattcaaaattagtcctacttttcacacttagctacctgagtctatatatgccaatatttccactaaatttcacggtcatttctctcaaagaggctagtttagtagagcagaaagtttaagtaaatgtacttaaacagtataggaacaaagaggaaatggttgatttgacttgttgggagacaggacaagttaagtttaatacaggaaatgacacttgaactaatcttgttagatgagtagggctcaacagaacaggacaaagaacgatgttcaagaggaaaggtataggatgactaagggcgttggggggctctggaaactataagtagctcatggttggagcacagatgtgaccagagtaaaggccagagagaatagcaacaggaagatcttgaacaggtcttgcatgatctgctcaggagtctggacttgatcctgtaggtcttgttctccaattttattacgcaacagaatcacctgtactgcttgtctaaaatacgcattctttggctccactctaattcaggtccagagtaggatcttggaacctgaattttaagaacactgcctcaattctagtgcaggagaatctgggccag

SEQ ID NO: 261 - DNA, 3910 bp, Homo Sapiens
actgtgatcaccgtccatggccgcctgcggatacccacgccgtgctcagaagagggctctgaggccacgcccgcctgtggggtcggtggccgggcttccgggaccccagagggagtcgtcgcgcgctaggtggaggggacccctctggaatccggcgatccccgggcgcagatgcaggagcgggtggggagagccgcgttcctggcatgtttgcctcgagttagtcacgaaggaatcgaagagagccttagtcttcgaggcttttcccttcctgtgagcccctttgaggccagcacattgatttttttttctttcgcagaacaatttcggacctcctggggtctatgctaggtatgaggtgtatctttgccctccatcaagtagcaaagatggacatgtaaacaaatttcgacactgtgatgactgccacaaaaagcagcattatgaggttgaatgtaaaaggataaccttagcggcggcgggggccggaggatgaaggaaggcttcctgaggtaggcgctggttgaaactgaagttggagagagcaagtggcatttgctgaagtgcatttccggtagaaaactccagtggtccctcacctgactgagtggcgcagtcagagataaatggaacaggtacactgaccagaaagggcaagatgggctaaacttcgccgttgggccactgggctcccccgcaggattttaaagagctagccagtagatggattttgtttttgttattttcgcaatttattttcaaatatgtaatacgcgaacttggtacaacattcatgtgataaaaaggtagatacgtgggcaggacgcggtggctcacgcctgtaatcccagcattttgggaggccgagatgggcggatcatttgctgtcaggagttcgagaccagcctggccaacatgagtctacaaataaacattttataaagatgatccttcaatacatattctacagcccagttaaaatgtgagaggccatgatctacagacagccatttataaaggtggatcagggccggacacggtggctcaacgtctgtaatcccggcactgtgggaggccaaagcgggaggatcgcttgagcccaggagttcgagaccaacctggccaacatgctttatgtgattgacacagacatggaagagatctggtccttatgaagaattctgtgctcgcaggaaagatctgtaggaataatgaaatgctttcttcattgatgagatgaagtctctgtttttcagataaagaaaagagaggataatgggaagacaaaacattgtattaaggtagaaggaagctggataaattgtctctgtaaattatcttaaattttgtattaacaaatttaaaatgactcaaataaaataacaaagaaaaatatattaatttggcctcaaggaattttctcaagccataaaaaattttcttagtttatttctttacggaagtatcttatgcttgatcagctgacttaaaggaactctcctagtgtgggactgaaaacaactttatcattgataaaagatgattagtttaaaaagttggtttttattattgaagtgcccacaggcacaagagtataggtgcttacatttccctttagattatgggaaagcccttttgagaatgcactaaatcaggaaatctttcagcaatcagaatgcatgctgaaagttcagatcttttaagttttgggtttcgctgtttgagcataaaaaggaagggagcagggagaaatgtaactaggttcacaattttgagcaagagcatatgtaaaggtaacgtatgtacattttatttcaagaaagacagaagacaaacagcataaagatgcccagatgccctaaagataaatacatttcaaagattctcattaaaatgaatctgtagtatttttttcctgcaagcaaaatacctttctttaaataaaattaaaaaaatcagtattctgaattgcaaatgcttttgttttttttttgcagaaaatctgccatgattatttttttaatgaataaggattttccacaaaacaggcttgctctacatgctagatttttaaacagttcagtgacacaatatgctaactacatacacaacagataatatagtaagaaaacactcaacctgatgaaaagttaaaatcttcattaatacactgaaaattgacataactcatgcctttaaaatcaaaaatacaaaaattaaatgttttcctaaaaagatttccttattttaaggattcatttgaaaatgaagctgcatgtaatttgtacagtaagttgtacaagtaaacaggtaatatacataaaaaattaattgacatactcctcaattatcagttgtccacctttaatttccaatactgtactttcttaacaagcatacaaaatatcaaacttctctttagaaaaagtgccgttctttgacatcctttacacaaaaacagtctgagcctgtggcatgttaatgcagttgagaggcaaagcatacgaacttttacaaattctaccttccataaaaagcctcccgaaaaggagattacacgccactataaaaatatcaacctcttgtggtagctgcattagagaaccaaggcttgaagactattttcatatagcatagaaaaaccactatgagagcatattaactgcattggtggcttgggagtgtactgtgccacaggattatgcatagctactgttaggtaccaagactgttatacagttttaaattgattgtaactgagagcataacagaggtactaccagcccatgcaaaataactaaaaatactgagtcactgtgctgaatacttcattcctggagaaaaccaaaggcagcagtaactaaatcaagccaaacaggtgaccaaactttctcctcaaagatttgtgagcacagtgaagtctgaggtatacctttatccattaaatctgtgtgccattgcaagatattaccatttgagaatatacgccatcacaatggtttaaatcttttgtatattagtcattcatatattcttatctacccagtctcttgatttttgaaaagatttcacctacagtagaatattacagaaacaaaatataaatgcatgtctttctaaatgaaacttacatagactaaaagtagagaatatttttaaacaaatatacaatgtgcaggcagacaaagcaggaaaacggccattcaaatgtataataaaaaactaaaaattgactatctccagaaaactatgaagcgcctcaactaaaaggaatgcataatgaaattctaatctaatacaggtcaaaaatgtaaaaaggttataaaccttaacaggaaaaataaaacaacttttactggccattcctgttgaaatgagaatcataaagtaacagaaaagtggctacaaacccacttagagcaccaaacagagagaaaataaaagtccattttcatctctgttattatcataaaatcctgtgtgactacaggtcaaactgctggtggcagaaacagaattctttataaactgcagatgtcctgtacataaaaaatttcactggagttgcactagttctaaagactcttctgttttagcctacctactatatgtattcgatctgagatagataaagtctctttctgtaacccttaattattattgggcaccaaagataagaaaagcaagacggggtacaaaaatgcaaaatttcaacagtaatggcaatgtttttgtcttagtccaaaagggtcctgcattctctcccccttcagtgatttgacaagtctttgtacttaatctgggggcagcaaatcatgcaagcgaaatctgtctctgatgtgtggtcgaacatcttcattctgcgtggaaaaaagacaatttttaaaaaggcataaaatttcaaagatat

SEQ ID NO: 262 - DNA, 11871 bp, Homo Sapiens
agactaggggtgaggctgctgcgaggaagacccggtcagctgtcccttcccccatcggtcctcttaggggaagtggagatgtgggcctcggagctgcgtggcccgggctgtgcggattccctaaacgccgcacttgcgcacagccccttacgtaaccgtcagtgccggggattccctggagggggtcattctattcaaccattatacacaccccgggctcctgccgccgcgccgccgccgcctcacaaaatggcggcgcccatagaggagaccgcggccgcctccccggccccattttgtgggaggcgagagatctgtcaacatggaaaacctctgctgaggatgcatccgagtttggaaaccccacttaagggatggagcctgggggatcacattaaacggaaaatgccaacgacttctaccacctctacgcgtttttagtttttcattttctcgaaggaagcgccagaagcctgtggagtaattgtaactagagggagaacggaaagctgaggtgactgctccggggacttggcgcggcgccttggtggctttggttgctcttccacgctcccggcagctgaccagaatctcttggagggtctcctgggccacctcggccgcgccagtcgtgcagtgagacttctgtagttttaaaatgccacagtccacggcccggtcggcaccgctcgcctgaatcgtgggctttgggaaccttggaggctgctgctccaggaactcgcggtcggccgggagccggggagcttcgttgctgggagcgggcggtattcgcggactccggcggccctggcgggtcgcggccgggatccgagccggggatgacgatgctgatggagctgatggggcaagagtgggaacggaggcacgtacactgaaatttaagtcatccaagttgggacttaagatagcaggttaatattgtctcaggcgagacttagaacgtcttttctggtatcccagtctgcagtgggcaaatctattgtctttatttctcatttaagggcagaatggagggatgacatatttttacttttcaagaggcggttgccacttttaagtcactgttgtgtgtgtgtgtgtacatacacaaacatacgatagtgtgttttcagagcaagtatcaaaggctaaagacttggagtgatactagtgtttaaaagcctttttaaaaaaattaagatgtgatgagaaactggagaattgacttttaaaaatttcttttctgtagaagaggctatcttcaaaatggagtcctaaagtatatctgatggatagaatttaaattcttaacactgtatataccctgtggtcaaaagcatcaacgtaaaacttgatgtttatcagattacttatgtttcaattttcctgtggttagaaaaattaagacagaagtaagctattaacggtatttgcttgtaagagtaacgttaaaggtttaaggaaaggtttgttgaaatcgatatgcatcacacgaatcatttattttcaatgttgttttccagttgcagcaatcatttgtgtttacatgactttgaaaaagggtttagtttatgttgattttgaccctcttatttaatctctagtgcagaagtgcagctttctgcaggctgcgcctcaatcgctaagttccactctccatcctctgccgcgctactcctggcatgtggatcaccaagatacaatttctggtcctgtctgttcttattgatgtcctttacagttaataaatttgattgccactaatcagtctgtatctcttgcaaaaacaccacatttagcatccaagtagagtcagagtatgttttttatgagattgtactaaagtaaccttctattacatttcttattaccatattgcatttcctatagtgggcagcatagagcaggtggatcctgacaaagtaatgttagagatgtgctgacagctttacaatagatattctccaactaatttgacaagatataaaataaaatgtagttcgtagttttcaagcattaatggaaagtgttcctattaaaaaattaccaataacagtggaaattgttgcaatccaatttgtatagtttactgttttgatgacaaagcgcttatgatgggaaaaatgtagtgttgcttttgtaactgcaaacgctgcacgccgtaattagaggtttatgttattttatttgaatttttcattcttaccatcagttttcatattagtcaggaaattgtgataaattaaaaattccctcattcaactaaaccttaaaaaactgtacccagtttcaaatcaagcattatcaggtgtatgattacaacagctgaaataaattgaggaattggtatgccaactcagtggagaaattttgggattttaggtcactctaagatttaaaaaaatagtttgattcgttaaacaaggctattgaagttaaattgatatttccttaaagatgattttagagaaaaattccttggcgagcttcgagaatgcgttcatggcttctgttgcctgtacctactgctatacttttttatgtggactaatttgtcttatttgaaaatttgattacaatatcaaatcctagatgaagcccttccattcttagggtgattctaaggagtactgataactaagctcttaaaaggcgaggaaatagtttattctactgcagattagggtaatcttaatacagacactctgatggtaattctaagcagtgttgataactaagcttttaaaagataaggaaatagtttattctacttcagagtagggtaattttaatgccctgaatatactctgaatcttttatagatagatttctggatgatttggcccaaaaaatctgataagctttggggaattttttaatttttttttctcttaaagagaaatcagaaatgtgggatttttttaaaaatttattttcagtagatattggagattatgctttgtacattaaatccagtttgatttttaagtgataattttcaattaaagactttttaataagacaactaaaaaattaaattttagtcaattacaataatattttttggagaagcattcccagatgtgcttttgacggggagttgatttcattagttgtttgggttgtttaatccagaatttttaaaactgttatgggtttaatttgctacatttgtccattcttattcatttcatctgttttgatcactgaaaagttgtctaaaaactgtgctcattatacacagtttatagtattttaatactttgtttatagtatttaatagcttctgaaaactttaagagaacatactaaaccaaggaactatttattaatggtaatctatatttagtaataaatatatttgtaacttactaaatgtaagtttactaaatgtagattactaaatcactgagtaaatatttcttgaatatttggacaagagatggggggagggagaatgacttgaccctcaagaaacttaactgctacctttaaaaggttataatgaagctgggcacagtggtacacacctgtagtcccagctactcaggaggctgaggcaggaggaccccttgagccgaggagttcgaggctctgtctcttaaaacaaaaaaagttataaaaatattcagactggagggttcctaacttttaatacttaagcagggtctttaccacagagttaaatttaaaattctgtttagaatggtaacaaatttaattatgtacaaaacagcatcactttagtgttaggatcagtgttactcaaagtgttgtaatgttaataacaagcatttaaatcacattgtttgaaaactgggatctacaaaaaatatgattccaataattaactttttaattatgggaaaggcaagggaatgttcagtgaatgtaaaaaaaatatactactgagcaaacaaattgttttaatgaattttgattttctgttttaattttttggtacattgactcttcttgacatggcactttgctattaattaaaaaaaattaaaccccaaagacaaattaattctgtatttaatgcagatttaattcttgactagctgtaatgcttaaggagttggcagtcttgttggcaaaacaataaaataggaattaagctgaaatgtaaaattgtgtaataattaggtttcattaaagtatatatagtttccttaataactacatgagtcagtagtgttgacttaataataagttatttagcttttgcttttctctgaaaacatatcaaactcttcatatatagcatcgaaatagatattcaacctgagccactgtaaattgttgaagcttattgctatacattaagggaaattctatccaacagttcagtgtaaacaattttttaaaggtgctatgattctttaacatgatttgtagtatgtagaactcaagtattctagaataatctttgcatgataatgtatgagaaacatttataaacagtccttcaggtgtacaaaataactgacataatattttgcatttaactacactgcctccaagtattttaaacaaagatgaaatttttagagtattgtgctatatttttataactgaatttccctcttattaacaatactcataacatttagccattaatgattactgatagcttaaataagagtgtagtttctgtttctaatgtctattaattttaaccccatttaaagatatttcctacttatcatactcaaagttaatcagaagttaaataaatgatggtccttctggttctctggaaactgaaaagaagcttctgtttctttagggtatgcaggaattttttttcttcccagtgagctgaatccatcctttacgctgctatttgctaacctcagttgtttttctgctccattaaagttgaggccaccaaaaatagtagtaatatcacaactacaaaaccctgggtggatttgtacccattgcacatacacttcttgctgccaattcctaagagacttttgaaataatagtatattcccagctggacaatatattctacttgtggcctatgtatagtgttcaacaagtccaggagccctatgaaacggaatgtgtttactgcatttttctagggagaagttctcagcaggcacgggcatcttaaagaccctgtgatgcccaaaaggttaaagctctatttgctaatgacagatagtaagtttggaggattgcttcaggtgcagcattttattttgtgggttgttggcctgtagggaaaaacattttgaaattgtagttaaggaataccacttcagttcatcaaattaaaaaaattatggcaaataagcaaaaatctatttctaaagaactacatacaatatattcttacagaaaattttagattaaatgcatgtaactgtttttttggtttgccatgtattgaaaatggatggatgggggattacattagttgatgtatttatttatttatttttgaggcggagtctcactctgttgcccaggctggggtgcagtagcgcagtctcggctcgcaacctctgcaccctaggctcaagcaacactcgcacctccacctcctgaatagctaggactacaggtgcacgcaccataccacacctggctaatttttgtatttttttatagagacaggggtcttgctatgctgcccaggctggtcttaaactcctgagctcaagcaatctgcatgcccaagccattggcccatcttggccttctaaagtgctgggattacaggcgtgagtcaccatggtcagcccatattaatttaaagtaggcttcaaatataattattcactaattgggaatgcctggggatgtatatgaatgtattaccgttttgtgagtagtagtgtgtgcttgtgttcatggatggcattcatcagaatgtttgcaatggtgtagccaggttacactgccatcttcctgttctcctttgtgcttacttgctctgcctgtatttgctgcagtttctagcgagtgtatgtaggtgttggcccagaacttgcttttgtagagatcatacattgtgctaatttatcccaaatcagtttttgtgtattatctgtgggcccaatgtgtaatttgaactttaaggatactacttcagactgcagtgtagcataacctttaaaaaaaaaaatgctagttttgccctaatctgtgcatattccagttgttcaatgggtattagtaatacatgaattacttctgtgccctttttggtgtagagtctcatatgaataattactgttatttaaaacccacgactccatgcattgttttggtgggagagggtagtttcccatcatgttttacatatatgttagcattcagattttcctttttagcccactccctactgaactgaagggaaagggcgtatttgagagaaaacatatgctttactcaggttccaataattaagccaatgcacttgatttaagttatacatttagctcattcttaaagtgtaataaagactttaagcctcctggctcccaaatcagtgctttttctactaaacattctttctgtcttgctaaaaaaatccaattttcagaatcaagttagttgctaagcaaatatgcataaaaccatacatttatctgaattgtttctaatttaaggagtagtatataaaagtttcaacagaaatcattgattagtaaaagtgatggaaaatcagcaaaataaaaatagaattagagtaggctaaaaggcccttctttagggtaatcggaaaactgagttcaaatatagggtctgggacttctcaggtgatattttatcttaaattagaatctgcatgaggtagggtggggccactcatgcctataatctcagcactttgagaggccgaggcaggagcgtcccttgagaccaggagttcgagaccagcctgagcaacatagcaagaccttctctctatttttaaaaaactaaaattggatttaaataaagaatctgcatgaactttcttgtcacttattcttacatattatttgccagtgtgcgatacttaataaccaagtaagacacttgaaatgagtcttttaaggctacaacttaggtaacattttataaatattactgctacatacataatacagtaactttttttagcctcacaataataccttgtacaatttataactgctaaagggcctatagaaggctacccacctatgtaaaaaaaaaaaaaaaaaaaaaaaggtcctagctctgtctggtgtagcttggcaaattatttttgatatgaattgccaggaatataggggtatcattccttgctgataagagcacatacccttcctttgctggctaagctatgtgattctgtaggaccttagtgtcatggccatcctttcagtagtaagcagatttagagaagttgtcccattgttaccttatttcaatagtttttggtctttctatattgtgcataacctcacttaatcagattgttatgactgtttccccccaggaagtataggaagataaaaaaaaaaaaaagccaggccagatatatatgactgaacgtgagctcagcaaatgatataggtgtcttaaacatactttcttttttttttttttaaagggaggggttctggctctgtcacccaggctggagtccagtggctcaatcatggctcactgcagccttgaccttcccaggctcaagcgatcctcctgcctcagccttctgagtagctgagactacaggcatgcagccccacacccagttaatttttttatttttatttttgtggagacaccgtcttgctgtgttgcctaggctggtcttgaactcctgagctcaaccagtcctctcaccttggcctcccaaaatgctgggattacaagcatgagccagggcacttggtccatattttgtttcttaaagtcacaagttaaagctggaggtttcacccagaatcaaagtgccaggtagcattttagtccagcctaggataagcagctgagtttccatgaacacagtacaagaattcagggatatcacttgctaaatgtaaaccagttacctccgtaatttcccaaaaattttattgtgacaaacgagtgccatactctgaacattaaaggcttttacctccagctgtccaaacattgtgcatgttattcgggtagaggcactggtatggtaggagtttctcctttagtgtcttgtaattgacaacagatccagcatttatggaatgtattgttattgtaacttttgagtttccatagccaagaacgtaagagtaataactaggtatagtccattatttttagtaaagttagttttagttagcctttgatggtagacacttctcaggttataattcagactcaataacaaagccagaaagttcaggaagggtagggtagtgctgtggtctgaatgttgaaatcctaactatcaaggcattaggaaatggaacctctaaaaggtgattagatcatgagggcagaaccctaatgaattagtacccttataaaagagaccccagagaactggtttgccccttctgccttgtgaggttacagcaaaaagaccatcatataggaagcaggacctcaccagacaccaaatctgccaacgccttaatcttcgacttcccagactccagaactgagagatataaatttattaagtttataagctacccagtctttggtattttgttataacagcccaaactaaggtaacaagaagcaatcctcacagtgcttgcttaatgtcatgcacctgtcattctagtggtgctcatttgccagtcttttttttttatgaaagaaattagcagtcctgctttctcttgttttgagtgacaggtctcaggtaaggatttattttccagaaagaaagtgactaaatagattccctccagaaagattttcagatcagtagatctgccttaaactaatgtagtctttggacccagttcagaagtggccaaggccaatcctcaatgcatgaaagtaaaagttagactgtatttaagggagacaaattactagttaggaaccatcgaatgaggtcagaggcaagaccttactaacagatgggcaagttaaatgctatcttctgaaaattttagttgcttcatgatggactcatttggagcatatctggaaagttttttggacatgtctaaaacacggggttgaattttccttacaagccagggttaggacaggaggtcgacctgctgtctagatagtctcagcactaccagaagctatttgtaagctgtactactagtctggtgactcaagtaggaagtgtccaggaacctttcttctagacactgcgagaaaccaaagattagtaataagaaattgtttgatagacaagatgaacatcttaaagcatagattcaagacagaggacctttgtacctgacaagtactcaggaagacttgaaaagggcccccgcaggtgagtttcaggctctgtcttccactcatgaacctgcaaaatccaatccttgctgctgaagatttcttaagaaaaatgaacagtgtacctggccacttcagtgtctttagaatcccatcttggtgttatactttgcctattgattctagatggagaggtatcaaatgctttacaaaatctcaaggagttataaactacttttacaatctgtgttataaagtgtattccctggttattataaataggcaaaatgctattccaaatctaacaataaagacttttgccaatactcattgtttcagctttcaaatatgttaagtatgttttctacccatcctacaaaagtatacataatcactaaaacttatgaacaacacatatatgatattaacctgaatatttacagagagctccccggagggatgattttatttattatgttaattctctatttgtttagtttgtgacctgatcttaatagtaacaagtgaatgagttagcagaggaaatcagttaataaatataagagcaacaatgcctgtgaagaagtcaccacatgggccaggcacagtggctcatgcctacgtctgtataatcctagcactttggtaggctcaggtgggaagatcccttgaacccaggagtttgagaccagcctgagcaacatagcaagaccttatctctactaagaataaaattaaaaataaaaacatgaagaaatcaccacagccttagtttagtaacgataacagtattttgtaatatccacagcagaggagactaaggactagatattttagctcctccagaagcgaggaatgtttattgtttttacaattgtctacaatcaagaactacccaaaagcttgaggagcatcagtcatttatgacttttcagaagttaaagtatcatctcaggtgaggacagcactttctgccacctaggaagaatatggagaaagcaaaattttttactactttgtcttaagaacagactgcatgtctagaagccaatttggtttttttctccaagctgccagttccctcttcaatattatacagtgttttgttttggtcatagcaccaattactaatttaaatgagatttaacgaaactctttcaataataaataatacataacaaaatacgtgtgtgaccatatatttgcaagaaaggggttgtgccatgaatctttttttctcagtttaacaaataaatttgcaaaggcaactttcaggaatcagaatgttattttaaatattattaacaagacaacaaattattcagacaactaatcagaattatagactttaaacttacgttatttttcacagaatatagcaacactgaaatccaggcgtccaggaagactattttacttgaaataatatttttaaacccagttttatgatatagaatagaattctatttgcttttctgcagctttagggaagaggggacattttccccttttgatattgctggttttttttttttattttaagaaaacagcaattagaagtgtctaaatatcagatttccattagctagcatcaagagagaagagtaggtacaaacttaaaattcagaaaaggacagaaagggccaggcatactggctcatccctgtaatcccaaacttggggaggctgaggtaggaggattgcttgaggccaggagttcaagaccagcctgagtgacgaagcaagatcccgatctctacggaaagatcagccattcctggtggctcgcagctgtagtcccagctactcagtagactgaggcgggaggattgcttgagcccaggagttcagggctacagtgagctgtgatggcaccactgcactccagcttggatgacacagcaaggccctgtatcagaaaataaagagaaaaaggacagaaagataatgctaacaaatggaatatggagcatataatgtcttgcctctacatgtaattaagaatagaagtaaaatttatctcagattaagattttttttgaaacaatctcaacagtctatattcagataagacagattttaataaaattatatatgtcagtcatctgtttcaaaaatttcagggctatttttagtctttatcaagcataacttacagttatagatagttgtggttttagaagctattctatttgttattccctctgtatcccttaatcccatgcctcaaattatttcagaatactttcccaataaatgtactaacttgttcttttgtattccaaaaatgtgaaaggtgttaaaagtttgtgttttcagtgcctttggaaacacttaaaaacgcatctttgaaattgtgtgtccaaaccagtatttcccaaaatgtgccatgatctgtttataggtgttgagttaaatatatgtatacacacatatattatatacacatatata

SEQ ID NO: 263 - DNA, 1607 bp, Homo Sapiens
atgtttcactgttctcagaaattaagtcctatactgcctgttgtccaatgtctgaaaacagttgtcttgtgttttgcctggttttctagttgttcctctatcatagatggaatccataataaatatgatgccaatgccaaaatctgctactatattactctttaaagcagagactgtataggaagaggaaaaaagaaatcagtgtaaccgtgggggcaaggcaggaagcattctgtttatgtaacacagacgtggcattctttactttctaacttaggacatttgtgatttgaagaagagacacctgaattttcaatatgttagtctttgttggaataattggctcttctcattctttagtcatcaaataatacttattaaataccaactaagtgctttgtgccctgctaggcattacttctctttattctacttcttaacagttggaatatgccaaacaaatgaaataaaaatagttttcctattctagttacaggttggattcttggatttatctcccaagctttgacattcagaaactgaaagtggaatatagtgtattctcagatgtaaagttgatctcatttcctcactggccatctgtttatttgcgtctaagaataacaaaactttcatagtcatatctgtattttttaattactaaaaataatgaatggactgaaccatgcttgccccacttttgaaacaattccttctatagactgttgcagtaggaagctaatacccctgattaagaataaagaccagacctacataagcatatgttgtattggtgtatctgaagtcatgaggatgtgattaatggtccttaagagttttaatttggcgtgtcttaatgcctaaatctcacttaagcttggttgcaaagcctggcaaatcagtcttctgtacatggcaagctaagatgtggcaccatcttcttgaggtttcatatcctaaacctgtctgtccttacaggttaaattcaaaggatagggccaagcttgatttgctgtagtcatagtgaatcatcacagatccattcttagtgcagaagagttaaataattccttggccaagagcatggtgccttccccagaccaatttctaacagtgtcctctgttagatctttaagttaataaattcttttattagatttttgggtcagaaaaacagactatgcttgtactcaggagcccagaaatacataatataattgactaattcctgtctttgaggtcttaacgtggtttcatgtgccttttgatttgtttttacatgtggatcattttcccttaacactttaatatgatacaatttttgtctatcgtttttcttaaataggagggagaaaattttttttagtaggaaaatatctggtggtaagtggcatctttttattccatgtgggatgcagaagtttctcccaaaaactgaagtgacctgctttttgcagataggacccctgtatttctcccatattactttatagctggtagatggtagggctgtacacagcaaatgggtttgaatgcatgatggttttctggtggagctgagataattagtattatgaagccacgcttctgattgtgagaatgagaac

SEQ ID NO: 264 - DNA, 1976 bp, Homo Sapiens
aataaaattgtgtttttgtttccagtgtttattgttagtgtatagaaatgcaattgatttttaaaaatgtatatcttgtattttgtgaccttgcggagctcactttttaattttaggagattttttctttgcatgatccataggattttctatttcaataataatgccaactgcacacagcacagtttatccctttttttctcaatttacatgccattatttctttttcttgttttattgcactggctagaactttgagcactatgttgaataagagtggtaacagcagatagatgttgttgccttgttcctgattttacagagcaagcattcaatctttcattctttataattttagctgtgatatttttgtagatgctgtttatcaagtagagaaagttattctcaatttttatttttctgagagtttttaaaattataaatgcatgttgaatttttcaaaaatctttttcttcatagagtatatgatcatatgctctttcttctttagggtgctcatttgatgggttatattaatttattttcaaatattaaagtagtcttaaaccacttggtcatgatgtataataaattctatttactaatattttgttaaagatttttgcatctatattcttgagggatattggtctgaagctttcttttgttttgtttggtactgtctttggttttgatatcaaggtaatattaacttcatacaatgaattaagaagtgttctgttttcttcccttcaagagattgtgtagaattggtgttaaattttctttaaaagtttggtagaattctccagagaaattatttggcttggagattaatttgggatagagatgagtttttagcttatgaattcaatttacttaatatttaaatatctgttcaaattttctatgtcatattggataaattgtggtagttttctgtttttttttttcctgaggaatagtaaaatttcttctaagttattaaatttagttatgcagagatgtttgtagtattcacttactatctttttgatgtcttcaggatctgttttattcctgatgttggcaattagaataatctttttccttttttgtcagtcttgccagaagtttgtcaatcttattgatcattcaaagaaacagcttttcgtttctattttttttttgttttcatttccattgcttttctgctcttatctttattattgctttccttgtgcttactttatttagatttacactggtcttctttttatagattcttgaggagcaagcttgaattactgatttgaagcattgtctctaccctaatctaagtgctatctatacatctggtgctataaatttccctcttagtcctgcctacatttgtcctcaaaatttcggtatggtgtgtttttattttcattcagttgaatatatttctcggatttttcttaaatcttcttttttggccaatgagttatttggaattgtgttgttcagttttcaagtctttgaggatttttctttctttctattattgatttatagtttgatttccttgttatcagaaaacatactcttcatggtttcaattcatatggcccagtatatggtctttcatggcatacattttatgggtgcttaaaaagaatgtatattcttctgttgttgtgtcctataaaagtctattagattcatttagttaagagtgttttaatcttctataatcttgttgattttctgtctagttgttctatcagttgttggataggggtgttgaaatttccaactttagtcgtggagttgtatagttttccttttagtgatattgcttttcatttcacatcttttgcatcttggttgtttgatacgtatacttttataattgctatgtcttcttggtagattgacccttttgtcattatatggtgtcttactctaattcttttgttttctctgttctatttaatctgatactataatagaag

SEQ ID NO: 265 - DNA, 705 bp, Homo Sapiens
gcagaaaaacacaaaaaagaattgacatgtcccatttaacttaaactattcaaagatccctgcttgacgccctgcaaacacaacttctgcttcacctgcctcaggcagttggagagggagaactagcatgtcctttcacttgttcccagtgtcttgacatctcttggatccagaggatctagaccaatatggccctggggaagctagtggctgagatcacagtgatgacacttgtgacacttgtgctgagcatgttctgcatggagttctatgaaaagatgagtctgaatgtggccacaagtaataacctcctcatattttctaatgacctgtggagcctcttatggagatatgtccagatgagaccaccagagaatgccaagacattaatctctgttcctcctgtcctagggtcctcgtgcttcacctctggctgacattattaggagttgaaagtgggagaaataaaaagatggattgcgggtgtttgcagagaatctgcatttcatgaagaacctttcctagtatcatcagatctctggttctgagtggtgagcctcaagagcgtatgtgaagtcactgctagcacagaaactaggacggttctccatgtgagcccaaacttagaagtggggattttcctggactgtgacctgaaaaccatttcatttttcaacacgtctgatagtttccatttattcacct

SEQ ID NO: 266 - DNA, 3909 bp, Homo Sapiens
acagacaaacaggtactggcaagatagactatgctgatggagtaaccaagtttgtgagtatatgaaaataacgagggatgacatatgggaatattacacaatgataaagttggaatgtcacaatgaataaacaaaatctgattcagagactatgccaagccaggtgataagatcttgaagaaccaagatccagagagaagtgaaaggaatcagtgttccatggaacggaagtgcatcaggaaaggaaagagaaaacagattcagactaaagcacgtgcctgacaatgtgtctgctgcattgcatgaggcagccttgctgcagccaaccatagtggggtccaattaagaggcttaattgaagaattccaagttagcagactgtcctggcactcagaggatattgtgcctggtaatgatagtgttgaattggacagaaagaatattcacaaaggtggctgtccatatccatgggttctgtatccatagatgcagaattcttgaatacagagggttgactgggagatctgacatctgcaggttttggtatccgtggaaggttctgcaaccaatctctggtggatgtgagaggtgattgtacttaagcttcaagaaaggcctcctctgctaaaaatgctctctgattagccattcactgcttcctgaactatgaagacatcttctaggaatactcaggatcttctgctatgtggctttaatttattttaagattaattcctcattaccttcttacacaaagccaccattagcatatcaagcacagctgtacaaatttttaaaaggccaaaagatgtatctgccaattctaggaggatataaacctgaaggcacaaatctgggctggagcacatggtttcccttgtgagaagaaaaagtctccttcctctgaatggacacaccttgcacaccagggcacaaggtttgtctagaagagcacagctgaacatcataaagtgcagaaccacacacctggcatccttgtccctacacaagtttagacggggtttcaccggttagccaggatggtctcgatctcctgatctcgtgatccgcctgcctcggcctcccaaagtgctgagattacagacatgagccaccacgcccggccaccttggatcctttaaaagtaatgtatggtttaaggaggaaatttggttgaatacgtttaaggaaatattaatccaacctgtttaataaacattacctgtgaacattgcattttgaaactgttcaaatataccaaatgattcatattaattagaacaaaaagtccaaaaagagaaaactacaaattctattacactatttaaaatagcatacaaaaacaattttgagcaaaataatgtaaaagtagaaactgataaattaaaaaatagaaacgtagaattaattcaatttaatccctgtatcattggatacacacacagacatcaaagagagagagaacatgaaatatattagaacattaggtatgagaagaaggtatatatccaaaattaaatataaatttaactgctatctgggttattattttaaaatctcacttaaatgaatctatatctgagcagatacaaattatttacatttttctaaagggttaactgataaattctcaaaacatttcaactatcagaaaaatcatcatactgtgtaaacaactgcagaaaacacaaaataataaattctcatgttttcaaactaacaaaattcttctcttaatgatttccaaaacacataaaaagaaaatgacagatcattcctaatatttattcaaattttttaaaaaaattaacgatataatccagcagtatgttatagaaataataagtaaaattagttctaatatgacaaaggtgatttaatatttgagaatatgtaatatgaagcaagtcattccaaatgaaaatttcgtaaacataattttatttttgtaatggcattttagaagatttcaattattctgtaattaaaaatttagctattttagggtaagagagattccatgaatatagtgaatagtaaataacctacatcattgttcattttcattcaaattaataataaaatgaccttactttctttgaccagaaacattcataattgttctggcaattctgatcagtgaatgatgaaacagaattagagttctgtttctaattatttcaaggaaaagggtgaggttgaagatatcctatctaaaactttatgtaatatatataatatatatagatgatatatagatatctattatatctaatggatatacagacattacataagccttaaagagtcagtcaatacttgttatttatataagttcagtatttttttgactataaatactcaaaataaattatgtcatcaaccaaagatgaaaaataatttcatttacaattgctcctccaaaaagtcacaaaaacgacatgggaataattatagaaaaaaactaatagtataataataataaattacaaaaatttttagatttatcaattaaatttaaatgtatggataatcacagtttgaccctagattttaaaaaatcaattctttctaaacattttattagtttatacaaaataaattaaaactccatggtactgattttgtctcttaccaaaatttttgccaagttatctggaaaaattaatttccaggaataattatgaaaaaataaagtccattgcccaaaatactgtactgaggaaaagattatttcttataaacagtcatattaagtttttcttctcatcttgtatctcaaaataaatttcaggttgattaaagtatcaaagttataaaatgaaaatattaatggaaaactgaataaaatacaggtcaatattgaactgatttgtggataggaaataaaatgaaatgattgaaaatataacacaaatttaatatattgctaaataaaaataaatggtactgaagaacattactaaaattaaatgtaaatgaagaactaggaacactataagcaatgcaactaaaaattggtatatttaatctaatctattaaaagcattctagtaacagaccgtggatgtgagaagacaacacaaggaatatgaccagaaaataaaaattaaacatatttaattttaattataaatgctattaaaatcaaattgatttattaacagtaattcacaaacattcaggaacgataaaaataataatacttaataagctaaacagggaatttcacttttaatagaagagtaaatgaagacaatctctctgtaaagcaattcattatcttaaaatattattctttgaaatagtaatttttagaatcagttcctagaaataatcagtgacacacagttttgtatataggataaatatattcatcacaatatgattgacggcaaaataactgagaaacaaatgaaatgtgaactatgataattgaattatagccctaaaatgaatactaatcattaaaatgacattttaaacttttcggaagaatcgtttaattattttatacaaactaatatgtcaacattattttaagaagcaaggaaaagagtcaaataaaataaccaaaatatatctctgtccggaaatagcacatttggagaacatcattattggtctcttagtatatagatttatacagattctttgagttcattatgtttgagaatatttttgtcttgctgttataagtaagccaacaaaagctgtttatagtattcttgtgttataatatattctccttggatctacagataattcgttcacttgtgtctgcaatttgttactaaaaaaatctatggccaatatgactaagcctacctctcatctccatgagtgacttgatattttctgcatggaccctgaagaatttttcatttttcaacttcaatagtataatcg

SEQ ID NO: 267 - DNA, 2477 bp, Homo Sapiens
agacaaggaatctggagttcaatgacgggagacgcacagggcagagcgaaagacttttgcattctggtaaccaactgatcctacccggacccatgatgcataactcagctggtcctgtggcgcacacccagaggccgactcaatgcatgaagactgttttccacacccctatgatttcatccccaaccaagcagcagcatccattccctagccccctgcccaccaaattatccataaaaactctggcttctgagttctcagcaaaactgattttagtaataactccagttcttccacttggctggccttagttaattaaacttattctttactatagtaccgtgttcccagtgaattggttttgtctgtgtagcaggcaggacaacccatcaggcaatcacacagttactctgcagtgcttctttttattttgcttttcaaacaaatttcaaatattattagattgaaataaactatacaaatagcttttcctcacaaaaatgcaatattttgtgtattattcctaggtaaactacaaaacttttatttttggaagtttttttttgcaaaaataaatcaagatgcttatgcatataaatcaagatgaggcaatgaaaaaaaaccaaagaataaccaaagagagacaaatcagttgtcagtgtctgtgaactcatgttctgtcttgcttgtaaaacagagggttcatgtgtggtccgctaaaaagctgatggcccagttagggtagagatacaacaaaggggtgcaagccccagcaacacatgtggggcaacagtgaggcatccctccattcaaactgtaactgtaactccttcctttcttccttcctccctccctcccccttccccctccatccctccacacttcccccttccctttcgcctcccctcccctcccctccactcccctcccctccttcctttctctttctttattttttttttaagagatggggtcccactatattgaccaggctggtctgtaactccgggcctcaagggatcttcccaactccacctctcaaagtgctggattacagcctgagccactggacctggctactgtccattctttgatgaagacaaagtttaccctgaaatcctgttcaggtgagcacacagtttctatcactttctggtaacttcctaaactattccttatggaatagttttaatagtgcacttaaaacacaatgtatttgagttggaagcttcgttcttttgtataaatttttttctccctccctcacttcctcaacatttatttcttccaaaagctgataactcaaatcctggtcattagattggtagattataaatgtaattcccaaaatgactttaatcccttcatcacgccactggcgggcatcgcacagaaatgaaacttgacactttgaataccatcttcttggagacagagaagttttcaaagcatgcaagttcaggctgtgattattcaacatgtaggacatagatggctaatggatttggtgggaggcctgtagccaaatttacctttagtgactaagtggcctaatgcaaatcatagttttacttcctaatagtgaaaaacaaagcatcttaaaatattatctcaggtattgtcagtaatttccgagttacttttggaggctctgactcatttgtatagagtttgctttatgtgtctatcattaaatgcaaaccatgttttgtattaagagttatgttaaccaagtgacatgacctgacctctggtcagtgtttttttgggcatattttgtgatgcttacatccatctgtgctcactctcagtctccatcctgggaacacaggacctgaaatgatatgtaaacattaagaaagagacatagatgtcaggcagatagcgagcatcataaattgtgaacagatagaagttctttgcctttccgtgtgtatttccacttgatcttccagcaatggagctccatagaagtgcgtctagattggtgagtcactctgtacatgtcagcagtgtgttactctgacatgttgagctggagatgtcctgtgtcttagtataagtactttgaggtgctgatctgagaaaatctaagtttctgaataatgtgctctaccattgggacactgtttctaataatgtcaaaggctagttgagattctaggttatcctggtaatccctgaaaaacttcccagaaggtttcatttgaacatcatgtttagtggccacattagtggcttcctcaaaccaaaaagtataataaaattcaatattttttaccacttcatttgtgaatgtgataactgtagttaagctgctgcctgtcaagaagatgccagaagtttgccactggaattttccccccaaaggctcttgttaagatagggcattttttgaggcgggtggatcatgaggtcaagagattgagaccatcctagccaacatggtgaaacccaatctctactaaaaatacaaa

SEQ ID NO: 268 - DNA, 3744 bp, Homo Sapiens
gtcacatgttgtcaaacatggctacctacaccaccatcatagaagagatggaagtgagttcttctgcagcaccccagagccggcctgcagtcaggaaggcctccccagaggcatccacgaagctgcctgccaacctgggtgccccaggcatgggcccctctaagcctgccctaggaggagaacagtttgtgtgacacagggggcggaggctgggtctgaatctttttttttttttttttgaaacagagttcgctgtgtcgcccaggctggagtgcagtggtgcaatctcacctcactgcaacctccgcctcccgagttcaagcgattctcctgccttagcctctctagtagctgggattgcaggtgtgcaccatcacgcctggctaatttttgtattttttagcagagacggggtttctccatattgggcaggctggtctgaactcctgacctcaggtgattcgcccacctcagcctctcaaaatgctgggattacaagcgtgagccaccgcgcccagctgggtctgaatctttaacagttcccctccgctcctggagcccctcccacagccagcccttgctcaccagcgggggaaccaacagccccttcctcaccctcctgggggttggggtctctctccacaataccagtgccgggacgcatccctcgtcttctctgctcctttccgttgtccggaggcctaggcccagtcatccagccagcctccacccagctcctctccctgcacacaaagactgaccccatcaagctgcacttcctgaaacacacccacaaaccagaaactcagcctcccctttgcccgcaggatgcccatgggcaaaactgtcaccaagagaagagaggaggggcccaaaccggctctgtctctgtggagaaagagcctgcctagggctggaccctggttgtgtggcttcaggtactgtaaaagggattgagttcaaactcctgacctcaggtgatccatccgccccagcctcccaaagtgctgggattacaggcgtggaccaacctggtgaaactccatctctactaaaaatacaaaaattagccaggcatggtggcgggtgcctgtaatccgagctactcaggaggcagaggcaggagaactgctgaacctgggaggcagaggttgcagtgagccgagatcgcgccattgcactccagcctgggcaacaagagcgagactccatctcaaagggcaggacccaatctcggaggagctgcaaatctcggcatgctcgacaaattccagcagggcatgaatcatgggctcctgcctcgtgagggccctcctctgccagtggggctggtggagctctggggctcgcctgctgcccagcttggaggcagagccgggcctgacggagtcctccctgcacattccagaggagctcaagccagctttccccccgggatctcacctgacactgcaaggcagagtgccccacgaagagagggtttccttcgcttgcctttttgccctggcaagactggcaaccaggagtccgtgagcaccggtgcctcctcaggggtggcacctctttctgggaagccacacgggtctcagacagctgtgcccttcctgctgccctccagctgccagaaggccatagttcccatgtgccctggaatgtgggactctctttgagacgtccacttggggacctgtcctcaggccctggggtcagcacacaggtgggcagtttctttgggctcagggtcaggctcctactggtgggtgaaggcagccctttgtctcatgtcttgccccagcgttcctgagtagcaggctccctcccccatcctcttggcagctgtccctccctgctccctcccggtgaccacagccaagccaagaggcctgtgctctgttccccacacgtccatgtagagtggctggacaccggtgttgattgctgtggaggtggctggagggagtggacattccattgtaatgatggcaaaaatagccatgatctttcagccactgctgaaactgctggagtcaggcccttcccaggtatgatttgccctccctgatggtgcatttgtctcccagatgtgcagatgtggaagccgatgtcctggggatcaggggaacctcatgagggaggaggcagggggccaggactggctcctgagctctgcaaccccagtgttgccgtctgtcttttaatctttaaaaagaagatacaatgatataattaggatgcggcaatctcagcactgggaggccaaggcggggcggatcacttgaggtcaggagtttgcgaccagcctggccaacatggtgaaatcccatctctactaaaaatgcaaaaaaattagccgggagtgatctcagctactcaggaggctgaggcaggaggatcgcttgaaccggggaggcggaggttgcagtgagccgagatcgcaccactgcactccagcctgggcaacagggcaagattgtgtctcaaaaaaaacaacaaaaacaaaaccaataataataattagaatgctgacactgtctctagcttttctgggtctctcccattcctgtagaatcgttcttgcccacaatcacctgcccatctctcttgcaccccagaaaagttttgcaagttcaggaagagaaaaaaataatctgacatgtactgtctgtattctcccatgacaataatctctctgtggggggaggggtgtccatgtctaccacggtattgaatgaatattgaatgaatggctgaatgtgcatgaaggaaaggagacagtgggtggttcaagtgtggttgttcttgcttccccattccaatcaggacataagcggggggccagggaggacaaggccaggctggcagagtgtcatcaactcacggctgctgcggtgggtggccctcctgtccagcaacagcatcagggggtgggtgagcgtgttaggaggggacagaaaagtaggggccactggcttcccccacccccaatctgccaatcctacctcagaacagtttttttctttttttgagacggagtctcgctctgtcacccaggctggagtgcagtggcttgatctcagctcactgcaatctctgcctccccggttcaagcaattctcttgcctcaggttcctgagtagctgggactacacgtgcgcaccaccacgcccagctaatttttgtgtttttagtagacatggggtttcaccatgttggccaggttggtctcgaactcctgacctcaggtgatccacctaccttggcctcccaaagtgctgggattacggtcatgagccaccgtgcctggccctcagggcaactttagtgctcctccctatacccagcaggggcagaggaaagtccccagggaaagtcctctttgagccgttgatgacagcatggttagtagtagttacaatgccaaaatataaaaagaataattttaaaaaagattttgtgtgcaattttgcagagggaatgtcttgcccttttttctccactcaaaaggaagggagggtattcaaaagagtccaaaagtggaaacagcccaaatccccactggctgatgagtagataaacaaactgtagtgtatccacagcgtgacacgttactcagccttcaaaaggaaggaagcaccaatttatgccccaatgtgcaggaacagtgaaatgtgatgctgagaaagcagccaggcccaagaggccacacagtgtgtgactccactgacacaaaccacccaggacagg

SEQ ID NO: 269 - DNA, 3503 bp, Homo Sapiens
ggagcggggcggggcctgcgggggcggggccccgggccgggccaggactgatggagcgagcgagaacggactgcgcgtgcgtggctgcctggccggcgctgaggggctgagcgtacgcgggcggcggggtgggccgctatgctgcaactgaagcccagtgatctgacagtatggaagtgctttccttccgctcatccgcggccctgggctgcggcaggggggttgggtgtgtcaggtgaaaagtgctccctcccacccttcagacaggtccccaaaccctgcggcctgcgcggaattcctgcattgtcattgccggcccacccactgttcaggctgagagcggtcccccgcccaaaccggcgcttcgccggcgccaagatagaaatgggtcgcccggctggtaaagaggctgccctgcaaccctgggctggagtattgctgtggtcctggatttctggactttatttgcgttctcaagtggcgaagtgttcctcaacctggacccacatcagaagcaggttctccgagcccctaagcagcggcgtgacaaagtaattgtttaccctggaaatagactgttattttttaaaaattattgtcagggcttgctttaatgttcttaatgtttttgtatgagatcctccatgtgagatttgaaaagatccactatgcgggtcatctaaccggtcactagacattgattccacacttactacgtcgagcacagttgacactgggaatacatggatggacttatactagccctaaaataactccttttctattagaactttactaggtaaaggtatttgaatgtctgaactccatgtttagaaggagtcattggttttaaggctctgtcctagtacacctgtaagagcatttgcttaaaattgcctggcctttgtatgttatctctgtcacttcatatttgaaaatcacttgctagaatatggcctgatcaatgctgttatgctagtgagaaaatccacaactaaagactatttgctatatattagcattacggttagaagtctggaagcctttggaggctggcaaatctgagttcaggtctagctcttcgagtttactggctgtgtaaccttaggcaatttacttaacctccgtgagtctcagtttccttatctgtcaaatgaggataaaagaacttagagttgttattgagattaaacgggatgattcatgtaaaatggcttagaataacgactggcaaatcttaagcgcttaccacatgttaattgttatcaatgactttctttacctttcacaccattaatatctgaccaacctctagaagtgatgggcctaaagaactcttggagctaaaattctttgtcacctgtaatgccagcgctttgggaggccaaggcaggcagattgcttaagcccaggagttcttgaccagcctgggcaacatggcgaaaccccggctctacaaaaaattagccaagcgtggtggtgtgtgcctatagtcccagctatttaggaggctgaggtgggaggatcacctgagtccaggaggtcgaggctgcagtgaactgtgatcatgccactgcaatccagcctggatgacagagcaagaccctgtcactaaataaataaataaataaataaaataaaacttttgattttgttgtttatatacttaagaaaggaaccagaaccctccccagtagtcctacactttctgtggcacaaagcaggatggagacccccaggagaagctgagtctttatgttactgttctaaaggagagctgtatactgctcttggcccctctgaaagccattttactctgtactttattctttcagtcatcttcctcagagcattttcccctcaattttgttgtcagttccatatcatatttgcttagtctgagaagtgtttacttttataatagtgtcaggcttcaacacctcatgacttccagatgctcaactacccacctaaattgaggtcaaagttgtattccttgtggttttataatatccctatccagcattcttccattaaggtggctgacaaaagtggtcatttatgaatgcctactatgtgccaggcactctgtgtgttgtatttgcaatcctcatactttgtaagggtcagcaaaattaagtaacctaccccaggtcacacagatcagaagtttatagataagctgagattttttactgtctagtctgtaaaatgacctaggccaaaccatgttaaaataaatgtcctcgtaattttagatgctattctggtaaataccttctgtgaaaacctctacattacaaaaatagggaagctatatattatgaggaagtctataaaaggaaataattcatcagtcccttggaatttttgttgcataaatgctgttttataattgacctgttttctatactatgattgctttttctttattgcccaatgttttcttacatctaaaattaataaccatcttgtttttcttttttcttttttttttttttttttttgagacggagtcttgctccatcgcctaggctggagtgcattggtgcgatctcggctcactgcaacctccgccttctgggttcaagcaattctcctgtctcagcctcccgagtagctgggactacaggtgcctgccaacacacctggctaatttttgtatttttagtagaaacggcgtttcaccttgttggtcagcctagtctcaaactcctgacctcaggtgatccacccgccttggcctcccaaagtgctgggattacaggcgtgagccactgcgcccggccaaccatcttctttttcatttgcttagatttccatgtctttaattcagtttcaaattcccgtcccagctgtgtaaaactccttgttaggtattttaacaattttaccttcttaaagacacctttaagaaccttctagcctgctccattctgagttggttattctgaaactgaatacacagctgtcatcctgtgatctttcaccattgttcagaagattccctttgcctcaatcttgtgtcttcttgttttagtggagaacttcccccaatagttttctgataaaaaggctcactggtaagtctttggacaccagtgtatccagtcaaggtcaaccagaggaaaaatggcattcttaagggggtgctagaggaaagcttaataaagggactgtttacaaaggtgtgaacagtgtgaagagataggactagcaacagcaggaagccttaggcttgaaagggatagaggaaggaatgtttactagaatccagagagagatgcagcttataggaaagtgttgcccaccaagatttatagtcttcagtaaaggaacacagtatccatccctttctttctgccccctggtctcccaccagtgttgccctttgaccaaacccaaccaggagccagaggacaagagacccaagtgaagcaatccatgcaggtctacctccctgagcacaaagtgggaatagagaaggatctcaaggggcaaac

SEQ ID NO: 270 - DNA, 3417 bp, Homo Sapiens
ccttacagtagcgcagcgccaggagggtgtccgcggtctcgcctgccgcccaggggccctctcagtgccgcgctccgccagcctcggccccaccccaaaccccttcctccttcaccgccggctcttacagggaaatcggcgcccgagacacagccagcgggtgttcagaaaggaaaacgctcgctcaacagccttttcggttgattcttacattcaaggtgtgttactatttgtggcaagcatcttttcatttaaatctcgtgacaaccccgtgaggaccatcgtccccattttcctcttgaggatgagggctcagagacaggaggaaaccggtgctctgatcaaagccatacagctggtgacaggtgggcttggctcccagcgccctctctgcaactgaataagctgccttattcagaacgtgctgagatggaacagatttaacatctgacaagcaggaatgtccccaagtggtgtttctcagctagatcctgtttgaaaggacacttcttgcaagcctctcagtgtggactcaaattgtttttagaataaagctaaacagcttcatgcataaaccagcacaagctccctatgtttgtgagtcctaaagcactcaaattaaattcagcataagccagactataaaatcaaaactgttgaaatcctcatgagtcgggaggctgttctgtttgcagggccactgctcttggctgtgtctgtcccagctttgcagggcaggcaggtgccgcccggtgctaggtggcccaattctcctctgcttttctttcttcagagccctgggttatggcactggagtgtcacggggtactgcggtgagggtgcgggaaagggggttctaacttctgtcacccgcgccctagggttcgatagtgttttttcaatctcattaaagggctgacttctatacacacagagattcggaagctgccactgcattattttcatattagctccacctctgttcttttgttaatgtctcccaccaatttataaaatagtctgaggctctggtgggatcagaaacccaaaggtgaacacggcagcagctcctgcgtcataaggtggtgggccggatggtcggtgtatctgtactggtttttcttcacttgtcaacaaaatggaaatggtatttaaaatggaaaatggcaggagtactaaaagtcctaatagatgatagggcattacaatcagtattttagttgtggtagtaacaccgtggtcatacgtttttctttttcttttttttttttttgagacggagtctcgctctgtcgcccaggctggagtgcagtggcgcgatctcagctcactgcaagctccgcctcccgggttcacgccattctcctgcctcagcctcctgagtagccgggactacaggcgcccgccaccacgcccggctaattgttttatatttttagtagagacggggtttcactgtgtgagccaggatggcctcaatctcctgacctcgtgatccgcccacctcagcctcccaaagtgctgggattacaggcgtgagccaccgcgcccggccggttatatgtttttcttttgtcattttaatcatgcagcctgaagtatttatatggatgaatatcatgatgcccgggattggcttcaaagtaaccccatggagacgaggggttaatatgagtgtgtccgaccggcacaagatgggctggataaggctaggatattcattatatgaaaattctacttttataaaggcttggaattatccgtaattaaaacatttcaaaaatcttccacgagctcaaggagactccaagcctatggccctggatcacctccctgagacagctggagcaaatgtcaagcccagtgttgggatggcaccagatggggtgcatgtagcttgggagaccttccttggccctaaaagggagcactgtctcccccacacctccccctgctgggcagcatgggcactgcatgccacaggcagctcggcttggacacttgggcacagagcccatactgggtcctccacgtgactctcaacctaacaaaatgttaaaggagatgctttttctattaacataaatcagcaaacatttatgagcacttcggtaagtggtccttgaagtcttggataggcaagaagagggagaagccacggggcaggggaaagactaacgtgcgtggatttccagcccaatcccagctgtcaccccctgactgcatggccttagacatctcttgccctccccgtacaatggcgacagtaatccatggctctacgggttaaatgaccgctgcaagagagggttcgcagcacagggtagccatgcagaggacttaactgaatgaaggagaagaggagagagcccagagctgacctgatgcaaggctggccacaatgcctgtgtcccttacctgactggctgatgaaaaagcaaacgtcatccctgaacacaggtgtgttcctgtccagaaaatcactagcaagttcaaccatcacaggaagctcagtcagttcctccaaaacttgccgcgtctgaagccaacaagcaagcatggagactaaagtcagtcacaggcacgacagggacatggggcagctgggcttctagggacagtttgtgacacggaacctcactgtccaggtggcgaggggacttcggtcacccacaggccacctcgaagataaaagggctccgtgtcatttctcacgctagctcatgggaatgggtacaagggcttagccaaattcagaaggccacatgagtgataaaactgaaggccagtgtctggtcctagactgccgtcgacttccccacgcacatgtgtcacacttacagccacggcagcgtggtagctggttccacagccaatcacgatgagccgtcggcatcgtcgaatctccttcaagtggtccttcaagccacccaggagcactgcagggcacacgacaaggcgttaatgctgagtctacacagtcaccgcattccctgagactaggctcgggcggaggctccccaccgagtgtaggaattacctgtgttggtttcaaaattcacccgacctctcatagtattgaaaactgattctggctgttcgaagatctccttctgcataaacgcactgaagttacctggtcaaataaacgtctggtcagttttaatttcattatatttcactgcttttcattatgcagcagcgatagtaactcctgtaaagcttactgcagattcccaaaggcatccccagggattaccctgcctgacactcactaccatcagagggaagcaggtcaggaaccaggactatctccaatttacatattggaccctgcagcttgagaaagggagggatttgcccaaggcatgcaagtaacaaatggcctggctgatccctctgggccatgctccctta

SEQ ID NO: 271 - DNA, 1738 bp, Homo Sapiens
gtgttacccaggccggagtgcagtgactacttacaggcacgatcatagtgcactagagccttgaactcccgggctccagtattactcctgcctcagcctcctgagtatctgggactataggagtgcaccaccattcctggcataatcctctttttatgttgagttgaagaaagtcacaagacgtgagacgctttatgttgcagttaatggtctcttcctcccttttctctgttcctgcaaatggacaattattccttctcacaaggtttttggcttcccacttcagcatgcctccagcagtgttctaaaattactctacaattgccaaagtaagagcagcagatgctctaaatctatttccaggacacccgtctcatgatcaaggacaaatggggtccaaactccttggctgccagatgagcaaaactggagtaaagatgctgcgcaaaaggccaaaatgatgtcaaagcagtgtaaactgatacagatcaaagaacaggagtggaaaattgcaagcagggatatgtagcggctctgtatggcccaatgtgctcaaaactctccagaggttgttaatttcctggcaagatgaggttacatcatacagtctgtatttgcatatgtacccatacttgacagtgaaatatggtctaatacacaggttttattattattattatttaatttgaatattcacatttataggttccaaattcaggtcaccaaggataagggaatcaaagctctaaaaattatagaatatttgagcaatgcaataatgactggacaggcagctagatgcttagatggtttccactcaatgcagttgtctcagctacccacaatatattaccgctaggatttctttagctttaggaattgtcgataggcaattcttctgatctgcccataagaacatttttaaggggtcaaaggtgagcccatctcatggcaatacgataaccatgtaaattaggttcactgctagttttcagaaaagccattagtactttctacacaagtggatattaaaaatatctacaagaatattttattataaaataataaaaagtactaatgggacttctatatctatagattattggtaatctttgagcaatatcattgacaaattaattttcagtagcaaaactgaataaaactaagctcttttagctattctccaaaactcttatgacaaaaggattccaccatattgtacgctttagcatttgtaactcgtcaagaattgtttttatttctcaagtgtactacttgtatatagacacatatatgaccttattttatcacacatccaccttaaaaatacatagcaagtaaaagtagctcttaaagaaagtagctcttaaaagtagctctttagaaagcaacattgggtgcaggaactaagaggactggctggtgcttttcatcagtagtaggtggtggtggctaaggtttccactgtgggcacagcccaacacagccctatcaaactgactctgcagatcaccaaatggctaacattacactgaaaagtgtagggaaaatattgatttgtttattttctatgaattgagctaactttcctcactagtcttgttgttaaatagtggagaaaaaaaatttgaaaaaaaaataaaataaatttgaattcaatggagcaaatttggtctaatgcagtacaatactttttaaaatctgtctttgcaaattaaaataaaatactgttatcttg

SEQ ID NO: 272 - DNA, 5012 bp, Homo Sapiens
aggtctcctaagcttgactcctcttcggcatgagactaaggaagctccccaagttccagtcagagcaggcttatggaagagtcttgccctaacagaaaaacagggatgaggctgggaagaggataaagttatagcaggataaagttataagaagataacaaagcaggatgacatcacatgggaccaagaagggggctgcatcatccctggacctgctcctgggggctgtcggattgtgggcgtggccgctttggatgcccaggtgagccctgacacagaggtgcttcctcacattacagtgaggagaggatggggccagtacaaagactgaagaaccagcactcctcctgggtccgtctttgctaagttgagtcatcccagcccaggctcagatgatgggcactgtggacggagagagacctgtcttccagcaggcttctgtgtgcgtggctgctgcagtttctgagggctgacccagttttctcatctctggactttataccttctttgtccctaaatagaccacaacaccactctgtgttctctgcaagcctggggctaggaagcatcgctgaggtaaaggccttttttaaggttctctgccaataacaaacacgtcttcaattatgagagcagtactccatgatcctgaatctctgccaaccaaaagaaagctgtgcacacactgctgaacttttacaactctacaactcagaggacataaggcatgtgtaagccagctgtaaatctcgttgacagtcttgccccacccactggccactaggcagctggatttccaatttcaccccggacacggccagcctatcaaccctctctgcttaatgctctcagttcatttctcatcatttttctacctccactcaccaggccacttaccctcccttcctccttccagcttcctgagccctacagagataacaactagcagagtgcaccagcacgtacattggattatccttttcattgtgtctgagccaatctgcttaatgttcagatacacgtggggaaaaaaaggcaaaatatttttgttttagatcctttcagaaggcacaaaaaaataaagtacaaacacgaatcacttgacaattttatgattaaaaccaacaaatggaaaacagacagtgttgggtgttgctgacataatcaagcatttcgtgcggacccactcaaccaccccatttcttggatctatttctggatgtaccaaatgtgtctgaagatgaactcactttcgcacatcaaagatgtatccagtgttaaacaccggagccagaacccaggtgaaaatctgctggttcagggcaacaccacttccggctttattaaacactcaaaagtcaggttcccaagaaacgcttggatctatgcgcaagtataacatgtcaaaactgttaaatgtgaccatgagaaaaatgacatgagcatgtttcatctttgggtagagggtggtggttttctgggaagacactgtctgagacaccgagtagagaagtcaaatggaagacgtttagcatgtgcttaattcttgcttgataagaacaagaaatcccggaaaaggtcacccacagaacggtaagcaaagtccccagtgaacaagtttgaggtggggcttagcagtttgtttacagttgtggaaaactgttttagtcacttggccaaaaaccatatgaggggaggcaacctgaaaccctagactacttgactctccctgcatttttctgctagaagcaggataaaaggcctaaaattttggctgcatctctatttatgtaacagccacagctgctccccaaaatagctgctgttggccaaaagaattacgggattttgttgctaatatgtgaatctatagtcaatagcactctgctaagtttccttcccttcccttttgccgtcccaggtctaaaaggagatagggaatctcattatttgcacatcaatggtgccatcagttggatgtggatagattttaaaatcgaggctcatcttttcggcaagagcaaattgacatagaacatcttaactctccaccttctgcaggcggcagtgtggctaatattgaggcccttcaaagtcacaactccaaaagagaggaacatacagtgctcctgtgattttgtgggacaaacccagacccggactgctggcgtggcatttaataggatgccctcccctgaaagtaacaaagagaaccctcgtcaaagctatcaaacacattaaaaaaatacaaaagttattttctccttttgattgctatttacttgtgacaatatttgttaaaaatatcacttctgtctttgagaagagatcattctcttcatatagtatggaaaaataaactctgctgaacactcagtcaacattccccaccactgccaggggcttttggctttcacatctccaaataccatcatcagcataaaagtattatgtttttgagtaggcaaacacttttgctatgtctagtgtgctggaagtaagagaaaaaggaagtggcaaggctcatgtagcattttgaagggggagagttacaaaataggatggtttatttgctaacaaaatgaaaggtaacaaggtggtttcaggccttcctaaaaagtcataggatgtcccctcacctcttagaccactttcagccttgctaatgcttggtagattcttaatggaagggtagggagccctataggctaattatcagtgtcaatgcaaaggagggctcaacttctgcacccaggatcatcttaaaacactgagctggatgaatgggagaagacaaggatccataaaaacagtaaaatgtttattttcttagaaaaaaaagtgaggaagagggattcaaaatgattgtgatcacacttccatctgcatctgagcaaagccaatgttgcaagcttaattcttgattaagatacctattaaatcaaacaacctgccactcactcctacgtcacttccaggagtcacatcacagcatgcttttaattgataatagcttctctacttcttctgagcagagaaacaaggcttggcatagcaaccatcccatctccaaagctcaacactgccagtgagaagcaaggctcagtccatctctagactgcgtgcgagagatggggaggaaggagagagggcaggagatgcttgtcttagaagcagaaccagtttagaagagaagtttgttatctgagttcaccactacctcatcttatagaaaataggttggagagcatctgtaaaaccaacagtatctttaaggtgaaattgcagaattttgctgcatacctggacacaagagaagtgaaaagttgcaacaagttttaactagcagcaacaaagaaagttcgataacagttttttttgtttgtttttagcaatattcctttgcaagttcattaagaaacactgtaatttaatggggcgtacaatatggaacgatcttcttttgctatagtgctgttcgctgaatagaaccgacctttgcaaagatttcaactggggtgtaacctatttacacagtagtagctcctggtttgagtggtaaaattggtgctatgtgatatcctcttcttccgaacagtaatcccgacccttggagggaaaaagaaaaaagagcatgtgaatgagaaattcaaagcagagcctgaaatagttacttgtaatcaattttctctcaatatatgtctccttgcaacagaatccaggctttgtcagtgatagctggcacaggggtagctacgtcataaatacatgttagccaatttataagctatatatacttcaaggcatgacagttttaccaagccccaaataagcccttactttatgttggtaagaatttatattataacagccatattcaagagtcagcctttcactaagaaattaccaaatggccaatccattcaggagatcaatttcttatcaggaagaatgaacaagccacattctacagctacatccccgtgcctgaaaatcaacattctacagacagcatacaatccagggatgtctgagtttaattcactctaaaacggattacaaaaaacaacaaacaagaatccttaaacacgcataacaggtctgtgcttggtatgtgtgggatgcacaagaaaggcaaagatgcttctgattcatttgctaactaaaacaggttatctgaagctctaaggactatgtacaatggttatttgtgaacatattttatcctctctcctctaggtcataaactcaatgaagacatgattggggctgggctttaaggatccacatttaaccgagctggcttgtcttggtcaaaacacatgactctcttggtctgtaacccatcacagggcacctgccctgcctgtgtccgatgtcatagataagggttttgtaaaaagtcaggtgttattattatttgtttccttcaactttttctttttcttttaaaatacacactacatgtttcatttttcttggggggggggaatgttcttttaaaagcagaacttatttctaaaagtaccaatacttaacgatactaataataattttgcatataactatttctcagatgtattacatgttttttggtcacattatctatataacagaaatattttacattttcctaatatttaagcattatcaaaatggattattttgtgccacgtggctgggtgctaatcttgactctgtgacttcctagctctgggatcctggtaaaattacctctctgtgtctcagtttcttcatctgtaaaatgaagagaacaatagtacctatttcacagaatagttgaagattaaatgagttaatagtaataaagtgattaaatcatttctggcacatacttttacacatgatgtatatgtgcccatgcccgtgtgtgtttggcaaattacaaaatactgctggctggacacggtggctcacgcctgtaatcccgcactttgggaggccgaggcaggtggatcacctgaggtcaggaatttgaggccagcctgacc

SEQ ID NO: 273 - DNA, 2011 bp, Homo Sapiens
caggaagcaagagagagagacagaggggaggtaacaggctccttttagccatcagctctcatgggaattgacagaacgagaattcactcacccccacccacctcctggaggggattaatctattcatgagggatccacccccatgacccaaacacctcccattaggcctcacctccaacactggagatcagactccaacattagatttggaagggacaagcatccaagctgtagcatggttccaggttggaaatcattttcccttcaacattcgaaggcagtgcactcagtgttgctgttgagaaatctgaagccgtgcagattcccatctccgggttgtatctgtttgctcgggatgccataacaaaggaccacagactggggggtttaaacagcagaagtttactttctcacagtactggaggctggaagtctgaggtcaaggtgctggcggtgtcggtttctcctgagccctctctcttttgccggggctgttctgcttgctggattggaaatgattttagcccctcatgccaggaagaaaacataggcagatttctcaccagctaaaaaggaaggaaaaattgtgaagtgaaattttctactggctgtggtttatccatgttaaattgtaaagcatataacacagatggaatccggcacatgcaaaacactcacaaaacctagttactactactgctggcgctgcggctacacgactacaactactactacagccactactctcctcctactgctactgctgctgctgctagtgtttcgtaaagtggagctacagaaatcaacattttttttcttagctgcacagtgaattcgttttttggactccagtattcttcctgaaggtctgtttcatcctagtatgactctcacttttttttcaaaattttattttattttatttttgaaatggagcctcactctgttgcccaggctggagtgcagtggcgtgatctcggctcactacaacctccgcctctgggttcaagagattctcctgcctcggcctactgagtagctgggattacaggcacgcgccaccacgcccagctaatttttgtattttcagaagagatggggtttcaccatgttggccaggagggtctcaatctcctgacctcatgatccgcctgcctcggcttcccaaagtgctgggattgcaggcgtgagccaccatgcctctacattttaattttttaaaacttaccatctttatcatttttaagtgtacagttaagtggtaataaatacatatgtatctcctatctcatttccttattttcatcccccatcccatttctggactctggctaatagcagtctactcggtatcatcacgagatccacgtttttagtttccacatatgaatgagaacatgcgatatttgtctttctgtgcttggcttatttcacttaacataatggcctctggttccatccatgctgctgcaagtgacaggatttcactctttttatagctgaataatattccattgtgtaaatataacacatttcctttattcatctgttgatgggtacttacgttgattctatattttgaatagtgctgcagtaaacatgggagggagatatctctttaatatactgatttcctttcttttgagtatatacccagcagtgaaattgctagaccaaatggtagttctatttttagtttttttgcagaacctccatactgttctaatttacattcccaccaacagcgtatgaggattcccctttctccacatcttcgccagatctgttatcgcctgcctttatttacttatttttatttttaattcttgtgggtacgtagtaggtatatatgggatacattagctgttttgatatagacatgcaatctgtaataatcatatcatggaaaatggggtatccgtcccctcaagcatttattctttgtgttaccaacaattcaattatactctttcagttattttgaaatgtataattaaattattattgatgt

SEQ ID NO: 274 - DNA, 2313 bp, Homo Sapiens
tctctggtaaatatttcattaggggagatgcggatgcagcagggctgatcctgtctaagcctcctcttgtctcccctcgcccactggattcccaagtggctcctccaaagaagtcccacctctctctcctaccccaccctgccctccctcaggctgctctcctgggtgacgctgtgctccaacattcatggcctgacagctattgcacatgttcctgtgtggcctctgggtcatcaggtatgtgttgggaagtggggatttgtctcttgctcaaaccacgaggaccctgggaggaagaatggcctactttcttcctttcctaaggtcactcacatggtacgggagggggtgatcctaaaagcataggaccatctccattatttctcagctctcccactccactccctgctctgagcttctatatgctagtcctgcctggtggtggcggtggtggtggtggtggtggtgtgtgtgtgtgtgtgagagagagagagagagagagagagaaagagggagaaaaagccatcacagcattctgacccaggcagaagagaagagaggagaaagcaagtcccggtaggaggaggtaggaaccactataaccaaagccagcaggcaaccaggctcagcctctggaatgctgcagcctgaaatgacaggaaacagaaatgggggaactcacagagctccacgcgccctgctcagccccggccatgcccagccctatgctgctcagaggaaggcactcaaaggacacaatgcctccagctcacggaaagccccaccccaccttctccctctccccatggacataggctcattcatgtggggtagggactggaaggggtgtggactccaccgtgacatttaccgaagacatgaactcagcgaacattgtaatttgctgattaaaaatttaatccccatcttaaggtcagaaaaccgggtacgaagaagttggcagaaattggggctggtgggtggggaagagtggagcaagtcagtctgcgttagctgaggggaggggtttgtcaggctggtggggtttgggggcagagtgtagggggaaattgaggaggacccaggagcccgctggcagggataaggatgggggcaggacacatcttcctaagggagctgggtggggtagatactcccagtctattcccagttgcaggagacagaaagagtccggacttcagagtgagatggacctgggctagcatctggctgtgtggccctggggacgagagccctgcccaatacagagtgatctaataccagccacttggatagatgcatttcgtttcttccatcctaggatttctggagaggcagcttgggaaggccaggtgtggataacatgtgtaaagattcattctcattgtagatcttagcaacctcagcatacagattttttttttctatccttaagtcaaaaacttttaccttttcacttaaaggaagaactttccagcttattcaacattaatatacagtatattcaaattgccatgatcactgctactgcactttagggcaattattaagtaaaataagggttacttgacacaagcattgtgatacctcaacagttgatcggataacctagagggctcctaagtgacctgagagccagtagtggatacactggacaaaggatgattcacatcctgggcaggatggagtgggatggtgagatacttcatcgggctactcagaatggtgcacaatttaaaacttgtgaattatttctggacgttttctttctcttttttttttttttgagatggagtctcgccctgttgcccagactggagtgcagtggcaccatcttcgctcactacaacctctgcctcctgggttcaagcaattctcctgcctcagccttccgagtagctgggactacaggtgtgtgccactatgcctggctaatttttttgtattttagtagagacgggcatttcaccatactggccagactggtctcgaactcctgacctcgtgatccacctgccttggcctcccaaagtgctgggattacaggcatgagccactgtgcccggcctggacgttttcatttaatatttttcgactgtggttgtaactgaaaccatgatagtaattttcactttcggaaagtgaaactgcagataagcaggggagacatatttagtcatgtattacaccatttttttctgttttatatattggggttctgcatgaaattgaagtttgaattttcctttgctctcccattatctcgcttgatctcacaaaagccctgcataatcaagatattagtattattcc

SEQ ID NO: 275 - DNA, 18420 bp, Homo Sapiens
agctcctgcaaaggggcccagaatggtggggaagcagaacttctgcctccaactcactttctcaccgtgcaactgcggatccagaggaatctctgcatgtgaggctctgccaggttggggaggagtgtgcgctcaacatctctctccactttttaccattgcaacagcttttcttagctctggggtccaggagtgtgtctcagccttagtcctgaattctgggacatgcacgatggtattcttgcctgtggagagctgctagttgaatttctgtggtggtgagtgatgtcagtgaagtcccattctggtttctctctgatgtcacactgagagcacagttttggtgagaagattatctttgtgtaaaagcaaagaagagaggaaagaacctgcgtttctcctctgcactatccgctgcgtttttctgtagaattgggtgtgccatttgcaagagctgtgtgtgtgcagcagagcaggcagccaaccaatccttgcggttcagtgtgagttgggagggagaaagcgcaaaccactaagtgtagacaacacgcagggagttcatttgggaagtttagcgagtggtgtccaaagcagagttgctccctcagcactatgggcagtttgggccacacaattctttgttgttggggagagaaggctgtcctgtgccttgtaggaggtttggcagcatccctggcctggacaccccatgacagtggcaacccctcccctagcggtgacaaacataaaggtctctagatgttgctaaatgtcctctggtgggggtgggaagggcattgccctgtgtgaggaccgctggtagagactgttgcagggttcagaaaagagatttttgtttttcagttgggacatacatgatcagtcttggggaaggaagcagaagcaatggtggaataggacaaagataaaggaaagaggtggaaagtgatgaacacagaccgcgatgacccggtgtggggtgatatgggcgaggacagcatccagcgaagaggtcctggctcctgactgcaatttggtggctctactgtaccctgtgcaacgggtataggttggtgcttattttctctccatgtggtcagaagtctcatcttcaaagtgcttaagctgtagcccttgccctgtcacctctggttattgctgggacctgggtcacactcctggttcatctgctggccccaggccgggtgaggctcccatgtgcctgctggcctgagaaaggcttatgtgagtcacgggctactaggggcagagagaagggaacaggatggagaaattaagtgaggaataagattgtagaaagccaggaagaagccgaaaggggacttggctctggcagcattttgttttgcatcagtctgtgctggaataagctgtcgaaaggttgtctacccattgccccctggtaccttgtgctgtgctcattgttggcaaaacacttgaatgattgtggcctaaatgtgcagtgataaaagacagaacatagctttgttatttttctaaccagaataggagagtggcttttggaatcaagatttaaaattcagccttatcctcatgatttgcttgtgttttggcttgtattttggcttgtgcttgaaatgacaagaaggatcaagggtttaaatgtgatcttgagaagacatgagagagagaattgatattttcctatctaatatttatattactttcctgtatagagtaggctaaggattttatttggacgctaattgtatgtaattcctatagcagttattttgattaagccaactagatttacctctaattattcattttaagccctagatttaaagataactttttattctctgtaaacaacctaaaagttgccttagatttatttcataatatgtaaaaatgctgaaaaagggctagtttggctggagagacattttaatttttccctttaattttaaatgacaatagtgtgtgtataggagctgcgtttcctaccgaatattcacctggtgtggagactgaataacatgccactctaagggttaataaaagcattaaataacttgcatctgggaaacatcaattgaatagataattgcttctttgtgtttctgcttagtagtggctggacatgtaaagtttctataccacaaaatgaaaacagatgagcaaacaagaggcccggggtcacataaccgatgcgtgctcaaagctcgaagcagcgtcaatcaaacctggagggtaccatgtcgagagatggtatctttccattaatcaggaattggtacccgggtgatagacggcctctgtaatgaaaacctcagttagcaaacagccagaagagagagaaaataatccaaccagccaaataatcaaagaacacatgaggtgtctgtagggagatttccacagtgggaaacccatagaaaaagttctgtctctcactcttgtttttgttttttggttttggatacaatttcatttaagtagaaagatcatccatgattttctcaatcttccttatgtcttttatgcactatacttgccaaagtagcatagacagaaaaaaagcaggaatcctatggatttccacccttagtccttcaactaactttaaaataacttttaattttcttattcaggtctacattctaagtcacactcccctcccacatgtctttgcctgctattttacttcattaatatttaccagcttttctgaatttagacacctaattttgtattttcatgtatttctctgcatatccttcagatccttattttcctcaatattcatgtaaaatatataaactataatttctgtgttcttttaagagatagcaagtacctaaacaaaggggtgttctcccgtgatttttttaactcagcattttttgccagaaatggtcatttgggatttattcccacgcccttgtgtttttccctccccctcccctttccctcccttccctccctttatctttttctctctcccttcctcctgcccacccaccctacatttttccctccctcccttcttgctccctccctctctttcttcctccctcccaccctcctttccttcttttcctctctttctttgtcctttcttctcttccctcctcctttccacccttttcctttcaccactatttattgagtgcttattgcacaagagactttgagtgtccagtgctggcttgtggcaggacaagctgcagacaaaacccctcagacaccgagttgtagaagaaagggctttattcggctgggagcttcagcaagactcacgtctccaacaaccgacctccccaaatgagcaattcctgtcccttttaagggctcacaactctaagggggtccgcgtgagaggatcgtgatcgactgagcaagctgagggttcatgactgggggctgcatgcactggtagttagaacggagaagaacaggacagggattttcacagtgcttttccatacaatatctgtaatctatagttaacctgaccgattaggtcaggggtcgatctttaactaccaggcccagggtgtggcactgggctgtctgcctgtggatttcatttctgccttttagtttttacttcttatttctttggaggcagaaattgcgcataagacgatatgagtagtggtctcctcccttagctaaggactctgactcctccttctgtggggctccatgtattctttctcattggcaacactgggaatagcagggcccagttgagtttggagagtgttgcttagtgctctttagttgcaaccatctgaaaataacatgaaaagaaaggggaatttcctgaaaaatgttggtggtagcaatgagagcaaggctcaaagaataaactggaagctgagaaactaggcttgaaaatagaaatcaaagggactggggaagcaaggaccctgcattcgtctctgggcaggaagggttcgctcagcgcactggtgctgcgataaatatcatgtgcctctgctgttctctcatcacggatcaagagtccaagcctggagggagagcgactgacagccatggtctggtcacacgcctgcctgagagctgcacgggagccggcgaggaaaagcccttgctgcttccagtgtaaggcaggtgtctggatttttcttcaagagagccaacacgatgaatgaaggaacttaaatcatggcacggttagaaagaaaagtagcaagacaggaactactccttccctccaaacaaaaagaaaaacaaaatgagatattcactgtaattaatatgaatttgcaagggaaataatgcagtatatgatctcagtctcaacttatatctttatttcaactatatctacttcagaaaggatttgaagggtttccaataaaagacaaataaaatgttataaatggtagataaatgaagatcaaatatgaccctggtagaggtatgagaattttgtctgtcttgttcaagagctacactggctgcacctgatatagtagatgctcaataagtatcattaccttctgccaggtccctcccaggacacatggggattatgggaactacaattcaagatgagatttgattagggacacagccaaaccatatcagtattatattttattgcaactattggctcaataggtgcactatgtatttttgttcaaagttattgctcaagcgtttaccgtgtatattgttaacttatcacagtttattcttaagtactattatatcatctcccaagtaatataaaaatcttacagcagtcctggcttttcgtggttcttatatgcaggaatttttgttactgtgctttggttagataacatatataattccttcatggacacagtgcaaatttcactttccacagtgtattaactatgtgtaatttcattcagtacaaattttgatgctggtttttagtacaaaaattagtaagtatttaatggacaagcatgatgatcagtgagcaatcatgctgtctctgtgaaagtgtgctggttatttgtcgctgtgtacctgtgcgtctgtatgaatttagtttagacagatatcaaggtgtgtagttgtgtaaactacttgtcctccagtcataaactcacataatttaacttttaaagcaccatcactgttggataagtgtccaggtcacctttattcatttggatacctccatgaagatgttaaaaagccgctttttactaacaaatacaactttaatcgtccagctagtggaccaaggagttatttcaatgtttaaagcctactgtcttagacaaacttttcaacagactactgaagctacaactggagatcatgcaatttttaagcgaagttttgaaagatatattacttaaaaatgcagttgaaatacttaagcatcatggcggcaaagaaagtgagtaatatgtgtgtgcagtacagcagaaacttgtattgctctgtgaaaataacatgcaggataccaacagaatgcaagtggagctattggctcattttgctcctgcttgtgcagaacttttcatgtcaggccatctcctgggctactggtgagtttatggatcggcccagctgtagtctatcctgttgttcctgaagtggggtggaggtcagccagcagcctgcaaaaatgttagaaaataagagtcaagcaggacttctgatgcccccagatcatgttattgttatgatcagccatccacagcaagtgtcttatttgcattatatccgatgatagtgatggatctgcattgctgtttgcctcttgtaacccacagtgtgagaatgcaaaatccagggttaggagtgcagtcagtggcagtgtgactaggtgtttctctgtaggatactaagaaaaatacagcccaggaaactgttagtgctttcattttgtttcactataggtctgcctggatgatcaaaacagatgggaaggagccatggtggggcaatgatcctgttctgttgcctcctggagattcaagcattatatatggagagctatcatctctacccctcctcccggtttactctcatggtgagctcaggtagagtttagcagggatgttcatgtgaatatcgtctgtgttcgtgaataggctcgtatttcagttgcaagcaacatgataaccttaaagttcagttgctggttaataactgtcttttttattaagttgatactgaacttgatgtctttttgcagtactaacagagattactggtgctaccttttagcttttgatcatttatgcaagcctagatctttagctttacgttgtaaaaggggtatttttttcaacatttttttggtgagagtattaaagttgacattattatgatcacaagtgtaaacaggtatataaggaagtggcgatacattgttaagactgctgttattcatgatgcttagccaaatggaggtgcaattaatactgccatgtagaactggaataacgtcagctcaggaacagcaagtttagatagtttgactgtagtgaattttcatgaatggaatagttaatcattttagtggatcttgggggtcaattcaggctgttttacttgatccacttcttatcattatcctaacaaagtcttctgagataacacagcactgatagttgctaacagactttatatctaccacgttattagcattttatcttgatacactgataaaataagcttcaggaatacttaaaagattgcaatggcttccagctgccaaatgctagatttaattattttttaggaccaacatgagggtttagacacaccacttgtggtgcagcacacatgtattatccaaactgaaattagcaattcaactgaagtccatgtagagtcgaaaaatgtgaatatttggagatgatctagctcactttattttgtagaaaagaaaacagattcagggaaagggcatgcattgcctaaggtgattcagcaggtttggagcagaaatgcaatacaatctctgttcttttgcttctcagatccagaattttttcacagtactgaactacttatgtttctgattccttattttttctgttttatattttgccaatattgtcttaccaagatcctattctttaccccaaatatttaaattcattaccactattgtctctttataagtaaaagtactagttgttattataaatgattattcgatcacttttcatttttttttgggtccagcacaaagttagtaacaaataaacattataggccttggcaatccaaggggagctcaagtcctccagggcacgtcaggaaaaggctaaacgacagctgagcttcgagtggacagaatacagctctcatacggactgttgagtatttgatgttcttcaacaatttcattcatcttcagttttttcctctttgaagtgatggatttagtccttgctatactcgactttcaagtttcttttgaaataattatagattcacaggaagttgcaaaaggtacagggatgtcttaggtactcttcactaattctcccaacggtgacatctcgcatagccatagagcatatcaaaacctggaaactgacataggtacaattcagaaagcttgctcagatcacaaccattttgtacacatttgtttttgtatgtatgtgtgtgtgtatttgtgtgcatgtgttctgtgcatttttatctcgtgtagatctctgtaactacaacctcgacagtcaagatacagaactgtagcctcaccgccaggctccaacttgcaatctttgtggacactctgacacattttcctccatcccttccccttggcaaccccatagtctgttctccatctttacaattttatttctataattcatataaatgtaattgtacaaaatcgtatttttgaagggaagaaacaagtcacagatatttttgttagcactgcaaaataatctttaatgctaatttattctatgttctatttgtctcaaaaaatgtgctttgttctttcccatattttctgatatcaggataggaaatcaatagcaaacaaaacataattccattcatttttttccacagcttgtttctcactgctgtttcctaacggttattgttccatttactctttctctctgttttccatcacataaaagtaactttgtgttccttatctcttctaagaaaacttggtaatgagtctttaattgaagcccagaccacccttgttttgattttgtgttatgggtgttcttttttgtgatcgctttcatggagagtccttgtgaagctgggcttttccaatggtttgtcaaaatggaaatagatatttaacaaaccaaacacaaaatgaccttgctccaggaatgcatcatttctgagaaaacactacctcttccaactagagattgtgaatattactcatattatcctttactcccttttattaaaactgtattttttttacacatttgtataactcgggtaatgaaatgtgaaactaagtgattgcctaccaattacaattgatattaacgatgctagtgagaggccacctctacagtggctgcgccgtgtctagggacttgctagctttgctaagttacatgggattgcctgcgtactaaatgcaaacttactcatgtacataggaaaccatttgtattaatatgattaagaagccctgcctaaccctgatgaaaaattacttgaaaataacagaagacagagtccttattttaaagtacattaactattgggagtaattactattagtccaaccataactggatctaatgagactgaatagaaacaaattagacataattggaagctaagcaaaagtcaattaaattcctataattttacctttataaaaattattgaattaaatgacccggatcaattagcagaggaaataaagccatgaagaatatttccaggaaactattaccttttttgagggaaaaatattgtttcacttaatgattagagtttagtaaaatgtagcttaatgaattttgctgccttagcagtttaataacttcaaatgaagtaattatgcaaattttttgatagttttacctacaaagtaatgcaggagttgttttaaggaatccaggagtagaatttatttgatagaataaaataacatatttataaaaatcagcaaattcagatggtttggaataaagatatgattgcttttactcaatgttcactttagggctgggtcagctgtgtgggaattgcagttgacctgttgtagaaattgtgtgcttggaaatatatcaccacattgctccatgtagactccctctgtgattcaagtcttgttcctacagcactgctgtcaaccctcaaccaccgtcaccctatagaccccaagtcagtttgtattcagtaatgcaagtggtgttctgtgcaactggtcacccaagaacttggtgctaagaaactgagaaagtgatgaccaagacaatctcatcaaaacacagccagggccagtcacagtatcgtaatttctgctttctggatgttcaaggaaatgtagatcatggctccttctgtgatgcctcattatcttcaaaaggagctataagcgtacactcatttccaaatgtgatggaataagatcgcagtttcaatgaggtcctgaaggataattaattatataatagttatcaaaatattaattctgtaaggacagtcacaaaggaaagaacagtggcaaataggtctcaggaaatacatcaaatgggatgttcaggtgtgatgcagcttcgtacatactatgctaaatacattatgtctgtaattaaaccagctgcatacacaatgcaggtgtggcaaattctttgctgaaacatgtatgccagtttcctcattttttaaaatgacaagtgcatgcttaatcaggttagagtggatagattatgatattatcaatgcactggacaaatccattaatgatacagtgagattttgtgcagaaaaatggaatagagaggtgtgaatccaaactttgaagaataaagaacatacatttgtaattaggaaatatctctcactttcatcccttatgtgccacacatagcacaatccagccccacccagccatgactcttacatttatcactcctgacaaagccggcctggcaattcagacccggagcccggagaaaaaagaggaatcccatgatttctggcaaacactgctgcttcttttgtagtggtgtgagatgaatgcctctacatgcacacaagtgccatgttgagggggatgaatctttcaagatttgtttaaagtcaaataatgtgaaggtccatgactgacctccaggcctctcagagcttcagttaactcctttgtgttaggggatgttagaagaacgtttacaagtcagagcaggtgatgctcaggagcaagagtgaatgaggaggaggaacccaaacaggtccagcacagaacatcagcatctgagcatgaagtctacccctgagaaaaagtggtccaaaggtttgtgtgaaccccattctccaggccttacaaaccctgtgatttctgcctcattctgtcccgtcctgtcactttgagtctgaattggaagagagaaaaacagtaactagattagtaaagtaaggaggagtgaagagcaggaaggtggaggtcgtggtggtggaagatggaaacctctgcgagtgaaatagaacagtttggatgtcagctgtgactgctctagatctcctaaaacccactccatttttattaaaaatatacattgcatttttccagtgtacacgatatcatgttaagagttcataaagttttgaggatgtgagtcatcagaaaggaggtttaaagaaccgattattttggtggtctgactcctttaccccagtaggaaaagctgccattttgcttatgccctgtgctgaatctcagaatgcctgtcaacccaacacgcttcagcatgaactttaactcaaaaaatcaaaaagtaccaggatcaatttacaatcctagctatatgatattttagaaattacaaagcctgtaaatgagctattttgtcaacttcatagatgagaaatctaagagtgggttagtaagttctcttagatttctcatatccataaagtggatagaacatctaatttagaggcttgttgaaggacagacagaaatggcatttataaagtatctagtgaaactactgctagggattatatgctcagtaaatgatgagcactataatcacaaataatttgatctttgccagtgtaaaatgtatttgtctgtctgcttggtttttctcggaggcatagtttccctctgtcactcaggctggagtgcagtgctgtgctcactgcaacctctgcctcccaggttcaagtgattctcctgcctcagctgggattgcaggagcccgccaccatggcccaactaatttttgagtttttactagagatgggatttcaccatgttacccaggatggccttgaactcttggcctcaagcgatccatccaccttggcctccgaaagtgctgggattacaggcgtgagccactatgcccggccacatttatgttaattcagagaacaatttttcagtaaggttgtacaaatgattgtcctacattcctgcatgtttgaaactctttttctcttttcatctccatatgtgaatgacagtttggctaggtatagaatgcttggtttacactttttattgttcataaatctatagtcttatctttgtttctatcctctataccagcttgagtaggattaagtgtgggattcactataaaactctatacccactgaacaagtcctcttttccccctccgctagtccctggcacctgtcattttacgtctctgtttctaagagtttgactactttaaaaacctcatataagaaggatcatgcagcactgtgtttgtatttttgtgactggtttatttcacttagtatagtatccccaaggtttatctatgttatgacatatgacacgatttctttcttttttaaggctgaataataatttattgtgtatataccactttttaaaatccattcatctcttgacagatatttaggttgcttttacctcttggctattatgaataatgctgcaatgaacatgagatgaacaagctccttttttatctctttacttttgttagaagcttttaattcctgattaatgagttctgaatgtatgcagaggtctctacctggcagtgacctaaaagccttgtcttctgccaccctgctcagccttcagattcaagtctctagattcttgaggttgggaaatgtttccggagcagccatggttttgcattcattggccattcaggttttctgctttgccgtttcccccccattcaggttttctgctttgccatttccccgggggtttccttaccctcttggaagaacaaccatgcattaagtccatgttgactgtattttacctgctgtttctatgtgttttgcaataagggcttttcaaaatacccataacttgtggctaaaaatgaggtttgttccaatgtgccttagaaagatccagtttcatacttacctggcagggcagataccatgatcttaaaggcagttttcccagggcaaggcttatccattccactctggatccattataggggcatgctgatccctggaattgccccaaatgtgggaagctctactgcaaaatttttggtagtgagcgatggcattatgcattcatgtacgaattcaactgagtatccagtttcatacaaataataataacatcttctataaaatgtattcttgtgtattaacacatggggctctgtagtactccagctgagatatatgggaatcttaccctagttttgccattttctcctaacatcagtctacttcttttaatattcattgcttctccccatttctgtagttcagtgcatgttcctttcctctgcaggaactacttctctttcctcacccaactcataaatctctgcctcccaccctaagggtaggcacatgacccaacctgggagatcagaatgccacacccccaatacaggattggtttgtgagtaggcagatgattctgtccatgcacagaactaagtagaagagagtttttacacctcagcttagcttgatgctagcagagagctactggagttctatttcctcctctagggaagaaaaggattttggtttggagataaagccaagataccaagaaagtgggaatgaaagacttagagacagggagtcctggccccttttcagatgctcagatgctggcactagcttgaggcccagtcctgcttctgctcttcccaacagccccttttcagatgttggcactagcttgaggcccagctctacttctgctcttctcaacatttggtaaggggagctcccaatttcttttctaagatagctggtttgacttggatatccatctcttctaatcaagggtcctgattccttgtcattgtcatcaaaaaaatatttgtaaatatttcacttctcgctggtgttgaacaaagtgatttgcacagatacaatctctgcatcttaatagcttacattctaagagctgtacacctggcactctttctctggaactataactgctaagttcacgaatctttattaataatgcttttcagatatatagttaaaaaataattttaatagttgaaaggcatccatctttccaagaggttcagacatactgcaattgagtgctaagtaacttttattttgtattttttaatatttgtatttccataggttattggggaacaagtggtactcaagatggatgaaggacttaaatccaagacaagaaactataaaaattctaaaagacaacattggaaaaactcttctagacattggcttaggcaaggatttcacgaacaagaacccataagcaaacgcaataagaacaaaaataaatagctgggacctaatcaaactaaagagcttttgcacagcaaaaggaacagtcagcagagtaaacagacaacacacagagtgggagaaaatcttcacaatctatacatctgacaaaggactgatatccagaatctacaatggactcaaacaaattagcaagaaacaaataatcccatcaaaaagtgggctaaggacatgaatagacttttaggtatttgtgtgtgcagacctcttggtgtcaaggctaaactgttcctttctctgacacatgggaaattgatgcacaataccttgcagtgtataattccaggcccctaggcactggagactgggttatcttttcactcaactgacagttgatacattgtttgcactgaaaaatctggctttgttgaaccacaccagtttatgtttttaattccaaatcttaccttgttatgaactatttttttgtcctttcctctagagaaatgctaatgctgcttgcttacatggaaagtaaagttaaggagttggtgttgacattttggcttgctgtcacaggcaaaaaagaatagtgctgtttttgtgtgtttaattttctttcactttccccactctgtgtattggaggatgcctttagcaataagtagtccttatccaggtcactcactcattaaccgccaaccactgacagtaatgtctttactagatattttgcttcttttgattaatttgtctctatttcctttgttctaaagcctatagtgagtaatcatatttggagtaatagcagagctccctgctgtgttttcatttgcttaaatcaagacttagctgctgtattgaggaaccaagactgagatgtggggctaggagggcctagggtctgtcaggcactcttcagtgacttgaggtgctgaatgactcacactgtactgggagatgaccacctgtgtgcatccaacacagtcacagatagtgccattgagccaccaggagcagccacagaccatcagtggttgtgctttggaatacgcaattttgtgtttctggtgagctgtaatcttttcttttcccatagaattatttttcattgaattatgctattaaaactcatctttgggtttcttgtaacgtcattgccgagaacgttatttttgcatttcacagtgatttcttgaggaggaagtaagaagtaattgttttctggactcactgtctgaaaaacttgcactttactgaagcgattgttttgtttacactaagtaacaatatgagttttgttagctttttggatggactacaaagcataaaaccaactttgttcctcatctctggcaaagatggagggttgttggcttgtgttgtgtgatgagtcttatacctggctctgtctgctcttgccttttgccttacatttcaaagacctcacttttttcttttctttttttaaaaaatattttatcacatgattttctatacattttaataaaatttcttttttgtaaaaaaagcaaagcataaataaaatagggtagccatttcttctaaggttatgttgaatctaacccaaactcttatcagagaaaactctgctttagatgtagcctaaagcaggaagcaacaaacctgtatacagccaaagtatcatctcaagggcctgcattcaaatctcacacatgtggcttgaaagtgatctcttttgcccttatttcaaggcctaatcttaggttacatagtacttaaagaagcttcagtatgcaatttcaaagcctgtagtagatgtaaaatgagaaaattagaaataaggagaaaagctgctacatgaggacactgacagcaaggaaagggagagaaaaactcacaaagtaagtggaaaaatagaccaatgcaaataaccccacatagtttaacagacctcatcatatctattgtgtacatgtttgtatgacatagattatatctattatatgtaatccagtgttcatagtgttgacttagaaattatcaaccaaattcaaagcttttaggctttgaaaattgtttgaaaagattttcacccaaaatatttaaattattaaaaaaaattattgttgattaaagttgtaatcctcaattaattagaagttttggctatccagagaccttatattccaaagactttagagagttgtttgttagatcacataaattattaccaatatcctacatttaagcttctaatttacgtaaattgtgagcaaaattgagagccacacaaatattcaatctctgaagctcttatggcagcattgatcaaataggttagagaacacatggatacagctttattgccttctagttttactgcaaacgtgttatttaatagtatgcaaatgattggctagatgtacagactgccagggccttcatagcaaacaggttttgtgtttaccctagcatacaaaaatgcttcatctacgatgtatgctgtaactgtgtgtattgtctaccctagcatgcaaaaatgcttcatctaaaatgtatgctataactatgtgtattatattatctataattatatttctccttggtttaatattagatattttcaggtacaagaaatgtatgcacattatagattcaatgcatgtaggttatatgtgtaaatatttattgataagaggcattaaacccctgccttctatgctggataaactcctgaacttagcctccaaaacaccacagtagcctccctggtaagcacagggctctttctctacccttttgtgtctcccacgctcccacttgtctacaagagctgagtgtagaccaagagcaataaagttcatttccccaaaataaggcgtagcattcaggttttgtgatacctgattggtttacattgtttacaggtggggcctcgaaggggtaaaaatcagaagcttcttattctgagcgcaagggcaagatcattgagcagacattgacctcccttcagacatttcttgggaggaacagaatgagaatttcaggggccagtgcctgcaccctactagctgtggcagcctggtgctcatctacttctccagcttgggaaggcctaggttaaccccagtctttggaggcattgttattcctcttctctccctgcttccccgtgtttgtgttctgggcccggtgtaacactgaggttcagaattgctttcaagagaggagcccatttctgtgtctatgcaaggctggacaatttctccaagtggttcagcctgtgggggttaacggggcaaaagcatctcagctagtaataaacactgcttcgcctcttgcttttttatttttatttttgcaaaacttctctgtaggtgtgtatttctctagaggatttcaaaaattctctgtaggtgcgtatttctgtagaggaaggagtggtgactgggccagggtgaatggattatttgatctatattatcttgaattttatatcttttattttaaaatttgggtgttttttgaagtaggaaatcaatgcacatggctgaatatctaaaaagtgtaaaagtatacattgaaaagtcttcctcctaatctcgtgattgtcttcgtttcagtccccatggccacatcatgaggctactgatgtcattagtttcttttgcgttcttctagggtttctgttggcatatgcaagcaacaataaatgtatacctttatgttttctctttttacagcaaggacagtttattaaacacactgttttaaaccttattttttctctaaataatatttcatataagtcagtatgtagactttatgtatttttaaaatgaagacatagcgttccactgaacttagacaataatttacttaactagtccaagattgaagaataaaattattttgaatcttttgttaatagttaatagctttgatgagtacacttatgcatacattattttacacatgttcaagtatgttgtataaaccccaaagtgggaatgctctgtcaaatattacaggtatttgcaactttgatagatactaattgccctcgatagaggtagtaaaagcttacactccacagccttactgatgatatatattataaaacttttagttcttgccaatctaaacgtgaaaaatggtatttcatggtaatttaaatgcttttctcgttttataactgaggttgacatctatcaaaaaattatttgaatttttctgagaactattaatctttgaatccttttctgttgtttatcttttccttcttcatttctaaaagttcctatacagagagattcacccgttatctgtgatatgattacaaatgtctgccctccaatttgttatatgtctttagatccaaataccttattttttgccatgtagaaatttttaatttgtatgtgataaaatgttaatactttatggattctggattttcagaaataaaaaggtcatcctcacttccaggttttaaagaaattctttaatgttatttta

SEQ ID NO: 276 - DNA, 2307 bp, Homo Sapiens
gccgcgccgcaaagcaaaggtcgtgcgttgccggcttggtagcgccttccttctccgacttcccagacttcccagtctgcgcaggcttacttggggacgcagggaactaccaagaaagtgtcagaggaaaggaaaggtgaaacagacgaggaactggaacgggaataagtgggaaagaagccaaggggtttgagagagacttgctgccctgggtttttggtttttgttttttgagacaagagtctggctctgtcgcccaggctgcagtgcaggggcgcgatttcagctcattgccgcctcaacctcctgggcttaagcgagtctcttgtctcagcccccgacgtagctgggactacaggcacacaccgccatacctggctaatttttgtatgttttgtagcgacagatttttgccatgttgcccaggctggtctccaactctcaagctcaaataatccaactgtttgggcctcccacagtgctgaggttacaggcctcagccaacgcgcctggccctgctctggtttttttagggagtaagttgttgcggaaggacgcaggtcttagccatatttttgaataatacttcgttatgggaatgaaaccgcctttgcaaaattatgactgatttgggaggccgaggcgggatcacttgcagtcaggagttcaagaccagcctggccaacgtggtgaaacctcgtctctactaaaaatacaaaaattagctgggcatggtggtaaacgcgcctgtagtcccagctgctcaggaggatgaagcaggagaatcgcttgaacccgggaggtggaggttgcagtgagccaacgtcgcaccactgcactccaccctgggcgacaagagtgaaactacgtatcaaaaaaaaaaagaaaaaacctctgctccctgaatgctcagggagactgatttgagtaataatagaactccggtctcacacagctggctctgcatgaattactctttctctattgcaattcccctgtcttgatgaatcagctctgtctaggaagcgggaaaggtgaaccccttgggcggttacagcaagaggagatagtccagagactcagccctcgtatcttgaagggtttcttggttttttgtttttgttttcttaaccaagttgtctgctccaattgctggatttcattcacaaggctttgctaggaccagttgtggcccttggaaactcgtggaggagaaaagctgtgaaaataggcacacatgctggaggaggaacagagggcaacacacataatactggataataaacttgagaggcaaaaattaaacaaaccgacaaacaaagttggaaacccagactgtccaaagcagcttgtaatcaggcttacttcatttatattagcttattgatgtggcaactatttgacttttacttacatgatccgctgtttctgtggtgtggttccaatacaccgacgttacaaaactttgaccatcttaaaagccagattaatcgaattttaacaaccattgttctgaaaactgcagaactctcgacaggtattgactgttcaaactacactgtcaacctagacgctgaggcacgagatagaacttaaagcatttactttagccaaagtgaggacagctgcccagaagacccagacccaagtaaccttaaatgtgaactcctgtccacctttgttacaatcaggtttttaaaggcaaaaaggggacagggagttgactgatacaaagttgtaaagaattactggtttgtagaaatagtattggttagtggttggctatacgttaagctatagggtgcgagttacagtgtccagtgtaccattattaggttaatttttagctacttgtggctatagtaagcagtttaaagagatgaatgcataacaaagtggggagtaggatgtaattgctgtctcattttaatgtctctctgggcctggtaatttaaaaggatttaccttcctcatataaaagttcttttctcggcactgagagatttgattatactctagcatagcttccagtagcttaaggccttgtccctaggctgaccccagatcccgttaaaatgcttccctgaaatcaaaactcaatgcctggagaatttactgtttgttccagccaaaacttgatgataggcagataggtccctgaaccccttcttagagcagtcactttagaaagcttgtttctctacccttggtgatgtaagtctaccacccaacacagtttcctcaaagacttgggagccatctctttgaaatgcaaatattcagaaagataactcaccctagctccta

SEQ ID NO: 277 - DNA, 32707 bp, Homo Sapiens
gcacccacagccggtaggcccccagcagcaccagagccaccagcgccacgttcagcagcatttccccgccccccgtcagaagcgccaacgccgccgccgcccagcctcccccttccgctgccgctcccgcgtcgcctggactctcgctgccgccgtcgttgctgctctcgctgccactccccagggtgcctagcttcacgtccccatcaccagccgccatcactgcccgccagcgccttcctcctcctccccgccccctgccctccccaaccccacggccggccccgcccatctgggggcctctcagccaataacgtgagaagagggggcggggtcaggccggctcctgattgggtgttgacggggtaacgttgtctcggatctcccgccccctcccttctttcgctggccgcgcacgcgtgcaacgccccgcccacctcgccccacacttccctgctctcactccaagcctccgctaggttaagtagacgagccgggcgggtctgaagaaaagatgctacgacggccgcgcggacgctcatgggcggggcgagaccacagcgcgtgcgcgggctcctgagcgccacgcgctcgcctttcgttcgtaacccctgcgggaggcacgccccgcccagtctccaggctctgcgcgtgcgccctggaatcgcttcccttcctaggcctgcgttcgcgtccgcaaactcccgcctccttgcgctccccccgcccgggagcttcacgtgcgccttggcggccgcgggggcaggtccgggctggacgcctggcggaggacgcgggcaggtggcttgtgggaggctggggcatagttgagctgcaaggcgcaaaccgatgaggggcgtctgcttttcaccagggcgccgtcgcttttgtcgggaaaccggcagcgtaggcgcgcagaccgggaagcggcaagaagatttggccacgagctggggtcttcctggaacggagagaaagcacggaacccgcaccgggcttctctggcatcggcagtctacgtgctcctcgcgctggcaccgagcagccactccccgctgggtttggcaaaggctgctcttgtagaattttaaaggatttagagtctcattattccttgaatcataacttctgcggccgtagggaagtggacaggttgaggtggtctttctattcgtcattcactcttatttgcaggttctgtttcatgtacttggacgtcttttagcctctcacaccttgaaattctagtgtgaaaaagtgacctctgaagtctcacgcactcaactcgtttgacgaactcgtttgacgtgttctctcttgccctttgttgtctgttgtcttgagtctcatagaataggtttgaacctttcactgtcggttttgtaggagtcactgaggatattgacgaggcaagtgacagggtcgacactcttgtagagaggctgtatagcaaccaggtgtctgaaggattagaggctggggaaagagtgggaaagcagttagtaggctagggtatttgtgcgtgaggtgaggagactcagagctaggggagacattagagcaggggttggcaaacattttttgtaaagggcccgatcatattttaagtctctgccttaactactcagctctaccttgtaacgagaaagcagccatagacaatacttgaatgagtgtagctgtcttcagtaaaactatggacattgaatttttaatataatttcaggtatgaaatattcttttgatttttaagaaaatcattgaaatatgtaaatttttttttttttagttctggagaggtgcaaaaacaacttataagccatattgctgagccctgcattagaggtacctgagggagagcgacacaattggtagtaaatgaccatatactctatccttcaatatggaacacttttggaagtaaagtagggcattaataattatagccagagaccaggagttatatcagttttatcccaggcaaacctaaaggaatagtcaccttaaggttaagggttaggagaagtcaaaattgctttaggacttggtaacagaaaatgggaggtgccagtgatggaaataggaagataaagaagaaactggttttgaggagaagatagctgtagcagtcccaagagctgtatacagttgagacaacattgataggaaggaagaaagcaccccagaagcaggccactccttatatcttattgaccagaactgggctattagctgtccctaaagcagtaacagacaaggagcatgggacatccatgattgcctagtgtttatctggcttttttaattcttattcaggactgtgttgagcattgctggacatttaccatctctggttccttccagctaaatgtcagtaccacacctcaggcattgtgacaccgtaaatcaaccgtttttccctcccaccccccagaggtgtggtactggttgagaaccagtagcttagaccctcaggatttaccttggggctgaattagtgtgtgtaggtttcttttccagttggtttggagggaagagaggaattggacagtattaaagttctgctgtcaaggaagtgggctggggaatgttgggtagctaaccaacattggctgccacgtgaagtaaaaaagttttcctttatatccttgataaaatagtgtctcgacttcttcacacttgaagccttcccaaaaccccagcttttttgattctcattgtaagccccttgaactggactagttggaagttcttattttccaccctaagtaacaagctcttgtcccaataggatactcttgctttgagtactgcaataactttccaattggtgacttgccgtcagtcttttcctatttcattcctacacgaagagactagaactgtgttctgatttcctttgctcagacaccaatctccaggggtgctctgtaatttgaagaggacaactcagaaagcactcaagggcctccataagtccctgagtggcttccctgccttcccgttccccagcaaacaatcccttggataccctctattaaatgatacgtttccccttacaatacctagtcccttgccccatatatgctatgtgtattgcacagtctaggacttgactcatgctgtttcctcacggagcatgcccttcttatttctaaccatacaaattccatgacctatccattctttcaattctacttccacctgaggcctctatcagcccacattaacctaccttctttgaatttctgtgtgttccttacctgtaccacccattttggccttttattttatgctcttcttgactattctgttattgaaactgtcctttagatcccaagatttctactttttccctgcggatgcttttttattttttttatttttgacttctttctaccctccttttcctcttacatccctgctttgcctagaggacatctacaagaatcgtcatgtacattcttttctcctgttgttagcttttttcccctgacacttcatctatttactgatttacttgtaaatctctggaagatattagtactagccaccaaatatttctatttctttttccacacacgtagatttggatttccctactccttttacctcaagaatggccaatgaaatgtgattggaagtgacttgtgtcatttccaaataaaagctttaagagcctgtggacatttatcctgcgctgtttcttcctgccaacagtgatgaaatattttaattatctattgtcccatgacaaagcaccttaaatcttaatggtttaaaacagtcaccattttattatgtgtaacagttttgtgggttgactaggctcatgggcagttgtctaatcttgctcagggtctctcatgtggttccagcctggtattgtttggggctggagtttttggaggctcaactaggttgctagagtagctgagcttttctatttacccatgccgttccaaagactctctgattcacatggcttcttcagcagagtagcctgacttctttcttgcatggtggcttaggattctcaaatgcaataaaagcaaaaacttcgaggttttgtaagtcttaggtctggaaatgacatgttgtattggtaaaagcagttacagggccagctcaattttaaggggagaggaaataaacacttgataggggtggagggagagtgacaaagaatttgtggccatctttattacaaaaatttttgtcaaccacagagttacaggaaaatgtggccatctttaatcactactccaacgatgtttcaaattgagtgggcttccatcagccagggtctcggagacaggacaaagtggaaaacagctcccaaataacatacctagggcattttggggacagactctacagtttactagtggccccaggacatcctgcaaaagaggtgaaatcagtattggagaagtggtctcatgaagatgggagcacgactactacaattgactgctgacttctcacccaaggaagtaactgtatcccagcctaatctcagtggataagcccacagggttaaggtcctcacaacattgtgcaacaagtgtgaaagatgtagtctccatttacggctactgaaataggctgagagaggagatgttcaagaaaaagaacaacttcagtggaagaagaagaagataggagcccaggtcctgtgtttcaccaagacagccgtgcaaagcagatgctgccaaaaaggtgcaaagtggtttgtcagctcttctgcatgttctaacaaattagacatgcatcccaaaaggtatactacaatattaaagcttatttatacacactgtaaagtttcccctgagtgtcctggcaggcacttgcatggctgggcagtatccgtggactgattcctttgtgaattacatggagctgacagggctgaaacccacagctgactcggaggaggatggaagcttgtgctgggcaaggggctgaagcccctctgtgtaagtcatattaatctcctctgagcagagtgctacaaaattactaaagctgcttcttgaagacacttctaatgcagtacctaatgaaaatgtcaggtgcgacaagttattagttgctgcactgctgttctgaagtcccaggtatttctctacctgttatccatgaatgtgagttttgtggggaaggcagtcacaggctgaggaaagcatcagcagtcatgtgtgctgtcaggcctgtaaagtgagtgaggacaatgaagctggttgaagtgccccaggaaatggccagacttccatagtggaggtgaggtgaagaattgagtccgggcaaaggtgtgtggggagaagaagctgcctggtgtacgatgctgagtaatgatacaacccaaatcatctgactctgcagatttgaaagttgccgttattattaagaattcagatgggaaaagaaatatggtttgggttatttccatagtcattccagaaatccaggctcagtttggcatttattgacataactgtttatattggatctgtgtagaagtttgtatctttctgacttgcatgatacttcagcctttccttggagtctctgtggcttctcttcctcctttgctcacctccagtcattgtcaaatggctttgtgcaagttactctttctcggcctccatttttttggatcctgcctttgccgccctccttgcctgtactctgtccagtccaggccctctggacctcttgcctggacctccaagctctccctcctcccatctcttccctttcaaccttcctacccagagcacagcagtagtaacagctaacaccatttaataggtatcctttctatgccaggccctggggttgctatgtcacatatattatttgtaatgtttgcaataaccctggaaatggtattattacctccattgtacagtttggaaggcaccaaaaaaggcacatgggcccacattcatgcaagctaatgaggggcaaaactggaatgagaacccagggccactgggtccctcagcttatgctgttccctaaccatactgcttcctccactcagaatcctttagtggctcccattgcctaatagatcaagtctgggctccttatcttggcttctgggtcctctaaaatgtagtctgctaggtttccaggctttcctctccacccctcacacatcctactctttagccaaaaaaacagacaaaaaccctaaaaacaaaaaaatccatttttttatttatacccgtgctttctttcctaagtgcttttatatgtgctatttctcctgccaggagcagagactgtcatgctttcctctgtataagtaagtgttgcccaagaaaacattgaacagaggtgggctagagatccatttattttctggttcacaaagggcatattggatctttattaaatagtctaaaatgtcctttcaataatgtttttctttaatatctttttaaaagacatttaaagtgaatcagaaagcaattaaatgattaattgctgtggctgaattctgctgccctcagcctctgtggatgctatctcaccgattaacctccatttctaagctctgtctgattgagggaagcaatgacagaaaacgcttggcctgtcacatgactgatccttgctgtcatgagccatcgttttctaactgcaagctttcattttcaaagccctggcatgatttcaggagctgtaaaccctcatgtgagtaagtgagcagtaagaactggcagtttttcaatcttaagtctctccagctttaaacccacatttagctgtgattctttttttctccttaagttggacatttttttagtgaatacttttttgataaataaagtggggtgaaggtgaacttgactgagacagatatgggttggtccgtttagggctgaccctggaaaaaaaaagttatatcagtcttgacattaattccgtagtcagagtaggtgagagaggagtagattagtatatagggttcccagccttcccagtacaaccatggactcagagttggggacactaaaaatgtacatgaagtttatgatttcactggtagagatggcccacaatgccagtttggacaggcattactctaaacgtggtggggaagtcaggagacatctactccaaggcataacctctaggacagtttgtggggtatcagggaaggatatatcattggaaagatttctagttgccatacacaaataattgggcttcagtttaatgcataattaactgttctcagtgtgttattagttggacaattggattattacattatttacattagtgtttataggtaatctgaaaacaaaaatgtgaatataatatgaactacctcaaagatttgtctctgcttaatagttttatttcaaatttgtatatcaaatgtttcattacccttttttcattttattttttagctttcaaaacaaattagcaagaggaggaaagaggagagggagaaactgtgcacaccaccagaatgttatagtaggcgatatcatgaaagcaatgttggaactttatactcaggttttgattgtgcatctatctctttgttgtcttatcctttatcttcatttttaccaagtaattattgaccatcaaatgccattatggtaccaacttaagaaatggatgtaaagaattctacagggaaaaaaagcacattgtcagtgtatgaaatttatttagaagacagttacagacacatataaaaatgatagcagcttatgtttgcgaagcactcactatatgccaagcactttctgttagctaataataatatttgctcatttaatattagctcacataataatattaatattattagctcatttaatcctctcaacaactgtctagggtaggtactattatccctattttatggacaaggaaattaagtcaacaagagatgaaataatttgtttacagtcacatagctaggaagtggtagagtcataagttgaacccaggcagtctgaatccagaataataataataaaaaaaggtataaccagggtggaaacttattttgctcttttcaggtttcctagactttccatcaccaccagtgaattctgagtgacaatagtgtggaatttggaagaatggaagagaaactgaagtggagagatggtgaaagagaagaaaaaatgaagaaagatgcttgcaaaaatactgctgtgggtcctgagatgaggattctgggagggctgaaatggatgcccctgacagctccctttgagttcctgttcatctgaagtacaccagctttctagatatgctgtcactttccttctgcagagccacagtggtgtcctgtcttctcagacctcttctcacctcaaatcacttaggactcggccaccagacagatttgggatttcagaacttttcagatgttagaaagttcttttctaaatgtgatgaggaattacggaatcataaaatggaagcagagttaaactcagacatgtgggcactcaaggcaattaggagctttctgcgatgagaaagggatcagactgatccttaagactttatgcaaccccagagtattgcagccacctgcatgccgaaggtgtcaagagtgttctcactgctgcctataggagggtcttcagcctccagtgatccaaagtaccaggtaaaatatttaagccaacagaaagaacgtgttttattgtgttttacatgtcataaagcattctctatcatgagatatcactctgtatcggtaagacaggcttgaatttctgtcttggttctgccactgactagctttattccttaggctaacctgttggaatctcagttttctcactgtaaagtgaggataattattttatgaggatagttatgaaaattaaataacataatggttgcaaaacacttagcacagcactaagacacaaaatagacaataagtgttagttacctttattcctgtcccctttcctatccagacaaaggctcagtataaggacaaatattgtttagaacttctttttaaacctacgagccttacctttcaagaaccgcagatttgttcctgaaagttacctgtgtagtgagggttttataaatcaaattttactttcaatgtacagaggagctctttgacagagtcccttttcctgagaagtcattgtgggtttggcatcctgttcagcctggctggggccaggggagctgaactgtaatgacaagcagatgtactattgttctatgaaaatagtgtctggctccagatggggtttaggaaaaagtagtgatgatttctgttgaggaggatgggaattctgacccactgagctagctggtgaagaaggagagtaagacatgtgggtaaatgcaggttaagaaaaaggacctctagatcaactgaaagcctactagaagaacattaaaagcagataagaaaacaaggaagcaaacaaaactcgacaagagaaagaagagaccattaggaaacatccaggataattgctgtcatcattaaagctcccatttgttaatctgttacatatgaggcccaacactggatgatttaccaacatttaacctatcctctcacttttcaatgaattggatattgtcaaccccattattaatggaaaaatgggagctctagaatattgaagtcacttggctattaagtgatggagccaggactgggattcagaatccaacactcatattctttccatgaggtgtagattccattgagaagaaggtgtgtgcctaacaccgtgagaaagtcttggccctggtaatgctggtgaggccagtggctgagaaaagaatagctcttacctaaggctgagaacagaagacccaaggttgtggaaaactgacagtggtgcccttcctcacacagagtgcaaagattggtggcttacctgcttcagactcttggacgtgctcttaaatgcagatcctggcagtcagagaggaaaggctgagaaaagttcactctttgccaaagtaataaatccttctctttgatccctcaaaagttgatagacgaaaactcctcaaagcacctaggggtaggaaccccacttgagagttgtgggttctccatttcatcacagggatttgctgtgaaggaatcctgtggtaaactccataagaaaatgtaaataacatcccctctccaatttatcttttctgtaaatctggcttttcatatattaggtttctttacagtaagttgaaaccttaagaatagatttcaaaatatttaggaaatggcctatttattttgaatgatattcaacaccattaaactagagtgttgggagaatatttggacattccataatgatttgacttgtaacttaatataacagaactaaaaacaaaaaccacatgatcatctcaatagatgcagaaaaggcttttgatacaattcaacatcccttcatgttaaaaacccttgacaaacaagacatcacagaaacatacctcaaaataataagagccgtctatgacaaacccacagccaacatcacactgaatgggcaaaagctggaagtattcctcttgagaaccagaacaagataagaatgtgtcctattcaacatagtactggaagtcctagccagagcaatcagataagagaaagaaaaggcatctaaataggaagagaggaaattaaactccttttgtgaatataacatgatttgatacctagaaaatcccatagtctctgcccaaaggttcctagacatataaacaactttagcaaagtttcaggatacaaaatcaatgcacaaaaatcagctgcatttctatacaccaacaatgtccaaggtgagaaccaagtcaggaacacaatctcattcaccgtagccacaaaaagaataaaatacctaggaatacagctaaccagagaggtaaaagatctctacgagaattataaaacactggtgaaagaaatcaagagaagacaaacaaatggaaaaacatttcatgctcatggataggaaggatcaatattgttaaatggccacactgcccaaagcaatttacagatttggtgctatttctatcaaactaccaataacattttttatagaattaaaaaaaaactattctaaaattcatgtggaaccaaaaggagcctgaacaaccaaagcatttctaagcaaaacaaacagacgaaaacaaaaaacccaaacaacaacaacaaaaaccagaggcacactacccaacttcagactgtactacaaggctacagtacccaaaacagcatggtactggtacatagacacatagaccaacaggttaaagaatctagaaataaaaccatacacctacaactaattgatattcaacaaagtcaatgaaaacaaccaatggggaaaggactttctattcaatatatgatgctgggataactggctagccacatacagaagattgaaactggatccctcccttttaccatatgcaaaaattgagccaagatggattaaagacttaaatgtaaaacctaaaactataaaaaccctagaagaaaacctaggaaataccattctggacataggccctggcaaagatttcatgacaaagactccaaaagcagttgcaacaacaacaacaaaaatagataaatgggacctaattaaactaaagagcttctgcacagcaaaagaaattatcaacagagtaaacagacaacctacagaatgagagaaaatacttgcaaactatgcgcccaacaaaggtctactatccagaatctatagggaacttaaataaattaacaagcaaaaaccaaacaaccccaataaaaaatgggcaaaggaaatgaatagacacttttcaaaggaagacatacacgtggtcaataagcctatgaaaaaatgctcaacatcactaatcattagagaaatgcaaatcacaaccacagtgagacaccatctcacaccagccagaatggctattattaaaaagcaaagaaggctgggcatagtggctcatgcctgtaatcccagcactttgggaggctgaggcaggtggatcacgaagtcaggagatcgagaccatcctggctaacacagtgaaaccgcatctctactaaaaatacaaaaaattagccgggcgtggtggcgggcacctgtaatcccagctactcgggaggctgaggcaggagaattccgtgaacccaggaggcggagcttgcagtgagctgagattgtgccattgcactccagccagggtgactgagcaagactccatctcagaaaaaaaaaaaaaaaaaaaaaaaaagcaaagaaataacagatgctggtgaggttgtggagaaaagggaatgcttatacactgctcttgggaatgtaaattagttcagctactgtggaaagcagttcggagatatctcaaagaacttacaacagaactaccatttgacccagcaatcccattactgggtatatatccaaaggaatataaattgttttcccataaagacacctgcacatcgcaacactattcacaacagcaaagacgtggaatcattctaaatgcccatcaatggcagactggataaagaaaatgcgttacatatacattaaggaatactatgcagccataaaaacgaatgaaatcctgttctttgtagcaacatgggtggagttggaggccattatcataaatgaattaatgcaggaatagaaaaataaatactgaatgttctaacttataagtgggagctaaatgatgaatacacatggacacaagaagtaataaacactggagcctatttgagggtggagtgcaggagtgagtgaggactgaaaaactacatattgggtactgtgctcgttgcctgggtaatgaaataatctgtacaccaaacccccatgacacgcaatttacctatgtaacaaacctgcacatgtaccccctgaacctaaaataaaagttggaaagaaaaaaaaaatgaacctctgagacaatattataaaaattagcacattcaaaccacggaaattgtcaaagtgtagctaaaatattaaaccttttagatatgttgtctagatataattatcccattttatagccagtgttatggacatccaaagacaatgtcaattttgctaataaactgcatcaaataagtgcatgggaaaaaataaaaagttgatacattaaaaaaatgtttttgatacataacttttattttgaaaacttgaaataaattgccattgtgaatttggcagcttttaccctggcatgcctacaaagaatgtgatatacatttaatcacgaagaatgccacccagtgataacagtggtactggggttatgattatgttttaatttgttttgtgcagaaaggcatgaccatttgcaaagctgtcctatgaaacgtatcatgtactagtcacctcatgttatcagcatgctcctggaggagtaggcaatggattttttcaccagttcgcactgtgcaatctcttcctcatgtgtgtgaactttgtgggatgtcaagtaccccattaaaattgaatgaagtatttgaggggctcccacaaaccctctagtgatcttctttcaacaaacagcattttattgtgtaaattagaaaaacaacacagagtctggcttaaagaggatggaaaactggcattacaccaagaaagaacctgaacttcagtctttgacctcaggagacatccaagtattaaaacagaattttttttttttatttacatggaaaccctgatggaccaggaaattctttataatgtagagtctggtgctaagtcttactttcaggtgaacccaaatgaagattattgaactcactgttgaatctcatcccctgtctttttaacagcagtaagacccctcttggtcagccacaatatggggaaactcctcagcagctgctgttatccctaatattattgatatcacttctacttgctcttgctatgtttgtttcttttcagcagagctttcacagtactctaaaaagtagaggctcttaacattaaaagtttccttagccttttcaataaccctttcctggttgtctatgctggtggcagcctcaacctgaacctgagtgaatttgtttttctggcctgagctttgctgagcctcttaaggggtagaccgtctatgtgtgtttcttttatgtgagataaaacgcacaatttattaaatatcttctgattcttagacaggatctcaagggtggagctactccagggctcattgattttcatggctttttggctgtttgaaaaagagcctcctttgacatcatgtgggtttttgctatttctatttaagggtatatcttacatgtcagatatattattattgctgttttagttctagacagcaagtgatatgagcaaacaacaaagcttccatgctgtgaaattatgcatttattaaagctatcagttgacacttagctttgaattatttatatttttctataaactgtcgacaatcataacgggaccagaaccataggttcatatgggaaggtgatttactcatcttcctttcttgcccttaggaggagttgcagacagagtattatctttttttttttttttttgagacaaagtcttgctctgttgcccaggctggagtgcagtggcgcaatctctgctcactgcaacctctacctcttgggaccatgcctggctaatttttgtattttcagttgagacgaggtttcaccatattggccaggctggtcttaaactcctgacctcaggtgatccatctgacttggcctcccaaagtgctgggattacaggtgtgagccaccaggcctggcccagagcattatctttatcatgactttttcctttatatgtattgactatttgcaggtgtatcacaactacaggagacagaaagggaagcggtatacctctttctgcatgccttgtgtttaaagcgtgcctagattctgataaaggcttgcctgacagaaaaggcagaatgccaggggtctatcccaagatactgagtcattcctgtgtccttaaatgccaaagaggtaggatcaaaacaccagatctaaaacttgacaatataagttgttagacttaatctccaccagactcaacttgtatctcagcttctcactaatctcctatttctcattcactcactggtaccttcagcttattctctgttttctcctttgtttgtcaggttttggcatgatatctcagacactttttttctccttgcttcattcagccagccccaggtgatttgccttcccagaccactggctttctcctgaaaagagaagacacaattgacttctggtctttcttgctgtccatactacatagattgttattccaaagcttggtccaggctgagttcttggacactgctttaaatgagtggcccttgaccagaagggagatctagaaacaaacacaattttcctggggaagctgaggcattgtgtttgaggcccacgtatctttgtactccttccgtcctgtgatccagaagtctatttatgccagtcttgcttcaacctctctcacaattgcaggggaaaagtctactgaagggagagaacatttcagctaggggatataacttaaggtgagaaataaaagtgagacgaagaaaacatgtttggtgaactggtttgaccagaactcatgtttcaagttggaaatgttcaaataggaggaagataactaaggtaaaaatattaaagactactattaaaaatttggaattcaatagttaaacaccacaattagagatatttttatgacattactgatattaggattgtcatttactgagaaaagtgtgtaaaaatctcccactatgattgataatagaatgtttattttccttgaagttatttcaattattactttatttattttcgagactgtgttattcattgcatacaagttgaggattgtgatatcttcctcgtgaattgacttttgtcatcatataatgactttcttacctggaacaatgcattttgcctttaggattactttgtatgatattaatactttgtcaccagctttcttttgtttaatgtttgccccatagtaaaatattatcttgccttttggaacatcttggaatttttcctcctgcctttctaacctatcttcactgtgtccttctatttcttctttttttcctcctactcctgattacccccaaaacccaggccttgaacataggggtatatctgtgtgtgtacgtagatgcacgtgccaacttttttatctcaaggctttaactgttactctatcattgaaactgcatttcacaccttctctttagtctcaaattcccaactgccactcatcatcttcccttcccttgcctatatctctactctattctctttttctcttgggcttgcagccttggagtcaaccttttttccgctttatgctctatattaagctgtcataaatgccatgacctttgctgaaatgcctaacagattctcagcaataagctcacagggaaagggcaaagccaggagtgcaggacgaggggaggatcagtggcagccatcctgtagattatctactgaaattctttccattcctttgaatttctgctcctttgaagccctggattataataattatcttggaaagtttttcagtccgagatccaaaaattcttaattgggacctcttcagtgaaaatgacattcagtgaaaatccctggcaacattttcctagatgagaaaaagaattaggaatcagatgaagacgtgagaaagccatgacttcacaatgtgtaaagcatgtgctgatagcttgtggaagagtgtcttaggaggtccctgtcccaatgaggataacttcttaatcagaatcttgtttccaagttctccctcaactccaggataaactttaaaaaggaaaacaaaatccttgctagaaaattttccatcatttttctcttttctgtatgagtagcatggatgaaagagttctgtgactgagttgaggtttgcatctaactattgagccatggcaaaaaatattaagcatcactatttgttgtcatataaggaatttagtggggtttgaggttttaaatgttattgtttttctctatagtaatatcccttcaatccccttggttatctttctagagcaatataaaatgacctgacttctgtgagaagtctttagcttttggaaatcctcacctaggtttctttcacctagagaattggtttctgagaaaatcctccttccttttactgaacagtgaactgggagcctttaaatggagtggaggtggaggaagatggaagtgaggcaggtagaatttgtcattctgtccccctgggagaatgaggaaattagcatccagttctctagaacctagagtttcagggatctatttgagtgggaaaaagcattccttgtttttttgtgacctacttaaacattctgtgaaagttgtaatcatttgaggttttctaagaaaagaaaaaaaaaagtctaaatataatcctaaaagggagctaacctaacaacaaagaacacccggttgcagagattatttctctggaaattggcaaaaagagacaaaaatcttccctggcgattactggctatacctgctgctacacctgatttcatgctttttattcctggcagcactattggccttctccaatgtgggcttctccaaacttcacacccaggggcacacaaatcctatttctcccatctggaaagctctgctcacttcttcccaagtccgcttcccacctgcctttgaaatgcagctaaagaccacttcacagagattccctcaatgctagctcttccgctatgcccttcattctttctcttaaacccctagaactcttagaacctgttaacagtgtatgacatcctaagtgctctaattcagggacagcagagaatgcagtccaggctcctggtccagtagtggggatggattgtgctggtccacccgcatgctgccattcagtctgctttatcgtgagcacttcccatttgccagcaggggctaatggtgtaggccaaccatggaagaacgtgaagctcatctcagtttagctgactggatgcagcctgcagcaagcatgtgttgttgtttcatacattcctgtctttgctctgtgtgcacatttgggtttcatcttttcctcctagcggcacacgttcccatagactttgtgcttgcatgtattaaggaacattgcgttgtcaaaaggtaataataagagcagctaaaaattattgagaacacgtgatgttgtaggcactcttttaaacatttttatatgcatttaatccttgcaacaatactgtaaggtagttattatcccattttatggatgaagaaaataaagtactgagaggttatgttactttcccagggccacatggctagtaaattctaaagcccaagctattgaccttgagcctatgctcactccaggctttggagttgtaggagatgtgcaaggcttaatgaacactgagtgaacttatgaggcagttcagtcatctgacatcctcattaaatctgatttgaagaaatgacagagagaaagttgatagagcttagaaatttggttctaggtgagaccttaaaagtcatgtcaccaaggaataagagaccctcaagaggttagataagtcctctgtgcatcatttcctcctgacctgtatctcaacgtcaaagctgtcaacaaaaatgaacagggagcagcacttagtttgtatgatgtattcataatgtttggggtgccaaacagaagtcttatgacatggtatttttgcccggctaggtttttctatactagggcatggccatggttttaatgctttatttattaaagttattagaagataaatatgtgcaatcattgaaacttttcttattttcaaataagaaagggaaacttaaaaaatttagatttagcaactaacttttatttagaactgccatatgatctaacataaagttttcttacaatctgaatttgaaacattcaggattattttactaagatctgaaaaggtaatttgacatactatctataaaagtgtgaattaccctggggattaggaggtgaggttctgtagtaattaggtatgccaaaaataattttttaccctcctccccctcttccttctttcttttctgcatttacatgtattgctcttggtctctcatgtcattctttcaggattttctaatgtaatgaatttctctttctctaccctagagagtaccattatttccattctttcatggaactgtaagtgtgtgcaatttgttgacctcgtggtatttcaaagaactgtaaaatctcaattatcaggaatgcccagggaaaggggcttttaatggaatggatttttctcttaaactgaaggttaatcaggactcttctctcccccccgtttcaaatttattggttgcaattttttttccctaatctgtgagtgtactttctgggctttgctgaaatgggaggttatctgattgactagcaatcataagccctatgtttaagtccacattcttccatttgccagctctatggtttgaggaagttatgacactgagccatttgaaaaatggagatagcaacacttgtcctacctatgtcacctgggctgtttagtgtatcaaattatataaagacaatggacttgctttgtacaagtcttaagttttattttaatgaattatgacaactaccaagttctgagtgcctaggggccaggtgctccatacacattattgttatttccacaataaacctactatatatatagatgtatatagatgagaaaagtaaggcttgggagataagtgacttgcccaagattatgtaaataacagtggaactaaatttctttacagcaaattgataccttgattaatcaaaagtctttattctaagtaccatttcttgtggataaagagagtatagaagattgcctagaagcatactgaccttaggatgcattgttttgcttagggttcttttagttataaggaacagagatgttaggtttcagagggatttcagagaaacccaatgacagaaattgaattatagttgggtgttaaggaagctgtcatgaatcaagcctactcttgcctctcctctttcttctcctctccttccttcttttcgctctctctttgtccacacaggcaaaatcttccttacatatgtggccttcactctcttttgtctattgactggcttcctcataactgtagcttgcatatggttcatcatatggtttgggtctgtgtccccacccaaatctcatgttcaattgtaatcccccatgttggaggaggagcctggtgggacgttccttggatcatggggatggtccttcatgaatggtttagcaccattctcttggtgctgttcttgtgacagtgagtgagttatcgtgagatctcgttgttttaaagtatgtggcacctcccctgtctctctcttcctcctgctccagccatgtgaagtgccttgcttcccttttgccttctgccatgattggaagttccttgagacctccccagaagctcctgtatagcctgcagaaccgtgagccaattaaacctcctttctttataaattacccagtctcaggtatttctctatagcaatgtgagaatggactaatacagaccgtagtagggactctacacctccatatagcatagtatctcttgatctgtccatttagcttttgccctgttgcttactggaaattctctaggtcttgtgattcagattcctgaaggaggattcttactggcccagctcatctattctagtcagatcccaggtcactgactgctacaagctcatggattggctgcttttgcatcaggtgtcctgctttggtgctgcccacttagcaaagctaagggaagactaggaaataaaagcaatgtgacagctacatctatcatcactattaaagaaggctatatatcacgatatatttgtttttgtaaaaatccttaatattttattgttatcttttagttcttattctcttcttttcaacgtagtccctcgtctttcaaaatatttctcagtaattgggttcctgttgactcaaattttatgacacagaaccttgtttataacctcctaacttaccattactaatatcagttctgtagtcatatataccacaattttatatgtttttgaagaaggtagtaggaaaatatgtcatagtttaagttttatactaagcataagtcatgtcatagtagaagtcttttttctattaatagaagatgtcatgtctcaaggttattgttggaatataccgtaattaatttttttaatccttaaaataggagaattgagggtttccgagtagtgtgaatacatgaaaagtgaaaaaaatgggtcatcttctaggaaggcctgcagaacttaaaactgagaacaggccttagacttgctttctttcctctcctggcacttcctgggttttgttttcctccctgctggtaggttttgatgggaaggcattatatttctgtttatctgaatatctattttactcacaaacttttttcttttatcatagctgatatgaagtgaaaacatgtatcacttggctcagcctgaactgctgtgtgataggatgtccctgtatcaaccatgaaccagaagtggaacagggacctaattaatatttatgctgaccttggtggctgttgtaaaataaactaccatacatctaaaacctcaccacactgggttggatagctaaaacttctatactattcatggcttaacttctgagatttatatgcctcttgaagagaaagtactcatcactgctgaaagtttaactttctatttttgttatggcctccattacatttccaaatattcctttacttaattttatccataaacctgaagccttcactttcttagtgaggtactagattctttgtatataaatttgactgtattggaaagcctgggtccatgtgtttttagtccttaactctccagtccttgtagatttccttgtatataaacactttaactgagttatagaacctcttcctctgtgaactggtgtcaggctctggtggtaggtcctcttcctactctacatgctgcctaccctcttgtatggaaaaagattaactgttttcctcacactcagcgcaaaacacttctggtcaccaaaacgtgtgggtttctcccacacaaagcaattctctgacaccagctggatatcctacagttcagttcaattctgtgctaactgaagttggcacagactccacgtgttaagggctcagcccctcaagactgtccccggcttcagatgtcagtcactagtggtagtttcccatgttacccatgacttgtgtcagacttggctgtaaactggagggtcccaaagcccccttctctggtttgatcacttgttagaacagctcacagaatgaggaaggtgctttacttattattagccattgattataagatgatataagtcaggaacattcagaaggaagagatgcacaggtgaaggtatgtgggaaggggtgtgaacttctgtgccctctctgggaccaccactctccaggtacctcctcctgtttggcaacccagttatggaggcttcattacataagcatgattgattaaatcaggccactagtgattttttaaaaaatttaattaacacctaataattgtacatctttatggggtgcaatgtgatattccaatttatgtatacatgtgtaataatcaaatcagggtaattagcatatccatcacttccaacatttacaatttgtttgtgttgggaacattcaaaacctctcttctagctacttgaaaatatataataaattaacgttaactatagtcatcctacagtgctaatagaacgctaaaactttttcctcccatttagctgtgattctgtatctgttaaccaaactctccctcttccctacttccccctacacttcccagcctctagtaactactattctactgtctatttatataggatcaactttttcagctctcacaaatgagtaagaacatgtggtatttttctttctgtgcctggcttgtttcacttaacataacgtcttcccagctcatccatgttgctgtgaatgataagattttgttcttttttatggccgattagtatttcattgtgtacatataccacattttctttatccattcatctgttgatggacactaaggctgattctatattttgtctagtgtgaatagtgctgcaataaacatgggagtgcagatatctcttcaacatactgatttcctttcctttggatatatacccactagtgggattactggatcatatggtagttctatttttagttttttttgaaaaatctccatactgcttcccataatggctgtactaatttacatttcaaccaacagggtataagaattcccttttctccacatcttcaccagcatttgttatttttttgtctttttataataaccattctaactgaggtgagatggtatctcattgtagttttgatttgaatttccctgatggttagcaacgttgagcatttttcacacacttgttggtcatttgtatgtcttcctttaagaaatgtctattcagatcatttgcccattttaaaattgggttatatggtttttttgctgtttgctgtttgagttctttgtgtattctggatcttaatcccttgtcagataaatggtttggaattatcttctcctgttctacaggttatctcttcactctgttgattgttttctttgctgtgcagaagcttcatagtttgatataatcccatttgtctatttttgcttttgttgcctgtgcttttgaggccttatccataaaatctttgcccagaacagtgtcctaaagtggttcccctatgttttcgttgagtagtttcatagtttttatccttacttttacatctttaataaattttgggttgattttatatatgatgagagataggggtctagttttattcttctgagtatgaatatccaattttcccagcaccatttactgaaaagggtgttttttcttcagtggatgttttcagtgcctttgttgaaaatcagttggctataaatacatgaatttatttctggtgccatttgtctatgtgtctttttatgccagtaccctgttgtttggttactatggctttgtagtgtattttgaagtcgggtagtgtgatacttccaccttcattctttttcctcgggattactttcactagttgaggtcttttgtagttccatacacattttaggatttttttttcctacttcagtgaagaatgttaaaggtattttgataggaattgcattgaataaatagattgctttaagtagtatgatcattttaacaatattagtttttccaatccgtaatcttgggatgtctttccatttttttgtgtcttcttcaatttctttcttaagtgttttatagttttatagttttcaacgcagagatatttcaccttcttggttaaatttgttcattttttttatagttattataaatgggattgccttcttgtattagtttgttttcacacggctataaatagctacctgagactgggtaatttataaacaaaagaagtttaactgactcacagttccacatggctagggagacctcaggaatacaatcatggcagaaggtgaaggagaagcaaggcacatcttacatggtggcaggagagagtgtgtaggggaaactgccacttttaaaccattggatctcatgagaactccctcactatcatgaaaatagcatgggggaaaccgcccccatgatccaatcaccccccaaccaggtccctccttcaacatgtggggattacaattcaagatgaaatttgggagaggacacagagccaaaccatatcacttcttgatttctttttcagctagttaattgcagtatagaaacactattgattttggtatgttgattttataacttgcaatttcactgaatttgtttcttttctaagagttttttgatggagtctttcgatgaaggtttttccatatataagaatatgtcctcagcaaacagggaaaattttacttccatctttccaatttggatgccctttattttgttctcttgcctaattgtgctctggctaggactttaagtattatgttgagtaagagtggtgaaagtgggctttgcgtcttattccagttcttagaagaactccccccaaccgccattcaatatgatgttagctgtgggtttgtcatatatggcctctattgtgttgaggtatattatttctgtacataatttattgagagttcttgtcatgaaaagattttgaattgtagcacatgctttttctgtgaatactgagaggattatattagtttttattcttcattctgttgatgtgatgtgtgatgtatattgatttgcatatttgaaccatccttgcatccttgagataaaccccacttgatcatggtgtataattcttttgatgtgctattgaatttcttttgctagtattttgctgtggatttttgcatctatgttcatcaaatatattggtctatagttttctttctttgttgtgttcttttctggttttggtgtgagaataattctggcctcgtagattaggtttggaagaattccactccccacctccattttttggaatagtttgagatgaattggtgttagttcttatttaaaagtttggggagtaacaacagcataatgttagaggtgcctagtattcattccccttacaagaaaaaaccaaggcaatgaatacacagctaagatttgactggagtgtgggaaggagcaccttggaaggcagcaaagaggtggagatgcacctgtggtaaatggaagtccaggagggcagcacgcaggcactcagcctctgaagctctgtctgccccacccagattagatatgtctgaagtcaggagacacttcctgttctggcaaaaatctgagtagaagacccttgccagcttccattgccactgccaatacctacagtccttataacaagagaattccacaatcctttcaagccatgagcccaattgggagaactgtggggattatactaaattagcagtacaaggtgtgcactctccaccccctgcccactccctatgagccaggctgctgcagcatggtgccatcttgagaccagagtcacctctggtgtgcaccctgctctgggagccactagccactgtgcctcacaagcactgggactccatcttcatcccaccaagcccataggtcattgaaccccacaacctcatctgtgcagagcctgggcccaagatcagctatgactcctgcactacagggaaaccaactcctgctgccttacctccagctgaaggaacagtctgattgtctcatccagggtgaacccccccttaagctggcgaaaacactacatgccatccttcaaacaggagaaactttcaagcttccgtgtagctgacatatccctgagtcagtggaatgactataggccatactcagaacctgagaaacaatgtagcagtgccactgccccaagcagacacaccccttgtctgcccaatggccctaatgatagggacaggagatagcgaaatactgggtagaagagggtggttccctggcaaaggccccaccctcaagcctggaaacccatggccctaaatgggaacaggcattcctatttttgcacccaaaagttcccttttggcccaccacactctgcatcctgaacccatataaaccccaaatcccaggctccacgagcagatgaacagaagagcagaagagcagcagagaaggagagaagagaaggagcatctgaacgttgagaggagttcagctgggaatgattggagatgagatcggcgctagatggccaaactccaggggaagatcatcttcccactccatcccctttccagctccccatccatcctgttgagagccacctccaccaatcaataaaaccctcgcattcaccatccttcaagtccgtgtgtgacctgatttttcctggatgctggacaagagctcaggatacagaaagcccttgcaaaaaggcagagtgttcactgagctgtttaacacttaagctgtccatggacagcaaagctaaaagagtgcgctgtaacacatgctcactgggacttcaggagtcgcagacacccacccctagattctattgtggggccggagcccaaaagtgctcacaccagcttctgcacctgcccatctgcatgctccccgtcatgtaaggggtttgagtgccagtaagccatcatccttttacttatttaacatttaatatgtatatggtgttggtgcatgataacatcatggaccagatataatgtttgtctccaaagagcttgtatagctatagggaaataagacttagacactgggcagagggaggtaaaactgacaatgagttgtgggatattacagataggaaagaacataggtgtggtgttttcatttttgtctgcaggttacaaagctatgcataaagaatagtaggaatagtcttctgctcattatattgacaaatgtgatttttaaaaagccaaggtaaattgatgtatttttagaaacatgaaaaatacttacaaaaatacttttaacatttaaaaaaatattgctagcataaagaaagtgggagagtggtccttctggccaaaaatgccatttgacttcttgtcatgcagccactggctacattttttataccttttctgaccctccagtttccacttctgtcactacatttttccatttctaatatcacactgcatgctgatttttgacttttggaactgatggcattttcaccctataaaagtgtcataaagacacattaatattcaaatgatcacttattttgtaaatagggaatttttgcatatattaaaccagtagctttcacttcacttcacataagtcatgtttctttgtggttgtccattttcaaatctgtgccacaagactatgtactgggaaggagaaaatgagaattaccacaaacaaaaaaaaaaagtgatagactctgaatcagagttcactttcttgacctctctagtgagataatagtcttgaaaggcaggcttcgtggaaagagaaatttcttttcattgttttattttttccaaatctattttttaaaacttttctatttagaaataattttagactcaaaggaaagttgcagaaatcagagttcctgcataccctttaacagcttcccccagtgttaacattttacattaccatagtaagagtatgaaaaccaggaaattaacagtgacataaaactgtcaccttatctatgaatctttatccagtttcaccagatttcctattaaagtgtttttcttgtcaaggatccaatccaggctcccacattgcatttggttgtattgtctccttggttttgtccaatattagacccaccttgagtctttcctttctttcttttcttttttttaaatttcatggctaacacacttaaagagaactggtcagttatttatagaatatcccttaatttggaatggtctttcttttaattattacattgaggttgtgccattttggcaagaatgccactgaagcgatgtgcccatcttagctcatcatatcagtgggcacatgatgtcgatatgccttattactggtgatgttagcctgtgtcactcaattaaggtgatgtctgccaggtttctcaattatgaagccactatttttcccttgacaatcactgaatatcttctggggagatacttgaagactatgcaaatatttcacttcttgccatatttttgcacactaatttgagcagccattgattgttcttgcctgcaacatttattactgtgctgttgcctaatggttattttttattttccctacttctaaatttattcattggtaatccattgtaagaagttgtcccttctccctcatttacttatttattcaattatttgtttacattagcatgaactcatgggtcatcatttgatactatcataacttactttgttgctcaaatttaactagctctggtctttgggagatccttcatgttgcttctctgtcttttcaacatgtccccagatttttttgagtacattctcacttggcaacatgagttttcctggattgtcttttatttcccttgccctagctctggaatcaccatttccctggagttaattctgtagccttgatttcttttattcaggaatggtatttacagctaagatctgggcagatatgctattgctataaggggttattgaaacaggaaatcttccctgaccccttcacaggacttgtgaagggggtaattcatttactgagcccacagctctcaatccctcatgggatggggagcatgcaggtgagtgggtacaggggctggcatgagtgcttctgggcactggcaggaacagaacttcgtgtggccctgtagcagcatctgcagggggtacctgtgacccatggagccttagaaggtgtgtgttacagttgtgctcttttagctttgccctctggtgatggcttaagtgtttaacagctcagtgtgacagccctctgtatcctgagctcttgtttggtgtccaggaagaagcaagttgcatgaacgaattgaggatgctaaatgcaggggattttgttgccgatgaaagtggctctcagtataatggagagctggaaaggggatggagtgggaaggtggttttccctggagtacagccatcctgggccaaactcttctctgagatcccaccatcaagccgtccctctgaaatcaagctgcttctcctcaacatcaagctgctttttctcttctttcctttgctgttgccagtggagcctggggtttttatgggtacacgatagggggtggaaaaggcaacattcaagagggaaaacaggaatgcatgttctcactttgggctgaggttccaggcttgagggtggggcttcaacagggaccccaccctcttctacccactattttccctgcctcctgtccatatcagtattgtctctagtcctgctcagtcaacagaagtaggatatatatacatccatccgtaagtatacatattaaaaattatacatttatacctctgattccaacccaacaccactggtttcattctagcctttctgttctttgtaacttcttttgctgatagtgaggaactagctcattatatttacttaagttttgatcctagtatatacacaaactagttttggaataatcaacctacattagcctagaatacagaatttgggttcaatttttttttgtcattagccttacagtattcatgcaaaatactcttttccaaagatatttagattagttctttcttcaccactctcttcactttgattatgttagttatttgtgatatagttaggttcatttgtcactgtttgtcttccatttgaggttcctatcacatcctggtttatttttaattatttatcgtgtgtgtgtgtgtgtgtgtgtgtgtgtgaaccattaccatggttctaagaatcagaactatgaaaaaaaaagtattctcagagaaacatttcttccgcattcggccttgtcctattgttctttccaccctgttctcactcaccccctctaggtaaccaatctcattaacttctggtttatctttcctgtgtttattttgcatttgtacaaatgagcagatatgtgtatattttctttctccttttatacacaaaggttagcactatagataatcttttttactttgcttttttgtaaaaaaataataacagtatatcctggaaatcacagacattttccatattcttttttactgctgcatagtgctccattgtatgaaggtaacttcatttatccaacaactgtcctctgtataataattttggttgcttccaatttttttgcaattacaaacaatgctgcaatgactaaccttggacatattcgtctgtgtgtgtgtatgattgggggtgtatctgcagggtagatttctagaagtgagattgcaggcccaaaaggtaagtgcatgtgtagttttgttaggttttgccaaaattccctccagaaagcttctaccagtttgcattgtgtgaaattatctatttccttatagcctcctgacagaatatatcctcacacttttttattttttctgatataagaagtacaacatggtatcacagtattgttttgattttatttctgtaattataagtgaatttgaacgttctaaccttttaaaaacatttctgttcatgtattttgccgtcttgctatgaggtttttgtcctttgtctcataacactttgatatattttctcccggtttgtccgttgtcatttgactctatttactcttggtatgtaatttaaaaaacatttttgtagtcaaaatttttttttattttattgcttctggattttgaattatagttagaaagcctttctcatatctaggttgaaaagcaatccccccgtgcttttttctaggatttttatggttccgtcccttgttttctatttagattcctaatcctcttggagcacatttttgtttatggtgtaagttacagatctaattttatcttttttccccagtggatgcccaattgtttgagcactatttattattataaagtccatctttgaggccaggcacagtggctcacacctgtaatctcagcattttgggaggccagggtttgaggattgcttgagtccaggagttcaagaccagcctgggcagcatggtgaaaccccgtctctactaaaaatacaaaaattaggtgggcatcatggtgcaggcctgtaatcccagctactcaggaggtggagccacaagaatcgcttgaacctgggaggcagaggttgcagtgagctgaggtggtgccactgcactccagcctgggcgacagagtgaaactctgtctcaaaataaaaaataaaataaaataaaataaataaaataaagtccatctttgtaccagtcatttgagatcccacctttatcacatattacatttccagattaacttgtgtctatttctaagctttctattctattccactggtctatttgtttattcttgtactagcaccacacttttaattatagagaatttatagtatgttttaattcctgatatatgacttatccccaaattgatttttcttttgagtgtgtcctggctactgttatgtgtttgtttttctatatgaactgtaatattagcttgtctaacttcatgaagaagcttgttggtattttctttgagactgtcctaaatatataaattgatttagggagagctgacatatttataatattgagttgcattattcaagaacagaagatgtctttccatttgttcaagtctacctgtctattcttgatacttcatgtctttcaaaaatgcttcttgtctattcttgactctttactcttccatatgcattagaattaacttgtcaagttctgttaaaaacttgttgattgaaa

SEQ ID NO: 278 - DNA, 32633 bp, Homo Sapiens
gcacccacagccggtaggcccccagcagcaccagagccaccagcgccacgttcagcagcatttccccgccccccgtcagaagcgccaacgccgccgccgcccagcctcccccttccgctgccgctcccgcgtcgcctggactctcgctgccgccgtcgttgctgctctcgctgccactccccagggtgcctagcttcacgtccccatcaccagccgccatcactgcccgccagcgccttcctcctcctccccgccccctgccctccccaaccccacggccggccccgcccatctgggggcctctcagccaataacgtgagaagagggggcggggtcaggccggctcctgattgggtgttgacggggtaacgttgtctcggatctcccgccccctcccttctttcgctggccgcgcacgcgtgcaacgccccgcccacctcgccccacacttccctgctctcactccaagcctccgctaggttaagtagacgagccgggcgggtctgaagaaaagatgctacgacggccgcgcggacgctcatgggcggggcgagaccacagcgcgtgcgcgggctcctgagcgccacgcgctcgcctttcgttcgtaacccctgcgggaggcacgccccgcccagtctccaggctctgcgcgtgcgccctggaatcgcttcccttcctaggcctgcgttcgcgtccgcaaactcccgcctccttgcgctccccccgcccgggagcttcacgtgcgccttggcggccgcgggggcaggtccgggctggacgcctggcggaggacgcgggcaggtggcttgtgggaggctggggcatagttgagctgcaaggcgcaaaccgatgaggggcgtctgcttttcaccagggcgccgtcgcttttgtcgggaaaccggcagcgtaggcgcgcagaccgggaagcggcaagaagatttggccacgagctggggtcttcctggaacggagagaaagcacggaacccgcaccgggcttctctggcatcggcagtctacgtgctcctcgcgctggcaccgagcagccactccccgctgggtttggcaaaggctgctcttgtagaattttaaaggatttagagtctcattattccttgaatcataacttctgcggccgtagggaagtggacaggttgaggtggtctttctattcgtcattcactcttatttgcaggttctgtttcatgtacttggacgtcttttagcctctcacaccttgaaattctagtgtgaaaaagtgacctctgaagtctcacgcactcaactcgtttgacgaactcgtttgacgtgttctctcttgccctttgttgtctgttgtcttgagtctcatagaataggtttgaacctttcactgtcggttttgtaggagtcactgaggatattgacgaggcaagtgacagggtcgacactcttgtagagaggctgtatagcaaccaggtgtctgaaggattagaggctggggaaagagtgggaaagcagttagtaggctagggtatttgtgcgtgaggtgaggagactcagagctaggggagacattagagcaggggttggcaaacattttttgtaaagggcccgatcatattttaagtctctgccttaactactcagctctaccttgtaacgagaaagcagccatagacaatacttgaatgagtgtagctgtcttcagtaaaactatggacattgaatttttaatataatttcaggtatgaaatattcttttgatttttaagaaaatcattgaaatatgtaaatttttttttttttagttctggagaggtgcaaaaacaacttataagccatattgctgagccctgcattagaggtacctgagggagagcgacacaattggtagtaaatgaccatatactctatccttcaatatggaacacttttggaagtaaagtagggcattaataattatagccagagaccaggagttatatcagttttatcccaggcaaacctaaaggaatagtcaccttaaggttaagggttaggagaagtcaaaattgctttaggacttggtaacagaaaatgggaggtgccagtgatggaaataggaagataaagaagaaactggttttgaggagaagatagctgtagcagtcccaagagctgtatacagttgagacaacattgataggaaggaagaaagcaccccagaagcaggccactccttatatcttattgaccagaactgggctattagctgtccctaaagcagtaacagacaaggagcatgggacatccatgattgcctagtgtttatctggcttttttaattcttattcaggactgtgttgagcattgctggacatttaccatctctggttccttccagctaaatgtcagtaccacacctcaggcattgtgacaccgtaaatcaaccgtttttccctcccaccccccagaggtgtggtactggttgagaaccagtagcttagaccctcaggatttaccttggggctgaattagtgtgtgtaggtttcttttccagttggtttggagggaagagaggaattggacagtattaaagttctgctgtcaaggaagtgggctggggaatgttgggtagctaaccaacattggctgccacgtgaagtaaaaaagttttcctttatatccttgataaaatagtgtctcgacttcttcacacttgaagccttcccaaaaccccagcttttttgattctcattgtaagccccttgaactggactagttggaagttcttattttccaccctaagtaacaagctcttgtcccaataggatactcttgctttgagtactgcaataactttccaattggtgacttgccgtcagtcttttcctatttcattcctacacgaagagactagaactgtgttctgatttcctttgctcagacaccaatctccaggggtgctctgtaatttgaagaggacaactcagaaagcactcaagggcctccataagtccctgagtggcttccctgccttcccgttccccagcaaacaatcccttggataccctctattaaatgatacgtttccccttacaatacctagtcccttgccccatatatgctatgtgtattgcacagtctaggacttgactcatgctgtttcctcacggagcatgcccttcttatttctaaccatacaaattccatgacctatccattctttcaattctacttccacctgaggcctctatcagcccacattaacctaccttctttgaatttctgtgtgttccttacctgtaccacccattttggccttttattttatgctcttcttgactattctgttattgaaactgtcctttagatcccaagatttctactttttccctgcggatgcttttttattttttttatttttgacttctttctaccctccttttcctcttacatccctgctttgcctagaggacatctacaagaatcgtcatgtacattcttttctcctgttgttagcttttttcccctgacacttcatctatttactgatttacttgtaaatctctggaagatattagtactagccaccaaatatttctatttctttttccacacacgtagatttggatttccctactccttttacctcaagaatggccaatgaaatgtgattggaagtgacttgtgtcatttccaaataaaagctttaagagcctgtggacatttatcctgcgctgtttcttcctgccaacagtgatgaaatattttaattatctattgtcccatgacaaagcaccttaaatcttaatggtttaaaacagtcaccattttattatgtgtaacagttttgtgggttgactaggctcatgggcagttgtctaatcttgctcagggtctctcatgtggttccagcctggtattgtttggggctggagtttttggaggctcaactaggttgctagagtagctgagcttttctatttacccatgccgttccaaagactctctgattcacatggcttcttcagcagagtagcctgacttctttcttgcatggtggcttaggattctcaaatgcaataaaagcaaaaacttcgaggttttgtaagtcttaggtctggaaatgacatgttgtattggtaaaagcagttacagggccagctcaattttaaggggagaggaaataaacacttgataggggtggagggagagtgacaaagaatttgtggccatctttattacaaaaatttttgtcaaccacagagttacaggaaaatgtggccatctttaatcactactccaacgatgtttcaaattgagtgggcttccatcagccagggtctcggagacaggacaaagtggaaaacagctcccaaataacatacctagggcattttggggacagactctacagtttactagtggccccaggacatcctgcaaaagaggtgaaatcagtattggagaagtggtctcatgaagatgggagcacgactactacaattgactgctgacttctcacccaaggaagtaactgtatcccagcctaatctcagtggataagcccacagggttaagagatgttcaagaaaaagaacaacttcagtggaagaagaagaagataggagcccaggtcctgtgtttcaccaagacagccgtgcaaagcagatgctgccaaaaaggtgcaaagtggtttgtcagctcttctgcatgttctaacaaattagacatgcatcccaaaaggtatactacaatattaaagcttatttatacacactgtaaagtttcccctgagtgtcctggcaggcacttgcatggctgggcagtatccgtggactgattcctttgtgaattacatggagctgacagggctgaaacccacagctgactcggaggaggatggaagcttgtgctgggcaaggggctgaagcccctctgtgtaagtcatattaatctcctctgagcagagtgctacaaaattactaaagctgcttcttgaagacacttctaatgcagtacctaatgaaaatgtcaggtgcgacaagttattagttgctgcactgctgttctgaagtcccaggtatttctctacctgttatccatgaatgtgagttttgtggggaaggcagtcacaggctgaggaaagcatcagcagtcatgtgtgctgtcaggcctgtaaagtgagtgaggacaatgaagctggttgaagtgccccaggaaatggccagacttccatagtggaggtgaggtgaagaattgagtccgggcaaaggtgtgtggggagaagaagctgcctggtgtacgatgctgagtaatgatacaacccaaatcatctgactctgcagatttgaaagttgccgttattattaagaattcagatgggaaaagaaatatggtttgggttatttccatagtcattccagaaatccaggctcagtttggcatttattgacataactgtttatattggatctgtgtagaagtttgtatctttctgacttgcatgatacttcagcctttccttggagtctctgtggcttctcttcctcctttgctcacctccagtcattgtcaaatggctttgtgcaagttactctttctcggcctccatttttttggatcctgcctttgccgccctccttgcctgtactctgtccagtccaggccctctggacctcttgcctggacctccaagctctccctcctcccatctcttccctttcaaccttcctacccagagcacagcagtagtaacagctaacaccatttaataggtatcctttctatgccaggccctggggttgctatgtcacatatattatttgtaatgtttgcaataaccctggaaatggtattattacctccattgtacagtttggaaggcaccaaaaaaggcacatgggcccacattcatgcaagctaatgaggggcaaaactggaatgagaacccagggccactgggtccctcagcttatgctgttccctaaccatactgcttcctccactcagaatcctttagtggctcccattgcctaatagatcaagtctgggctccttatcttggcttctgggtcctctaaaatgtagtctgctaggtttccaggctttcctctccacccctcacacatcctactctttagccaaaaaaacagacaaaaaccctaaaaacaaaaaaatccatttttttatttatacccgtgctttctttcctaagtgcttttatatgtgctatttctcctgccaggagcagagactgtcatgctttcctctgtataagtaagtgttgcccaagaaaacattgaacagaggtgggctagagatccatttattttctggttcacaaagggcatattggatctttattaaatagtctaaaatgtcctttcaataatgtttttctttaatatctttttaaaagacatttaaagtgaatcagaaagcaattaaatgattaattgctgtggctgaattctgctgccctcagcctctgtggatgctatctcaccgattaacctccatttctaagctctgtctgattgagggaagcaatgacagaaaacgcttggcctgtcacatgactgatccttgctgtcatgagccatcgttttctaactgcaagctttcattttcaaagccctggcatgatttcaggagctgtaaaccctcatgtgagtaagtgagcagtaagaactggcagtttttcaatcttaagtctctccagctttaaacccacatttagctgtgattctttttttctccttaagttggacatttttttagtgaatacttttttgataaataaagtggggtgaaggtgaacttgactgagacagatatgggttggtccgtttagggctgaccctggaaaaaaaaagttatatcagtcttgacattaattccgtagtcagagtaggtgagagaggagtagattagtatatagggttcccagccttcccagtacaaccatggactcagagttggggacactaaaaatgtacatgaagtttatgatttcactggtagagatggcccacaatgccagtttggacaggcattactctaaacgtggtggggaagtcaggagacatctactccaaggcataacctctaggacagtttgtggggtatcagggaaggatatatcattggaaagatttctagttgccatacacaaataattgggcttcagtttaatgcataattaactgttctcagtgtgttattagttggacaattggattattacattatttacattagtgtttataggtaatctgaaaacaaaaatgtgaatataatatgaactacctcaaagatttgtctctgcttaatagttttatttcaaatttgtatatcaaatgtttcattacccttttttcattttattttttagctttcaaaacaaattagcaagaggaggaaagaggagagggagaaactgtgcacaccaccagaatgttatagtaggcgatatcatgaaagcaatgttggaactttatactcaggttttgattgtgcatctatctctttgttgtcttatcctttatcttcatttttaccaagtaattattgaccatcaaatgccattatggtaccaacttaagaaatggatgtaaagaattctacagggaaaaaaagcacattgtcagtgtatgaaatttatttagaagacagttacagacacatataaaaatgatagcagcttatgtttgcgaagcactcactatatgccaagcactttctgttagctaataataatatttgctcatttaatattagctcacataataatattaatattattagctcatttaatcctctcaacaactgtctagggtaggtactattatccctattttatggacaaggaaattaagtcaacaagagatgaaataatttgtttacagtcacatagctaggaagtggtagagtcataagttgaacccaggcagtctgaatccagaataataataataaaaaaaggtataaccagggtggaaacttattttgctcttttcaggtttcctagactttccatcaccaccagtgaattctgagtgacaatagtgtggaatttggaagaatggaagagaaactgaagtggagagatggtgaaagagaagaaaaaatgaagaaagatgcttgcaaaaatactgctgtgggtcctgagatgaggattctgggagggctgaaatggatgcccctgacagctccctttgagttcctgttcatctgaagtacaccagctttctagatatgctgtcactttccttctgcagagccacagtggtgtcctgtcttctcagacctcttctcacctcaaatcacttaggactcggccaccagacagatttgggatttcagaacttttcagatgttagaaagttcttttctaaatgtgatgaggaattacggaatcataaaatggaagcagagttaaactcagacatgtgggcactcaaggcaattaggagctttctgcgatgagaaagggatcagactgatccttaagactttatgcaaccccagagtattgcagccacctgcatgccgaaggtgtcaagagtgttctcactgctgcctataggagggtcttcagcctccagtgatccaaagtaccaggtaaaatatttaagccaacagaaagaacgtgttttattgtgttttacatgtcataaagcattctctatcatgagatatcactctgtatcggtaagacaggcttgaatttctgtcttggttctgccactgactagctttattccttaggctaacctgttggaatctcagttttctcactgtaaagtgaggataattattttatgaggatagttatgaaaattaaataacataatggttgcaaaacacttagcacagcactaagacacaaaatagacaataagtgttagttacctttattcctgtcccctttcctatccagacaaaggctcagtataaggacaaatattgtttagaacttctttttaaacctacgagccttacctttcaagaaccgcagatttgttcctgaaagttacctgtgtagtgagggttttataaatcaaattttactttcaatgtacagaggagctctttgacagagtcccttttcctgagaagtcattgtgggtttggcatcctgttcagcctggctggggccaggggagctgaactgtaatgacaagcagatgtactattgttctatgaaaatagtgtctggctccagatggggtttaggaaaaagtagtgatgatttctgttgaggaggatgggaattctgacccactgagctagctggtgaagaaggagagtaagacatgtgggtaaatgcaggttaagaaaaaggacctctagatcaactgaaagcctactagaagaacattaaaagcagataagaaaacaaggaagcaaacaaaactcgacaagagaaagaagagaccattaggaaacatccaggataattgctgtcatcattaaagctcccatttgttaatctgttacatatgaggcccaacactggatgatttaccaacatttaacctatcctctcacttttcaatgaattggatattgtcaaccccattattaatggaaaaatgggagctctagaatattgaagtcacttggctattaagtgatggagccaggactgggattcagaatccaacactcatattctttccatgaggtgtagattccattgagaagaaggtgtgtgcctaacaccgtgagaaagtcttggccctggtaatgctggtgaggccagtggctgagaaaagaatagctcttacctaaggctgagaacagaagacccaaggttgtggaaaactgacagtggtgcccttcctcacacagagtgcaaagattggtggcttacctgcttcagactcttggacgtgctcttaaatgcagatcctggcagtcagagaggaaaggctgagaaaagttcactctttgccaaagtaataaatccttctctttgatccctcaaaagttgatagacgaaaactcctcaaagcacctaggggtaggaaccccacttgagagttgtgggttctccatttcatcacagggatttgctgtgaaggaatcctgtggtaaactccataagaaaatgtaaataacatcccctctccaatttatcttttctgtaaatctggcttttcatatattaggtttctttacagtaagttgaaaccttaagaatagatttcaaaatatttaggaaatggcctatttattttgaatgatattcaacaccattaaactagagtgttgggagaatatttggacattccataatgatttgacttgtaacttaatataacagaactaaaaacaaaaaccacatgatcatctcaatagatgcagaaaaggcttttgatacaattcaacatcccttcatgttaaaaacccttgacaaacaagacatcacagaaacatacctcaaaataataagagccgtctatgacaaacccacagccaacatcacactgaatgggcaaaagctggaagtattcctcttgagaaccagaacaagataagaatgtgtcctattcaacatagtactggaagtcctagccagagcaatcagataagagaaagaaaaggcatctaaataggaagagaggaaattaaactccttttgtgaatataacatgatttgatacctagaaaatcccatagtctctgcccaaaggttcctagacatataaacaactttagcaaagtttcaggatacaaaatcaatgcacaaaaatcagctgcatttctatacaccaacaatgtccaaggtgagaaccaagtcaggaacacaatctcattcaccgtagccacaaaaagaataaaatacctaggaatacagctaaccagagaggtaaaagatctctacgagaattataaaacactggtgaaagaaatcaagagaagacaaacaaatggaaaaacatttcatgctcatggataggaaggatcaatattgttaaatggccacactgcccaaagcaatttacagatttggtgctatttctatcaaactaccaataacattttttatagaattaaaaaaaaactattctaaaattcatgtggaaccaaaaggagcctgaacaaccaaagcatttctaagcaaaacaaacagacgaaaacaaaaaacccaaacaacaacaacaaaaaccagaggcacactacccaacttcagactgtactacaaggctacagtacccaaaacagcatggtactggtacatagacacatagaccaacaggttaaagaatctagaaataaaaccatacacctacaactaattgatattcaacaaagtcaatgaaaacaaccaatggggaaaggactttctattcaatatatgatgctgggataactggctagccacatacagaagattgaaactggatccctcccttttaccatatgcaaaaattgagccaagatggattaaagacttaaatgtaaaacctaaaactataaaaaccctagaagaaaacctaggaaataccattctggacataggccctggcaaagatttcatgacaaagactccaaaagcagttgcaacaacaacaacaaaaatagataaatgggacctaattaaactaaagagcttctgcacagcaaaagaaattatcaacagagtaaacagacaacctacagaatgagagaaaatacttgcaaactatgcgcccaacaaaggtctactatccagaatctatagggaacttaaataaattaacaagcaaaaaccaaacaaccccaataaaaaatgggcaaaggaaatgaatagacacttttcaaaggaagacatacacgtggtcaataagcctatgaaaaaatgctcaacatcactaatcattagagaaatgcaaatcacaaccacagtgagacaccatctcacaccagccagaatggctattattaaaaagcaaagaaggctgggcatagtggctcatgcctgtaatcccagcactttgggaggctgaggcaggtggatcacgaagtcaggagatcgagaccatcctggctaacacagtgaaaccgcatctctactaaaaatacaaaaaattagccgggcgtggtggcgggcacctgtaatcccagctactcgggaggctgaggcaggagaattccgtgaacccaggaggcggagcttgcagtgagctgagattgtgccattgcactccagccagggtgactgagcaagactccatctcagaaaaaaaaaaaaaaaaaaaaaaaaagcaaagaaataacagatgctggtgaggttgtggagaaaagggaatgcttatacactgctcttgggaatgtaaattagttcagctactgtggaaagcagttcggagatatctcaaagaacttacaacagaactaccatttgacccagcaatcccattactgggtatatatccaaaggaatataaattgttttcccataaagacacctgcacatcgcaacactattcacaacagcaaagacgtggaatcattctaaatgcccatcaatggcagactggataaagaaaatgcgttacatatacattaaggaatactatgcagccataaaaacgaatgaaatcctgttctttgtagcaacatgggtggagttggaggccattatcataaatgaattaatgcaggaatagaaaaataaatactgaatgttctaacttataagtgggagctaaatgatgaatacacatggacacaagaagtaataaacactggagcctatttgagggtggagtgcaggagtgagtgaggactgaaaaactacatattgggtactgtgctcgttgcctgggtaatgaaataatctgtacaccaaacccccatgacacgcaatttacctatgtaacaaacctgcacatgtaccccctgaacctaaaataaaagttggaaagaaaaaaaaaatgaacctctgagacaatattataaaaattagcacattcaaaccacggaaattgtcaaagtgtagctaaaatattaaaccttttagatatgttgtctagatataattatcccattttatagccagtgttatggacatccaaagacaatgtcaattttgctaataaactgcatcaaataagtgcatgggaaaaaataaaaagttgatacattaaaaaaatgtttttgatacataacttttattttgaaaacttgaaataaattgccattgtgaatttggcagcttttaccctggcatgcctacaaagaatgtgatatacatttaatcacgaagaatgccacccagtgataacagtggtactggggttatgattatgttttaatttgttttgtgcagaaaggcatgaccatttgcaaagctgtcctatgaaacgtatcatgtactagtcacctcatgttatcagcatgctcctggaggagtaggcaatggattttttcaccagttcgcactgtgcaatctcttcctcatgtgtgtgaactttgtgggatgtcaagtaccccattaaaattgaatgaagtatttgaggggctcccacaaaccctctagtgatcttctttcaacaaacagcattttattgtgtaaattagaaaaacaacacagagtctggcttaaagaggatggaaaactggcattacaccaagaaagaacctgaacttcagtctttgacctcaggagacatccaagtattaaaacagaattttttttttttatttacatggaaaccctgatggaccaggaaattctttataatgtagagtctggtgctaagtcttactttcaggtgaacccaaatgaagattattgaactcactgttgaatctcatcccctgtctttttaacagcagtaagacccctcttggtcagccacaatatggggaaactcctcagcagctgctgttatccctaatattattgatatcacttctacttgctcttgctatgtttgtttcttttcagcagagctttcacagtactctaaaaagtagaggctcttaacattaaaagtttccttagccttttcaataaccctttcctggttgtctatgctggtggcagcctcaacctgaacctgagtgaatttgtttttctggcctgagctttgctgagcctcttaaggggtagaccgtctatgtgtgtttcttttatgtgagataaaacgcacaatttattaaatatcttctgattcttagacaggatctcaagggtggagctactccagggctcattgattttcatggctttttggctgtttgaaaaagagcctcctttgacatcatgtgggtttttgctatttctatttaagggtatatcttacatgtcagatatattattattgctgttttagttctagacagcaagtgatatgagcaaacaacaaagcttccatgctgtgaaattatgcatttattaaagctatcagttgacacttagctttgaattatttatatttttctataaactgtcgacaatcataacgggaccagaaccataggttcatatgggaaggtgatttactcatcttcctttcttgcccttaggaggagttgcagacagagtattatctttttttttttttttttgagacaaagtcttgctctgttgcccaggctggagtgcagtggcgcaatctctgctcactgcaacctctacctcttgggaccatgcctggctaatttttgtattttcagttgagacgaggtttcaccatattggccaggctggtcttaaactcctgacctcaggtgatccatctgacttggcctcccaaagtgctgggattacaggtgtgagccaccaggcctggcccagagcattatctttatcatgactttttcctttatatgtattgactatttgcaggtgtatcacaactacaggagacagaaagggaagcggtatacctctttctgcatgccttgtgtttaaagcgtgcctagattctgataaaggcttgcctgacagaaaaggcagaatgccaggggtctatcccaagatactgagtcattcctgtgtccttaaatgccaaagaggtaggatcaaaacaccagatctaaaacttgacaatataagttgttagacttaatctccaccagactcaacttgtatctcagcttctcactaatctcctatttctcattcactcactggtaccttcagcttattctctgttttctcctttgtttgtcaggttttggcatgatatctcagacactttttttctccttgcttcattcagccagccccaggtgatttgccttcccagaccactggctttctcctgaaaagagaagacacaattgacttctggtctttcttgctgtccatactacatagattgttattccaaagcttggtccaggctgagttcttggacactgctttaaatgagtggcccttgaccagaagggagatctagaaacaaacacaattttcctggggaagctgaggcattgtgtttgaggcccacgtatctttgtactccttccgtcctgtgatccagaagtctatttatgccagtcttgcttcaacctctctcacaattgcaggggaaaagtctactgaagggagagaacatttcagctaggggatataacttaaggtgagaaataaaagtgagacgaagaaaacatgtttggtgaactggtttgaccagaactcatgtttcaagttggaaatgttcaaataggaggaagataactaaggtaaaaatattaaagactactattaaaaatttggaattcaatagttaaacaccacaattagagatatttttatgacattactgatattaggattgtcatttactgagaaaagtgtgtaaaaatctcccactatgattgataatagaatgtttattttccttgaagttatttcaattattactttatttattttcgagactgtgttattcattgcatacaagttgaggattgtgatatcttcctcgtgaattgacttttgtcatcatataatgactttcttacctggaacaatgcattttgcctttaggattactttgtatgatattaatactttgtcaccagctttcttttgtttaatgtttgccccatagtaaaatattatcttgccttttggaacatcttggaatttttcctcctgcctttctaacctatcttcactgtgtccttctatttcttctttttttcctcctactcctgattacccccaaaacccaggccttgaacataggggtatatctgtgtgtgtacgtagatgcacgtgccaacttttttatctcaaggctttaactgttactctatcattgaaactgcatttcacaccttctctttagtctcaaattcccaactgccactcatcatcttcccttcccttgcctatatctctactctattctctttttctcttgggcttgcagccttggagtcaaccttttttccgctttatgctctatattaagctgtcataaatgccatgacctttgctgaaatgcctaacagattctcagcaataagctcacagggaaagggcaaagccaggagtgcaggacgaggggaggatcagtggcagccatcctgtagattatctactgaaattctttccattcctttgaatttctgctcctttgaagccctggattataataattatcttggaaagtttttcagtccgagatccaaaaattcttaattgggacctcttcagtgaaaatgacattcagtgaaaatccctggcaacattttcctagatgagaaaaagaattaggaatcagatgaagacgtgagaaagccatgacttcacaatgtgtaaagcatgtgctgatagcttgtggaagagtgtcttaggaggtccctgtcccaatgaggataacttcttaatcagaatcttgtttccaagttctccctcaactccaggataaactttaaaaaggaaaacaaaatccttgctagaaaattttccatcatttttctcttttctgtatgagtagcatggatgaaagagttctgtgactgagttgaggtttgcatctaactattgagccatggcaaaaaatattaagcatcactatttgttgtcatataaggaatttagtggggtttgaggttttaaatgttattgtttttctctatagtaatatcccttcaatccccttggttatctttctagagcaatataaaatgacctgacttctgtgagaagtctttagcttttggaaatcctcacctaggtttctttcacctagagaattggtttctgagaaaatcctccttccttttactgaacagtgaactgggagcctttaaatggagtggaggtggaggaagatggaagtgaggcaggtagaatttgtcattctgtccccctgggagaatgaggaaattagcatccagttctctagaacctagagtttcagggatctatttgagtgggaaaaagcattccttgtttttttgtgacctacttaaacattctgtgaaagttgtaatcatttgaggttttctaagaaaagaaaaaaaaaagtctaaatataatcctaaaagggagctaacctaacaacaaagaacacccggttgcagagattatttctctggaaattggcaaaaagagacaaaaatcttccctggcgattactggctatacctgctgctacacctgatttcatgctttttattcctggcagcactattggccttctccaatgtgggcttctccaaacttcacacccaggggcacacaaatcctatttctcccatctggaaagctctgctcacttcttcccaagtccgcttcccacctgcctttgaaatgcagctaaagaccacttcacagagattccctcaatgctagctcttccgctatgcccttcattctttctcttaaacccctagaactcttagaacctgttaacagtgtatgacatcctaagtgctctaattcagggacagcagagaatgcagtccaggctcctggtccagtagtggggatggattgtgctggtccacccgcatgctgccattcagtctgctttatcgtgagcacttcccatttgccagcaggggctaatggtgtaggccaaccatggaagaacgtgaagctcatctcagtttagctgactggatgcagcctgcagcaagcatgtgttgttgtttcatacattcctgtctttgctctgtgtgcacatttgggtttcatcttttcctcctagcggcacacgttcccatagactttgtgcttgcatgtattaaggaacattgcgttgtcaaaaggtaataataagagcagctaaaaattattgagaacacgtgatgttgtaggcactcttttaaacatttttatatgcatttaatccttgcaacaatactgtaaggtagttattatcccattttatggatgaagaaaataaagtactgagaggttatgttactttcccagggccacatggctagtaaattctaaagcccaagctattgaccttgagcctatgctcactccaggctttggagttgtaggagatgtgcaaggcttaatgaacactgagtgaacttatgaggcagttcagtcatctgacatcctcattaaatctgatttgaagaaatgacagagagaaagttgatagagcttagaaatttggttctaggtgagaccttaaaagtcatgtcaccaaggaataagagaccctcaagaggttagataagtcctctgtgcatcatttcctcctgacctgtatctcaacgtcaaagctgtcaacaaaaatgaacagggagcagcacttagtttgtatgatgtattcataatgtttggggtgccaaacagaagtcttatgacatggtatttttgcccggctaggtttttctatactagggcatggccatggttttaatgctttatttattaaagttattagaagataaatatgtgcaatcattgaaacttttcttattttcaaataagaaagggaaacttaaaaaatttagatttagcaactaacttttatttagaactgccatatgatctaacataaagttttcttacaatctgaatttgaaacattcaggattattttactaagatctgaaaaggtaatttgacatactatctataaaagtgtgaattaccctggggattaggaggtgaggttctgtagtaattaggtatgccaaaaataattttttaccctcctccccctcttccttctttcttttctgcatttacatgtattgctcttggtctctcatgtcattctttcaggattttctaatgtaatgaatttctctttctctaccctagagagtaccattatttccattctttcatggaactgtaagtgtgtgcaatttgttgacctcgtggtatttcaaagaactgtaaaatctcaattatcaggaatgcccagggaaaggggcttttaatggaatggatttttctcttaaactgaaggttaatcaggactcttctctcccccccgtttcaaatttattggttgcaattttttttccctaatctgtgagtgtactttctgggctttgctgaaatgggaggttatctgattgactagcaatcataagccctatgtttaagtccacattcttccatttgccagctctatggtttgaggaagttatgacactgagccatttgaaaaatggagatagcaacacttgtcctacctatgtcacctgggctgtttagtgtatcaaattatataaagacaatggacttgctttgtacaagtcttaagttttattttaatgaattatgacaactaccaagttctgagtgcctaggggccaggtgctccatacacattattgttatttccacaataaacctactatatatatagatgtatatagatgagaaaagtaaggcttgggagataagtgacttgcccaagattatgtaaataacagtggaactaaatttctttacagcaaattgataccttgattaatcaaaagtctttattctaagtaccatttcttgtggataaagagagtatagaagattgcctagaagcatactgaccttaggatgcattgttttgcttagggttcttttagttataaggaacagagatgttaggtttcagagggatttcagagaaacccaatgacagaaattgaattatagttgggtgttaaggaagctgtcatgaatcaagcctactcttgcctctcctctttcttctcctctccttccttcttttcgctctctctttgtccacacaggcaaaatcttccttacatatgtggccttcactctcttttgtctattgactggcttcctcataactgtagcttgcatatggttcatcatatggtttgggtctgtgtccccacccaaatctcatgttcaattgtaatcccccatgttggaggaggagcctggtgggacgttccttggatcatggggatggtccttcatgaatggtttagcaccattctcttggtgctgttcttgtgacagtgagtgagttatcgtgagatctcgttgttttaaagtatgtggcacctcccctgtctctctcttcctcctgctccagccatgtgaagtgccttgcttcccttttgccttctgccatgattggaagttccttgagacctccccagaagctcctgtatagcctgcagaaccgtgagccaattaaacctcctttctttataaattacccagtctcaggtatttctctatagcaatgtgagaatggactaatacagaccgtagtagggactctacacctccatatagcatagtatctcttgatctgtccatttagcttttgccctgttgcttactggaaattctctaggtcttgtgattcagattcctgaaggaggattcttactggcccagctcatctattctagtcagatcccaggtcactgactgctacaagctcatggattggctgcttttgcatcaggtgtcctgctttggtgctgcccacttagcaaagctaagggaagactaggaaataaaagcaatgtgacagctacatctatcatcactattaaagaaggctatatatcacgatatatttgtttttgtaaaaatccttaatattttattgttatcttttagttcttattctcttcttttcaacgtagtccctcgtctttcaaaatatttctcagtaattgggttcctgttgactcaaattttatgacacagaaccttgtttataacctcctaacttaccattactaatatcagttctgtagtcatatataccacaattttatatgtttttgaagaaggtagtaggaaaatatgtcatagtttaagttttatactaagcataagtcatgtcatagtagaagtcttttttctattaatagaagatgtcatgtctcaaggttattgttggaatataccgtaattaatttttttaatccttaaaataggagaattgagggtttccgagtagtgtgaatacatgaaaagtgaaaaaaatgggtcatcttctaggaaggcctgcagaacttaaaactgagaacaggccttagacttgctttctttcctctcctggcacttcctgggttttgttttcctccctgctggtaggttttgatgggaaggcattatatttctgtttatctgaatatctattttactcacaaacttttttcttttatcatagctgatatgaagtgaaaacatgtatcacttggctcagcctgaactgctgtgtgataggatgtccctgtatcaaccatgaaccagaagtggaacagggacctaattaatatttatgctgaccttggtggctgttgtaaaataaactaccatacatctaaaacctcaccacactgggttggatagctaaaacttctatactattcatggcttaacttctgagatttatatgcctcttgaagagaaagtactcatcactgctgaaagtttaactttctatttttgttatggcctccattacatttccaaatattcctttacttaattttatccataaacctgaagccttcactttcttagtgaggtactagattctttgtatataaatttgactgtattggaaagcctgggtccatgtgtttttagtccttaactctccagtccttgtagatttccttgtatataaacactttaactgagttatagaacctcttcctctgtgaactggtgtcaggctctggtggtaggtcctcttcctactctacatgctgcctaccctcttgtatggaaaaagattaactgttttcctcacactcagcgcaaaacacttctggtcaccaaaacgtgtgggtttctcccacacaaagcaattctctgacaccagctggatatcctacagttcagttcaattctgtgctaactgaagttggcacagactccacgtgttaagggctcagcccctcaagactgtccccggcttcagatgtcagtcactagtggtagtttcccatgttacccatgacttgtgtcagacttggctgtaaactggagggtcccaaagcccccttctctggtttgatcacttgttagaacagctcacagaatgaggaaggtgctttacttattattagccattgattataagatgatataagtcaggaacattcagaaggaagagatgcacaggtgaaggtatgtgggaaggggtgtgaacttctgtgccctctctgggaccaccactctccaggtacctcctcctgtttggcaacccagttatggaggcttcattacataagcatgattgattaaatcaggccactagtgattttttaaaaaatttaattaacacctaataattgtacatctttatggggtgcaatgtgatattccaatttatgtatacatgtgtaataatcaaatcagggtaattagcatatccatcacttccaacatttacaatttgtttgtgttgggaacattcaaaacctctcttctagctacttgaaaatatataataaattaacgttaactatagtcatcctacagtgctaatagaacgctaaaactttttcctcccatttagctgtgattctgtatctgttaaccaaactctccctcttccctacttccccctacacttcccagcctctagtaactactattctactgtctatttatataggatcaactttttcagctctcacaaatgagtaagaacatgtggtatttttctttctgtgcctggcttgtttcacttaacataacgtcttcccagctcatccatgttgctgtgaatgataagattttgttcttttttatggccgattagtatttcattgtgtacatataccacattttctttatccattcatctgttgatggacactaaggctgattctatattttgtctagtgtgaatagtgctgcaataaacatgggagtgcagatatctcttcaacatactgatttcctttcctttggatatatacccactagtgggattactggatcatatggtagttctatttttagttttttttgaaaaatctccatactgcttcccataatggctgtactaatttacatttcaaccaacagggtataagaattcccttttctccacatcttcaccagcatttgttatttttttgtctttttataataaccattctaactgaggtgagatggtatctcattgtagttttgatttgaatttccctgatggttagcaacgttgagcatttttcacacacttgttggtcatttgtatgtcttcctttaagaaatgtctattcagatcatttgcccattttaaaattgggttatatggtttttttgctgtttgctgtttgagttctttgtgtattctggatcttaatcccttgtcagataaatggtttggaattatcttctcctgttctacaggttatctcttcactctgttgattgttttctttgctgtgcagaagcttcatagtttgatataatcccatttgtctatttttgcttttgttgcctgtgcttttgaggccttatccataaaatctttgcccagaacagtgtcctaaagtggttcccctatgttttcgttgagtagtttcatagtttttatccttacttttacatctttaataaattttgggttgattttatatatgatgagagataggggtctagttttattcttctgagtatgaatatccaattttcccagcaccatttactgaaaagggtgttttttcttcagtggatgttttcagtgcctttgttgaaaatcagttggctataaatacatgaatttatttctggtgccatttgtctatgtgtctttttatgccagtaccctgttgtttggttactatggctttgtagtgtattttgaagtcgggtagtgtgatacttccaccttcattctttttcctcgggattactttcactagttgaggtcttttgtagttccatacacattttaggatttttttttcctacttcagtgaagaatgttaaaggtattttgataggaattgcattgaataaatagattgctttaagtagtatgatcattttaacaatattagtttttccaatccgtaatcttgggatgtctttccatttttttgtgtcttcttcaatttctttcttaagtgttttatagttttatagttttcaacgcagagatatttcaccttcttggttaaatttgttcattttttttatagttattataaatgggattgccttcttgtattagtttgttttcacacggctataaatagctacctgagactgggtaatttataaacaaaagaagtttaactgactcacagttccacatggctagggagacctcaggaatacaatcatggcagaaggtgaaggagaagcaaggcacatcttacatggtggcaggagagagtgtgtaggggaaactgccacttttaaaccattggatctcatgagaactccctcactatcatgaaaatagcatgggggaaaccgcccccatgatccaatcaccccccaaccaggtccctccttcaacatgtggggattacaattcaagatgaaatttgggagaggacacagagccaaaccatatcacttcttgatttctttttcagctagttaattgcagtatagaaacactattgattttggtatgttgattttataacttgcaatttcactgaatttgtttcttttctaagagttttttgatggagtctttcgatgaaggtttttccatatataagaatatgtcctcagcaaacagggaaaattttacttccatctttccaatttggatgccctttattttgttctcttgcctaattgtgctctggctaggactttaagtattatgttgagtaagagtggtgaaagtgggctttgcgtcttattccagttcttagaagaactccccccaaccgccattcaatatgatgttagctgtgggtttgtcatatatggcctctattgtgttgaggtatattatttctgtacataatttattgagagttcttgtcatgaaaagattttgaattgtagcacatgctttttctgtgaatactgagaggattatattagtttttattcttcattctgttgatgtgatgtgtgatgtatattgatttgcatatttgaaccatccttgcatccttgagataaaccccacttgatcatggtgtataattcttttgatgtgctattgaatttcttttgctagtattttgctgtggatttttgcatctatgttcatcaaatatattggtctatagttttctttctttgttgtgttcttttctggttttggtgtgagaataattctggcctcgtagattaggtttggaagaattccactccccacctccattttttggaatagtttgagatgaattggtgttagttcttatttaaaagtttggggagtaacaacagcataatgttagaggtgcctagtattcattccccttacaagaaaaaaccaaggcaatgaatacacagctaagatttgactggagtgtgggaaggagcaccttggaaggcagcaaagaggtggagatgcacctgtggtaaatggaagtccaggagggcagcacgcaggcactcagcctctgaagctctgtctgccccacccagattagatatgtctgaagtcaggagacacttcctgttctggcaaaaatctgagtagaagacccttgccagcttccattgccactgccaatacctacagtccttataacaagagaattccacaatcctttcaagccatgagcccaattgggagaactgtggggattatactaaattagcagtacaaggtgtgcactctccaccccctgcccactccctatgagccaggctgctgcagcatggtgccatcttgagaccagagtcacctctggtgtgcaccctgctctgggagccactagccactgtgcctcacaagcactgggactccatcttcatcccaccaagcccataggtcattgaaccccacaacctcatctgtgcagagcctgggcccaagatcagctatgactcctgcactacagggaaaccaactcctgctgccttacctccagctgaaggaacagtctgattgtctcatccagggtgaacccccccttaagctggcgaaaacactacatgccatccttcaaacaggagaaactttcaagcttccgtgtagctgacatatccctgagtcagtggaatgactataggccatactcagaacctgagaaacaatgtagcagtgccactgccccaagcagacacaccccttgtctgcccaatggccctaatgatagggacaggagatagcgaaatactgggtagaagagggtggttccctggcaaaggccccaccctcaagcctggaaacccatggccctaaatgggaacaggcattcctatttttgcacccaaaagttcccttttggcccaccacactctgcatcctgaacccatataaaccccaaatcccaggctccacgagcagatgaacagaagagcagaagagcagcagagaaggagagaagagaaggagcatctgaacgttgagaggagttcagctgggaatgattggagatgagatcggcgctagatggccaaactccaggggaagatcatcttcccactccatcccctttccagctccccatccatcctgttgagagccacctccaccaatcaataaaaccctcgcattcaccatccttcaagtccgtgtgtgacctgatttttcctggatgctggacaagagctcaggatacagaaagcccttgcaaaaaggcagagtgttcactgagctgtttaacacttaagctgtccatggacagcaaagctaaaagagtgcgctgtaacacatgctcactgggacttcaggagtcgcagacacccacccctagattctattgtggggccggagcccaaaagtgctcacaccagcttctgcacctgcccatctgcatgctccccgtcatgtaaggggtttgagtgccagtaagccatcatccttttacttatttaacatttaatatgtatatggtgttggtgcatgataacatcatggaccagatataatgtttgtctccaaagagcttgtatagctatagggaaataagacttagacactgggcagagggaggtaaaactgacaatgagttgtgggatattacagataggaaagaacataggtgtggtgttttcatttttgtctgcaggttacaaagctatgcataaagaatagtaggaatagtcttctgctcattatattgacaaatgtgatttttaaaaagccaaggtaaattgatgtatttttagaaacatgaaaaatacttacaaaaatacttttaacatttaaaaaaatattgctagcataaagaaagtgggagagtggtccttctggccaaaaatgccatttgacttcttgtcatgcagccactggctacattttttataccttttctgaccctccagtttccacttctgtcactacatttttccatttctaatatcacactgcatgctgatttttgacttttggaactgatggcattttcaccctataaaagtgtcataaagacacattaatattcaaatgatcacttattttgtaaatagggaatttttgcatatattaaaccagtagctttcacttcacttcacataagtcatgtttctttgtggttgtccattttcaaatctgtgccacaagactatgtactgggaaggagaaaatgagaattaccacaaacaaaaaaaaaaagtgatagactctgaatcagagttcactttcttgacctctctagtgagataatagtcttgaaaggcaggcttcgtggaaagagaaatttcttttcattgttttattttttccaaatctattttttaaaacttttctatttagaaataattttagactcaaaggaaagttgcagaaatcagagttcctgcataccctttaacagcttcccccagtgttaacattttacattaccatagtaagagtatgaaaaccaggaaattaacagtgacataaaactgtcaccttatctatgaatctttatccagtttcaccagatttcctattaaagtgtttttcttgtcaaggatccaatccaggctcccacattgcatttggttgtattgtctccttggttttgtccaatattagacccaccttgagtctttcctttctttcttttcttttttttaaatttcatggctaacacacttaaagagaactggtcagttatttatagaatatcccttaatttggaatggtctttcttttaattattacattgaggttgtgccattttggcaagaatgccactgaagcgatgtgcccatcttagctcatcatatcagtgggcacatgatgtcgatatgccttattactggtgatgttagcctgtgtcactcaattaaggtgatgtctgccaggtttctcaattatgaagccactatttttcccttgacaatcactgaatatcttctggggagatacttgaagactatgcaaatatttcacttcttgccatatttttgcacactaatttgagcagccattgattgttcttgcctgcaacatttattactgtgctgttgcctaatggttattttttattttccctacttctaaatttattcattggtaatccattgtaagaagttgtcccttctccctcatttacttatttattcaattatttgtttacattagcatgaactcatgggtcatcatttgatactatcataacttactttgttgctcaaatttaactagctctggtctttgggagatccttcatgttgcttctctgtcttttcaacatgtccccagatttttttgagtacattctcacttggcaacatgagttttcctggattgtcttttatttcccttgccctagctctggaatcaccatttccctggagttaattctgtagccttgatttcttttattcaggaatggtatttacagctaagatctgggcagatatgctattgctataaggggttattgaaacaggaaatcttccctgaccccttcacaggacttgtgaagggggtaattcatttactgagcccacagctctcaatccctcatgggatggggagcatgcaggtgagtgggtacaggggctggcatgagtgcttctgggcactggcaggaacagaacttcgtgtggccctgtagcagcatctgcagggggtacctgtgacccatggagccttagaaggtgtgtgttacagttgtgctcttttagctttgccctctggtgatggcttaagtgtttaacagctcagtgtgacagccctctgtatcctgagctcttgtttggtgtccaggaagaagcaagttgcatgaacgaattgaggatgctaaatgcaggggattttgttgccgatgaaagtggctctcagtataatggagagctggaaaggggatggagtgggaaggtggttttccctggagtacagccatcctgggccaaactcttctctgagatcccaccatcaagccgtccctctgaaatcaagctgcttctcctcaacatcaagctgctttttctcttctttcctttgctgttgccagtggagcctggggtttttatgggtacacgatagggggtggaaaaggcaacattcaagagggaaaacaggaatgcatgttctcactttgggctgaggttccaggcttgagggtggggcttcaacagggaccccaccctcttctacccactattttccctgcctcctgtccatatcagtattgtctctagtcctgctcagtcaacagaagtaggatatatatacatccatccgtaagtatacatattaaaaattatacatttatacctctgattccaacccaacaccactggtttcattctagcctttctgttctttgtaacttcttttgctgatagtgaggaactagctcattatatttacttaagttttgatcctagtatatacacaaactagttttggaataatcaacctacattagcctagaatacagaatttgggttcaatttttttttgtcattagccttacagtattcatgcaaaatactcttttccaaagatatttagattagttctttcttcaccactctcttcactttgattatgttagttatttgtgatatagttaggttcatttgtcactgtttgtcttccatttgaggttcctatcacatcctggtttatttttaattatttatcgtgtgtgtgtgtgtgtgtgtgtgtgtgtgaaccattaccatggttctaagaatcagaactatgaaaaaaaaagtattctcagagaaacatttcttccgcattcggccttgtcctattgttctttccaccctgttctcactcaccccctctaggtaaccaatctcattaacttctggtttatctttcctgtgtttattttgcatttgtacaaatgagcagatatgtgtatattttctttctccttttatacacaaaggttagcactatagataatcttttttactttgcttttttgtaaaaaaataataacagtatatcctggaaatcacagacattttccatattcttttttactgctgcatagtgctccattgtatgaaggtaacttcatttatccaacaactgtcctctgtataataattttggttgcttccaatttttttgcaattacaaacaatgctgcaatgactaaccttggacatattcgtctgtgtgtgtgtatgattgggggtgtatctgcagggtagatttctagaagtgagattgcaggcccaaaaggtaagtgcatgtgtagttttgttaggttttgccaaaattccctccagaaagcttctaccagtttgcattgtgtgaaattatctatttccttatagcctcctgacagaatatatcctcacacttttttattttttctgatataagaagtacaacatggtatcacagtattgttttgattttatttctgtaattataagtgaatttgaacgttctaaccttttaaaaacatttctgttcatgtattttgccgtcttgctatgaggtttttgtcctttgtctcataacactttgatatattttctcccggtttgtccgttgtcatttgactctatttactcttggtatgtaatttaaaaaacatttttgtagtcaaaatttttttttattttattgcttctggattttgaattatagttagaaagcctttctcatatctaggttgaaaagcaatccccccgtgcttttttctaggatttttatggttccgtcccttgttttctatttagattcctaatcctcttggagcacatttttgtttatggtgtaagttacagatctaattttatcttttttccccagtggatgcccaattgtttgagcactatttattattataaagtccatctttgaggccaggcacagtggctcacacctgtaatctcagcattttgggaggccagggtttgaggattgcttgagtccaggagttcaagaccagcctgggcagcatggtgaaaccccgtctctactaaaaatacaaaaattaggtgggcatcatggtgcaggcctgtaatcccagctactcaggaggtggagccacaagaatcgcttgaacctgggaggcagaggttgcagtgagctgaggtggtgccactgcactccagcctgggcgacagagtgaaactctgtctcaaaataaaaaataaaataaaataaaataaataaaataaagtccatctttgtaccagtcatttgagatcccacctttatcacatattacatttccagattaacttgtgtctatttctaagctttctattctattccactggtctatttgtttattcttgtactagcaccacacttttaattatagagaatttatagtatgttttaattcctgatatatgacttatccccaaattgatttttcttttgagtgtgtcctggctactgttatgtgtttgtttttctatatgaactgtaatattagcttgtctaacttcatgaagaagcttgttggtattttctttgagactgtcctaaatatataaattgatttagggagagctgacatatttataatattgagttgcattattcaagaacagaagatgtctttccatttgttcaagtctacctgtctattcttgatacttcatgtctttcaaaaatgcttcttgtctattcttgactctttactcttccatatgcattagaattaacttgtcaagttctgttaaaaacttgttgattgaaa

SEQ ID NO: 279 - DNA, 33633 bp, Homo Sapiens
gcacccacagccggtaggcccccagcagcaccagagccaccagcgccacgttcagcagcatttccccgccccccgtcagaagcgccaacgccgccgccgcccagcctcccccttccgctgccgctcccgcgtcgcctggactctcgctgccgccgtcgttgctgctctcgctgccactccccagggtgcctagcttcacgtccccatcaccagccgccatcactgcccgccagcgccttcctcctcctccccgccccctgccctccccaaccccacggccggccccgcccatctgggggcctctcagccaataacgtgagaagagggggcggggtcaggccggctcctgattgggtgttgacggggtaacgttgtctcggatctcccgccccctcccttctttcgctggccgcgcacgcgtgcaacgccccgcccacctcgccccacacttccctgctctcactccaagcctccgctaggttaagtagacgagccgggcgggtctgaagaaaagatgctacgacggccgcgcggacgctcatgggcggggcgagaccacagcgcgtgcgcgggctcctgagcgccacgcgctcgcctttcgttcgtaacccctgcgggaggcacgccccgcccagtctccaggctctgcgcgtgcgccctggaatcgcttcccttcctaggcctgcgttcgcgtccgcaaactcccgcctccttgcgctccccccgcccgggagcttcacgtgcgccttggcggccgcgggggcaggtccgggctggacgcctggcggaggacgcgggcaggtggcttgtgggaggctggggcatagttgagctgcaaggcgcaaaccgatgaggggcgtctgcttttcaccagggcgccgtcgcttttgtcgggaaaccggcagcgtaggcgcgcagaccgggaagcggcaagaagatttggccacgagctggggtcttcctggaacggagagaaagcacggaacccgcaccgggcttctctggcatcggcagtctacgtgctcctcgcgctggcaccgagcagccactccccgctgggtttggcaaaggctgctcttgtagaattttaaaggatttagagtctcattattccttgaatcataacttctgcggccgtagggaagtggacaggttgaggtggtctttctattcgtcattcactcttatttgcaggttctgtttcatgtacttggacgtcttttagcctctcacaccttgaaattctagtgtgaaaaagtgacctctgaagtctcacgcactcaactcgtttgacgaactcgtttgacgtgttctctcttgccctttgttgtctgttgtcttgagtctcatagaataggtttgaacctttcactgtcggttttgtaggagtcactgaggatattgacgaggcaagtgacagggtcgacactcttgtagagaggctgtatagcaaccaggtgtctgaaggattagaggctggggaaagagtgggaaagcagttagtaggctagggtatttgtgcgtgaggtgaggagactcagagctaggggagacattagagcaggggttggcaaacattttttgtaaagggcccgatcatattttaagtctctgccttaactactcagctctaccttgtaacgagaaagcagccatagacaatacttgaatgagtgtagctgtcttcagtaaaactatggacattgaatttttaatataatttcaggtatgaaatattcttttgatttttaagaaaatcattgaaatatgtaaatttttttttttttagttctggagaggtgcaaaaacaacttataagccatattgctgagccctgcattagaggtacctgagggagagcgacacaattggtagtaaatgaccatatactctatccttcaatatggaacacttttggaagtaaagtagggcattaataattatagccagagaccaggagttatatcagttttatcccaggcaaacctaaaggaatagtcaccttaaggttaagggttaggagaagtcaaaattgctttaggacttggtaacagaaaatgggaggtgccagtgatggaaataggaagataaagaagaaactggttttgaggagaagatagctgtagcagtcccaagagctgtatacagttgagacaacattgataggaaggaagaaagcaccccagaagcaggccactccttatatcttattgaccagaactgggctattagctgtccctaaagcagtaacagacaaggagcatgggacatccatgattgcctagtgtttatctggcttttttaattcttattcaggactgtgttgagcattgctggacatttaccatctctggttccttccagctaaatgtcagtaccacacctcaggcattgtgacaccgtaaatcaaccgtttttccctcccaccccccagaggtgtggtactggttgagaaccagtagcttagaccctcaggatttaccttggggctgaattagtgtgtgtaggtttcttttccagttggtttggagggaagagaggaattggacagtattaaagttctgctgtcaaggaagtgggctggggaatgttgggtagctaaccaacattggctgccacgtgaagtaaaaaagttttcctttatatccttgataaaatagtgtctcgacttcttcacacttgaagccttcccaaaaccccagcttttttgattctcattgtaagccccttgaactggactagttggaagttcttattttccaccctaagtaacaagctcttgtcccaataggatactcttgctttgagtactgcaataactttccaattggtgacttgccgtcagtcttttcctatttcattcctacacgaagagactagaactgtgttctgatttcctttgctcagacaccaatctccaggggtgctctgtaatttgaagaggacaactcagaaagcactcaagggcctccataagtccctgagtggcttccctgccttcccgttccccagcaaacaatcccttggataccctctattaaatgatacgtttccccttacaatacctagtcccttgccccatatatgctatgtgtattgcacagtctaggacttgactcatgctgtttcctcacggagcatgcccttcttatttctaaccatacaaattccatgacctatccattctttcaattctacttccacctgaggcctctatcagcccacattaacctaccttctttgaatttctgtgtgttccttacctgtaccacccattttggccttttattttatgctcttcttgactattctgttattgaaactgtcctttagatcccaagatttctactttttccctgcggatgcttttttattttttttatttttgacttctttctaccctccttttcctcttacatccctgctttgcctagaggacatctacaagaatcgtcatgtacattcttttctcctgttgttagcttttttcccctgacacttcatctatttactgatttacttgtaaatctctggaagatattagtactagccaccaaatatttctatttctttttccacacacgtagatttggatttccctactccttttacctcaagaatggccaatgaaatgtgattggaagtgacttgtgtcatttccaaataaaagctttaagagcctgtggacatttatcctgcgctgtttcttcctgccaacagtgatgaaatattttaattatctattgtcccatgacaaagcaccttaaatcttaatggtttaaaacagtcaccattttattatgtgtaacagttttgtgggttgactaggctcatgggcagttgtctaatcttgctcagggtctctcatgtggttccagcctggtattgtttggggctggagtttttggaggctcaactaggttgctagagtagctgagcttttctatttacccatgccgttccaaagactctctgattcacatggcttcttcagcagagtagcctgacttctttcttgcatggtggcttaggattctcaaatgcaataaaagcaaaaacttcgaggttttgtaagtcttaggtctggaaatgacatgttgtattggtaaaagcagttacagggccagctcaattttaaggggagaggaaataaacacttgataggggtggagggagagtgacaaagaatttgtggccatctttattacaaaaatttttgtcaaccacagagttacaggaaaatgtggccatctttaatcactactccaacgatgtttcaaattgagtgggcttccatcagccagggtctcggagacaggacaaagtggaaaacagctcccaaataacatacctaggtatatgaataagaaatacatctctgctgtcctgagtcacttagctatttggagttgtttggtatcaacttttgcatactaatataaaaattggtactggaaatagggtggtgctataacaaaaatctaaaatatgagtcactgacatatataataattgagttagaaatactagtggttggttgttaggcagcatccagctttgactcacttatgcatttcccagtgaacctagctcagaagtttgcaccatgatattcaataaataattcttaaataagagagattgtttcttgtaatttttccctattttagggaaaaactttttttttttttccatatcacatttttcttgaaacattggagtgccacgaacatatcatttgatgctctgtttgagtgccaccagtgagtttcccgatgtttaagtttggctcgtgggcagcccaccttcttcctctccactttctcttgggagccatcctgctcatggaaagtgtgctttctcctctgctacctcacacaagtttcaaaggagcttgctcctgccaggggaggcttggggtaagccaaacagcatcagctccccgggggaagggaaatttcaggtttggagctaagttcacttccagggagtgacaaagcctgtttgaactttaattcacagagtaaaagagttcaatgttggccattaatgatttggactttaacatgaagttggtactgattactttgggccataatttagaaggacagagtgatttaatctctgaacttttaatttctctctggaaaattaatactgggagagggttaaaatcaaattgagaacatcttgttggttcttagttattaaagtatttgatcacattttagaaattctgataactttgggcaagctgacaggacatagtttgagatggcgatagaacatattgtgaattacagccttggatacagaatagcattggaactgatttaatcgataaattgttctgacccattcagggcattttggggacagactctacagtttactagtggccccaggacatcctgcaaaagaggtgaaatcagtattggagaagtggtctcatgaagatgggagcacgactactacaattgactgctgacttctcacccaaggaagtaactgtatcccagcctaatctcagtggataagcccacagggttaagagatgttcaagaaaaagaacaacttcagtggaagaagaagaagataggagcccaggtcctgtgtttcaccaagacagccgtgcaaagcagatgctgccaaaaaggtgcaaagtggtttgtcagctcttctgcatgttctaacaaattagacatgcatcccaaaaggtatactacaatattaaagcttatttatacacactgtaaagtttcccctgagtgtcctggcaggcacttgcatggctgggcagtatccgtggactgattcctttgtgaattacatggagctgacagggctgaaacccacagctgactcggaggaggatggaagcttgtgctgggcaaggggctgaagcccctctgtgtaagtcatattaatctcctctgagcagagtgctacaaaattactaaagctgcttcttgaagacacttctaatgcagtacctaatgaaaatgtcaggtgcgacaagttattagttgctgcactgctgttctgaagtcccaggtatttctctacctgttatccatgaatgtgagttttgtggggaaggcagtcacaggctgaggaaagcatcagcagtcatgtgtgctgtcaggcctgtaaagtgagtgaggacaatgaagctggttgaagtgccccaggaaatggccagacttccatagtggaggtgaggtgaagaattgagtccgggcaaaggtgtgtggggagaagaagctgcctggtgtacgatgctgagtaatgatacaacccaaatcatctgactctgcagatttgaaagttgccgttattattaagaattcagatgggaaaagaaatatggtttgggttatttccatagtcattccagaaatccaggctcagtttggcatttattgacataactgtttatattggatctgtgtagaagtttgtatctttctgacttgcatgatacttcagcctttccttggagtctctgtggcttctcttcctcctttgctcacctccagtcattgtcaaatggctttgtgcaagttactctttctcggcctccatttttttggatcctgcctttgccgccctccttgcctgtactctgtccagtccaggccctctggacctcttgcctggacctccaagctctccctcctcccatctcttccctttcaaccttcctacccagagcacagcagtagtaacagctaacaccatttaataggtatcctttctatgccaggccctggggttgctatgtcacatatattatttgtaatgtttgcaataaccctggaaatggtattattacctccattgtacagtttggaaggcaccaaaaaaggcacatgggcccacattcatgcaagctaatgaggggcaaaactggaatgagaacccagggccactgggtccctcagcttatgctgttccctaaccatactgcttcctccactcagaatcctttagtggctcccattgcctaatagatcaagtctgggctccttatcttggcttctgggtcctctaaaatgtagtctgctaggtttccaggctttcctctccacccctcacacatcctactctttagccaaaaaaacagacaaaaaccctaaaaacaaaaaaatccatttttttatttatacccgtgctttctttcctaagtgcttttatatgtgctatttctcctgccaggagcagagactgtcatgctttcctctgtataagtaagtgttgcccaagaaaacattgaacagaggtgggctagagatccatttattttctggttcacaaagggcatattggatctttattaaatagtctaaaatgtcctttcaataatgtttttctttaatatctttttaaaagacatttaaagtgaatcagaaagcaattaaatgattaattgctgtggctgaattctgctgccctcagcctctgtggatgctatctcaccgattaacctccatttctaagctctgtctgattgagggaagcaatgacagaaaacgcttggcctgtcacatgactgatccttgctgtcatgagccatcgttttctaactgcaagctttcattttcaaagccctggcatgatttcaggagctgtaaaccctcatgtgagtaagtgagcagtaagaactggcagtttttcaatcttaagtctctccagctttaaacccacatttagctgtgattctttttttctccttaagttggacatttttttagtgaatacttttttgataaataaagtggggtgaaggtgaacttgactgagacagatatgggttggtccgtttagggctgaccctggaaaaaaaaagttatatcagtcttgacattaattccgtagtcagagtaggtgagagaggagtagattagtatatagggttcccagccttcccagtacaaccatggactcagagttggggacactaaaaatgtacatgaagtttatgatttcactggtagagatggcccacaatgccagtttggacaggcattactctaaacgtggtggggaagtcaggagacatctactccaaggcataacctctaggacagtttgtggggtatcagggaaggatatatcattggaaagatttctagttgccatacacaaataattgggcttcagtttaatgcataattaactgttctcagtgtgttattagttggacaattggattattacattatttacattagtgtttataggtaatctgaaaacaaaaatgtgaatataatatgaactacctcaaagatttgtctctgcttaatagttttatttcaaatttgtatatcaaatgtttcattacccttttttcattttattttttagctttcaaaacaaattagcaagaggaggaaagaggagagggagaaactgtgcacaccaccagaatgttatagtaggcgatatcatgaaagcaatgttggaactttatactcaggttttgattgtgcatctatctctttgttgtcttatcctttatcttcatttttaccaagtaattattgaccatcaaatgccattatggtaccaacttaagaaatggatgtaaagaattctacagggaaaaaaagcacattgtcagtgtatgaaatttatttagaagacagttacagacacatataaaaatgatagcagcttatgtttgcgaagcactcactatatgccaagcactttctgttagctaataataatatttgctcatttaatattagctcacataataatattaatattattagctcatttaatcctctcaacaactgtctagggtaggtactattatccctattttatggacaaggaaattaagtcaacaagagatgaaataatttgtttacagtcacatagctaggaagtggtagagtcataagttgaacccaggcagtctgaatccagaataataataataaaaaaaggtataaccagggtggaaacttattttgctcttttcaggtttcctagactttccatcaccaccagtgaattctgagtgacaatagtgtggaatttggaagaatggaagagaaactgaagtggagagatggtgaaagagaagaaaaaatgaagaaagatgcttgcaaaaatactgctgtgggtcctgagatgaggattctgggagggctgaaatggatgcccctgacagctccctttgagttcctgttcatctgaagtacaccagctttctagatatgctgtcactttccttctgcagagccacagtggtgtcctgtcttctcagacctcttctcacctcaaatcacttaggactcggccaccagacagatttgggatttcagaacttttcagatgttagaaagttcttttctaaatgtgatgaggaattacggaatcataaaatggaagcagagttaaactcagacatgtgggcactcaaggagctttctgcgatgagaaagggatcagactgatccttaagactttatgcaaccccagagtattgcagccacctgcatgccgaaggtgtcaagagtgttctcactgctgcctataggagggtcttcagcctccagtgatccaaagtaccaggtaaaatatttaagccaacagaaagaacgtgttttattgtgttttacatgtcataaagcattctctatcatgagatatcactctgtatcggtaagacaggcttgaatttctgtcttggttctgccactgactagctttattccttaggctaacctgttggaatctcagttttctcactgtaaagtgaggataattattttatgaggatagttatgaaaattaaataacataatggttgcaaaacacttagcacagcactaagacacaaaatagacaataagtgttagttacctttattcctgtcccctttcctatccagacaaaggctcagtataaggacaaatattgtttagaacttctttttaaacctacgagccttacctttcaagaaccgcagatttgttcctgaaagttacctgtgtagtgagggttttataaatcaaattttactttcaatgtacagaggagctctttgacagagtcccttttcctgagaagtcattgtgggtttggcatcctgttcagcctggctggggccaggggagctgaactgtaatgacaagcagatgtactattgttctatgaaaatagtgtctggctccagatggggtttaggaaaaagtagtgatgatttctgttgaggaggatgggaattctgacccactgagctagctggtgaagaaggagagtaagacatgtgggtaaatgcaggttaagaaaaaggacctctagatcaactgaaagcctactagaagaacattaaaagcagataagaaaacaaggaagcaaacaaaactcgacaagagaaagaagagaccattaggaaacatccaggataattgctgtcatcattaaagctcccatttgttaatctgttacatatgaggcccaacactggatgatttaccaacatttaacctatcctctcacttttcaatgaattggatattgtcaaccccattattaatggaaaaatgggagctctagaatattgaagtcacttggctattaagtgatggagccaggactgggattcagaatccaacactcatattctttccatgaggtgtagattccattgagaagaaggtgtgtgcctaacaccgtgagaaagtcttggccctggtaatgctggtgaggccagtggctgagaaaagaatagctcttacctaaggctgagaacagaagacccaaggttgtggaaaactgacagtggtgcccttcctcacacagagtgcaaagattggtggcttacctgcttcagactcttggacgtgctcttaaatgcagatcctggcagtcagagaggaaaggctgagaaaagttcactctttgccaaagtaataaatccttctctttgatccctcaaaagttgatagacgaaaactcctcaaagcacctaggggtaggaaccccacttgagagttgtgggttctccatttcatcacagggatttgctgtgaaggaatcctgtggtaaactccataagaaaatgtaaataacatcccctctccaatttatcttttctgtaaatctggcttttcatatattaggtttctttacagtaagttgaaaccttaagaatagatttcaaaatatttaggaaatggcctatttattttgaatgatattcaacaccattaaactagagtgttgggagaatatttggacattccataatgatttgacttgtaacttaatataacagaactaaaaacaaaaaccacatgatcatctcaatagatgcagaaaaggcttttgatacaattcaacatcccttcatgttaaaaacccttgacaaacaagacatcacagaaacatacctcaaaataataagagccgtctatgacaaacccacagccaacatcacactgaatgggcaaaagctggaagtattcctcttgagaaccagaacaagataagaatgtgtcctattcaacatagtactggaagtcctagccagagcaatcagataagagaaagaaaaggcatctaaataggaagagaggaaattaaactccttttgtgaatataacatgatttgatacctagaaaatcccatagtctctgcccaaaggttcctagacatataaacaactttagcaaagtttcaggatacaaaatcaatgcacaaaaatcagctgcatttctatacaccaacaatgtccaaggtgagaaccaagtcaggaacacaatctcattcaccgtagccacaaaaagaataaaatacctaggaatacagctaaccagagaggtaaaagatctctacgagaattataaaacactggtgaaagaaatcaagagaagacaaacaaatggaaaaacatttcatgctcatggataggaaggatcaatattgttaaatggccacactgcccaaagcaatttacagatttggtgctatttctatcaaactaccaataacattttttatagaattaaaaaaaaactattctaaaattcatgtggaaccaaaaggagcctgaacaaccaaagcatttctaagcaaaacaaacagacgaaaacaaaaaacccaaacaacaacaacaaaaaccagaggcacactacccaacttcagactgtactacaaggctacagtacccaaaacagcatggtactggtacatagacacatagaccaacaggttaaagaatctagaaataaaaccatacacctacaactaattgatattcaacaaagtcaatgaaaacaaccaatggggaaaggactttctattcaatatatgatgctgggataactggctagccacatacagaagattgaaactggatccctcccttttaccatatgcaaaaattgagccaagatggattaaagacttaaatgtaaaacctaaaactataaaaaccctagaagaaaacctaggaaataccattctggacataggccctggcaaagatttcatgacaaagactccaaaagcagttgcaacaacaacaacaaaaatagataaatgggacctaattaaactaaagagcttctgcacagcaaaagaaattatcaacagagtaaacagacaacctacagaatgagagaaaatacttgcaaactatgcgcccaacaaaggtctactatccagaatctatagggaacttaaataaattaacaagcaaaaaccaaacaaccccaataaaaaatgggcaaaggaaatgaatagacacttttcaaaggaagacatacacgtggtcaataagcctatgaaaaaatgctcaacatcactaatcattagagaaatgcaaatcacaaccacagtgagacaccatctcacaccagccagaatggctattattaaaaagcaaagaaggctgggcatagtggctcatgcctgtaatcccagcactttgggaggctgaggcaggtggatcacgaagtcaggagatcgagaccatcctggctaacacagtgaaaccgcatctctactaaaaatacaaaaaattagccgggcgtggtggcgggcacctgtaatcccagctactcgggaggctgaggcaggagaattccgtgaacccaggaggcggagcttgcagtgagctgagattgtgccattgcactccagccagggtgactgagcaagactccatctcagaaaaaaaaaaaaaaaaaaaaaaaaagcaaagaaataacagatgctggtgaggttgtggagaaaagggaatgcttatacactgctcttgggaatgtaaattagttcagctactgtggaaagcagttcggagatatctcaaagaacttacaacagaactaccatttgacccagcaatcccattactgggtatatatccaaaggaatataaattgttttcccataaagacacctgcacatcgcaacactattcacaacagcaaagacgtggaatcattctaaatgcccatcaatggcagactggataaagaaaatgcgttacatatacattaaggaatactatgcagccataaaaacgaatgaaatcctgttctttgtagcaacatgggtggagttggaggccattatcataaatgaattaatgcaggaatagaaaaataaatactgaatgttctaacttataagtgggagctaaatgatgaatacacatggacacaagaagtaataaacactggagcctatttgagggtggagtgcaggagtgagtgaggactgaaaaactacatattgggtactgtgctcgttgcctgggtaatgaaataatctgtacaccaaacccccatgacacgcaatttacctatgtaacaaacctgcacatgtaccccctgaacctaaaataaaagttggaaagaaaaaaaaaatgaacctctgagacaatattataaaaattagcacattcaaaccacggaaattgtcaaagtgtagctaaaatattaaaccttttagatatgttgtctagatataattatcccattttatagccagtgttatggacatccaaagacaatgtcaattttgctaataaactgcatcaaataagtgcatgggaaaaaataaaaagttgatacattaaaaaaatgtttttgatacataacttttattttgaaaacttgaaataaattgccattgtgaatttggcagcttttaccctggcatgcctacaaagaatgtgatatacatttaatcacgaagaatgccacccagtgataacagtggtactggggttatgattatgttttaatttgttttgtgcagaaaggcatgaccatttgcaaagctgtcctatgaaacgtatcatgtactagtcacctcatgttatcagcatgctcctggaggagtaggcaatggattttttcaccagttcgcactgtgcaatctcttcctcatgtgtgtgaactttgtgggatgtcaagtaccccattaaaattgaatgaagtatttgaggggctcccacaaaccctctagtgatcttctttcaacaaacagcattttattgtgtaaattagaaaaacaacacagagtctggcttaaagaggatggaaaactggcattacaccaagaaagaacctgaacttcagtctttgacctcaggagacatccaagtattaaaacagaattttttttttttatttacatggaaaccctgatggaccaggaaattctttataatgtagagtctggtgctaagtcttactttcaggtgaacccaaatgaagattattgaactcactgttgaatctcatcccctgtctttttaacagcagtaagacccctcttggtcagccacaatatggggaaactcctcagcagctgctgttatccctaatattattgatatcacttctacttgctcttgctatgtttgtttcttttcagcagagctttcacagtactctaaaaagtagaggctcttaacattaaaagtttccttagccttttcaataaccctttcctggttgtctatgctggtggcagcctcaacctgaacctgagtgaatttgtttttctggcctgagctttgctgagcctcttaaggggtagaccgtctatgtgtgtttcttttatgtgagataaaacgcacaatttattaaatatcttctgattcttagacaggatctcaagggtggagctactccagggctcattgattttcatggctttttggctgtttgaaaaagagcctcctttgacatcatgtgggtttttgctatttctatttaagggtatatcttacatgtcagatatattattattgctgttttagttctagacagcaagtgatatgagcaaacaacaaagcttccatgctgtgaaattatgcatttattaaagctatcagttgacacttagctttgaattatttatatttttctataaactgtcgacaatcataacgggaccagaaccataggttcatatgggaaggtgatttactcatcttcctttcttgcccttaggaggagttgcagacagagtattatctttttttttttttttttgagacaaagtcttgctctgttgcccaggctggagtgcagtggcgcaatctctgctcactgcaacctctacctcttgggaccatgcctggctaatttttgtattttcagttgagacgaggtttcaccatattggccaggctggtcttaaactcctgacctcaggtgatccatctgacttggcctcccaaagtgctgggattacaggtgtgagccaccaggcctggcccagagcattatctttatcatgactttttcctttatatgtattgactatttgcaggtgtatcacaactacaggagacagaaagggaagcggtatacctctttctgcatgccttgtgtttaaagcgtgcctagattctgataaaggcttgcctgacagaaaaggcagaatgccaggggtctatcccaagatactgagtcattcctgtgtccttaaatgccaaagaggtaggatcaaaacaccagatctaaaacttgacaatataagttgttagacttaatctccaccagactcaacttgtatctcagcttctcactaatctcctatttctcattcactcactggtaccttcagcttattctctgttttctcctttgtttgtcaggttttggcatgatatctcagacactttttttctccttgcttcattcagccagccccaggtgatttgccttcccagaccactggctttctcctgaaaagagaagacacaattgacttctggtctttcttgctgtccatactacatagattgttattccaaagcttggtccaggctgagttcttggacactgctttaaatgagtggcccttgaccagaagggagatctagaaacaaacacaattttcctggggaagctgaggcattgtgtttgaggcccacgtatctttgtactccttccgtcctgtgatccagaagtctatttatgccagtcttgcttcaacctctctcacaattgcaggggaaaagtctactgaagggagagaacatttcagctaggggatataacttaaggtgagaaataaaagtgagacgaagaaaacatgtttggtgaactggtttgaccagaactcatgtttcaagttggaaatgttcaaataggaggaagataactaaggtaaaaatattaaagactactattaaaaatttggaattcaatagttaaacaccacaattagagatatttttatgacattactgatattaggattgtcatttactgagaaaagtgtgtaaaaatctcccactatgattgataatagaatgtttattttccttgaagttatttcaattattactttatttattttcgagactgtgttattcattgcatacaagttgaggattgtgatatcttcctcgtgaattgacttttgtcatcatataatgactttcttacctggaacaatgcattttgcctttaggattactttgtatgatattaatactttgtcaccagctttcttttgtttaatgtttgccccatagtaaaatattatcttgccttttggaacatcttggaatttttcctcctgcctttctaacctatcttcactgtgtccttctatttcttctttttttcctcctactcctgattacccccaaaacccaggccttgaacataggggtatatctgtgtgtgtacgtagatgcacgtgccaacttttttatctcaaggctttaactgttactctatcattgaaactgcatttcacaccttctctttagtctcaaattcccaactgccactcatcatcttcccttcccttgcctatatctctactctattctctttttctcttgggcttgcagccttggagtcaaccttttttccgctttatgctctatattaagctgtcataaatgccatgacctttgctgaaatgcctaacagattctcagcaataagctcacagggaaagggcaaagccaggagtgcaggacgaggggaggatcagtggcagccatcctgtagattatctactgaaattctttccattcctttgaatttctgctcctttgaagccctggattataataattatcttggaaagtttttcagtccgagatccaaaaattcttaattgggacctcttcagtgaaaatgacattcagtgaaaatccctggcaacattttcctagatgagaaaaagaattaggaatcagatgaagacgtgagaaagccatgacttcacaatgtgtaaagcatgtgctgatagcttgtggaagagtgtcttaggaggtccctgtcccaatgaggataacttcttaatcagaatcttgtttccaagttctccctcaactccaggataaactttaaaaaggaaaacaaaatccttgctagaaaattttccatcatttttctcttttctgtatgagtagcatggatgaaagagttctgtgactgagttgaggtttgcatctaactattgagccatggcaaaaaatattaagcatcactatttgttgtcatataaggaatttagtggggtttgaggttttaaatgttattgtttttctctatagtaatatcccttcaatccccttggttatctttctagagcaatataaaatgacctgacttctgtgagaagtctttagcttttggaaatcctcacctaggtttctttcacctagagaattggtttctgagaaaatcctccttccttttactgaacagtgaactgggagcctttaaatggagtggaggtggaggaagatggaagtgaggcaggtagaatttgtcattctgtccccctgggagaatgaggaaattagcatccagttctctagaacctagagtttcagggatctatttgagtgggaaaaagcattccttgtttttttgtgacctacttaaacattctgtgaaagttgtaatcatttgaggttttctaagaaaagaaaaaaaaaagtctaaatataatcctaaaagggagctaacctaacaacaaagaacacccggttgcagagattatttctctggaaattggcaaaaagagacaaaaatcttccctggcgattactggctatacctgctgctacacctgatttcatgctttttattcctggcagcactattggccttctccaatgtgggcttctccaaacttcacacccaggggcacacaaatcctatttctcccatctggaaagctctgctcacttcttcccaagtccgcttcccacctgcctttgaaatgcagctaaagaccacttcacagagattccctcaatgctagctcttccgctatgcccttcattctttctcttaaacccctagaactcttagaacctgttaacagtgtatgacatcctaagtgctctaattcagggacagcagagaatgcagtccaggctcctggtccagtagtggggatggattgtgctggtccacccgcatgctgccattcagtctgctttatcgtgagcacttcccatttgccagcaggggctaatggtgtaggccaaccatggaagaacgtgaagctcatctcagtttagctgactggatgcagcctgcagcaagcatgtgttgttgtttcatacattcctgtctttgctctgtgtgcacatttgggtttcatcttttcctcctagcggcacacgttcccatagactttgtgcttgcatgtattaaggaacattgcgttgtcaaaaggtaataataagagcagctaaaaattattgagaacacgtgatgttgtaggcactcttttaaacatttttatatgcatttaatccttgcaacaatactgtaaggtagttattatcccattttatggatgaagaaaataaagtactgagaggttatgttactttcccagggccacatggctagtaaattctaaagcccaagctattgaccttgagcctatgctcactccaggctttggagttgtaggagatgtgcaaggcttaatgaacactgagtgaacttatgaggcagttcagtcatctgacatcctcattaaatctgatttgaagaaatgacagagagaaagttgatagagcttagaaatttggttctaggtgagaccttaaaagtcatgtcaccaaggaataagagaccctcaagaggttagataagtcctctgtgcatcatttcctcctgacctgtatctcaacgtcaaagctgtcaacaaaaatgaacagggagcagcacttagtttgtatgatgtattcataatgtttggggtgccaaacagaagtcttatgacatggtatttttgcccggctaggtttttctatactagggcatggccatggttttaatgctttatttattaaagttattagaagataaatatgtgcaatcattgaaacttttcttattttcaaataagaaagggaaacttaaaaaatttagatttagcaactaacttttatttagaactgccatatgatctaacataaagttttcttacaatctgaatttgaaacattcaggattattttactaagatctgaaaaggtaatttgacatactatctataaaagtgtgaattaccctggggattaggaggtgaggttctgtagtaattaggtatgccaaaaataattttttaccctcctccccctcttccttctttcttttctgcatttacatgtattgctcttggtctctcatgtcattctttcaggattttctaatgtaatgaatttctctttctctaccctagagagtaccattatttccattctttcatggaactgtaagtgtgtgcaatttgttgacctcgtggtatttcaaagaactgtaaaatctcaattatcaggaatgcccagggaaaggggcttttaatggaatggatttttctcttaaactgaaggttaatcaggactcttctctcccccccgtttcaaatttattggttgcaattttttttccctaatctgtgagtgtactttctgggctttgctgaaatgggaggttatctgattgactagcaatcataagccctatgtttaagtccacattcttccatttgccagctctatggtttgaggaagttatgacactgagccatttgaaaaatggagatagcaacacttgtcctacctatgtcacctgggctgtttagtgtatcaaattatataaagacaatggacttgctttgtacaagtcttaagttttattttaatgaattatgacaactaccaagttctgagtgcctaggggccaggtgctccatacacattattgttatttccacaataaacctactatatatatagatgtatatagatgagaaaagtaaggcttgggagataagtgacttgcccaagattatgtaaataacagtggaactaaatttctttacagcaaattgataccttgattaatcaaaagtctttattctaagtaccatttcttgtggataaagagagtatagaagattgcctagaagcatactgaccttaggatgcattgttttgcttagggttcttttagttataaggaacagagatgttaggtttcagagggatttcagagaaacccaatgacagaaattgaattatagttgggtgttaaggaagctgtcatgaatcaagcctactcttgcctctcctctttcttctcctctccttccttcttttcgctctctctttgtccacacaggcaaaatcttccttacatatgtggccttcactctcttttgtctattgactggcttcctcataactgtagcttgcatatggttcatcatatggtttgggtctgtgtccccacccaaatctcatgttcaattgtaatcccccatgttggaggaggagcctggtgggacgttccttggatcatggggatggtccttcatgaatggtttagcaccattctcttggtgctgttcttgtgacagtgagtgagttatcgtgagatctcgttgttttaaagtatgtggcacctcccctgtctctctcttcctcctgctccagccatgtgaagtgccttgcttcccttttgccttctgccatgattggaagttccttgagacctccccagaagctcctgtatagcctgcagaaccgtgagccaattaaacctcctttctttataaattacccagtctcaggtatttctctatagcaatgtgagaatggactaatacagaccgtagtagggactctacacctccatatagcatagtatctcttgatctgtccatttagcttttgccctgttgcttactggaaattctctaggtcttgtgattcagattcctgaaggaggattcttactggcccagctcatctattctagtcagatcccaggtcactgactgctacaagctcatggattggctgcttttgcatcaggtgtcctgctttggtgctgcccacttagcaaagctaagggaagactaggaaataaaagcaatgtgacagctacatctatcatcactattaaagaaggctatatatcacgatatatttgtttttgtaaaaatccttaatattttattgttatcttttagttcttattctcttcttttcaacgtagtccctcgtctttcaaaatatttctcagtaattgggttcctgttgactcaaattttatgacacagaaccttgtttataacctcctaacttaccattactaatatcagttctgtagtcatatataccacaattttatatgtttttgaagaaggtagtaggaaaatatgtcatagtttaagttttatactaagcataagtcatgtcatagtagaagtcttttttctattaatagaagatgtcatgtctcaaggttattgttggaatataccgtaattaatttttttaatccttaaaataggagaattgagggtttccgagtagtgtgaatacatgaaaagtgaaaaaaatgggtcatcttctaggaaggcctgcagaacttaaaactgagaacaggccttagacttgctttctttcctctcctggcacttcctgggttttgttttcctccctgctggtaggttttgatgggaaggcattatatttctgtttatctgaatatctattttactcacaaacttttttcttttatcatagctgatatgaagtgaaaacatgtatcacttggctcagcctgaactgctgtgtgataggatgtccctgtatcaaccatgaaccagaagtggaacagggacctaattaatatttatgctgaccttggtggctgttgtaaaataaactaccatacatctaaaacctcaccacactgggttggatagctaaaacttctatactattcatggcttaacttctgagatttatatgcctcttgaagagaaagtactcatcactgctgaaagtttaactttctatttttgttatggcctccattacatttccaaatattcctttacttaattttatccataaacctgaagccttcactttcttagtgaggtactagattctttgtatataaatttgactgtattggaaagcctgggtccatgtgtttttagtccttaactctccagtccttgtagatttccttgtatataaacactttaactgagttatagaacctcttcctctgtgaactggtgtcaggctctggtggtaggtcctcttcctactctacatgctgcctaccctcttgtatggaaaaagattaactgttttcctcacactcagcgcaaaacacttctggtcaccaaaacgtgtgggtttctcccacacaaagcaattctctgacaccagctggatatcctacagttcagttcaattctgtgctaactgaagttggcacagactccacgtgttaagggctcagcccctcaagactgtccccggcttcagatgtcagtcactagtggtagtttcccatgttacccatgacttgtgtcagacttggctgtaaactggagggtcccaaagcccccttctctggtttgatcacttgttagaacagctcacagaatgaggaaggtgctttacttattattagccattgattataagatgatataagtcaggaacattcagaaggaagagatgcacaggtgaaggtatgtgggaaggggtgtgaacttctgtgccctctctgggaccaccactctccaggtacctcctcctgtttggcaacccagttatggaggcttcattacataagcatgattgattaaatcaggccactagtgattttttaaaaaatttaattaacacctaataattgtacatctttatggggtgcaatgtgatattccaatttatgtatacatgtgtaataatcaaatcagggtaattagcatatccatcacttccaacatttacaatttgtttgtgttgggaacattcaaaacctctcttctagctacttgaaaatatataataaattaacgttaactatagtcatcctacagtgctaatagaacgctaaaactttttcctcccatttagctgtgattctgtatctgttaaccaaactctccctcttccctacttccccctacacttcccagcctctagtaactactattctactgtctatttatataggatcaactttttcagctctcacaaatgagtaagaacatgtggtatttttctttctgtgcctggcttgtttcacttaacataacgtcttcccagctcatccatgttgctgtgaatgataagattttgttcttttttatggccgattagtatttcattgtgtacatataccacattttctttatccattcatctgttgatggacactaaggctgattctatattttgtctagtgtgaatagtgctgcaataaacatgggagtgcagatatctcttcaacatactgatttcctttcctttggatatatacccactagtgggattactggatcatatggtagttctatttttagttttttttgaaaaatctccatactgcttcccataatggctgtactaatttacatttcaaccaacagggtataagaattcccttttctccacatcttcaccagcatttgttatttttttgtctttttataataaccattctaactgaggtgagatggtatctcattgtagttttgatttgaatttccctgatggttagcaacgttgagcatttttcacacacttgttggtcatttgtatgtcttcctttaagaaatgtctattcagatcatttgcccattttaaaattgggttatatggtttttttgctgtttgctgtttgagttctttgtgtattctggatcttaatcccttgtcagataaatggtttggaattatcttctcctgttctacaggttatctcttcactctgttgattgttttctttgctgtgcagaagcttcatagtttgatataatcccatttgtctatttttgcttttgttgcctgtgcttttgaggccttatccataaaatctttgcccagaacagtgtcctaaagtggttcccctatgttttcgttgagtagtttcatagtttttatccttacttttacatctttaataaattttgggttgattttatatatgatgagagataggggtctagttttattcttctgagtatgaatatccaattttcccagcaccatttactgaaaagggtgttttttcttcagtggatgttttcagtgcctttgttgaaaatcagttggctataaatacatgaatttatttctggtgccatttgtctatgtgtctttttatgccagtaccctgttgtttggttactatggctttgtagtgtattttgaagtcgggtagtgtgatacttccaccttcattctttttcctcgggattactttcactagttgaggtcttttgtagttccatacacattttaggatttttttttcctacttcagtgaagaatgttaaaggtattttgataggaattgcattgaataaatagattgctttaagtagtatgatcattttaacaatattagtttttccaatccgtaatcttgggatgtctttccatttttttgtgtcttcttcaatttctttcttaagtgttttatagttttatagttttcaacgcagagatatttcaccttcttggttaaatttgttcattttttttatagttattataaatgggattgccttcttgtattagtttgttttcacacggctataaatagctacctgagactgggtaatttataaacaaaagaagtttaactgactcacagttccacatggctagggagacctcaggaatacaatcatggcagaaggtgaaggagaagcaaggcacatcttacatggtggcaggagagagtgtgtaggggaaactgccacttttaaaccattggatctcatgagaactccctcactatcatgaaaatagcatgggggaaaccgcccccatgatccaatcaccccccaaccaggtccctccttcaacatgtggggattacaattcaagatgaaatttgggagaggacacagagccaaaccatatcacttcttgatttctttttcagctagttaattgcagtatagaaacactattgattttggtatgttgattttataacttgcaatttcactgaatttgtttcttttctaagagttttttgatggagtctttcgatgaaggtttttccatatataagaatatgtcctcagcaaacagggaaaattttacttccatctttccaatttggatgccctttattttgttctcttgcctaattgtgctctggctaggactttaagtattatgttgagtaagagtggtgaaagtgggctttgcgtcttattccagttcttagaagaactccccccaaccgccattcaatatgatgttagctgtgggtttgtcatatatggcctctattgtgttgaggtatattatttctgtacataatttattgagagttcttgtcatgaaaagattttgaattgtagcacatgctttttctgtgaatactgagaggattatattagtttttattcttcattctgttgatgtgatgtgtgatgtatattgatttgcatatttgaaccatccttgcatccttgagataaaccccacttgatcatggtgtataattcttttgatgtgctattgaatttcttttgctagtattttgctgtggatttttgcatctatgttcatcaaatatattggtctatagttttctttctttgttgtgttcttttctggttttggtgtgagaataattctggcctcgtagattaggtttggaagaattccactccccacctccattttttggaatagtttgagatgaattggtgttagttcttatttaaaagtttggggagtaacaacagcataatgttagaggtgcctagtattcattccccttacaagaaaaaaccaaggcaatgaatacacagctaagatttgactggagtgtgggaaggagcaccttggaaggcagcaaagaggtggagatgcacctgtggtaaatggaagtccaggagggcagcacgcaggcactcagcctctgaagctctgtctgccccacccagattagatatgtctgaagtcaggagacacttcctgttctggcaaaaatctgagtagaagacccttgccagcttccattgccactgccaatacctacagtccttataacaagagaattccacaatcctttcaagccatgagcccaattgggagaactgtggggattatactaaattagcagtacaaggtgtgcactctccaccccctgcccactccctatgagccaggctgctgcagcatggtgccatcttgagaccagagtcacctctggtgtgcaccctgctctgggagccactagccactgtgcctcacaagcactgggactccatcttcatcccaccaagcccataggtcattgaaccccacaacctcatctgtgcagagcctgggcccaagatcagctatgactcctgcactacagggaaaccaactcctgctgccttacctccagctgaaggaacagtctgattgtctcatccagggtgaacccccccttaagctggcgaaaacactacatgccatccttcaaacaggagaaactttcaagcttccgtgtagctgacatatccctgagtcagtggaatgactataggccatactcagaacctgagaaacaatgtagcagtgccactgccccaagcagacacaccccttgtctgcccaatggccctaatgatagggacaggagatagcgaaatactgggtagaagagggtggttccctggcaaaggccccaccctcaagcctggaaacccatggccctaaatgggaacaggcattcctatttttgcacccaaaagttcccttttggcccaccacactctgcatcctgaacccatataaaccccaaatcccaggctccacgagcagatgaacagaagagcagaagagcagcagagaaggagagaagagaaggagcatctgaacgttgagaggagttcagctgggaatgattggagatgagatcggcgctagatggccaaactccaggggaagatcatcttcccactccatcccctttccagctccccatccatcctgttgagagccacctccaccaatcaataaaaccctcgcattcaccatccttcaagtccgtgtgtgacctgatttttcctggatgctggacaagagctcaggatacagaaagcccttgcaaaaaggcagagtgttcactgagctgtttaacacttaagctgtccatggacagcaaagctaaaagagtgcgctgtaacacatgctcactgggacttcaggagtcgcagacacccacccctagattctattgtggggccggagcccaaaagtgctcacaccagcttctgcacctgcccatctgcatgctccccgtcatgtaaggggtttgagtgccagtaagccatcatccttttacttatttaacatttaatatgtatatggtgttggtgcatgataacatcatggaccagatataatgtttgtctccaaagagcttgtatagctatagggaaataagacttagacactgggcagagggaggtaaaactgacaatgagttgtgggatattacagataggaaagaacataggtgtggtgttttcatttttgtctgcaggttacaaagctatgcataaagaatagtaggaatagtcttctgctcattatattgacaaatgtgatttttaaaaagccaaggtaaattgatgtatttttagaaacatgaaaaatacttacaaaaatacttttaacatttaaaaaaatattgctagcataaagaaagtgggagagtggtccttctggccaaaaatgccatttgacttcttgtcatgcagccactggctacattttttataccttttctgaccctccagtttccacttctgtcactacatttttccatttctaatatcacactgcatgctgatttttgacttttggaactgatggcattttcaccctataaaagtgtcataaagacacattaatattcaaatgatcacttattttgtaaatagggaatttttgcatatattaaaccagtagctttcacttcacttcacataagtcatgtttctttgtggttgtccattttcaaatctgtgccacaagactatgtactgggaaggagaaaatgagaattaccacaaacaaaaaaaaaaagtgatagactctgaatcagagttcactttcttgacctctctagtgagataatagtcttgaaaggcaggcttcgtggaaagagaaatttcttttcattgttttattttttccaaatctattttttaaaacttttctatttagaaataattttagactcaaaggaaagttgcagaaatcagagttcctgcataccctttaacagcttcccccagtgttaacattttacattaccatagtaagagtatgaaaaccaggaaattaacagtgacataaaactgtcaccttatctatgaatctttatccagtttcaccagatttcctattaaagtgtttttcttgtcaaggatccaatccaggctcccacattgcatttggttgtattgtctccttggttttgtccaatattagacccaccttgagtctttcctttctttcttttcttttttttaaatttcatggctaacacacttaaagagaactggtcagttatttatagaatatcccttaatttggaatggtctttcttttaattattacattgaggttgtgccattttggcaagaatgccactgaagcgatgtgcccatcttagctcatcatatcagtgggcacatgatgtcgatatgccttattactggtgatgttagcctgtgtcactcaattaaggtgatgtctgccaggtttctcaattatgaagccactatttttcccttgacaatcactgaatatcttctggggagatacttgaagactatgcaaatatttcacttcttgccatatttttgcacactaatttgagcagccattgattgttcttgcctgcaacatttattactgtgctgttgcctaatggttattttttattttccctacttctaaatttattcattggtaatccattgtaagaagttgtcccttctccctcatttacttatttattcaattatttgtttacattagcatgaactcatgggtcatcatttgatactatcataacttactttgttgctcaaatttaactagctctggtctttgggagatccttcatgttgcttctctgtcttttcaacatgtccccagatttttttgagtacattctcacttggcaacatgagttttcctggattgtcttttatttcccttgccctagctctggaatcaccatttccctggagttaattctgtagccttgatttcttttattcaggaatggtatttacagctaagatctgggcagatatgctattgctataaggggttattgaaacaggaaatcttccctgaccccttcacaggacttgtgaagggggtaattcatttactgagcccacagctctcaatccctcatgggatggggagcatgcaggtgagtgggtacaggggctggcatgagtgcttctgggcactggcaggaacagaacttcgtgtggccctgtagcagcatctgcagggggtacctgtgacccatggagccttagaaggtgtgtgttacagttgtgctcttttagctttgccctctggtgatggcttaagtgtttaacagctcagtgtgacagccctctgtatcctgagctcttgtttggtgtccaggaagaagcaagttgcatgaacgaattgaggatgctaaatgcaggggattttgttgccgatgaaagtggctctcagtataatggagagctggaaaggggatggagtgggaaggtggttttccctggagtacagccatcctgggccaaactcttctctgagatcccaccatcaagccgtccctctgaaatcaagctgcttctcctcaacatcaagctgctttttctcttctttcctttgctgttgccagtggagcctggggtttttatgggtacacgatagggggtggaaaaggcaacattcaagagggaaaacaggaatgcatgttctcactttgggctgaggttccaggcttgagggtggggcttcaacagggaccccaccctcttctacccactattttccctgcctcctgtccatatcagtattgtctctagtcctgctcagtcaacagaagtaggatatatatacatccatccgtaagtatacatattaaaaattatacatttatacctctgattccaacccaacaccactggtttcattctagcctttctgttctttgtaacttcttttgctgatagtgaggaactagctcattatatttacttaagttttgatcctagtatatacacaaactagttttggaataatcaacctacattagcctagaatacagaatttgggttcaatttttttttgtcattagccttacagtattcatgcaaaatactcttttccaaagatatttagattagttctttcttcaccactctcttcactttgattatgttagttatttgtgatatagttaggttcatttgtcactgtttgtcttccatttgaggttcctatcacatcctggtttatttttaattatttatcgtgtgtgtgtgtgtgtgtgtgtgtgtgtgaaccattaccatggttctaagaatcagaactatgaaaaaaaaagtattctcagagaaacatttcttccgcattcggccttgtcctattgttctttccaccctgttctcactcaccccctctaggtaaccaatctcattaacttctggtttatctttcctgtgtttattttgcatttgtacaaatgagcagatatgtgtatattttctttctccttttatacacaaaggttagcactatagataatcttttttactttgcttttttgtaaaaaaataataacagtatatcctggaaatcacagacattttccatattcttttttactgctgcatagtgctccattgtatgaaggtaacttcatttatccaacaactgtcctctgtataataattttggttgcttccaatttttttgcaattacaaacaatgctgcaatgactaaccttggacatattcgtctgtgtgtgtgtatgattgggggtgtatctgcagggtagatttctagaagtgagattgcaggcccaaaaggtaagtgcatgtgtagttttgttaggttttgccaaaattccctccagaaagcttctaccagtttgcattgtgtgaaattatctatttccttatagcctcctgacagaatatatcctcacacttttttattttttctgatataagaagtacaacatggtatcacagtattgttttgattttatttctgtaattataagtgaatttgaacgttctaaccttttaaaaacatttctgttcatgtattttgccgtcttgctatgaggtttttgtcctttgtctcataacactttgatatattttctcccggtttgtccgttgtcatttgactctatttactcttggtatgtaatttaaaaaacatttttgtagtcaaaatttttttttattttattgcttctggattttgaattatagttagaaagcctttctcatatctaggttgaaaagcaatccccccgtgcttttttctaggatttttatggttccgtcccttgttttctatttagattcctaatcctcttggagcacatttttgtttatggtgtaagttacagatctaattttatcttttttccccagtggatgcccaattgtttgagcactatttattattataaagtccatctttgaggccaggcacagtggctcacacctgtaatctcagcattttgggaggccagggtttgaggattgcttgagtccaggagttcaagaccagcctgggcagcatggtgaaaccccgtctctactaaaaatacaaaaattaggtgggcatcatggtgcaggcctgtaatcccagctactcaggaggtggagccacaagaatcgcttgaacctgggaggcagaggttgcagtgagctgaggtggtgccactgcactccagcctgggcgacagagtgaaactctgtctcaaaataaaaaataaaataaaataaaataaataaaataaagtccatctttgtaccagtcatttgagatcccacctttatcacatattacatttccagattaacttgtgtctatttctaagctttctattctattccactggtctatttgtttattcttgtactagcaccacacttttaattatagagaatttatagtatgttttaattcctgatatatgacttatccccaaattgatttttcttttgagtgtgtcctggctactgttatgtgtttgtttttctatatgaactgtaatattagcttgtctaacttcatgaagaagcttgttggtattttctttgagactgtcctaaatatataaattgatttagggagagctgacatatttataatattgagttgcattattcaagaacagaagatgtctttccatttgttcaagtctacctgtctattcttgatacttcatgtctttcaaaaatgcttcttgtctattcttgactctttactcttccatatgcattagaattaacttgtcaagttctgttaaaaacttgttgattgaaa

SEQ ID NO: 280 - DNA, 8305 bp, Homo Sapiens
ctttccacccgagcgcgaggtagacgccggggccacccgcagcacgcagagcttctgggagccggtggcaaggccgaattgggatgcaaaccaaatggacgtgggtgactggcagaaaacgcctcccacaaatgggagggatttcggagggaaccgaaagaaagttgctgcaattgagtgaagtcaccttgatgcagaagtgttttctcttctcattcctgttaggaaaccaagttacagctgaagccagggccttctcctacccgactcccgcggcccattaaaacctacgtgagcttatctgataccttcaagccctgttttgtggccccatctcctcttcagatggcaatgtgcctagctacactacatttcctgcctcccttgcagctagaggtggccaatgagatataaacagatgctgtaagacatgatgtctagatccctagcagtcatcccagaccatgagataactttgagaaggaacaccatgtacaaaggactgtgcagaagagggttggcaggagcctggatctctgatgacttcacccttgactgcccacctcaccaggctgtacaagccactgttactggcagatgaatgcaagttctaaaacatacaactactgacctactgaattttccaaggagcacatttccactggagacatttggtgcctgcagaaaatacttactgaggaatttctatgggaccagcctgaagtagaagccactgaagagaggccctgaagcagcttttcttccttatcccagagaccaacatggttaccccagcccagagtcaccctccttcctctaagctgtcaaaaccctggctgcctttacaatgattctgacaatgaatcccaccctgctggtgatgtctattgctttactgttaaactttttaagggttaaaattcctttttatttttctttttaaattgattaataatagttgtaccaatttggatggtacctgtaatattttgatacctacatacaatgtgtgatgaacaaatcagagtaattgggctagccatcacctcacacatttatctagggctgaaatccctgaaggacaggattgtgtcttacaaattgtgtattctaatctgcatttacatttcagaaattctggactaagtaggcaaaccaacagaaactcttgctatgaagatctggaggtttcctggaggaagtggtgaatagggccttgggactgatgttaaaagccctggaacacaatagggagactcctgaactaggaagaagtcaaaagctctggtagcagcccccacaaattaagaaacctactcagagtaaaagaaacaggccatggtgggtggccggggagcaaggaatatttgtgagtaaccccagatggtggcaatcatttaatgccctccatccctctcagtgtatattaggttatgttttttttttagaaaatggaggaagggttttactatgttgcctaggccagtctcaaactcctaggctcaagcgattcacctgcattggcctcctaaattgctgggattacaggcatgagccactgtgcctggcccaagaagtctgagccagacgttgctgcataggtcagaactctgtgggctatgaatgtaagatattcacgagtcacatctattccattcattggcaaacacttacctgaaaccatacagcaaaagagattctggaaaatgtaccttccagccttagaagaaagtgatggtggtgcccagttgaccccaggcaagccggcccaggaatgcagacattttggactgctcatcttttactactttgtgtagcctttcacagaagaattacacaagaacttgactcttgattccaaggattctggaagaatgccaaccaaactgaagtctacaagcctaaccatgttatgaaaaggctggatgtgacatggtgaatcctccttagatgtgttaactagggttagggtaccagtgacatgcaaggggttggccatttgattaagtagaggaggcatgagtgaaagcagcacacctccaccctgctcaatggccatcatcacctagccaggctgtgagcctccatggagtgggtagctgagaacccacaacccacaatatatcttctttctggccctgttaacatggacctgtctctatgaggtgatggttgatatccagctaagtatggccctcttaatagtaatgtgggtggctttattcatattggcttcatgataaatggtatcactgagctgacttctctatgttttagataaaacaaaaataaaagacaaaaaaaaaaaaaagaaaaaaagcaaaatgacacaggcagtcttgctgccagacacatctgcaatcagaaagcttggaaaattagacttggaaatggcttgaaaaaacctttaaactttttctgaagagcaagtacaggtttgtctctggggtcagttctaattctttgaccagctaattttaagtggctgtatctcgaaaaaagtgacagtgacattttggtactccagctgaacttttagattagtcactgatacaactgcaacttttggcctatttgaaggattttaagggcaggataaataacaaaacccaacagtcttagcctgagtttcccagaaatcagagcctgagacaaaggcttgccttttaagattatctgagaatgtgatcttaggtagcaagagtacagggtaggggagtgatcagggaaggagggaaagctaatgcaacatggattattacgttgtctactactatggacaattgttcatgtggactatgctgtggactaccatatggactaccactatcactatggatacaagtcctgcttggaatttttggggagatttatggaaagtactagagaactgtttgtccaaaggaccaaagatggaaacatttatccattggctccaggtccccattggtcaaggatgacttggttgcatttctaagtaatgtatgctgagcacagagcagattcaagtggttgccctgagctgcagatacctctgggcaggaaatgagagatactcagtgcagacctagagtgagacccgtgatctgattgcaccagcatagagatggtcaaaacctaggtggaagcagtttcttcagttgtaactggagatagaggtgggattgagaggattttaaaaaggggcccaggagttatctaaagcaccaaacagtaagtatacattaactatgttctgggtgttgggcacaagcatgggaggtagagcagtgacatgataaagcctttactcttccccaaatatctatactttctctaatataaaaaatcttaagtatatgaaaaatatcacatttattataaaatgtaaactgcaatgacatctgagagagttatatgttgaaatttaaattcacattgagatataaatgttagatacaggtattttaccccaagtaaggctttactaggggaaggaggaagtgcacaagaattctgggagtctgatgtagttgtgaatcaaaatttccaatccttatatatatttttattatcagccttgctttgcctagtgcctataatcgtgtgagaacttgccctgtagccccccatgagtggcccttttccctagtcatccttctttggctttagccatgaggagcctgatgtgaggagagaactcagcaaatatttaagtaaatatttatggaatgacatgaatgaatacaaagttataaatagaacattatcttattctactcctggactagatgtacgaccaaacaaactagaatagattttgcatagattaaatttcacctttctgacctccccaagcaagtgcttctctgtttttttccagaccaccatgtatattcagtagctgtagcccttattttctgttttagttattcaaagcttgctggaatatgagctcctgaagggcaggggccatttcttattaatctttctgttgtcagtactgagcaaagtctacggtgcctagaaatgtttaattaatgagaatctgaatcaagactataaccatacaacctcaataatgcaattaaaatgaagaatctgtggaataaaatgactgaaaagcataccttgggaatacatatcccagctgagagactataggcaagtcactgaatttctgtgtctcagtttctccaagtgaaaaatgagagaccaatcagggttagaggatatgtgatgtgcatactgtcactctgttttctgtgtcttggttgacatttctaataaatcatgacttttcttcacactgatttcagatataagcttagtagtctcaattcacttcagtcagcttctttgaaattcatcagaaatatttttaaaagcataaatcaaatgatatctttcccctgcttaaaaccctctaagaacttctaattccatcctgatggcaaactagggtcatctaaaaaatctccagctatatgtccttagaaatgctacccaaactatagcaacaagtcaaaatgcatggtggatcctttagtaaagaaaggaaaatcaccaggtgccagaaaaaggaatgaaactgaaaaacatagggaaaagcatatgagcttatgctgtggctaccctggaagaagtgtggaatgagtggtttggtgtattattacaccgggtaattaaggttttggtcaaattagaggataagagatgcagtcttcagtttaaatgaatcagggagttggaactgaaaactctacatgagctaggatgcttgaagggctgacctatagagagggtgctagagaaaaaaattacaactgttaacatgaagaaaaaaggaagtgtttctttgctttggctctgggcaaataatgataataataattattcttgaaaaatttacaactttattctgtgctttatggaaaattagaattcaaatatgttctttcccagttctccatgaaaccaaaactgcagaattaatatacaaattgttcttaagtgaatgttactccttggattcctggcaaaaaaaacacacaattcttgtggaggaacatttccattactcccatgccacaggagctccacagattaagcacaactgaagatgaaaccacaacccaaaattacaaaactcacaaaaaacaaaacaacattagagagccaacagacacaacaatattagataattaatatttctaagtacctgggacatagtaagttttatataacgtttgactgataaataaatattaaaaaatgaacataccaggaatgtaggttaatggagaaattcgtaataaactttaaagtaggaggaattaaaatgattaaagatataaaagcaggaataatttacataaaaaagacactatgataagataataggcaggcttgaagatccatatagaacttctagaaaaaaatgttatttgaaataaaaagctcaataaagagtggtttgaatagagctgagaaaattgagtgcatcacagagaggttaagatatagtaatatgaaaaaggttaagagatgtgaacaatagaattaggaagtgtaatgggaatttcagaagaagagaatagataatgagaaagaggcaatattcaggaataatggtccagtttttcagaattaatcaaagacagaattgaagaagtacatacagtcatgagtaggaaaactataataaatacacattgtaatgaaattatagaacttaagaacaaaaaatagtttggtaaattccctcttttaaaagatagagacctactgaatggataaaaacagaaggacctcattatatgctgcctacaagaagctcgtctcacctgtaaagacacatgtagataaaagtgaaagtatagaaaaagatattttatacaagcagaatccaaaagtgaggaggagtagctatacttataatatcagacaaaacatgttctgtaaaacttcatgttctgtatcagacttcatgttctgtaaaaaaatgaatgacattataaaataataaagagatcaatttagcaagagaatataacaattagaaaatatatgtacccaatactggagcactcaggtaaataaagcaaatatcattagatctaaagggagagataggccataatacatgtaatagttggggatgtcaatatgcctctatcagcattggacagagcatctagactgaaaatcaacaaagaaacatcagatttaaactgcaccatagaccaaatggacataacagacattatagaacgtttcacacaacagctgtagaatatatatgtttttcatcagcatattgaacattctccaagattgaccatatgttaaggcataaaacaagtctcaaaaaattttaaaaattaaaatcatatcaagtattttatctaactacaatggaatgaaacaagaccagtaataagaggaacataacaaaactacacaaataaatggaaattaaacagcatactctgggatgaccaatgtgagaaggaaaaaattaagaataaaattcaaaaatttattgaaccaaatgaaaataaaaacacaacatagcaaaacctatgagacacagcaaaaatagtattaagaggaaagtttatagcaataatgcctacatcaaaaagattttaaataaacaacataatgatgcacctcaaagatccagaaaagcaagaacaaaccaaacccgaaattagaaggagaaaagaaataataatgatcagagcagggctggattgtgtggctcacacctgtaatctcagcactttgggaggaaaaggcaggaggattgcttgagcccaagaatttgagacctgcctgggtaacataataagactccgtatctacagaaaaaataatgaaaacaattagtcagggatggtgcaacacacctgtagtgccagctactagggagacttaggtgggaggatttcttgagcccaggaggtcaaggctgtagtgagctatgatcacaccactgcactccagcataggtgaccgagtgagaccctgtctcaaaaaaaaaaaaaaaaaaaaaaaaaattagaacagatataaacaaaattgagacaaaaattgaaaattgagaaaagatcaataaaacaaaaagctgtttttctgaaaaaagaaacaaaattaacaaactattagctagattaagaaaaaaagaggccgggcgcagtggttcacgccagtaatcccagcaatttgggaggccaaggtgggcggatcacgaggtcaggagatcgagatcatcctggctaatgtggtgaaaccccgtctctactaaaaaatacaaaaaactagccaggtgtcgtggcaggtgcctgtagtcccagctactcaggaggctgaggtaggagaatggcatgaacgtgggaggtggagtttgcagtgagccgagatcacaccactgcacttcagcctgggccacaggtgagactctgtctcaaaaaaaaaaaaaaaaaaaagaaaagaaaagaaaaaaagagagaagacacaaataaataaaatcagaaataaaaagatgttacaatgaaaaccacagaaatacaaaggatcattagaaactactatgaacaactgtacaccaatacattaaaacacctagaggaaatggatatgtttttagatgcatgcaacctaccaagattgaaccaaaaaggaacagaaaactggaatagactgataacaagtgtcaatactgaattagtaacaaaaagccttccaacaaagaaaagtctaagaccagatggcttctctgctgaaaaccgctaaatacttaaagaagacttaatatcaactattctcaaattattctggaaaatttaaagcagagacaattcttcctaattcatcctatgagaccaacataaccttgataccaaaaaccagaccaggacacaacaacagcaacatcaacaaaactacaagccaatatccctgatgaacagaaatgcaaaaattctcaacaaagaattagcaaactgaatcaaacaacacatcaaaaaaaaaaaaaaaaacacacaagaatcaagtggaatttatccaggaatacaaggatggctcagtgtacagaaatcaaaaaccatcatacatcacatgaatagaatgaagaataaaatccatgtgattatctcaatagccacagaaaaattttttgataaaactcaatatcccttcatgataaaaactcttaataagttaggtatagaaggaaaatacctcaacataataaaggccatatatgacaacccaaagctaacattttactgaatgagaacaagacaaggaggccaactct

SEQ ID NO: 281 - DNA, 1755 bp, Homo Sapiens
cttaattcctaccgattactattaccttagtcaactcctgcaaaataggctcatacccaaattatgtaaaaacatctatcgcatatgccttcatcgttagcctcatcccaacaacgtttatatgcacagaccaagaagccattatctcaaactgacattgaatgatgatccagactctcaaactcttactaagcttcaaactagactacttctccacaaaatttatcccagtagtgctattcattacctgatctattgtagaattctcaatatgatatataaattcagaccctaacattaatcagtttttcaagtgcttattttcttcatcacgatattaattctggttactgccaacaacctctttcagctctttatcggatgggaaggtgtaggaatcatgtctttcttactaatcagctgatggtatggcagagcagatgctaatacagcaggcctctaaacagtcctgtacaactgcatcagtgatattggctttattttagctatagcattgttcctgtcctccaacacatgagaattttaacaaacatttattctagaccagatccccatctccttccattaattagccttctcttagcagcagcagaaaagtcagctcaatttggcctccatctctgacttccatctgcaataggaggcccagccccagtctcagccctactccactccagcactacagttgcagcaggagttttcttgcttatccgcttctaccctttaatagaaaataacctatcaatccaaacctttatattatgtctgggggctattactaccttattcacagttatctgtgctctaacacaaaatgatatccaaaaaatcatagcattcttcacctcaagccagctaggccttataatagtcacaattggcattaatcagtcacacctagcattccttcacatctgcacccatgcctttgttaaagctatattatttatatgttcagggttcatcatccatagcctcaatgatgaacaagacatctgaaaaataggagggctattcaagactttgcccctcacttcctcatcctttattattggcagtcttgcacttacaggcatgcctttccttacaagcttttactctaaggcctcatcattgaaactgcaaacacgttcatacaccaacgcctgagccctttctattactcttattgccacttccttgacagctgtccgtgatacccatattattttcttcgctcttataggacaaccttgcttcatgactctggctgctattaatgaaaataaccccttcctaattaactcaattaagcgcctaacagttggcagcatattcgccggattcctcatcaccaaccgtattattcctgcttcatccccaaaaacaaccataccactccacctgaagctcacagccctaggtgtgaccatcttaggcttctcactagcaatggagcttaatcttgaaactaataaccttaaaccaaaatacccattacagacattcaacttctccaacatactaggattttattcatccacaattcaccatacaaacccccactcaggcctatacacaagccaaaatctggcttcacttctactagacctaatatgactagaaaagtctataccaaagaccattacacaacccaaatttcagcctccattaccatatctactcagaacggcctaattaaactctactttctttttttatcccatcccttctaactctgctcctaattatcta

SEQ ID NO: 282 - DNA, 2795 bp, Homo Sapiens
cagtcatggtctggagtcaagaaatgaagagggcaagcaatgtttttggcatcctgactacagttacatgcagtttggggctgctgcaatggcaactcaacggagaggttaggaacaccaactccaggatcaggcaatctttgaatccctgtcactagcagctttgtatattggagcaagttacttaacatctgtctgctggagtttgctggaggttcactccagaccctatttgcctgggtatcaccagtggaggctgcagaacagcaaagattgctgcctattccttcctctggaagcttcttcctagagagtcacctgccagatgccagccagagctccccgaaatgaggtattcagtgacatctttctaaattgtttaaaatgagaagcattgcacactgagagtcaggatccaagtgtctttgactgagccaactcagctctgctattaacttatggtgtgatcgcaggctgtctagaaaaggacaccaacaatcacccatgaagattgcccttcaacctttgggaggaaatgatcgaaatgggagctagagaagattgttgttggaatctcagttcttcagagagctactatcaacagattgagttgacaggaaaaagtcataatccaggccaaagtgagcaaactcccaagagcattcctggtcagcaccgcagcaaatccgtggcaagtgcagagattataagcaatttctccatggctggaattcagttgatctgggactgaacctatttctaatggggtcttgatatattgcccaggctggagtgcaggggctattcacaggcacaatcatagctcactacagtctcaaactcctaatctcaagcagtagctgggactgtaagtatgcaccaacactcccggtttgggtatctccattgattggcaaccagcaccacagtagatgctgatgaaaagaaagttatgaatgtcatgtaaaatgacagtagtattagcaaatgtgcttttaattataagaaaattacaatatgtaaaaaaatttcaattttcccatattatctcttaataataactgccatttgttgagcccattgggtatgttacatatattaacacaacaggatggacattatctatcttatatatattatgtgtatatatacggaaaacaggacacaaattgtctgaggccatggacaattagcttgcagtaaagtaggattctaaattaggtttctctagctccaagacccatgccattttgtttggtcatttgcttctgatgaatcaaatattaattcagccaaagacagctattcaaagctggttgaataacttactatgtgtaattcacttgtgtcctgcctttcttccgaacttttgtacaaaaccttgattattttaataaggcattctatacataaagtttcaaataaaccataagtacctcaagaaaatgtcatataatttagaattgaatcatagcatatttttaatctggaagcaacatatctaaataagccatttttatattataaatacaaacaggtacaaagaagtatagttcactttacaagctgttgtacatgcataataccatattatgctaccaaagaaactattaagttatacatattttttacagctttaactatttttgttgtcaatttcctctaataagattttttctggataaacaaaaatttatctactcaaatgattgtttttcttcaacatcataatgttgcaggcctattgatgtatatttttgtgtactaaatagtttgtggagctcttcttgaagaattatcttcagagctgattaaccagacacaccctccagacatcatagtcacagctgctttgagacagcaacaacctcatccccgcaaatagtatggattcctgtcttattcaataggtctgaattttaaatactcttagcttatttcaagaactaaatctatcctccacaaataaaaatgtgctgccgctcagaatatttaggagaatatgtgatagccaagatacttttggcttatttcaaaaattcatctatctccacaaaggaaaatgtttcaccattcagaatattcaagagaattttcttagaaaagaaatccaagattgtattcattggaataacagacctttcttcaaggtgacttctttcaaaagaacaatatttaggggtatatagaacatcatttttaaaataatttattttgctatatttaccacatttcatgacaccctaaaagattttggctaatgaaatttatacagttcaaatgtgtattcctgaagagacaagactgagggaaaaaaaattatctcaaagtcattctcaaattagacatgaaatgaattattaatttctacatattttaccatcatgcttgtagttttaataaacaaaaatcaaatgcatataggcttcacacactttgtgtaattgcttgtttaacatccccaaattccataaatgcaaaaactagatctgtctggctttccattaagtccccagcacctagcaaggtgcttaacaaatagcagatggatgttggaaggaataaaggaacaaagaaaagaatagaagaagttagtgacttgattctatacagagtggaccttgacacatactgcaagtgaatgttaaactaaaagtataatttctttatcagtgaatatatttccatgaattttaagtattttgctgatgatttattaaatatgtatttcactactttcttttcttttaatcagtcctattccatccccttcaaataataaaaaagtttcaatg

SEQ ID NO: 283 - DNA, 3002 bp, Homo Sapiens
attccagaattttttaaagttcacaacacgagagtggacgaaatgtcggagcttttgctcatatccagaaatgtggcctctgcctcccactcgggccctgcggtgcagacgggttcagggcggcgaggactgagccaggagcgccgagagttccagctgctcccaggctgggttctaattaacgctggacccctgctgagatggagtctcactctgtcgcccaggctggaatgcagtggtgcaatctcggctcactgcgatctctgcgtcctgggttcaagcaattctcctgcctcagcctcccaagtagctgtgactacagagaaacgtgaacaggccaaacaaagcctcacctggctatcccgccaccctggggttgggcctccaaaggcccgggaggtcacctaagacacggtgttctgaacatgcaagcccgacagcatcttctctaccattctgccagagtccagagacctgggaataggtcataccccccactgcattttacaagcttggcatacattaggttctcaataaatactgaattaatgaaaaaattgctgaagtaactgaaaacatccatccaaaccccacaccatctggtagataagtagtctgtggggagtcccatatttttcttaccttagatatttatttggaaatggactgtaggcccaatatggtcaatgaaacttgcagaggaacatttcatgcctttaattagttcttcataactgcagggacctctagagttcctgaaattgaactgggttgtaatactgtcaagaaaaaggaggacctatcttaaatctatttcaagggtaatactattttactatgtaaattttcccctggtcagggacagcctgatcatgcatggtagactcgaagcatgcaaatatttcaacatgcaaaaccgccctaaaaatataaccgaagcttatggagttgtccagggtacagtggtttactggcccctgaatgcgggactccatcaaactgggttccaggctgggaggtctctgaacccaatttctagacagcctgctttggagttcaactgatgggaccttagacaccagccttaccctctgcaagtcttgtgatttggagccagatacttggcctctctgtgctccagggagacaccactgcacctacctgagaggactgaaggagaggatctgtgcaactcactcaggatactggatcttaagccaatgggtggacttacattcgtcacctctgattctgtctcctcctgcgcggtgacttagcaaacacttcttcctctccagctctgcttcttactctccagctctgctgccctgttccagtgctgacgccagacaacagataatttcccaaatgcttgtattagcccttaggagttcatgtgttcctcccccagccaataaagctgttaaatcccaataactgtcaggaatggagccaattgctataaagtacttccagcttcttggcatgaagaaataattagttccagttgccactgtggcatgaaaaaaaaaaaacctcctgcagctagctcggtgtctacccaaacagctgcctagttttgtgcttgaaacctagggccttggtggcagaggcactggagggaatctcctggtctgtcgattgtgaagaccatgagaaaagcatagtttctgggtggagtgcaccgttcctcatggtaccacttttgccttttgtcctaagtggttgtggacatctccaggggctgataccaaggactaggaacagctgagggaggcagaaaggttcagagtacatctctatttacagggaacagaacaccgccttgagagggccatctgtgctccagatgtgagagttcatgtgaatagaatggctgcaattcaaagaatcttcacaggaaaacagggctcagagctcatccacaatggacagacagggagggaaacaggtggaggttagttcaccacttcctcataagaaggtaataaatagtttggtgaaataaaatggtagcactgagtaattgcgggcttctggataggcagtcaggttgatttcatgttgctactgctggacttgagggctggcttggctgtggtggcagacacagcagcagctcaggatgatggtgatggtccatgccagccagaaccaccaatgttcatagtagtagttacaacactgagactgcccatagcagtgtcctgttgtgtcacagatgtagctttgattgttggtacacacacaggcttccttatcctttgggggttcagccctggctgacacagggctgggcagtgcctagaggtgcaagagctccatgccacccaggagtcttccctccatactcctcctgctcctccgacccagcgtgggcacctccctccacccttgctgcacttctcctctaccctcttcttccttcttttgttcttttcctgtaatatgttttgaagtcagattgtgaggccttcagctttgttcttattgctcaagagtcctttagttattcaggatcctttgtggttccatataaattttcaaattgttttttctatttctgtgaagaatgacattgaaattttgataaatattgcattaaacctataaatcgctttgggcagtaaggacattttaagaatattaattcttcctacccatgaacataaactatctttccatgtatttgtgtcatctacaatttttcatcaatgttttatagtgttcagaatacagatctttcacctccttggttaaatgtactcctaagtacaatcctaaatgtgctcctaaacaaaaaaaatacgttttttttgatgctactgtgaatgagattgatttctttatttttgtcatatagtttgttgtgagtgtaaagaaactactgagttttgtacattgattttgaattctgaaattttattgaattcatttatcatttctaatagctttttggtggagtttttagggtttcctatatataatatgtcatcaaacag

SEQ ID NO: 284 - DNA, 3293 bp, Homo Sapiens
gagtgtgagagcgagaacagccccgcaggtcccgaggcgctggctggggacaatgccgcggaaagttcccagtccccagccgcagatctgcagaattgaaatgaaatgttttgagctcttcaagctgactcgtcagaatcctggagccttttaaaaaatgacgaagtgcccaatgtggaaatcatagatttcaaggaaggaacaagaaaattgatgaaacaagttcaaaagaaagaagcttggccaatttgatgtcaatggaaatgcgtgagatttttattcagcattcacacctgagcaatgcttttggtcatgatgtcatactaagaagaaaccacctgagatgagactgttagatgttcagagcaaacaaaaacaaaaacagaccaacaaaaaaaacccaaaacaaaacagaagtttctgaaggacagcagaaatggctttgcaggaccacaacaaccactcccagtcatgatggagagaagtgttcaatacccacagatcctgaacgttgagctgattatactaactagatgggacttagttttgtctaccgtggggtgagcgtatactacctgagggaacaggttctctatggtgaagatggcaacttgctgactcagtctcagaatgcgttaaatccacatattctggcaagtggagttctgcttctccaatatctcttccagactaagtctcgaaaggacagtaattgatccaccctgagtcatatgcccatgtccaaagcaatgagtttgggaaatttcatgacacactcctaattttgtggtaggagacacatcagaaccacacaatgagtcagtcctatttatgaaatagaggttcatctatcagatgaaagggaaaaaagttgtaaaaacaaaacagatgttcactaatggggatctatctgaatttcacctgtaactacaaatgctcacaagtagatttacagttttcctagagtgtcatgaatttaaaaacatatgcatggaatcataaagtaatatcctaatcacctctcacaacctttctctccttaacataaaatgagaatattttagcagcaggagaaggattttcatttatagacctttatcagacactaatgtaggattgagtttgacctgatacagtgttctatctctgagtgttgtcactcagttttatcataaataaaatttattttatatgatatcatatagagaacaaatttacttatttttctcatgtaatcatgtaatcaattgttccaacataatccattgaatagatattgtggcatttccctaattatttataaaggcactgttactagatatgaatatttatatatgaggatatgaatcgtggctctctgatttgttcattatttgcttgtctattcctgtgccagtatcatacaattggtactaatatagtgttctgatattgacaggatgaagtgctccttctaatgatgtagctttaaatttgtcttggttgtgcatttctttttattcttccatagagatttgtggttcagttgtcagctttgaaaatcacttttgggatttgaatttgaattgcatgaaatttgtagactaacttgtagaaaatagacatttttatgatatgaatttacacatccttgtaaccatgggtgtgttatttattttcacttttgaatattattgtgggtatttagtaataaaaataacaatcgacgagttacatggtggttactatgtgacagatgttgtcaaagttccatccatatatcaacttattatatattcttatgggaagagaccgttattatctccattacacaagtaagaaaatcgaggtacaaagagcttaagtaacatgtgctaagtcatataagagtaaagctttatttgaatccatgcagtttgtctccagagcttgaaatccattttattttattttatttttgctttttaaaaaaaatttttttgagacggaatctcgctttgttgcccaggctggagtgcagtggcacaatcgcggctcattgcaacctccacctcctgggttcaagcaattctcctgcctcagcctcccgagtagctgggactacaggtgggcaccaccacgcccagctaattttttgtatttttagtagagaatggggtttcaccatgttagccaggatggtctcgatctcatgacctcatgttccacctgcctcggtctcccaaagtgctgggattacaggcgtgagccactgcatccagcctgaaatatttaccagtatctgatattgcctcactaagaactttgcccaactccttagtgattctaccattggcttagtattttggattttctagtagacaataatatcgtgtgcataaagcaaatacaattattattacaataaaatttttaaactactcatttgtacttgctttcataaagccttagctaattccaacaaaatattgattactgtgggagagagtggtaaatcttattttgtacctaatattaaataaaatgctactaaatataagtgagatgcttgctataagttttagtagttaaacactataaagttatttcttgtctattttcaagaattttttattattttaaatgcatgtgcaatttttttaaaaagtattgttttgcatctaatgttaaataaaatgcttctaagtattagtactaaatatcagtgagaggcttgttgtaagttttagtagttaaacactataaagttatttattttctattttcaagagtttatattattataaatgcatgtacaattaaaaaagtcttatttgctcttcttttctaatgttaaaacatttgtgctttcctgagatgaatgctgtgctctcatgaaagattgcagagtcaaaaagtagcctctggagttaagactttctggttttagagcctcctatggccacttactaattatgggtcttaggagagttactgaaccttcataatgggtaccaatcctagatcctgtcaaaagggatccttctcttggcgatgactttggaagatcctttgcatgacaataaaaaaaaaagtattattagatctaatttattagataacacttgggtgtctctaagtgttatggtggtaaacgttcaacaggctctcaaaaatgcatatatgtatatgtttatatagatacatatacactcaaatgtgtatatatgtatatatacacactaatatgtttatcataaattttattgatataaaggttgtgtaacacaagttacaaataataataaaatattcaatattatttattgtaaatt

SEQ ID NO: 285 - DNA, 2493 bp, Homo Sapiens
agaagagaaactcatgtcagccccagccctggggctacctgacctgatgaagccatttacactgtatgtggcagagtgaaaagatggaagttgggagttttaatccagacggtggggccctggccaagaccagtagcctacctctccaaacagctagatggagtttctaaaggttggcccccatgtttgaggaccttggcagcaactgccctgctagcacaagaagcagataaactaactcttgggcaaaacctgaacataagcaccccccatgctgtggtgactttaatgcataccaaaggacatcattggctaacaaatggtagactaactaagtaccaaagcttgctccgtgaaaatccctgcataaccattgaagtttgcaacaccttgaactccaccaccttactcccagtgtcagagagcccagtcgaacgtaactatgtagaggtgttggacacagtttattctagcaggcctgacctccaagaccatccttggacatcagtagactgggagctgtacatggacaggagcagcttcgtcaacccacaaggagagaggtgtgcaggatatgcagtggtaaccctggatgctgtcactgaagccaaatcattgccccaggatacttcagcccaaaaggtcaaactcattgctttaatttgggccttagagctaagtgaaggtaagactgtaaatatttatactgactctcggtatgccttcttaaccctccaagtgcatggggcattatataaagaaaaaggcccattgaaatctgggggaaaagacataaagtaccagcaagagatcctgcagttagtagaggcagtatggaagccccaaaaggtggcagtcatgcattgcagaggacaccagcgagcttccacctcgattgccttggggaactcccaagctgactcagaggcttgaaaagtagcatccacccccttctgggcatcaatcacagcccccctattccctcaggcacctgaccttgtacctacttattctaaagaagagaaggactttctctaggcagagggaggacaggtgatagaagagggatggatctggttatcggacaggagaatagccataccacaactgctaggagccgcagtcatattggctatgcatgagaccacgcacataggccaagagccacttgaaaagttgttgggccagttcttctacatctcacatctgtaagcctttgccaaaacagtggtgcagcagtgtgtcacctgctagcagcacaatgctaggcaaggtccaactgtcccgcccagcatacaagcttatggagcagccccctttgaagatctccaagtagacttcaccaagatgtccaaatgtggaggtaacaggtatttgctagttctagtgtgtacatactctaggtgggtggaggcctatccaacacgaactgggaaagcttgtgaagtaacctgtgtgcttctccgagatctcaaccctacgtttggactgcccttacgaatcagctcagacaatgggctggtgtttgtagctagttggtacagaagacagcaaaggtgatcgggtatggatcacggattggaacatagcctccttgcagccacggtggagaggaccccagaccatcgtcttgaccactcccacagccataaaggtagaaggaatcccagcctggattcaccacagccatgtaaaacctaaagcatctgagacctgggaggtgagaccaagcttggacaacccatgcaagatgactttgaagaagatgacaagccctgctccagtcacacctggaagctgactggtccgtgcatggctgaagcatgaggaaactcatcgtgggactcattttcctaaaattttggacttgtacagtaaggacttcaactgaccttcctcagactgaggtagggcaaaaagttaaaacagactttctgtttaaaagggacttgtgtgtataatgctacccagtacaagatatgcagcccaagaagtgaccagcttgatgtgtgctataacccattggaactagtttatccctgttggaaaacagagtatgtaactctaggaattgatggaactggactggaagacctgggtagtgaagatgacagtgagaactcccactagtgagtgagattctcaaaggggggaatgagaagtgaggccatttctcttactgtctcctgtctctgaagaggaggaggaagtaaaagttgaaaaacaacaggaatgaagtcattggcaagaccagccggtgccactgatgaccaggcctgaggttaaaagatcaaccccccactctaaccacatgtgctctcaatctatcatgaccctttcatgtggacccccttagagttgtaagcccttaaaagggccaggaactctgtcttcagggagctcggttcttgagacatgagtctgccaaagctcccagctgttgagatgcgagtctgccaaagctcctggccgaataaagccaaatccttcctt

SEQ ID NO: 286 - DNA, 6662 bp, Homo Sapiens
ccagttaggtttaccctttgactctccacttctgtgaatagtccctccatttccagttattttaaagtcagaatatgaaggccgcttagtccatcggggttaagccttcccatcaaatcaaattcttcttccttgcattcttctcttcaagccatttagtgaaacaagcacaaattgttaacttcagattaatatgtttaataagtgaaatctggactatttcaggaaggcaggcaggccagcatgactcttagcatcccactaactcgctgtcgggctcccaggcagcggctcgggcaggcggccttgtggctccgcaacccaacctcttcccctccgggcgcctcccggctccggggtcctgctgcctctgggacctcctcacccccagacgttcttcctctgcttctagagccaccagttcccctcccatgataactcattaaactattaacccattagtccattcatccatgaatgaattaatccattcatgagagcagagccctcagctgttcactatgcacacttgcttgaaaaggtgatcggaaacaaaagacagtgcctccacttgtgaggtgcgtagagatgtgagagacccatggagaattgtcttccaactgtagataattctcatatattcccatgttaacattttagtagctaatcagaattgccaatcaaatccttgacattcttctgatcaatagagtaggtcatcaaaactggaatcccgtgaggtttaaagtaattgttttgtttgtaaaatacatcctgcaaatatttttatttttctgaattgatccttaaaaaaaaaagttattcttgactggtctgaagcatctattgtccattttaagctttacatctggacaactagtttccgagacttcatgtatttaagtgtatttaagggcaatgctttttattttctctgcattagccatccactggctatttatttaacaacaatcccattgcactgaatacattgtccttcatgatgtagcctcagccttcttcaaactcattcacccatgtatgctctgccccagcctaattactggaagctccccaaacatgaccggttcttccatcctccatgccttatgtacactgtttcctctgttggaaagcctgactcgtcaagcaaactcctacttgtccttcaaaactagacttgtgctttacctcccctccttccctatgtcccctaagtggaattattgacctcttcgttcgtgacatttgttcatttctataatagtgtatattatattgcattgtaattatttgtttacataatgatctccccacagttagcgtgtgggcagaaactatgtctctatattcccagtgtgaaacatagtagatgttcaacaaacctttttctttgaatgaaggagtacattagtcagacttcctagttaggagttactgaaacagactcaaatggtctcaggaaaaagtaaaggatttgctaagtagctactgcagacagatcaaaaggctggaaggctatgtttggaaaatgggcaggatgtaaggaaactaaggaggccaatcagcagaaataaacagattttcactatcatcttatatttgtgcatcattcccatgagatcctcaggctggggagggtgttttattgactgagcctgtgtcactcatggacaaactgggataaggttgacctacccccttaagcttgcaaggctgagggatgggggaagacgctacttcccaccaagcttacacacaatgggggaaaagcaattatctgaaaggaaactggaatgtcatcagtaggggaaagaaatgtgtctaactccaaaaaatgaccaatatgtactactaataactgaaactttccaaaaaaaagagactatgatttaaaaatcaatttaacattgaatggtttgattatcagcaaaatcaccatgacatttagcacctttcttttccttgatgaactaagaactcttgcatagatttaataatgtgttatgtaccccctgggtgtctgatttactgacttgagctgaatgattggactcaatacaaataaaaagagcttgcaaacttcgcccatggtttcccagacatcaaggaactaagctcttttgctccctggagaggctaaaaattctaaaatgaagtgccctctgctctggtttctgcttttcagcatttctcttctgttttcacatacttttgctgctttaaaattaaatctaagaaactcattccatatttttcatcatctgcttttgaaagtgaatgttatggatttatggtttgggattctttgatgttagagcagcaactatgcttgcttcacttgtttttgtttcatttttttttttacatttatgaggctttgataatttgatttattaaaatgccacagtcaatgtaggggaactgacaccattcgcattgttggaaagcgtcatgaaacatcaggcgctagttccccatggagcgcttacctctattattatatctccccctcccctttggtcttcaggaaagtttggcattaaacttaagctgcacgcaaagaatattcattcctagaacatttcagtatttttggattggattccatcccccaattttgattttgtatctgccaagatgtacagagtggtacatctaaagctagttatgatacacaagctagctttccttatcaaggaacagaaatattccttcctcttaccctgtaatcattgcatatctggtatattaaaaattgaatttcatatcgtatccctttaaatgtattaacaagtgcaggttggaactttacattatgaatccctaaggatgagtaatgactaaaggacaagactgaccctttctgcaagtggagggtgtttttttcttttccatttctataggaagagacagatgaagagagagggagagaaaacaggacaagtttacccagaatgaaaacctggataagaagattaccataagagcttaaaaccatagaaaaaaatgtcagggttggaaaagtccctagactcttcattcattataattccctctaccagtccactgggtttcaggaaaacaggaacactcatatgctactgtttaagtgagtgagtgagtgtgtgtgtgtgtgtgtgtgtttgtgtgttacaggatattataagaatagaatagggaatcttccaggtatctgaggaatagaaaaaagccaggtcacatgggaaccaggactggaaagtcagaaaccaacaggattctatctctttccatttgtcagggactacacagtctctttcttctcctcaaaattgaccattcagctcacagtggaatatagccttattacagtagtcaatccttatccaaggcttaatttttttgtggttttagttacccacgattaaccatggtctgaaaatattacatacaataagatattttgagagagagagagagagactatatttatacaactttcattacaatatattgttaagtgttctattttattattattattgttaatctcttactgtgactaatttataaattaaacttcatcataggtatgtatgtacaggagaaaacatagtaaatgtaggattcaatactaccggaggtttcgggcatccattgaatgtcatgaaacatttataagaggggactagtgtatattttttcattcaacaagaaaataggcaattagaaaagtcagaaaatacaaaaaatcatggtttaaacatgaagcaaactaatctatgggattattttgaactgatgaagtgtcaagagagagaatccgtttaactgtggtactcggaatattcttagcgtgatgcaagtttgataacaagaattacaacaccttcctaatggattcattcacgtgacctaataataataacaataatgaacacttattgacattttactatgtgtcaggtactgtgctaatgctttatagattatttaatcttcaaacaattatttgagggtaggtattattatctcatttttttcagatgaaaaattgaggcatagagagattgagtaactctaccaagtcacacggctcttcagtggcagagctattctaagccgcatgatttacttctatgatatattgcttctggctaagctatgttatccaatcagcaataaattatttacacaatcattattataaacgcttttttgattttttaaagaattattctataaataaagcatgtgacttgattataataacaagagaatataaacattatcaaccttgatcacataaaaatagtaatataaagttaggggaaagagaggggaacaaaaggaaaagaacactgacttcctcatatttctcagtaaaagatattatttaacattactacatcaaaaagctgtgtttttaaagttataaacatagccaatagaactaaaaataaaaacaggttaacaaaagttggaagggtggttaatatatgtgagtcaaattcgtaattttttaaagcactattcaagaaatccttgaagttgataagcaaagaaacagtataaacatgttatttgaattatgtagatgactaccaggaaaaaaaaactataagcaagtgaaaaccagttacctacaaaaagtgagcctggggtgctgattatggagtgagatttttactctttattttatttctttccatttaagtgattatttccatgtgcacacattactttttataataagaaccatgcccatattattcacttcggtaaatctacatctaggtttccatcccagagaaatgcacatcatatacatgtaagtggcaccaagtgggatgaggggcttcttccaaaggctggaaccacagccccccagggggctctgggtaaacattcctagccccagtggtcttgggttcttttgtacctatctgaatgctattacacgcccacccatcccaaggttcagcccagagatgggagaaaacaaggacacttctgaacttttcactcactcttctcttttacatagtcccaggtgggagttccacttcctcttccggtctgtgtcttaccattctaatcccagggcacaaaaagcctcaaggtttcgccttaagggtggatggggtacatgaaggaaaagtagcttacagaaatgggtacacaattttgggaggtatttgaaaggtattgtctcctgtacatatatagatgcatggaaaatggtctgcaaggatacaggccacttcaaaagcagttggcacctctagggagagcagtgggggaggggaggatgcattcatgtaggacacaggtaattgtgggtttttttggtgctatggacatttatttagtgcttttgtatgttttacccattttaatcatcacaatagccaagtgaggttagtttttatctccacttacaaaaaaattaatagactattctttgaaaagttttaggtttacagaaaaatcgtatgggaagtatagagagttcctatatacttatcctcacgccctcctccccaatttcgcctattattaatatcttgcattagtgtcatacatttgttatattgatgagccaatatgaatacattatcatgaaccaaagttcatggcttacaccaggtttcactcttggtgtacatcctatgggttttgacaaatgcacaatgtcatgcgtccaccatgacagtatcatacagaatagtttcaccaccctaagactccctgcgctccacctgttcatctctccccctaattgatttttttaaaatccctgattatcctgcttgccctgcatgcatttccctcttacccacgaagtgaaacctggtccactgcacctgttccttcagttactgactgctgcctgtgataatagtagcatgagtggtcttcaagcacctcatatcctgccactaccgccacttgtcaggggaaaacccagacaggatgagatccacattcccagctgtccctgtcttccaaggaagagaaaccctaaaccagaagctaaagagtgaaaccagatatcccagggaaggggtgggggacgttaggtccccagtggtctgcgaaagaggtgccaagccagaagccccaaagtgctgggaaagccagcacagagaagcagataatgccaggaaacatctcaggcatggtggaggggcttggggggtactcaaatgacaggactgaagatttgtgaggatttgtgaggcactcaaaaattgcagagcgattatgaacactagggagctctcctgcttcctggaaaaaatcaaagcctgactcccaaggttggcattgggggcatctcttgtggagacagctcagagtgaggttgggagatacttttctaggaagtgtttttcaaatattttttaccgtgacctacggtaagaacatatttcaggttgagcacggtggctcacatacgtaatcccagcactttggaaggctgaggcgggagaatcacttgatcccaggaggttgaggctgcagtaaaccatgttcacaccactgcactccagcctgggagacaaagagagaccccgtctcaaaataataataataataatatatttcatattggcatctagtgcacacatgtggtgcacacacaaatacccacacactttcagcattagctggga

SEQ ID NO: 287 - DNA, 2666 bp, Homo Sapiens
aaaccctcgataagatacaactgcacacccactagattggctaaaattaaaaagaatgaaaactttgacggttggcaagtatatggagcaagaggacctttcatagactgcttgagggagtatagattggcacaatcattctggaaaactgcttgacaatatttactaaagctaaatatacacagactttgtgaccaagcagttccactcttaggtgattgcccagtagaaatctgtacatgtattcactgaaagtcaagttccagaacattcaaagcagtgttctttgtagtagccccaaacttcaaacaatccaaattgtgaataatgctgctaggaacatgagtgtacaaatatctgtttgagtctctgctttcagttctttttctttttcttcttcttcttcttctttttttttttttttttgagacagagtcttgctctgtcatccaggctggagtgctgtgaataatgctgctaggaacatgagtgtacaaatatctgtttgagtctctgctttcagttctttttctttttcttcttcttctttttttttttttttgagacagagtcttgctctgtcatccaggctggagtgcagtggcatgatcttggcttactacaacctctgcctcctgggttcaagcgatttttgtgccttagcctcccgagtagctgggacttcaggactgtgccaccatgctctgctaatttttgtattttttgtagagacagggttttcccatgttggccaggctggtcttgaactgctggcctcaagtgatccgcccaccttgacttctcaaactgctgggatcataggcatgagccaccacgcccccgcctgctttcagttcttttgggtatatacccagaagaactggattgctggatcatatggtaattctgtttaatttttggggaactgccacacttgggtattcttgtattttagaaacttcttggttttaatttcttctgtagatataatctacataaacaactattgggatcctcagtaattcaagaactactttaatgaactgtattatcaaggagagggttgaagcagccattgtcagtgagtgtagaaagtgataacgtgggtgagttgggtgacatactcttttgctctcaagtgacccagtttgggtgatatattatatggcccccctagtaatggagttcatattaggcagatggtcacacttggtaatgaggtcgccttagtgttggtgttcctgtggagctccctgaactcgcaaactttaatcttcctatgatggccaaccttggtggaccaaggtttagaatgaaagaaattgctttggagactacatatctcttttgagatttgacatacttaccaaaatgagtaatgattctgacgttcttccagtgttatttgaaattcaacatgaaacttttcctacatgtttctttgttaaaaatgttgagtaaattttgagacaaaatgtacatttttttcatataaacattgaaaccatcatgttgaggattacatgcattctgtgaagtttgtgtattaacaatccgtgtatgtcttcccaggaaaatgttaactgcagagggtttccaactgtgttggcttgatccggtcctttcccctctggcttgcagaacataacacttcctccctaagtgaggcagcatgaagccccatccagttactactattgtgagtggctcagagttcagcatcacagtttaatgcccagtagtctccttcttaggtctagtgactgtgcaccaaagggttatctgtcctccctttcccctccaactgcatttgtggaagaggaacaggatggagtagggcagaataaccaaaataagctttcctattctgacaaggaaagaatggggagacaagacacagtagtgtcttggctcacctctctcctgagtggaaattggactaagatctctgggcgcgtagatggagtcttttgcccggtagacctcattttagggcgaatgggtagaaaggaaagacccccccccccgcccccgccaccaaatccaagaattgggagagttccattctagcgctcaatattcatgctggaagcttaaattaacccagatggtctgtttggtttatttaaagataaaactagttttgagcctggaggaatagccacgttctctgcaggtgagtctgggaatagagcttgtaatttgcatagttgtttcagtgtacagaccttcaatttctgttacaatccctagttcttgctctcatccactatcccgtttgccagatattggtctggagcttctccagggtttcagagggcagacgctccttcttcctccagagccttcctgaagtacactcttggctgcattttctgttttgtttcatccatcttagctcttcagactattttgtcatccagaaatttgctgaaatctcacatccactggtgatgcctgtcccctgctgtttctaaggccatagtgtccttccttgctgtacttactgacattcatttcattgggatattggggcccaaagcatgggctttatctcctatcttctgcaggaagttccaagttgtgtgttttgctttttgtgtttttttttttttttttttgagacaaagtctcgctctgttgcccaggctagagttcagtggtgt

SEQ ID NO: 288 - DNA, 9172 bp, Homo Sapiens
atccattgcctccggctctcggcggggccgctggcgacccgcaggctccgcagtctgacctcttaggcgccggcccgaggtcgccagatcaaatcgccgataaaagcccggcgcccacgtcagggggctctgacaaccgccccacctgcgcgccccatctcttcaggtccagcgccgcctacccccatttcgccatttttaccggcgcgcccgccccgaggcgcagaagtagggcgaacggtggccgcagctcctttctcccggctcagccgccggccagcagccgcgccggaacctcggcccacgtgacgcgggcgcgcgcctatggaactgacggtggagttcagcgaagaaggtgccgcagagaattcgcaaacaccaaccgtaaccagagcagctgggggcgcggcggcgagagaagctgcgaagcgcatgcgcgcaggacgctgtgggaggggaaaggaggggaggagcgtggagcgatcgcctagttcccgcgttgcggggcgcatacgagacttggcgactcgctgcctcagggttgcgtgcctccggccctagcctgcgcaggcggcctgagcttggggctctgctacgccacccacgcccaccttggcggagggcggggccccacggctctcaaacttgcgcgccaaagacggagccacctggcgtactggtggaaagcgcagacttcagagccacacccgtagttaagtattcggactctgagattccagggtggggcccaggccatccgcgttttcacccagcatcgtgtgattcggcagcaggtggtctgtggcccgcactttgagaaaccctggtgcagaaggttcatggttagtggttctctctggaaggaacagtctaaggtttgtaggacttgcgttccacctaccaaagctaatcgagttagaaggctccaaactgaggtgtcatttctcattacggtggtgagaggacgggaccacacactgtgaagtcttcgttcccacatcccacacttcattcttgccgcctaagttgtcgccgtgggactattgaaagggtatcagcgatattcatctttcctataaatgggatctgctttctacagtttcctgccagatgtgtaaagattgcaagaattgaaggtatttcttcaactgaagacctttacagatactcagatgactgaaatcctcttatcactggctggacatggtggctcacgcctgtaatcccagcactttgggaggctgaggcagattcatcatctgaggtcaggagttcgagaccaccctggccaacatggtgaaaccctgtgtctactaaaaccacaaaaaattagctgggcattgtggcaggcgcttgtaatcccagctattccggaggctgaggcaggagaatcacttgaacccaggaggtggaggttgcagtgagccgagatggtgccattgcactccagcctgggcagcaagagtgaaactccatctcaaaaaagaaaaaaaatcctctattactatataactacttttatgtaccaatttgtagtctcaaaaatataccatcaatttattatatccagtgggggaaatttgtaaatattcaaaataccatttttccctttgccctctcacccaagtttattctgtgcttcaataaatttatggttctatacagatatgttgtcatgtacatctggaactatacttaatcagctatttgttttccaagaacaaggttatgtgctctattgtcaggcacatataatgaagaatgtgtgatttgagatgatttataaaagcttatcatatacatacttttttttgcatttaatttactagcatgtgacacaaccctgttttaaattctgtctccccattacctctattccctgttcaattgcccttccttcctccatcattcatctccttgtgatataacagatacatctaaggtatcattttatcgttctaagcagatattattctattttttcccctccatttgcaatataaagtattcttgatcaaactgacctgggtaattaacctttctgatttactctagctacaagcccataattcaaagtatcttaagccaaaatttagtgtagagttggcaaataaatatcacatatgcagcccttcctccttcccatgctcgtggcagactacgctattttctgccatgtccagacacagctccttgatacagcactctaagccacccttttctagacatctcagtctcactagtacttacaggaaccagctaagctgctagattttataagtattaccaagttttctgccatggttacataattcaagacagcacaattctttattaaccatgtcaagtccaaatgcttatttttaaataaacagaaataagagctattatacttcagggtatcaggaaaatctttcaatagttcaaactgactgctgagtttcaaaatttaagttacatcaggtttatttttcaaagcaacactcagagctaaagctaaacaaatctaacctgtcaactgaaagcattacctccaggtctgtttgcttctgtagtttttgtatcatattcatagtctttttcacagtagcacaaatgcggctcttactctctttctgctcaacagcaactggtttaaagcgggcatacaaagtttgatatcgagactttatcactgacaattcctttaagagtgtaactggatttttctatgtcaggaaaaaagtgaacatgtattaaattatgaaagattaaactttttaagaattaaaatactgtatacatacaacacattctaccatccatttaattgaacactgttgagtatttaattatgcagccacatgacatcagatgggaggtggggaagagagaaaagtataagacctagatcctattctcaaggaatttatagcctaggtacagaaataacccaccaaaaaaattagcaatattaaacagcaaataagggtcaccttagatatataacatttgatggatagttcacaataataaattatacaatatttctaaaatacaattctaaatgctattcagaagaagataaaaggcactattagtatttgttcttaaagaataagaacttgaaactacttataaaaatcttttttttttttttgagatggagtctcactctgttgcccaggctggagtgcagtggcgcaatctcagctcactgcaagcttcacctcccaggttcatgccattctcctgcctcagcctccggagtagctgggactacaggcgcccgccaccacgcccagctaattttttgtatttttagtagagaaggggtttcaccgtgttagcaaggatggtctcaatctcctgaccttgtgatccgcccgcctcaacctcccaaagtgctgggattacaggtgtgagccactgcgcccggccaaaattcgtaaacatactatcatggggataaagtatgtataaatatcaatttacttatatacacacaaaatataaaattcatgccaacccaactgtatttataaactatgctggttttccagatttattttgtaatatacattaccactattccataaaagacatttcaattggaccccttctgccacttggtaattcttttctttaattttttttttaaatagatacaggaatctcactgtgttgcccaggctggtcttaaactcctggcctcaagtgatcctcctgcatcagcctcccaaagtgctagaattacaggtgtgagccactgtatcctgccagatttctttttttatgattaggtaagattcatatattttcaggccccaccaagtgacagcacaattaataaaaagatctataccataactgtaaattttcgcaggatagaaaaaatattctgaaacttccaggtgataggtaagggactggggtaggctgaggaggaaagcacagacaaaggatcaggaatgagaatggcatccatttttcaacagcaacaatagaagctagaaaaccacgaagtaatgatgttaaaattaagagaaaatctccaatctagaatcctatattcaaccaaaccactcatcaaacaaagggttaggccgggcgcagtggctcacgcctgtaatcccagcactttgggaggccgaggcgggcagatcatgaggtcaggaaatcgagaccatcctggctaacacggtgaaaccccgtctctacgaaaaatacaaaaaattagctgggcattgtggcgggcacctgtagtcccagctactcaagaggctgaggcaggagaatcgcttgaacccgggaggcagaggttgctgtgagccgagatcgtgccactgcactccagcctgggcgactgagggagactccgtctcaaaaaaaaaaaaaaaagaaaaagggttaaagggtacaataaagactttttcaaacattcagcatctcaaaaagttaactttctgtgtaatcttcctcaggaagcgtctaaatgatatacttccagatcaaagaaataaaccaccaaagagtgaaacatatgatacaacacaggaataaaacaaagggaagtaccaaaataatggtaaagaaatcccagaaatgccgggcgcagtggctcatgactgtaatctcaacactttgggaagccgagacgggtggatcacctgaggtcaggagttcgagaccagcctggccaacatagcgaaaccccgtctctactaaaaatacaaaaattagccgggcattgtggtgggcgcctgtagtccttgcctcagtaggctgaggcaggagaatcacttgagcctgggaggcagaggtggcagtgagccaagatggcaccattgcattccagcctgggtgacaagagcaaaactccctctcaaaaaaaaaaaaaggtcgggcgcggtggctcacgcctgtaatcccagcactttgggaggccgaggcgggcggattgcctgaactcaggagttcgagaccagcctggccaacatggtgaaacaccgtctctacgaaaatacaaaaaaaaaaaaaaaaaaaaaaaaaaaaattagccaggcgtgtcggcatgcgcctgtagtcccagctactcgggaggctgaggtgggagaattgcttgaacctgggaggcagaggttgtagtgatccaagatcacgccactgcactccagcctaaccacagagtgcgactccatctgaaaaaaaaaaaaaatcccagaaagacagcaattcaagaagcctatagagcaggaggtcagatgggagcaggatagagacaccagaaaggataggatgtttccatgggagaaaataaaacttaaagaacatgtagtgtgtctgacaatattgagaagagttttacagttgttagaaatgtctgaggctgaattagtgaaaagtatatagaaaaactaagcaggctgggccatggtggctcatgcttgtaattctagcactttgggatgccaaggcgggaggatcgcttgaggtcaggagttcagtaccagcctgggcaacatagcgtgaaacctcatctctacaaaaaataattcaaaggctgggtgcagtgactcacgcctgcaagtcccagcactttgggagaccaagaggggcagatcacttgaggtcaggagttccagaacagcatggccaacatggcgaaacctcatctctactaataatacaaaaattagccgggcgtggtagcacacgcctgtagtcccagctactcaggaggctgaggtgggaggatcacttgagcctgggaggcagaggttgcagtgaaccaagatggtaccactgcactccagcctgggcgacagagcaagactccatctcaaaaaataataactattattattttttaaattagccaggtgtgctggcacatgcctatggtgctagctactcgggcggctaagcagggaggatcacttgggcctgggaggcagatactgccgtaagccatggtcacagagtagctgggactacaggtgtgtgccaccacacccagctaatttttgtagttttagtagagatgaggtttcgccatgttggccaggctggtctagaactcctgacctcaggtgatctgcctacctcggcctcccaaagcgctgggattacaggcgtgaaccactgcgcccaacctttaaattattttttgtagagatggggcttccctatgttggccaggctggtctcaaactcctgcactccagcctgggcggcagagcaaaaccttgtctcaaaaaaaaaaaaaaaaaagaaaagaaaagaaaagaaaaactaagcaaatggaaggaaaaaaaagaaaacaattattagctctagaaaaataagttgtgaagaaaggaaagcagacacagtattcaatagggcttatataaaagagttacagaaattgtgaagacaggaataaatatgggtagtaaagtatttaaactttatcttccatagtacaaaattcttttttttttttttttttttttaagagttagaattggctgggtgtgatggctaatgcctgtaatcccagcactttgggaagctgaagcgggtggatcatgaggtcaggagtgtgagaccagcctggccaacacggtgaagccctgaatctactaaaaatacaaaaattagctgggcagggtggcatgtgcctgtaatcccagctactcaggaggctgaggcaggagaatcgcttgaacctgggaggcggaggttgcagtgagccaagatcatgtcactgcactccagcctgggcaacagagcaagactctgtctcaggaaaaaaaaaaaaaaaagttagaatcttactctgtcacctaggctggagtgcagtggtgcaatcatagctcacttgaactactgggctcaagtgatcctcccacctcagcatcccaagtagctgggactacaagtgtgagctactacatcaggcctatagtaggaaattattattaatgataacagctaatgtatagcacttactctggactaaacagttatatatgttaactaattttattttctctcaatctctgaggtacatagtaatattcccattttacagatgaggaaattaaagtacagaaaggttaactgacttggctaaaatcacagtgctaataagaggcagagccaggatgtgaagtataacagttcgtatccaggaaattagtagatgtttcagatcaggaaaaataaagatgcagtacaaggaaaactatttagaaatataaaggaaataccataagacactgagatgagtggtatccttcttgagggtgggagtgtgaagcattattctttgtaattataagctttatatttctgcaactcttcaaatatattcaagaatttgacaaaaataaaagtttaggccggggtggtgactcacatctataatcccaacactttgggaggctgagacaggaggatcacttgagcccaggcaagaccagcctagtaaacatggcaaaaccccatccttactaaaatacaaaaaattagaaccaggtgtggtggcacacacctgtatttccacctacgcaggagactgaggtgggaggatcacctgagcccaggaggtcaaagctgcagtgagccatgatcatgccactgcactccagtctggacaacagagtgagactctgtctggggaaaaaaaaaaaagtttaacattgggagggaaattggtaggagggaagaagtcatcttcctcatgaggtgataataaattatgtaacttaattataaatgatctttaggtaactggaatgtagctcagtagtgaaatacccagagatctgcatgtattaatataactcaggagaatgatgagttccccaaatacagattcatacaggaaaaaataaaagtgacaagaactaatccttgaggatctcacaaaactaggaaaggaaagttggtatataaagcataagaaataaatggccatagagctaaaagagaggacagggtagttgggcagctacccataatacatgtttttatgacattagctcgatcaataagactgacatggcagtgagtaatttaggacaacatgatttgcatttatggcctgtttatgacaggttaggactgtggttaggacttagcaccataccacaaaggaaaaactgttgtgcgcatagcctgttttatttgagtaactggctgttgggaaccactacattcttttttttttttttttgagatggagtttcgctcttgtttcccaggctggagtgcaatggcgggatctcagctcaccgcaactttcgcctcccaggttcaagcaattctcctgcctcagcctctcaagtagctgggattacaggcatgcgccactacgcctggctaattttgtattttttttttttttttttttttagtagagatggggtttctccatgttggtcaggctggtcttgaactcctggccctcaggtgatccacccgccttggcctcccaaagtgctgggattacaggtatgagccaccgcgcccggccaggagcctctacgattcttttattagtgtttgtaaactgtgctgcactttagttaattttgtgcctataatacttcaattcattttagggttttagttatcatgagtggatgataaaaggttacaagaatggctgagcgaggtggctcacgcctgtaatctcagctttgggaggccaagactggtggatcacctgaggtcaggagttcaagaccagcctgaccaacatggtgaaaccccgtctctaataaaaatacaaaaattagccaggatagtagcgggtacctgtaatcccagctactcgggagggtgaggcaggagaatcacttgaacccagtgagccgagatcatgccattgcattccagcctgggcgacagggtgagactccgtctccaaaaaaaaaaaaaaaatgattacaaaaatacataaaaatactctgctaatgatagtgctggtgatgggagaaaagaaaagccaatatatgaacaaaaagctcagttcaattaagtcttttgaaagaaacaaaaggaaatgaattatactactaagcttaaaagaatctatagggaaaatgttcataaaataaaattatgtttctctgccgggcgtggtggctcacgcctgtaatcccagcactttgggaggcagaggagggcggatcacgaggtc

SEQ ID NO: 289 - DNA, 2068 bp, Homo Sapiens
tataagtgagattgctgacacacaaggaggatgagttccacatatgctcaaatacaaaactatccctcataaacagaataacctcatggttgagtcctttggtactgcttaaaatttgggtcactctcagttaccttattttacacaataaaatagcatgagatggagacatcttaatttgaaacattctcagtcatagctggagttggatgaatctagaaatataatttaaattaaaaaaaaattcaggagaaagatacttactttgagataaaaactattagggtcaaaatattgccattgagaacagtgagcaagtgtgtgccagtgtcagatattgtatgcatccaaagacaatggctttcaaggagaaattctgaaggaagtttggcctcctgtcttagtattcagatttaaatcttggcatttaaaaatgttaaattaatgaccgatcaattccaaataaattaccatctttagaggtgacgctaatcaatggaggacatggcatggttggtttgagaaaggcctcatttgacattgaggaagatgggataatgatggcttagtatttgtgatttctactccaggtcattaaaacagcaaacttaatagctctaatttttctaaaactcgacccatgcatgcattaaaataatcagcctaaaagcttgatttgtatttgattagaattaaaagacactatatgtcacaatggtatttgatgacaacccctgaaatgaaaatatcttgacttaaatactgtgctggccattagtagtctcatcaacacacagaataggaagagtagatttgcattctagtgatcatgagtcaagtgaacatagaacttttaagagacaagtcaggttgagagaaatgccatatatgaaacttacgtcctaaaggaaagaagttgagctctaagttaactagtctttggaaatttgtgattctgttcatggcatgtagaacttagagactggtgatatttttgtgtggtctctaaactgttgcccattagccagttcatcctcacctgtcctctaagctaatcacaaatttgcatccagattatataaatgtcaaggtcacagaaaaatatgaacgcagccaaaattagctatgctttctaaaatgtttgttccacccataaaagctttgcttaattatacaaataaagacttttgtttgttcatcataaaaaaaaatctattcaatactctttttctttttcttgctattatttatcctcactcccagatcgactttgcctaaattaactggccactgcaaatcaagataagaaaagcaagattactttcagtacaaaattgtatagacagacactgaattcagtctgcttcttgggtcctttctctggctcaaagttaagatgctcttgtaatgttccatttaggagcttaatgtttttccgataaagtgattataaagtttatatgtttaattaatttgcagctaaataattgtaggccctgctcttctcagtgaaggaggaaaactaacaacaatagagggaagtttttcttttcaaacatgagacaagaaagagaccaaaaagtttattgattctaatttcatcatgttatagctaaggaaactcagcccaaatgagttacatatcttggctcaagtgctaacattagccaatgaaagtgccaggactaaaactcctaattcctaatccattgttctttgtacacagtgtaatttgcaaaacacctttatttgttacttcatttgactctcaaaaatgtctttggaagttacctagtaagaaaactgaaacttaaactcacagatttaaaatatagttcaagttatatttaaaatataagtttaaatcagctggctcctcaattttatctttagcccttacctgtccctggataccaaactcatatatccacctgccctcctgacatatctaattaaatatctactttgtatctcaaacttaacatgccaaaataaaatctcgatctccttatccatcctctgttcttacccagcggaaccatgggctttcaaatcttattagatggta

SEQ ID NO: 290 - DNA, 823 bp, Homo Sapiens
gtaaaggttgaagtcaatagatttggcagtattaggtgtctggttacagggctcctttcaacactggcaaaatgaacattattgccaccaatgatcccttcattgttttcaactacatggtcctcatgttccaagttgattccactatgtcaagttcaatggaatctttaaggataggaatgggacgctcatcatcagtgggaagcccatttctatcttccaggaaacaggtcccaccaacctccaatggggtgatgttggtatgggggcccctggtgtcatcactatcttcaagaagattggggttcacttaaaggtgaagtcacaaaagtcctcatcgctgcttcttctgctgattcccccatgtgtgcaaggagagtgaaccatgagaaacataagcattccctcaagactatcagcaacaacacctgaaccaccaactgtgcagccctcctccccaagaacatccatggaactctcccagcagggaggacctcactgttataaacaatgccatcagtgccactcacagactgtggatggtccttctggcaaaccatggtgcagtggtcatcgtgctgcccagagcagcatcctcaccatcactggcacggccaagactgtcatgaatctgacttgccaccttgagaacattgccaagtacaatgacatcaagaatgtggtgaagcaggtgatgggggcttccgaagagcctcctgagcaacattgaagactagattgtctcccatgactctaatagtgtaacgctgtggatgcagggcctggcttcaccctcaatgaccactttgttaagctttttagt

SEQ ID NO: 291 - DNA, 3784 bp, Homo Sapiens
ctgagagccagccccccgtcccccacagcttaggacctccatcaaggatcctaagaaccttaggacccacctggaggactgtgggtattaggtgtccaagaagaaagctcaaatctgctgacggcaggtaccttgcttgggatttactatccgacaggggtccgaacgcagcccgggaacagaaagaaagcaggttatttacaatctaccggagcctaagggcagaaggcaggtaagggaattcttgggagctgtggggttttgtagactggatcccaaactttgcagtattagccaagcctttgtatgaggtcacaaagggggcggggaacggaacctttggaatggggatcccaagaacaaaaagtctttcaggagttaaaggaaaaacttctggcagccccagccctggggctacccgatctgacaaagccttttccattgaatgcgtcagatagagaaaagatggcagctggacttttaaccgaaactctggggccctggctgaggccggtggcctagttgtctaaacaactagagagggtttctaaaggatggcccctcatgtttgagggccgtggcatcaactgccctgatagtacaagaagcaaataagctgactcttgggcaaaacctgaacataaaggccgcccattttgggttgggtgacagccatcccctcttccccccctgccttaggacccccatcgcgtatcctaagatccttaggactcacctggaggactgtgggtattaggtgtccaagaagaaagctcaaatctgccaacggcaggtaccttacttgggatttactggaggactctgggtattaggtgtccaagaagaaagctcaaatctgccgacggcaggtaccttacttgggatttactatccgacagcggtccaagacaggggtccaaacgcccgggaacagaaagaaagcaggtcatttgcaatctaccggagcctaagggcagaaggcaggtgagggaattcttaggggctgtggggttttgtagactgtgcatcccaaactttgcagtattagccaagtctttgtatgaggtcacaaagggggcggggaccgggaacctttagaatggggatcccaacaacagcaagtctttcatgagttaaaggaaaaacttctggcagccccagccccggggctaccagatctgacaaagccttttccattgaatgcgtcagatagagaaaagatggcagctggaattttaaccgaaactctggggccctggctgaggccggtggcctacgtgtctaaacaaatagaaagggtttctaaaggatggcccccatgtttgaaggccacggcatcaactgccctgctagtaccagaagcaaataagctgactcttgggcaaaacctgaacataaaggctccccattttgtggtggctgagagccagcccctcttccgccccaggctcttaggacccccatcgcagggaggggaggcaccccccacgaggtagggactgagagccagcccctattcttgatttagccaatttaagtatgtaaaacggggggaaaaatgtgatgacagcctagttttaaggcattgatttgattgtgttgtaaaaaatacattcttctttttctttttttgagacggagtcttgctctgtcacccaggctggagtgcagtaagcccatctctgctcactgcaagcttacaccattctcctgcctcagcttccctagtagctgggactacagatgcttgccaccatgcccggctaattttttttgtgtgtgtttttagtagagatggggtttcaccatgttagccaggatggtctcgatctcctgacctcgtgatccacccgcctcggcctcccaaagtgctgggattacaggcgtgagccaccaagcctggccaaaaaatatattctttcagaaagataacatgtttgttctttcattcagtcaatatatatttattagtgttattgctatgccagtgtcttagtccattcgtattgctataaaggaatacctgaggctggggtggtgccatgttggttagaatggtgccatattttctgggatagcaccatgctggctgggatggtgccatgttggctgggatggcacctgcctcagcctcccaaatagctgggattacaggcatctgccaccatgcctggctaattttttgtatttttagtagagaaggggttttgtcatgttggccaggctggtctagaattcctgacctcaggtgatccacccacctcagcctcccaaagtggtgggattacaggcgtgagccaccacacccagcccagatttcttttatcacgctccataggctcaatagcaggaaacgtgtagagattcctcttgggaactggtcaccatatcatttggatgagctacagacagaccttcaatcatcctgtatcttactgttttgctatctctgtacactgcagttatgtggacatgtgtcacctccgccccactatccagaaatgtgggctcctatgtgcagggccagatctgctcccatgtgcatcctcatcacctggcaccaggcctgcccatgctaagcctccataaaattgttggactaaaaggtgacataggatactcaacttctcccagccatatgtcttcatgaaccaaatggcagtgcagaaagggaatgtttgcagtttcagtgggcctttctgagggcactgcagggcacacttctcccaccaggcccttggtggaggtgcagaatggggtctcttcagaagccacttccagagcccctaccaagggtggctcagaaggtctggttttcaatgagtccactagggaagtccatgtgtgactgattcgacctcgatgcttctacttcgccttctttccatctgactgactcagacctaatagtagggttctaggctgctccatgagccaaataaattttctgctcttataaatgactcagtctgtggtcttctgttatagtagcacaaaacagactaagacaccattccagagatatgcaaatattcaactgtaggtctccaaaaatgagatggcaatttcaagttcagctctgacagaagtaacaagaaggtacacacaatgagcagcacacacatctcccaccttctgggcacatgtggcccacatctagccagtcttcctgagccagcgggtcccaaagctgtctttggatcattgcttctccatgacaatttttgccagctcttcactggcctgcagcgttcctttcaagtaaattcctgacctgtgggggacaatctgggcccagcgtgcacccctggtcgcgaggaccacatggccagagaagcagaaaggaggcttcaggcacgagaatttaggttcttcagctgccacaagtgaagagcaccacttgtattttttattactacctgctatggactgaattgtgttcagttcataacacgtagtaataaaaatgtgtaggtcgaagccctaatccccagtatgatggtatttggagttgcagggcggggggctttgggaagtgattaaggataaggtcaagagagtggggtcctcatgatgggattagtggctttataccaagaggaagagagaccagagttctctctctcccttccccgccctccccccacctctttctctttctctctctgcaatgtgaggacatagcaagaaggtgccatctgcaagacaagcagagagcatcctccccagaaaccatgtctgctgcaccttgatcctcaattttccagtaagaaataaatgtctg

SEQ ID NO: 292 - DNA, 3386 bp, Homo Sapiens
gaaggcgggggacccgggacttccaagtgtgttcatctcaaagatctctctttgcataatgtgtgtgtggacctgcctacagatacattgggtggaagccctaggagcctcaagcaagtctgaagattggccctgagaaccactgttctcattatcagcaaggattttatccagagacctctaggaatacattcactaaaatgtgactgtggtcctgtggttgtatgaactctggctcttctcgtgaattacatttcactggagtcaggtgttttctgtaaacatcgttaaaccacgagaccaactgcattgaacattttttgcactacattgttttatttcttgctcgtcttttccttgcagagctggggctggggtgaggtgagtgtcttaggtgaggctggactcttcctccgagaagatctgaaatgcagtgagcacttttgcttgaagacagggactgattttggtagcatcctttggtctcttctagtctgggagtcagagaaagtttgcatcaaaatgtcatcaggccaaaaacaatccattgatacacttggtgacattaattgagaaaaaaacaatatggtctggccatggaggcatggtatccgtaacatcccccaaaggagctaaagaagaaatccacaatttaccatgagcatttctcgtctgaagattgccaagcgattcctccaggacattcctcaagatcaatttctgttcatccaccttgtcctgggagggacatcaatgggtttccatgtcctttggcttctggttgagttcactcagtggagaaccctggcaagaggcaggaaaaggggaggaagcagcctgaccggtttgaatttcaccttctgttcaccttggatgagagcagtaatcatcacgatcccagggaacagccaaaggaagagaaaaggcaaaagatttggacaagactcatgaagactaacagctcttggataattgagagaaggcagctgcgtgaacagttttgatgcaatcatgaaggcagggcccagtgcctgtggcatctgcctttttctggaaccaatccatatttccttgtggttttctaaggtgcagagagggcacattgggaactttgcttggggtctttttcacatcttagagggaaggtccctcaacatctgcattggcggagtgtgatcctcatgtccctctgaatgatctggacttgaggtaaccagccccttccaggaagctgtcccatgagtgaagcctcagcagcagcctctgtcagtccctcccccacagaacctttggcttccatttgaccagccttgacatccagtgtccaaacaccgataaaattgattccactaagcgtgggaaagtcctggagcatcgattgtttcctcctctgcacccccgataccctggcattagcactctcccagaatgtaccttgcttgtttgattggaggaggtcaaagccctgatgaagaatgagtggaattccacaggattggagcagtcttgataaatgacagcaggggatggtgtggggaggggaaaggatcagaggaagtgtggataaatgaatggcttaaaaaataatccacctttgcctcccccttttctaccagtctgtctagtgcttcagggtgaaaaaaaaaaaaaaaagcttgcctttctaaacatttggagtttcagaaatgatctatagagcatgtttagtttttcaagttaaaaatattaaaagaaaaaaaatgtttgagggctttactgctttcccgcaaagagctagagccacccaagcaggattgactgtcattggtttgaggtttctgtttgctttgaggctattttttccttagtgctataaactagatcagtccatttttagctgataaccctttccaatttcgctgtgaaatgaggggctggttgggtggtttttttttatgttctttccagcgttgacttttatggtctttgattccaaggtacctcgtcgactctgaagacgagagatgggtaggttctaactccagatgagccactgcaagatggtaccaggatgagatagagagtctctgtactatcttttatatgttctcaaacccagccagggatcagagtgacaatataacatggggaatcatagagatgtttatggtaattctgctatgagtcaactgagatgtcccttatggagataacttcccatactataggcagttggacaaagatgtaaatgccttgtttacaaatgctacccagatctcctaattaggaccacacatgcggagaacccaacagcttttggacttatcggccaatggtcttcttgggaaggtctctcctagtcatgggaattgtctttttattgttcaagcttttgcatagacctggaagaggcatccattgctgttacccctgagtttataatcatgctgcaagtccagtggggaactttggcacaaagcattgaatgagatgggactgcacttatgtagcctgcatttcttgagaataaagatttctgttcatttagtgcagtggttatcatctgggggaaaaccagtgagtagaggccagggatgccactaaaatccctacactgtgcaggaaagctgtcagccctttgtcccacaagagattaactggttccaaaagtcagtagtgctgtggttgagaaaccctgtttaccacctgtaggttccagagagctcggatggtggtggtcattgtgctaagtttcaaattcagtatttaggtttggtttttagcttataggcaacaaattggctgactatggggtgaaaaggaagcacctcctttatcaagattggcttcaaaagatgtctgcctccccttctggtgggtcctgtgtccattcacagtgtgagaaatggaaaggaggtcactaagagacttgcaatggatgtaataactggatgcagaaactctggatctgaagggaatgttcatgactatttcatccctcctgctgccttggagaaccaaacgcaggagccacccaaggtgaaaaccatccatttcttggagaagtgccacggtggggttgcaagtcccaggatcaagttttcgatgtgtctctttttcccgtaaagtggctgaaatctgaagctgaatctgcaagtgtcatggagtcattgaatctcacagtctcaactgataaaagttattaaaggtcgtctggttcagccttctacttgatgtggaaatcctttctacagtaactctgtgtgggaatcacagttcacttaggggcttagtctcatagtcaaaatgtcttcttcctaagtgggaaattacttccagcttctattcattcagtagttgtttaatactatctctctctctctctatatatatatgtattatatata

SEQ ID NO: 293 - DNA, 1030 bp, Homo Sapiens
ctgttatcagactgtatagaggtgggaaggctaaactgaggaattatgtctgacagaagggaaaaaatgactgtggtggccttctcagaccctgtaggaaaggcctctacctatccagtaaaagtgtctacctagattaataggtattttagttatctgacttggggcacgttgagtaaagctaatttgccagtcctgggtgggagcaaatcctggagcttgatgtgtagggaagggaggggggcctgaataatccctgaggagtagtagaatagcagatggaacactgagaagttatttccttgaggatagatttccacgatggaaaggaaatgagaggttctaagaggcaggctagtggcttgtactacagcatagcctgcctttgctggtgtgtggcgattaggcctggtggaaccgccatcaataaatcaagtgtgatcagggtgaggaacaggaaagaaggaaatatggggaaatggggtgaatgtcaggtggatcagagagatacagtcatgggggtcaggtgtggtatcaggaataatgtgggaggccagattgaaatcctggccaggaacaatggtaattgtgggacttaacaaagagtgagtacagctgaaggagctggggagcagaaagtatatgcatcaggtatgaggaagaaaatagattttggaagttatgagaaatgtagagagtgagttgagcatatttgtgattttgagggcctctgaaagtattaaagcagtggcagccgctgcacgcagacatgagggctaggctaaaacagtaaggtcaagttgtttggacagaaaggctacagggtgccgtcctggctcttgtgtaagaattctgaccgcactaaccatgcctaggaaggaaaggagttgttattttgtaagggcttgaggtttgggagattaatcggacatgatcagcagggagagcacgtgtgtttttatgagaattatgccgagatagggctgtaaagcgtgtcagggttgctgccgaaggagccatgaactgggct

SEQ ID NO: 294 - DNA, 755 bp, Homo Sapiens
acctgtctgctctctggcctgcctcagtggtctacagcagttacacacaggcagtggtatctgtgagcagctctgtggactcaaaggttttctccctgagaggcatgacccaggccagctgattcatcagaatcagatgagacgtctggggtcagagaggcagtaaccggcctgggaatccggacatgaccctgagttttgctctcagccctgccgtgtgctgtgctggaattcaggcctgaaccctgtgacctccctgccctagatcccaaatctgcccaggtttcccatcccgatggggcagagcctggtcctggcagagccactggtatagagccactggtacagatccactgacggtcctcagaacacctctgtgccctaagctgggtcctgatggtcgctgtgggccccactgaacacacatggtcccttgtccgggggagcctgctgcccttgggcagctgtggaaaatgaaggagccctggagggctggctgaggggagactatcttcccttgtgttcaaaggggtccgggcactagggttctccccaggtatttcttgctctgcgtggtcctcttgaggcctcgccctccttttgcctcgagtattcccaggagggacggtccatccagctgttctccaggaccaaggacccactgttcttcctcagtgacccaggaaaatgaagcctcctcctgttgggacggctcagaatggtggactccacagtccctccgcgagagacgtggt

SEQ ID NO: 295 - DNA, 8400 bp, Homo Sapiens
actcactgggatttctgttccagcagcctctccgttctagttgtgtatccactacacacatttttggttggtgtctacaatgcctcggctccatgctgggcactgaggacactgcaatgcaccagaaatgatccctgccctgcaggagctgcaattgcctcttggtgactgtttctgacacactttatgtggaagttggttcaatcaggaaagagacacctctttggacccccatctctcacccagtccacacttcctggtggtgactggtcggctccctagtttcctggtctggcctgagcagccggatcttctcctacgtacctgcttcatttttcctgctgcctgaagagaatcctaccaacttcacttcttggccttataggaaggagccacagtcccaaagaagtctggggagagcaggatgtggcagagaacaatgatcggtgccttgtttcaggaggcaaacgtggcccaatccagggaaatcagcagatggcatgtcatggccatcgcagatctgaggagctggcctttgggtgatttctggtccacatgacaaacattcaaggtgaattagaggagaaaagctacatgaagtgatgtgcaagttgaaaagagaaaagggtgtggtgctatccaggaaccatctaacgaaaaacctcttgcaaggcagattgagaattttaaaacaacactctccgacccaactgccccgtgacatctgttaacacaaaaggcagaactatttccaggaaaagctctcagtgtttgcaaggcatccagcaaaacagaacatggagactgaggacagaaaagagaaagaagcgtagggcaagacccctcctccaaattgcagtcctttaggaatttctggagaggtaacctggggtctccccaagcttcctgcagcccaaccaaccaacccaccaacctggctgatgcatatgtggaatatcggcttcctgttctctgaagggcaaaaaggacactgaagtatagcctacaggctctgcggcccaaagctcattaagaagataatagatttaggccagccgcagtggctcacgcctgtaatcctagcattttaggaggcctaggtgggtggattgcctgagctcaggagttcgagatcagcctgggcaacatggtgaaacctcgtctctactgaaatacaaaaaattagccaggcctgatggtgtacgcctgtagttctagctactcggggggctgaggcaggagaattgcttgaactggggagacggaggtttcagtgagctgagactgcatcactgcactccagcctgggtgacagagcaagactctgtctcaaaaaaaaaaaaaaaaaaaagaagaagaagataatagatttagaagacacacaaataattgtttaaaagaatggccctaatgtgctgcagtctgaggtggaaggttagtaaggtctggacttcctcggaatatgactgagttttcagatcacgtgagacgtcttcatggaagacattgaggtagttaccacatcttctggatgtcccacagccaacagcatatcaatttgggctccttcagacattaaaagcaggaattggattagtgtagctgccggaggtttcccactgtctccactcccagtttccacgtgcatttcctctggtgctcatcaagtgtacagtgctgctgtggtgagaatttgtcaaatgagtctccagtctcagaaggtctatgtaaatggggtttcaagtcatcacagggactgaatttagtctcaagtaccataaagaaaatacttttaaagctcttctaaaaataaagctcctctgaagagatgtttggcctgtggctaatgtgtttggaaacatgttttctgtaaaactcaaccttattcatctacttgcaaatccagaaagacaactttcactacacacatcagggcttgtcccaaattttccctactcacagtggaagatgccggggtgtgaaccattggcttaaggtgcctctgcctccctttccccaaaacagtttaggaagggagggtttgggtctagtgtccagcctgggctcagctttggatgctggcaacctggacctaggcacaccagggaggctgctttctttgcccttgtcttgccacttcccatctcccatgtcataggaggagcttggaaggagctgaaggccgtcaccttcctacaaagcagagagatcctctctccaagaacggcttttgctgccctctgggtcctgctatttccatggctcctgaagaatcagcctctgatatttcaattgccccttcatcagaactgtcaaacctggtgaatctcttctctttttctctggctcactctctctaaaacacgcatcttaaacaagttttaaaatccctgaagaatggcagaaatacaaagaactcaattccaaataatattgtcatgttctgctgcatagttgaggtaatcaccgttaagtaagtgcaggtatgggtgactctctaagacaaggatgaaagtacagtggacaggtgagcccatggcccaggactcaggcactcacagcctcccacgtttcttctctatttcacaattgctgatccaaggcgggaggggtgccattcatgtgtggcattcacatgagagaggtgggcattgtgggtcctcagtgcagggcctgttgtgtcctcaatgaacccaggattgagtcccacagtggacagactttgccaacttttataaatctctctcaagacactctcctccaatattgcaccttgaactgatgtaatttcttgtagcgaaaaaattaaaatctatcctttttgaccttcatatgcaacatgcatatcaagagagttgtcttagcagcagcaattttatattgggagatttgagcatggactggctgttgggagagctttatgaggcattccatgatgtcttggctttaattttgcttttattttgatgtgacaagatgtgttggactgagatgcctttgggctctagccctggaatttacaaaaagagaatactgcagggttatggtgggggtgaggctggaagatgttacccactcacaaagcttcagcacagcaacatatgttagaagaataaactaacattggaacagtaaatacacacatacacacacacacacacacacatacacacacacacacacagagtgggagagagtgagagagagtgcaaagccagtgttaaatcctggacatccctgcagggtcctcatgcctgcctttttctcttagtcttgtgggggtggggaaactctttggtattctcctttctcacttgtaggaatataaggaggaaaggaaccagaagtaaagtgtctgggcctctctcagccatgcttttcatttccacttattatctaaagtaattcattactacttctgtgctctcttttcatcttttccttgagcctcccctgagctcccttgaaggtggcaggtgacaggctggcttgaccagaacaaagacagttatccctggctgccgcctgtttcccaatgggtgcctgccctgtcttgttacacttcctctgtgtgtctaatttacactgcaagccctctgggcagtggctttttttttcttttttaaaaaattatctgctcttctctgcttacgactgaagtttaacttctgcaccccaactcctcctcattcttaagaaaatgccaacagaaaaatattaaaatgattgctgctgtatgtaaagacagaagggtaaaaccgaggcactggaggctttgggtgggtattgatggaggtctgggagcagctggtgattgacagggagaagagctgaattagttaaggaagggtctcctgggttttgctgggagtggtggccagacacagacaaggacaaggaagaaggccaggacctctgattgcttttctcagaacagaaaagatattattatttgaacctagaggctgggcagtttcctgtcatagaaaaactgactggcctcatggccagagaaaggtaccaactactttctttggtatttatggttctcgtatccaacgtaggaagttagggctagacaacatctggaagtatctggtagaagtatctatttatttaaatcatccatccattcatctatccatccattcatccactgatccatccatccacaatgattaactgcagtgaaagagaagacatttttagaagataaatgtggtcaaatgtcctaaagttttattcgcttgcatgcaagtaaccgtgatgtgtctggaggactggagggctggaaatgaaaggagaaaagcaattatctgggcccatggatttgggaagcagatatggggatcctctcactgctgacagagccccagtaaagcatctggaagggttttaaacagaatgagggtgtaacaatgacagacgtattcttcctccttcaaaatccacaacaaaataaacaaccaccaccaaaaaaaaaaaaaaaaaaaaaaaaaaaataggagaggtcaattcaggaaactttcctagaaaagtacatgaggtagaagagaaaggatagggaggagaccaagcattctaggttgcaaggaagacctaggggatgcctgagggtggggatgaagggactgacaaacatgttccatgggccatctatgggtagggcactcggtcgtgagagtagtgatggcacctgaggcagggctacaggaatagatgaggtagggagccctgtcagggtgcagtaagcatcccatggagaaggcacgcactgtgggcctggagcttactggggaggtggaacaagcagggaagcagtccttggtgcaagcaaggatgcacattccacatcaggctgcccgcccacgaggagggcctacacttgtggctctgaatccatgtggaggcggaaacggtctggttaagatagtgacaatgtgctttgtgtttgtgcctgaagggccagggaccacgctgtggcacaatgaaggcattgagagtcagcagtccccaagactaggtgtcctaacaagatgccaagacccagagagacaagagctgagcccttgccatgaaggtgccgagagctgtggtctcagcccttggaaatatcatcaaaagaagctgttccgagcaaaatgcattccatgtgttggccttgcccatgtgtttcttgtcaatgaggccgatcttcctgggttcagaagggtttctgtttgaaattttatgagccttggctgggaagcagaacttatccctgagtttgtgggagttaatggccttttctggcggcacaactctgggggcctcagggaattcccaaatgccaggaaagaagaaacccatagcccgtatttcaactgaaaattatgctttatttataggcagccatggagaaaagactccccagaacacttctccagcgtcacctcagtgtggtgtgtctgggctcacaggcccttccttggggtgacccttacagctcatgccagcactctgtggaaaagatatgcctcactccccagtgccaaataaagacatcagcctacatccagagcagaaacagcatttgttcctgagtcttccatttttgccatttaaatagagaagtcaaactattccttgatacactcttgtccccctaatttacttcaaccaacacgtatggggcacagactgggaactggtcattttattgggcatcattatgagcacaaagggacagatatgagatgggcaatccagaaggtcttggttcaagccatttccttccattgtctatcaagttctgtcaccgggacaaatcatttcccctccctggacctctgcctcctcatttgtcaaatgaggagcttggaccaatgaatatgaattctgaagaaattcagtgtaagaggaagagtcttaaaatactagtcctaaaaggttaattgaaggagattcatggaagtgatgcaaatattggtgttttgtatgagtgacacttaactgcttcttgtctatggcaaatgatattcctggggtagctaagaaagaccctttcgctgcctggcgtggccctctgtgaaccctgctagcctgacatgtcatatcagagctccctgcagaggagttgctgttcacagcaatcatctgggccaggctcttgacctgtacccctgtcagtgctttgctgtcttggcctgacccttggccttagctgttctctgccctttggacttggggttgctattttctcttcccatcttgattctcagttttccctcaaggtcttggctgagacccacccatggactcacctttcttttttcaaactacctcagataggatttgagtgccctgtttgatcccttgtgactcaatttctgttgctggacaaagaaaaaagaaaggcaagggaattggaaactttacagtataatactctgctcagcagtaagtattgcaccagaattttagtcaaaaggagtatgtataaaataaaccatgttagatcgagctaaaatatgactcactgagaattccaactctaggtcttagatttttcctttgaggttacacatgaacaagcctaattccttctcatatgatagatcttcacatatttaagtataatgatcgagcccccagccttcggtgaccaccccctctcctgccaagtcagttcttctctaggcaaaacaagtcaatttctctagcattcctcagatattttggttttgaatccttttgccgacgtgacggctcttcctaatccagttcaactgatttctgttcctcttcctttgaggtgcctgcagcttcatgcaacactctagacaggctccagtcaacccagggaactgaaatcttttgccttaaattgatgcttcccaaagtgtgttccattcatccaagcccctgtgacatgctctggaggtcaagggtaggtggtcacttagtttcacagtcaaatatgtttgggaaatcctgcagactaatatccctcttggagatttcagaatctgtgttagagtactaaaggatctgagtagtcctgtttacctttacttcatctaatttttcccgaattattcgaccactgagccgtttgttaaagtattactcattaacctccctagtgtgccatgaagctttgggtggcactgttcaacttccatttaagccatctgaaatcatttatttttttcctctttccctccctttctccgttcttttcttccttcttctatcacactattattacatattgattttagtgtcaatcaaacctcctacatatttttcaaacctgttgctgataaatcatatgtaaagtccttcacccttcttccctttatttgggcagctgttatttgatattcatcacttatgtattaagcatgcctttatttaagcccttaataaaaatgaaacttcataaatatttgttgaataagtacaggactgaggcctataccctttggacatggtaattcaattagctattaattatcctaatcacactaatattcagcccatgtttctctatgcttgtccgtgaggctatcttgaaatgcttgtcaaatgctttgctgcaatcagattcactatgaagttagatttcataatctaccagtctagagccatcttgttgaagcaggagatgaaattaatatggtaggactttgtacttcaggttcctgcgcaggagtttagaaacacaggtgagccttgatgggagggtaggatttaaaaaatggaggggatcataaaaaggattgtgggctggttggggtaagcatgagtaacggactacaggcaagtgtaaacatgttgggaatggttaggataaatttaacaatatttatccagtgttcactattgtgaggttttatgcagggagctggcagcaagggggttggttgagatggataaatagctaataattaactttataagtaccacttaaaagataaaatgtgatgagtgttacataaaaggaaggagtaaagtaacatagaacatttgttctgcagagtcagggaaggcttcacaatacaggtggcccctgagcagctatgaagattgggcagggctctgccagagaatgatagagggcttcaggattcaaaactttgatgatggaacagatctgtgaatggaggtgtcaatggattaacatgacttccagattcatgacctctttcttggacctgggcaaagccttgtggcattttagatggagctgggtgactggcactatgaccttgggctctgcctgaacctcacgtggatcatctataacataaaggtagtagtatgacagtgggggtgaggattgcataaacagtggaagtaaatctcccacatatcaggggtgcttactgaacctccttcctctcatctctcccagcc

SEQ ID NO: 296 - DNA, 8300 bp, Homo Sapiens
actcactgggatttctgttccagcagcctctccgttctagttgtgtatccactacacacatttttggttggtgtctacaatgcctcggctccatgctgggcactgaggacactgcaatgcaccagaaatgatccctgccctgcaggagctgcaattgcctcttggtgactgtttctgacacactttatgtggaagttggttcaatcaggaaagagacacctctttggacccccatctctcacccagtccacacttcctggtggtgactggtcggctccctagtttcctggtctggcctgagcagccggatcttctcctacgtacctgcttcatttttcctgctgcctgaagagatttcaggaggcaaacgtggcccaatccagggaaatcagcagatggcatgtcatggccatcgcagatctgaggagctggcctttgggtgatttctggtccacatgacaaacattcaaggtgaattagaggagaaaagctacatgaagtgatgtgcaagttgaaaagagaaaagggtgtggtgctatccaggaaccatctaacgaaaaacctcttgcaaggcagattgagaattttaaaacaacactctccgacccaactgccccgtgacatctgttaacacaaaaggcagaactatttccaggaaaagctctcagtgtttgcaaggcatccagcaaaacagaacatggagactgaggacagaaaagagaaagaagcgtagggcaagacccctcctccaaattgcagtcctttaggaatttctggagaggtaacctggggtctccccaagcttcctgcagcccaaccaaccaacccaccaacctggctgatgcatatgtggaatatcggcttcctgttctctgaagggcaaaaaggacactgaagtatagcctacaggctctgcggcccaaagctcattaagaagataatagatttaggccagccgcagtggctcacgcctgtaatcctagcattttaggaggcctaggtgggtggattgcctgagctcaggagttcgagatcagcctgggcaacatggtgaaacctcgtctctactgaaatacaaaaaattagccaggcctgatggtgtacgcctgtagttctagctactcggggggctgaggcaggagaattgcttgaactggggagacggaggtttcagtgagctgagactgcatcactgcactccagcctgggtgacagagcaagactctgtctcaaaaaaaaaaaaaaaaaaaagaagaagaagataatagatttagaagacacacaaataattgtttaaaagaatggccctaatgtgctgcagtctgaggtggaaggttagtaaggtctggacttcctcggaatatgactgagttttcagatcacgtgagacgtcttcatggaagacattgaggtagttaccacatcttctggatgtcccacagccaacagcatatcaatttgggctccttcagacattaaaagcaggaattggattagtgtagctgccggaggtttcccactgtctccactcccagtttccacgtgcatttcctctggtgctcatcaagtgtacagtgctgctgtggtgagaatttgtcaaatgagtctccagtctcagaaggtctatgtaaatggggtttcaagtcatcacagggactgaatttagtctcaagtaccataaagaaaatacttttaaagctcttctaaaaataaagctcctctgaagagatgtttggcctgtggctaatgtgtttggaaacatgttttctgtaaaactcaaccttattcatctacttgcaaatccagaaagacaactttcactacacacatcagggcttgtcccaaattttccctactcacagtggaagatgccggggtgtgaaccattggcttaaggtgcctctgcctccctttccccaaaacagtttaggaagggagggtttgggtctagtgtccagcctgggctcagctttggatgctggcaacctggacctaggcacaccagggaggctgctttctttgcccttgtcttgccacttcccatctcccatgtcataggaggagcttggaaggagctgaaggccgtcaccttcctacaaagcagagagatcctctctccaagaacggcttttgctgccctctgggtcctgctatttccatggctcctgaagaatcagcctctgatatttcaattgccccttcatcagaactgtcaaacctggtgaatctcttctctttttctctggctcactctctctaaaacacgcatcttaaacaagttttaaaatccctgaagaatggcagaaatacaaagaactcaattccaaataatattgtcatgttctgctgcatagttgaggtaatcaccgttaagtaagtgcaggtatgggtgactctctaagacaaggatgaaagtacagtggacaggtgagcccatggcccaggactcaggcactcacagcctcccacgtttcttctctatttcacaattgctgatccaaggcgggaggggtgccattcatgtgtggcattcacatgagagaggtgggcattgtgggtcctcagtgcagggcctgttgtgtcctcaatgaacccaggattgagtcccacagtggacagactttgccaacttttataaatctctctcaagacactctcctccaatattgcaccttgaactgatgtaatttcttgtagcgaaaaaattaaaatctatcctttttgaccttcatatgcaacatgcatatcaagagagttgtcttagcagcagcaattttatattgggagatttgagcatggactggctgttgggagagctttatgaggcattccatgatgtcttggctttaattttgcttttattttgatgtgacaagatgtgttggactgagatgcctttgggctctagccctggaatttacaaaaagagaatactgcagggttatggtgggggtgaggctggaagatgttacccactcacaaagcttcagcacagcaacatatgttagaagaataaactaacattggaacagtaaatacacacatacacacacacacacacacacatacacacacacacacacagagtgggagagagtgagagagagtgcaaagccagtgttaaatcctggacatccctgcagggtcctcatgcctgcctttttctcttagtcttgtgggggtggggaaactctttggtattctcctttctcacttgtaggaatataaggaggaaaggaaccagaagtaaagtgtctgggcctctctcagccatgcttttcatttccacttattatctaaagtaattcattactacttctgtgctctcttttcatcttttccttgagcctcccctgagctcccttgaaggtggcaggtgacaggctggcttgaccagaacaaagacagttatccctggctgccgcctgtttcccaatgggtgcctgccctgtcttgttacacttcctctgtgtgtctaatttacactgcaagccctctgggcagtggctttttttttcttttttaaaaaattatctgctcttctctgcttacgactgaagtttaacttctgcaccccaactcctcctcattcttaagaaaatgccaacagaaaaatattaaaatgattgctgctgtatgtaaagacagaagggtaaaaccgaggcactggaggctttgggtgggtattgatggaggtctgggagcagctggtgattgacagggagaagagctgaattagttaaggaagggtctcctgggttttgctgggagtggtggccagacacagacaaggacaaggaagaaggccaggacctctgattgcttttctcagaacagaaaagatattattatttgaacctagaggctgggcagtttcctgtcatagaaaaactgactggcctcatggccagagaaaggtaccaactactttctttggtatttatggttctcgtatccaacgtaggaagttagggctagacaacatctggaagtatctggtagaagtatctatttatttaaatcatccatccattcatctatccatccattcatccactgatccatccatccacaatgattaactgcagtgaaagagaagacatttttagaagataaatgtggtcaaatgtcctaaagttttattcgcttgcatgcaagtaaccgtgatgtgtctggaggactggagggctggaaatgaaaggagaaaagcaattatctgggcccatggatttgggaagcagatatggggatcctctcactgctgacagagccccagtaaagcatctggaagggttttaaacagaatgagggtgtaacaatgacagacgtattcttcctccttcaaaatccacaacaaaataaacaaccaccaccaaaaaaaaaaaaaaaaaaaaaaaaaaaataggagaggtcaattcaggaaactttcctagaaaagtacatgaggtagaagagaaaggatagggaggagaccaagcattctaggttgcaaggaagacctaggggatgcctgagggtggggatgaagggactgacaaacatgttccatgggccatctatgggtagggcactcggtcgtgagagtagtgatggcacctgaggcagggctacaggaatagatgaggtagggagccctgtcagggtgcagtaagcatcccatggagaaggcacgcactgtgggcctggagcttactggggaggtggaacaagcagggaagcagtccttggtgcaagcaaggatgcacattccacatcaggctgcccgcccacgaggagggcctacacttgtggctctgaatccatgtggaggcggaaacggtctggttaagatagtgacaatgtgctttgtgtttgtgcctgaagggccagggaccacgctgtggcacaatgaaggcattgagagtcagcagtccccaagactaggtgtcctaacaagatgccaagacccagagagacaagagctgagcccttgccatgaaggtgccgagagctgtggtctcagcccttggaaatatcatcaaaagaagctgttccgagcaaaatgcattccatgtgttggccttgcccatgtgtttcttgtcaatgaggccgatcttcctgggttcagaagggtttctgtttgaaattttatgagccttggctgggaagcagaacttatccctgagtttgtgggagttaatggccttttctggcggcacaactctgggggcctcagggaattcccaaatgccaggaaagaagaaacccatagcccgtatttcaactgaaaattatgctttatttataggcagccatggagaaaagactccccagaacacttctccagcgtcacctcagtgtggtgtgtctgggctcacaggcccttccttggggtgacccttacagctcatgccagcactctgtggaaaagatatgcctcactccccagtgccaaataaagacatcagcctacatccagagcagaaacagcatttgttcctgagtcttccatttttgccatttaaatagagaagtcaaactattccttgatacactcttgtccccctaatttacttcaaccaacacgtatggggcacagactgggaactggtcattttattgggcatcattatgagcacaaagggacagatatgagatgggcaatccagaaggtcttggttcaagccatttccttccattgtctatcaagttctgtcaccgggacaaatcatttcccctccctggacctctgcctcctcatttgtcaaatgaggagcttggaccaatgaatatgaattctgaagaaattcagtgtaagaggaagagtcttaaaatactagtcctaaaaggttaattgaaggagattcatggaagtgatgcaaatattggtgttttgtatgagtgacacttaactgcttcttgtctatggcaaatgatattcctggggtagctaagaaagaccctttcgctgcctggcgtggccctctgtgaaccctgctagcctgacatgtcatatcagagctccctgcagaggagttgctgttcacagcaatcatctgggccaggctcttgacctgtacccctgtcagtgctttgctgtcttggcctgacccttggccttagctgttctctgccctttggacttggggttgctattttctcttcccatcttgattctcagttttccctcaaggtcttggctgagacccacccatggactcacctttcttttttcaaactacctcagataggatttgagtgccctgtttgatcccttgtgactcaatttctgttgctggacaaagaaaaaagaaaggcaagggaattggaaactttacagtataatactctgctcagcagtaagtattgcaccagaattttagtcaaaaggagtatgtataaaataaaccatgttagatcgagctaaaatatgactcactgagaattccaactctaggtcttagatttttcctttgaggttacacatgaacaagcctaattccttctcatatgatagatcttcacatatttaagtataatgatcgagcccccagccttcggtgaccaccccctctcctgccaagtcagttcttctctaggcaaaacaagtcaatttctctagcattcctcagatattttggttttgaatccttttgccgacgtgacggctcttcctaatccagttcaactgatttctgttcctcttcctttgaggtgcctgcagcttcatgcaacactctagacaggctccagtcaacccagggaactgaaatcttttgccttaaattgatgcttcccaaagtgtgttccattcatccaagcccctgtgacatgctctggaggtcaagggtaggtggtcacttagtttcacagtcaaatatgtttgggaaatcctgcagactaatatccctcttggagatttcagaatctgtgttagagtactaaaggatctgagtagtcctgtttacctttacttcatctaatttttcccgaattattcgaccactgagccgtttgttaaagtattactcattaacctccctagtgtgccatgaagctttgggtggcactgttcaacttccatttaagccatctgaaatcatttatttttttcctctttccctccctttctccgttcttttcttccttcttctatcacactattattacatattgattttagtgtcaatcaaacctcctacatatttttcaaacctgttgctgataaatcatatgtaaagtccttcacccttcttccctttatttgggcagctgttatttgatattcatcacttatgtattaagcatgcctttatttaagcccttaataaaaatgaaacttcataaatatttgttgaataagtacaggactgaggcctataccctttggacatggtaattcaattagctattaattatcctaatcacactaatattcagcccatgtttctctatgcttgtccgtgaggctatcttgaaatgcttgtcaaatgctttgctgcaatcagattcactatgaagttagatttcataatctaccagtctagagccatcttgttgaagcaggagatgaaattaatatggtaggactttgtacttcaggttcctgcgcaggagtttagaaacacaggtgagccttgatgggagggtaggatttaaaaaatggaggggatcataaaaaggattgtgggctggttggggtaagcatgagtaacggactacaggcaagtgtaaacatgttgggaatggttaggataaatttaacaatatttatccagtgttcactattgtgaggttttatgcagggagctggcagcaagggggttggttgagatggataaatagctaataattaactttataagtaccacttaaaagataaaatgtgatgagtgttacataaaaggaaggagtaaagtaacatagaacatttgttctgcagagtcagggaaggcttcacaatacaggtggcccctgagcagctatgaagattgggcagggctctgccagagaatgatagagggcttcaggattcaaaactttgatgatggaacagatctgtgaatggaggtgtcaatggattaacatgacttccagattcatgacctctttcttggacctgggcaaagccttgtggcattttagatggagctgggtgactggcactatgaccttgggctctgcctgaacctcacgtggatcatctataacataaaggtagtagtatgacagtgggggtgaggattgcataaacagtggaagtaaatctcccacatatcaggggtgcttactgaacctccttcctctcatctctcccagcc

SEQ ID NO: 297 - DNA, 734 bp, Homo Sapiens
tatttccttaagataaatttctcaaagaagaataacatttatctagatggatatttaccaaattccacctcactccctcagaatttgatgcctctttcccaggtccttatgaacattctcaatgacagtgtttaaaagtgttggttttcccttttcttcatcaacactaggtattgccatttgttagcataaagagtataatctttgccattctgatatatagaaaaacagttacatatcactttaatttgtatttcttcaacagctagtagagcaaagtcttttattacatgtttctggtcatttgtaattgcttctggcaacaaacaaacaaaaaaccttaagcaattttttaaaagcccatgacattttattttaaaggtccattttaaagcaaaaaagtaaaattgaatcattgccataatcagattacttttaattaaagcatttcacacctagagccctcttgggaaggtatgaagtttttacttcaactaataatccattcttctgtaacctaaatggttcctatttgaacaatgaaacatgcattattcctttaggacacatgatcagtagcctcgggataaaaacaaaaccagaaatattcagtgtttggatagataaaatggcaacaacatttcttcctctgattatatctgcttcatctgcatgcagttttgcattgggcaatagatcttgtgtttcaatactgattggtatgaattccaaaa

SEQ ID NO: 298 - DNA, 1524 bp, Homo Sapiens
ggagttacactgtttgtgatatggtacatgacctggtcaatcttaggctctgaagctctccctggtggaaatttatttggattgttaattattttttatagtgccattattgggggaaaaaatttacaactcattagaatacctttagtgccgccatttccacctcttcttgggatgttactggctggttttacaattaggaatgttccattcatcaatgaacatgtccatgttcctaacgcatggtcttcaattttaagaagcattgcccttaacattattctaatacgagctgggcttggactcgatccacaggcttggaggcatttgaaggtggtttgtttcagattggctgtaggtccatgccttatggaggcaagtgcagctgctgttttttcccacttcattatgaaatttccctggcaatgggcaattctattaggttttgttttaggtgctgtctctcctgttgttgttgtcctttacatgatggtgttgcaagaaaatggatatggtgttgaggaagacattccaacctactaatggctgctagcagtatggatgacattctggctatcactggattcaatacatgcttgagcatagtcttcttctcgggtggtaagcttaataacgccatagcctctataaggaacgtatgtattagtcggctggcaggaattgttttgggattttttgtttgatattttccaagtgaagaccaaaaaaacttacattgaagagaggattccttgttttgactacgtgtgtttctgctgtcttaggcagccaacgtattggtttacatggatctggaggattatgcacattagtgttgagtttcattgcagggacaaaatggtcccaagaaaagatgaaagtccaaaagattattacaaatgtatgggatatttttcaaccacttctttttggtttagttggagcagaagtatctgtttcatcgcttgaatcaaatattgttgcatatctgttgccactctgagtttggcattatgtgttcgaattttaaccacatatctattgatgtgctttgctggttttagttttaaggagaaaatatttattgctttagcatggatgcccaaagctacagtacaggctgtgttaggtcctctggctctagaaacagcaagagtctctgcaccccacttggaaccatatgcgaaggatgtgatgtcagtagcatttttagccatctcgatcacagctccaaatggagctctacttatgggcattctggggcctaaaatgcttacacgccattatgatccaagcaaaataaaactgcaattgtcaacattagaacatcattaaaaagtttacctgtcatcatctgcctgcttcttttaatgaattatttcacatgacagaagaattttaaagtagaaatatgtagggactgtacagaaaatccaggatttagtaaacatgtgatttcagtacagggcttttcttggactttttactccaaagttaatttaataaaaataatattaaatggaa

SEQ ID NO: 299 - DNA, 12631 bp, Homo Sapiens
gctgtgttctcatttcacccaagacctttggctagatcagaacataaaaaattcatttcaaaaagtgatactgagaagatatgagaaatctagacatgagaatttacaaataagaaaaggctgtaaaagtttgaatgcatctaagttgcaggaaggaggttataatggacttaaccaatgtttgtcggttactcagagcaaaatacttcaatgtaatacatgtgtgaaagtctttaggaaattttcaaattcaaatagacttaggagaagacatactggagagaaacctttcaaatgtaaagaatgtggccaattctttcacaggttctcacacctaagacaacatgagataattcatactgaagagaaaccctaccaacatgaagaatgtggcaaagattttaagcagtcttcaggtcttactatacatgagagaattcatactaaagagagaccctacaagtgtgaagaatgtgacaaagcctttaaacaatcttcaaaactgaataaacataagaaaatttatactggagatacaacctacaaatgtgaagaatgtggcaaagccttttcctattcctcaaccgttactcaacataacatagttcatactgaagacaaaccctacaaatgtgaagactgtggcaaagctttgaagtagtcttcaaacctgactatgcgtaagattattcatatgggagagaaaccctacaaatgtgatgaatgtggcaaagcctttagaatatcctcaaaactgaaagaacataaaagaattcatacttgagagaaaccctataaatatgaagaatgtggcaaagctttttactgttcctcaggccttactcaacataacatagttcatactggagacaaaccctacaaatataaagattgtggcaaaatttttaagtggttttcagaccttactatacatcagagaattcatagtggagagaaaccctagaaatgtgaagaatgtggcaaagcctttaaacaatcctcaaaactgaatgaacatatgagaactcatactggagagaaatcctacaaatgcgaagaatgtagcaaagcttttaagcaaccttcaggccttactctacataagagaattcatactggagagaacccttacaaattcgaagaatgtggtaaagccttttattggttgttaagctttactaaacataattgataggggagagaaaccctacaaatgtcaagaatgtggcaaagcttttaagtggtcttcaaaccttactatacacaagagaattcatacgggagagaaaccctgcaaatgtgaagaatgtggcaaagcttgtaagcagtctttgggccttactatacaaaagagaattcataatgaagagaaaccctacaaatgtgaagaatgtgataaagccttttactggtccttaagctttactaaacgtaagatagttcatactggagagaagcactacaaatgtcaagaatacgtcaaagcttttaagcgtcttcaaaccttactatacataagagaattcatactggagagaaaccctacaattgtgaaaaatgtggcaaagccttttactgttcctcacaccttattcaacataacatagttcatactgaagagaaacactacaaatgtcaagaatgtggcaaagcttttaagaagtctttagaccttaatgtacataagataattcatagtggagagaaaccctacagatatgaagaatgtggcagtctttaaacaatcctcaaacctgaatgaacgtaagataactcatagtggagaggaatcctacaaatgtgaagaatgtggcaaaggctttaaacaatcctcaaacctgaatgaacataagataactcatagtggagaggaatcttacaaatgtgaagaatgtggcaaaggcttttactgttcctcaagccttactaagcataagatagttcatactgaagagaaaccatacaaatgtgaagaatgtggcaaagcttttaagtggtcctctgaacttactatacatcagagaattcatactgaagagaaaccctgtaaatgtgaagaatgtatcagagtctttaaacactcctcaaaaccgaatgaacataagagaaatcatactggagagaaaccctacaaatgtgaagcatgcggcaaagctttttaagcagtcttcaggccttactatacataagagaattcatactggagaggaatccagaaatgtgaagaatgttgcaaaaccttttactggtctttaagctttactaaacataagagagttcatattggagagataccctacaaatgtcaagaatgtggcaaaactttttcttgttcctcaagtttactcaacataagagagttcatactgaagagaaatcccacaaatgtaaagaatgtgggaaagcctttaaccagtccttaagccttactaaacttatgagaattcatactggaaaaaaatcatacaaattggaagactgtggcaaaatcttttaagtattgctcaaatatatccagccataattcatactaaagattatgcctatgaacctaaggaagtttggcaaagcttatgaatacacctcaaactttcctaagccttggagaaatatcagtgagaaacctcagaaaactgaacaatgtggcaagccctttaaatggttgtcacatcttactgtaggtaaaataattgatagtggagaaaatctctacaaacaaagaatgtgtcaaaacttctaacatgctcatactttatggcacataaaagcgtttatacttgaaaaattatacagagtgtggaaaagccatttctatctgctcacatcatagtcaacatcaggaagttcatacttaataaaattattataaatgtaattactgttcaaagaccttggaaaatataaacccttaaaataaaaaagagtattctggagacaaacattacaaatataaagagggttgtaatacctttacttgccctatataatgtacagattttacactagaagaaaactctaaaggaattactcaaacttgtttggcatcagagaatttatgttgaaggaaaccgtacaaatgtaataagtgtggaaaaacatttgttcagaaactacagcttacaaaacaccacacagtttataataaaaaatatttttgcagatggaatacatatgtaaaaatatttagtcaaaattaagtctttgtaaactttagaaaattcacggtagggagaactaaggcactggcacttaagacgttacactaaatcagaatgttctgtaaagaaagtaatccaaagctaaaactgttggataatttatttgtatataagtttaagaggagtggaaggttattttttggagagttaaaattacattcaaggtatacgtttttccttgaaaaaagtgtaagttttttgaaaagcaagtaggtaattcaactgtaaaattgcttcatgctgttccttttttcctgttgtttgtgtaaaagcatgtcatcaatttctgttgcatcagaaatctgagagattcctttcttattaggtaggcatcattcattaatttttccatggaagagtaaggatattaaaatgtaagatgataatgaaaatctgattggagaggctctttatggctgacttttaacattgttcatgtgatgcatgagttatgtgtttagagtaatattctgcattatagtgagaggaaaactttgagttttagtagtaaattgttttaccaattgtacttttatgtaataaaatgtagggaattttaaaattcttttataagactgtgataacttaacttttaaattaaacgaaatggttttaaactttttaagacgtgcatttagtaaagtgttatgtcaccaactttaacgtatcccactgtattaaagatgtagataaaagatggtaacatagtagaatgacctctctagcaatctcttttgcctgtggcattaaactgaaaagtttaacagtattgtttcaatgggtaaaatgtacatttgtttaactttttaaatttttgtaggaacataatattgtttacctatttatggcatatatagaatattttcatacaggcatacaatttgtaatcacatcagagtaaatgaggtattcattacctaatgcattttttttgtattacagacaatccatttaaacatttttagttatctaaaaatgtacaagtaaattattacttgctacagaggttttttatcgtcttgataataattacatagtagtataataaatctcacatttctaagtcctgaatgaatatttttaaaaatttgtcatatatattttgaacaagtggactctctgcctgtaaactcatgcagactgttagtttttacttacatgatgctaaatatacaaatatattactcttaagataaacattaggtgtaagaaaattgtggggcaagtaattgtgtgtgagagtacctattttcagaagacaagcaatattggaacaaaatatcactttaataaagtggacaaatcatttactagaaaaccagaaacctcagtgattttgaataatatctgtattctctgcattttatttaattaattactgtgaagtcttatggactgtgtttccgaatctttccatgcaaattctttctttcatttgcctggtactcatggtagactgattttttttttcatattttttgtgtttataatttattaagtattcattatgtgagttgctcagatattctaagaatttttataaaatttagtaatgcatgcaaaataatttttcaatgttatttcacaatgagtgtattaacttatatttcttttgttgctttcttttttcttttttttttttttgagatggtgtcttgctctgtcacccaggctagagtgcaatggtgggatctcagctcactacaccctccacctgctgggttcaagcaattctctagcctcagcctcctaagtagctgggactacaggcatgtgccaccatgcccagctaatgtttttgtatttttagtagagactgtgtttcactatactggccagagtggccttgaactcctgacctcgtggtccacacacctcatcctcccaaggtgctgggattacaggcgtgagccactgcatctgaccaacttatatttcatttagttagaacatcccattttgttattttaattggagaaacctgtgtaagctaagtttccttattgttccttttactctttataattgacataggtgaatttattcattcagccaatttgtttaagtaaatactggggaggcttcataagtcacaaagatattttgatatgtaaatgtagcaaacacaatgcttgctgtaatagaggcaccattattggccataaatatttctgctggagttagtttgtagctccaagtaaagataaagaaatatgcgtggtgaagaaataaaatcgattctgtatgtggagaggacgttgttcttatgctgcaaaactgactctttctgaatttaaagagacattcttcttattttctgattatctttagttttgtttttgtgtctacttatgtttatcccaactgtgtatgcatcacagcccttctttttcttctttgtgttatggctacatttttattgctgtttgttttgtgccatgtcatttcacacagtactttgtaggttctgatgagaagtttgtcaatgtaactttcagatccgttaattgagataaaaggcatccggtgttcacaggtgagaggaataaatcagtcagaatttcttgtctttgtaaaaccaaacttttattaaattttaacacagtctgtgtgtggtggctcacgcctgtaatcccagcactttgggaggctgaggtgggagaatcactaagtcaagagattgagaccttcctggccaatatggtgaaaccccatctctactaaaaatacaaaaattagctgggcatggtggcatgcacctgttgacctagccattcaggaggctgaggcaggagaatcgcttgaacccaggaggcagaggttgcagtgagctgagatcgcaccactgcattccagcctgatgacagagcgagacttcatctcaaaaaaaaacaaaattaacacaatgtgtggaaaatataaaattagttagaagatatgtcttagaaattaaacttttagaagagttaatggtaagtggagaatgttaaattttttattacatacttacagctcaacttaagttttcattcagaatcttttattttggtgtgaatgttaaatattcaaaaataatagaatgacacctgtggatttcacatgtgaagtaatctttttcatattaacattaaaatcttgaggaatttctcacacttgtataatgtacttttttattgggtgcagtttacaatttagaggtttcattctttgtcacctaactagtcaactccttggtcattttatctggaaaaattttaaggatcatgtcatcttttgagttaaaaaatttcttcagtgatctgggatgcaaacttatttactctcttcagagtggtttaatcatgtgaaccacagcaacacctgccctttttgtgtcttccctatcattaccaccagcaccagaaactccaggtgtcccaagctcaaagtaaaaggcctaaggtacgttggcttctcccatattctgtgctgggtcccaaaaacatggtggtaaatattagagttcatatggtcatgactgactaggtgaaaaaacagcacaaaaactatgtatctttcatactattcagacaggtttatgacaaaaacacagagtcagaatttgaacctttgtcatttttaatagtttttataaatatatttttaaattcactgataaaatatgtatttattttgtaaaatagtattttgaagtaaatatacattgtcaatgcctaattttaggtaattgtcaagtgctttgcctcacatagttactttttggtgcgaagacaacatttactgtcttagcattttttcagaaacacaatacatgcattataatctcttgaacttatttttcttatccaactgtaattatgtaatcaatatatgttttgtagaatccacatgtgagtgaaatcatgagatattaacctttctgtgccttatttcaacaactatagtgtcctttaggcttatctttgtgattaaaaataagattttttgtttaaaatatagtattccattgtatatatacaccatagtgtgtgtatttcctcattggacgatggacacatacgttgattctatattttggcttctgtaaagtgtgctgcaacaaacagaattgcagatgtctgttcatcaatctagtttcatttgttttgtgatagatatccagtagttcaattacatgttagattttaattgttttgcaaaatttctatttttcataatggctgtttttatttacattgacacaaacagtgtgaaagctttcctctttctcttttttcaagtttaccaacaattttttttaaacattctaacaggagtgagtttatatcttagagttgttttggtttgcctttccttgatgataattgactgagccatattcatctatctgccaagctataagtatgtctttctttgaaaattatttatatagatcttttgcttatttttaatggttatttgttttttgttttatagtcctttgagtttcttatgtatttttgatattaactgcttttcacatgtataatttgcaaatattttcttccatttttcagttatgtcattctgctgattgtatctgttggtgtgcagcagcttcttaattttaagaaatctggtttgtctatttccccctaaaattttgaggttaaacccaagagtcactgcccagaccaatgttatggggcattcattctatatttcctcatcttagttttagattttcaggtctcacatttaagtatctaatttgagttaatttttatatatggtgtgagatgaaggtctgattttattattttgcatgtggatatatattttctcaacatcgtttataaaagactttttttttaaattgtcatctttatttacaatcagttgtctgtaaatacatgaatttatttctggtctttctcttttgctctattggcctatgtgtccatttttatgcaagtaacactctgttttgattactgtagctttgttggacatttaaaagtcagagtgattccttcagccttttatttttcattttttgcttgattttcttagctattcaaggtcttttgtggggcaatatacattttagattttttaaaaacacttctatggagaatttaactggattttaatagaagttttattatatctgtatatcagtttgtgtaatgcagttatttaacaatattaatcgtgcccatttatgaattagaaatatctttttgtttgaatattatttattttctaaattcttttttttttagattataatgtaccgatcgttcacctttttggttacattcatttctaagtatagttactgctgcaattattgtagataggattgttttttggttttattttcagatactttattgttagtatatagaaatattacggaatttttttatgttgattttggatcctgcaagtttaataaatttgtatattctaataattttttgtgaggtcctaggtttttctatacttaagattatatcatctgcaaggaaactataatttatcttcttcattttatttaagattgctttgattttattgaatattttttctgtcttggtcattttgtattatgttcagtaagatcgaagaaattgggccaggcgtggcggctcacacctgtaatcccagcactgtgggaggcggaggtggggggatcacgaggtcaggagatcaagaccattctggctaacaaggtgaaaccccgtctctactaaaaatacaaaaattaggcaggcgtggtggcacgcacctgtagtcccagctactcaggaggctgaggcagaagaatggtgtgaaactgggaggcagagcttgcagtgagccaagattgcaccactgcactccagcctaggcaacagagcaagactccatctcaaaaaaaaaaaaaaaaaaaaagattggagaaattggacatccttgtcttgttctagctcttagagaaaaggcttacagtttttccttatttagtatgttgttaggtgtgcattgttgttaatgacattaccttgaattgcatttattttataactagttcaagagatttattatgaggagatattgaattttgttacactttcattatgcatctatttgaatgttacagttgtgacagccaatcccacaaaaatacaaaagatgcttgcagactactataaatatctgtgtgcacaccaactagaaaatctagaggaaatgaataaactcttagaaacatacaacctcccaagattgaatcaggaataaacagaagtcttcaagaaaccaaaaatgtgtaagtaaattgaattggtgataaaaaaaatctaccaattataaaaagtactaaaccagatgcattcatagcatgattttatcacatatacaaaaatgagttggctgtaattctacagaaattattccaaaaaatcaaagtgggactccatcctaattaattctatcatataatatcactgtcatcttgatatattaacctagtaaagacacaacaaaaaaaattacaggccaatgtccctgatgaatacagacccaaaaattattcatgaaatgcttgcaaactgagtcaggaaatcaaagttatttcactgcaactatgtggacattattctgtgaatgcaggaatgttttaacgtgcaatctataaatgcgattcaacatataaaaataattaaaaaacaaaaccacattatctcaatagatgtggaaatagcaattaataaaatgtaatatctatttatgaaaaaaattctcaaaaaactaggcattgaaggaacatacctcaaaataataacagccatataagacaaatcctcagccaacatcatactgaacaggtgaaagattaatgcatctttcctaaaaattgaaataagaaaagaatgtgcactttcaccactcctattcaacatagttctgaaggttttagccagaacaatcaggcaagataaagaaagaaaaacactcaaataagaaaagaggaagtcaacttatctgtctttactgatgatataactgtctacctacttcaaagactcctccaaaagactcttaagcctaataaaagacttctgcaaaatctcagggcaacaacaacaaaaagcaaaacaacattcaaaaatgaggaacatttctatacaccagtaacacttaaacagagcaaaattaagaacacaatctagtttacaatagccagaaacaaaaaataaaatagtgatccattaaacaaaggaggttaaatatctctactagaagaactacaaaccactactgaaagaaatcagacacagtgcaagtaagtggaatagtatttcatgctaatggattagaattattaaaaagttcatactgcccaaaacaatcaacagtttatttctatttctatcactctaccaatgccatttttaaataaaattagtcaaaaaactattctaaaatttatatgaaaacaaaaaagctcaaatagccaaggctatactaaacaaaaagaataaacctggtgacattatgttaccaaacttcaaactttaccacaagctacggtaaccaatataatatggatgcagatacacacacacacacacacacacacacacacacacacacacacacacacccttacggaacagaagagagcactgaaatgaagctgaactcttaaaattaattgatttttgacagcatcaacaaaaacaaatggaaagaactccctacccaaaaaaaggtgctggaaaaactggttagtcatatgcagaagaggaaatcgcaacacctacttctcatgatacagaaaattaaatcaagatacattaaagacttatctgtaagtgttcaacctataaaagtcctagaagaacacctagaaaattctctccttggcgttggtctctgtaaagaattaatgactacatcctcaaaagtgaaagcaacaaaaataaaaattaaaaattgtgacctgtacagcaagagaaactattaacaaaataaacagacaacgtacagtatgggctaaaatacgtgtaaactgcatacaataaataactaatatatacattttataaggaatttaagaaaaaatgttgacaaaaatgtgaacatatacttttaaaagaaagacaaaaaaagcagccaacaaacatatgaaaaattgatcaacatttctaatgattagagagatgtaaatccaaaccacaatgtgataccatctcaccccagtctaaatggctattattaaaaagtaaaaaaaaaaaagttaaaattatgtagaaaagagaaccctgatatactcttagtgggaatgcaagttagttcacctcctgtagaatgcattttggggatttctcaaaggactaaaactaaagttaccatttgacccagcagcttcagtactgggcatatacctcaatacaatacaaataaattattctaccaaaaatacacctgcactcgtatgtttattgcagcactagtcacaatagtaaagacatggaatgaaaccatgtgctcataaatcttaagatggattttaaaaattaggtaattacacaccatccaatactatgcagccactgaagaagaatcatgtaatactctttgcagcaacatggatgcagctcaaggtcatgatcctaagcaaattaacacagaacagaaaaccaaatactacattttctcacttataagtggaagctaaacattgggtacacatggaagcaaagatgagaaaaataaacactaaggattcgaaaatggagggagaaggggtacaagggttaaaaagtacttgtcatgtataatgtacactacttgggcaatgggattattaattgcctaaacctcaacgtcatgcagtatacctatgttacaaatctgcacgtgtatccttgaatccaaaatacaaataataaaatactttgtgatataatgccatgttagatttctccagttttggttaatggttggaattaagggtggaagacatagaattttgtcccctttagacataggggtgaatgtttctataacaggtctcctgacatcctataagctattttctctgaaagctctcggccttagttttgagtgtgcagctaaaataaatgactgtacatcaagcttgtccaactcatggcctacgctccatgtggcccaatatggctttcagtgcagccctaaacaaatcagaaactttctaaaagcattatgagttttttgtgattttttaaatcatcattggtgtattttatgtatggctcaagacaactcttctagtgtgtcccagggaagccaaaagattggacaccccagctctacatctttatttttcatctatttacagtgcactaggtgatagtgtttatttattactctactcctttgggaaaaaaagatggtca

SEQ ID NO: 300 - DNA, 3483 bp, Homo Sapiens
cagaggctagagctcaggctcaagcaggccaagaaggagttaacctccaaggagaatgcgggcttctcccagactggaggtctgtgcccagttttgctggtgccaactccgggaagaagtcctgggatctgtagtttgtgccaccacccacccctggcctgcctgtttatcaacacggtcttgtagactacagttcccagaaacctgcagaggctaggctttgggggaaggggtggggaaggaggctccgtggcggccagagggagagggagagggaggaggtggggagagaaaacccaattcacccccttcgtttttaattctttctcctggtgtgtctgctccaccgcccgagctaatcccccaaatccggtctcctaagccgcagctgcttcccttcgcagtgatgaatggctcagggagggaagatctctggtgagtgttcccccagcctggcgtagggcatgccccagttcactttcgcctgcttctgtggtctccacggcttctgcaaaatgaagaggaagaaggaggaagttcacagagagcgggagacggcggtgtgatcagaaccagggcccctccatcaagcccccagcaggtcccaggcctgatggtgcctgcttctggctggggcttggagcaggaagccgtgtgtgtatcttaagtcttgatttagccagtgctcttctcagcctgactctcacccgagggcatcagcctcctgtgtgcctctcatcctcctcatgcccacacccattagcttccaattctcagacctccttggagagaggccccagccacacaagggggaaccccaggacctgccgcatgccttccagagactgagaagccccagggaggccaaggagtgaaacttctttcctgccctgagagcttcgggggactcttctcagggtaaccgcatgaggcatgtgccgccttgggctaggagagctgttgctaaatgggaaactggctgctctagcagagaacttccagcagccctgaccctggagaaggcctccagggcggaagtgtgagactctcctgggattccaggacctggggcaagaatccttttccagccccctgccagcatcctcctgggccaggtggggccaggcctgaggtggccagcccagtgaggaggaaggcagaggtggccagtggctccgtggctccctctgttcttgctctccagaaagcagtgtttcctccagccccggccctgacccacccgtgttcatgatgcctgtgcctccttgccagcatcacagatgtggggaggcctgttccccaggccctgactcccctcctcagggactgtcttgccgtggccagactgagggacccctttcctggactgagccgtgccctcccttgattctcctgtctcccctgcctttttcttctctcctcagaagccatagaggggactgcgttcatatgtggtgccttcagtggaaactcttagggtggggggacctctaggaccttcctcgactttttccctcatcccccacccccgccaaccttccagcttcagcctctgcccttacccccagcccatttccaggaggtaggaagcaaaagaaaaaagcatttccttccctctttccttcttccttccttcctctctcccttcattttggtataacttagccttttgtctttaatcctggagttctccggggctagaagacaggcagagacgaatgccagcagcagagatgcttcaggcagattctgtaagcctgttctccctcatcagggagcagctcagccaaggagcaaagtcagaccccctctagctccccagggacagaatagcccttctgacaggtaaacaggtgacctgggtagagagggcaaggccccaagataggagagtcagggctcccctttccttggaatgtgggcctctctgggcaactagggagggcaaaagtcttcctcggctggttcgcccaaaacctgggagaagcaagggcacattctatgctggcagcctctgcctgcccagctcatgcccacactcaggggcctttcctgggctttgggcagattgggtgggattcaggttgtctttatgaggcttgagcacagcttgagttcctcctcccatcctccaaccccttcctttgcccctacctcctagcccccaccttctacaatctgttatttccttttatatccaaagaattataaacagaagtccttccctcaagggaacagcaagattcagcaataaaggccagtggggtcacaaaggacagaagaaaaactccctggttctttgtcctcttggatagtagaggccttgggtgaggcaaagagatgggcagaaaaagttaccttgatacagaggccagagagcctcctggagggcatgtgtttccctagcggtcacctgcgaggctgcaatcctagaaaagtcacttctgtggcagaggatgaaattgtatccccggagactcagagatattgggtgttatgtcctgaccacacaggctcaccaggaggaaaggttaggaaagtggagaaagtacgtcctggggagcgggtggccgaggagagctttccccttgtgcgcctctcaggccttggcagggattgcagctgcaggggtttggcagtgagcccatccagagagcttcctcccccgggagaactcccttggctccagagggatactagatatcttgagccctggctttgggaacatgggtggggtcccaaggtcaaagtgttctgagtggaggtccagttgtcctctgcctccaagccggcagccccttcttcacccagggctgaggttggggccagcactgcagctggaattgtctgagcaggaggtagcagcttctagccaggcacaccccaaccccacattctattgtccctcagtttccttctcaggaaaatggggactttgctccttttagcatctcaggaagcagtctggacacctgtgccctcctctaggcccttggatgagcccagggaatagggaaaggccaaagcagccccagcattcgcagaccctgcgccctgggcctctgacttcgggccaggcttctgctccttctagggttggcctggctgccctgccttcccatcctctctccatggttctctcccagagactccaccttgaggtgggggccctgagctcttggggtgagggaggggcacatgggtagatgattctgtggaggagatcaggcctcttgttcttgctgcgtggcactgattcctccttgcagatgggtgagggggccagttttccccatctgtaaagcgaggacttcccatggccattttccctcttgggcttcaggctgctgaatggaagatcaagaagtgtgaagggtgcttggggtccttgtgacttgagtgttgcctaggaccctggcccacaggacccaaggggcttcttgtctcaggttgaaacctttttatcagaatgtcatttccttc

SEQ ID NO: 301 - DNA, 6111 bp, Homo Sapiens
agtgaagaagggaatgagggacggaaagagagagacagcgaagagaggagaaaggtgagtgcattctggaaatcaccggcagctccgctccgcagaaaggccttggcctgtgccatctgagggtgaagttacgtggttatcaaattccccttccctggagcccctggcaagaagttgatgccagaaacagacggagggggtgcgaggagggagggaatcagaccttttgtttctctttttccccctaggacctggtctcatgcttctccccctcatctctcccagggcacccctccgacccccgctgcgaggggtttcccgcgggaggtggacgaagcgtgggccaggacaggcgcctggcactggggtttcagagccgcgagtaggccctgaaggccgggagggaccgccagtccccactggaagccgcttccgtgcagcccgggacagcatctctgaggttggggtgcatcttaacatcattgtccacaaactgtcctgtgctgtcattttccctgtgtctgaacaaacttggtagttacacccgtgacttgattgggtgacctcaacctttgatgtttcagtcaatgaaccattcaggcatcattgagatcattttcatcttgcttattttcctgaacatctttctgtgaaaatcaaacaagtccaaggatcaaactcccaggtgtcaacagcttggaagggttccacacacttttaagaaattttctggccaggcacggtggctcatgccaggaatctcaacactttgggaggctgaggtgggcagatagcttgacgccagaaattcaagaccagcctgggcaacatggcaaaagcctgtctctgtggaaaatacaaaaattagccaggcgtggtggtgtgcgcctgtaatcccagctactcaggaggctgaggcaggagaatcgctggaacctgggaggcagagcctgcagtgagctgagatcgcgccaccgtactccagaccgagcgacagagcaagactcggtctcaagaaaagaaaaaaaaaaaatgcaactgaaggaaacctagtgtgcagaaatgttttgaagaaaacttcaaaaaaaaattctattagtcttaaagatatgagaagatattacatccattaaagaagaataatttaccataaaaaattcaaacaatgaaaagggctcttaaaaatttaaaacatggctgggcacagtggctcacacctgtaatcccagcacttcgggaggccgaggcaggcagatgacctcaggtcaggaatttgagaccaggctggccaacagggtgagaccccatctctactaaaaatacaaaaaattagctgggcatggtggtgtgagcctgtaatctcagctacttgggaggctgaggcaggagaattgcttgaacccagtaggcggaggttgcagtgagccgagaaaagaaaaagaaaaaagaaatttgtgagagctgagcataagccacactaaatgcacacacaggaaatattaatacgtattagttatgttttgagggcatatgttcacaaatacaaaacctctggggaggctgaggcgggtggatcatgaggtctggagttcaagactagcctggccaacacagtgaaaccccctctctactaaaaatacaaaaattagctgggcgtggtggcaggtacctgtagtcccagctactcgggaggctgaggtgggagaattgcttgaactcgggaggcagaggttacagtgagccaagattgtgccaccacgctccagcctgggtgacagagcaagactctgccttttctttctcaaaaatccctggagtctgcctttgcttcagaaattagtttatccagctatacttgatggaaaacccagtgtttcagtagcagaaagagctttgtggtgtaagccattctagaataagtagacaggctaggggtctcttccgtgggatgccagttagctgtgtcccaaagacagacctcaaagactccatcccagggacacaatgcctctcccgaagctaggactctggaatcaggacacaggttgctctctctggacatatttctctaagtaaacaagttgctcttccttagagtagctgttgtgttgctgtattcccatcacattcccaggggtgtgaaatagtagactctccagtctactagagatggggccattttctcagcaacacttgcttgttatatcctgttaaaaaatcttaacgtagaaaaatgggcaaaacataaatgtataactccatgaacaactgcaaagtgaaaacatatatagtcaatatacatattttaaaaaataaaacattgtgggcgggcacggtggctcacatctgtaatcccagcactttgggaggccgaggcaggcggatcacctaaggtcggaagttcgagaccagcctgcccaacatggagaaaccctaactctactaaaaatacaaaattagccggcatggtggcacatgcctgtaatcccagctactcgggaggctgaggcaggagaatcgcttgaacccgggaggcagaggttgcggtgagcgaagatcacaccattgcactccagcctgggaaacaagagcgaaactccatctcaaaaaaaaacattgccaacacaccaaaagccccaaacagtatctgctatcattgctatcattacttaaacactgtggtataatttttccaattattgaattttgattttttagtatattcacaagattttgcagccgtcactataatttagagtatttttgtcctctgtcaaagaacccccccatacccattcgctgccacttcatactccccacattctgtccccaccctaaagacctactttttgtctccatagatttaccttttctggacactttatataaatgcaatgagtcttttgtgactagcttctttaacagcataatgcttcaaggttcatccatgttatcgaaagtatggatatgtcatatctttttattgccaaataacagtccattgtgtggctgtaccaatattttatgtattcattcctcagctgagagacatttggctggttttcactttctcgctattaacaataatgcagctctgaacatttgtgtacaataaaaataaatagcatcctacaattaatatggaaacagcagaaatttatttctcataattctggaggctgagaagttccatatcaaggatctgatagattcaatgtctggtgaggaaatgcttcataaatggttcataaatggtgctttcttgctgtgtcttcatggtggaaggggtaaggtcttcctggggcctcatttgtttacgtatgtattcatttatatttttggagacccagcctgcatctggtttccccttcttccttgaatgtaaaccctagaaagctgggctttcttttgagagcttgggagatttttgtctcaactcaaagagactagaggatgacccatctattttttcattagttttaaactcagcttttttacttcctgtagagtttcagaatttggcaaaagtctcaaggctcaagctggttgtctgaagcctttcaaacccccagttttatcaccacatatgagaggtcccagcaccaaccgcaccagccacaggactcctcttctcggtggtacaaccagcagcttccaggcccagccacatatccagagcttggggatcaggtatagagagccaatcccctgggaacccatgcattagtcccagggggcctctcctccaagcgcctacattctggaaaagcctcaagtttctacagtcatgatacctgggaaactcagtgctcccttttggatttttcttagcccttcaacacctatgtaaatctgcatgaaatttccactgtttgaatagagtgtcattccctgctgagccctaactgatacgctgtgtttccagtgtccctcatccactagactcagtggtgtcaggaatggtgtggtattttgttataaatttaactccttagatggacacacagagagcctcgataaatatttttaatccatcaatgcaaggagtgtggttgtcagaagtcagctaaaagtccaagtttaaatctaagctccgccgttcacagcttgggtgacctcagcttcttttttggaaatgaagttcatattttccgagcactttttctgtgccaggtgcttccaaatgtatctcgtttaatcctcacaacatacctcagaggaagacatcatttttacaagtaaggaaatagaggctcagagagatgaagtggttgacccgggctgtctatcttgtaaatggtgggctgtgattcccacacgactggagtttctggagtcagaggctgcctggagtcaggggctgcctgactccagaaaccattttctgtgcatttcatgtagctccacctcaattgccttcctttcctcatctgcagactgattaaataaaatgtataatttggatgaaatttgataaataattctgaatgcattcttttttagaataaattatctgcagttcagtactttattcttactaataaattccaagcaacactcctactcacgggcctggcccttcccatgcattttcttttcttgctttttttttttttttttgagatggagtctcgctctgtcacccatactgaagtgcagtggggccatctcggctcactgcaagctctgcctcccaggttcaaacaattctcctgcctcagcctcccgtgtagctgggattacagggatgtactaccatgtccggctaatttttgtatttttattagagacagggtttcaccatgttggccaggctggtctcgaactcctgacctcaagtgatctgtgcacctcagcctcccaaagtgctgggattacaggcatgagccaccgcgcccagcccccatacgttttctcgctggccatgctgtgcaccgtctactaagttgccatggctgcctggccatctgacttgtcaccctctcatccctgacctgaccccagtgtgtctgcttttgcagggccaaggggtcagattcttctgcagaggacagccctgtgaggtccaggttacggactcctgctcaagcacatgtaggatgccagcctgatggtgtctgggtccttcagtagtattcatggcagcctgctgaactctgccttccaagatccagtttatattttagggccccaatgtaaatgttgcaaagtctttcccatttcccctgcctcagaacagcagcatggaaagcctagaatggaaaaagagaatgagcccaaacccagcagctcaggccaggaggcatgcctgttccacatcactccacgtggctttgtgtttgttgcctccacatctgttccaacccagctaggctggtgcagaaggagcccagggggtcctgcttatcactgaattcctttactgatgcattgttttaaagagaaaaaatccccatgaaaggtccaccacaggaactggggacctctcaatgatcccaataggtaaggaagactcatttgcagtgagctccaggggacctttctacaactcacagtgaccagtgggaataggacacacaaggtgatgccaagcctggcacaacagctgagtaccttgactcgtcccaaatcccagagtaaatgtagggcacctgaggcagctgccaagggacagatgtccttcagagcagttctggacaaggccctcatttatttctctctgtcacctgcccctctctctctttaaaaacctaggcattttgtcttcttttcctcatttttgtcctacacaggaacatgagagccacctggtggaaggttttattagcatggaggacgagggagagtttggcagcttggcagagctgcaggttgtggagaagcagctgagacaacagccctgagagaggagatctgtgcttccctggagcacagggcaggttgacacatcagctgcggaacagtatctggaccagaagcctttgctcactgtgagagacaggccgggtcacttacttgctcaccgcacatgggggctgagtggtggctgttacagatccatggaggccagtggttgaggctctgaaggggacatggctgtcgctgtgggag

SEQ ID NO: 302 - DNA, 4912 bp, Homo Sapiens
tagttttattaattctcgctggcccccatctgtgctttcgactggattcagaactcagtttatcttccaggctccctgtctttgggtcttgatcaccacagaggggaaggggagaatccagagataaaatgtgagactgaaactgttttaaagaagcatacaagaaagaagcacacactttattagggagatgttgatgagatgcttacaacccgcccgccaccccccagccccagctaggccatctggcaggtaccgcccgtgcgccaggcatcgttttcaaattgcaagaccgaaatccaatcaaccgaaataatttcttaggaagataagcttgcaacacgtgcaataatgaaaaaatttaactagcattaaaaatattcaggaatgtcgagcaattaccacctggccgcagtcacaggacagaagacggaataaatgggcacgcaccaaaggtttatattaaagtgtaagtttcagcccctcagtatatttaagggaggctgctctgcagaggaaacctctgccttctcggcgagggagtttccgagctaccttaactggggcgcaacgcagccttccgccaccagaggcagcgggcgtctgcggcctgtcaaaaactggcgcttttttcctcccctttccgtggagagactatcaactccatctgtcacaaaaattaaggctaaatctcctctccagaagcagagggagccggggctccgacgcgctcagcgtcgggctgtctgcctctccctagaggccaagtgaatttgaaatggcaaaagtcacagccggaggcccagcactaggagattcctccggctgcgggaaatcttcctgtacctgctgaagctgctgcgttcctcagaggcgcttggtctgccgtgggaagctgcacctctgcagtccccaaaaccaaaatcaaaccttaaaagagccagactgaggtaaggcggaccgtcttgctctgatttgagtattggtagacaaacagcaatataaatcgatactaaaaaaatccagaaaggctgcaacttcatggcacatcaaaacaaccatatccctggctctctgtctctttttttttctctattatttggagttgtcctctcagtccggcctggaggacttggacaactcagacaccttctctgtgtctgggatccctccacagaagccagtcaccacgtaagacatctggaccaccttcagactcgcatgctgtgaggaagcccatgcttactatgtgtagaggatacatggagaaggaaagagatgcctggccagctccctgctgtttcagccatgtgagtgaagaaggcaccagacttgtgagtggagacactaacttggatgtccagcccagctgaaccttcaggcagaggtgctgagcagctaattggaggggatagtatgagcctccaaagattagggaagaaaattgcagttgaagaaaacttgctttggttcaatgcaaaaataatgggatgaatggcatgctgaaatatcatatgacttacgaaaatgatgaatgtgattcccaaactcaataagaggagaaatgatgacaagaagcaaaggccgtctacagccctcacgttaggtttattgaatctacatatgtggaacccatgaatgggagtcggagaagggggcaactgtatacgcaaaaagctatcataattgccaaaatagtgataacaatgttgaaacactactgggattactactgttaatgactaccagtgatcaagcacctcccctgccccagtgtttgcctgccttgtttgaagacacgaaaaaatgtacacaaaatgatttagaactgttgaacttttcagaaaataatttaaaatcatctacctcataactaaaggtgaaggaaatgaagtagaaggatgttacataccttgttcaaagtgacatagctgagtctgcttggactgtggttcaagccatgcagcctaactctagaacccatgctttgctacctgactttccagacgtaggaggcaaataccataatcagctccttgtttagaggtgtaggaattgaggcccagaaaaaataagtaacttgtccaaaatatgtagtgaaattggtacttgaacttttgtctgtctttcaactacactaccacctctaaatgctcaaattcagatcattttagatttaaggactagaaatagccttggagatcatgttattaaataattactcattttacagataatctgtaatcactaaaatcatttacctaaagcagtcaggaacaggttctatacagcaaagcaacttaacatacaaaggaaaattattgtttgaaatattatttctattttttttttttttgagatggagtttcgcttttgtcacccaggctagagtgcagtgatacgatctcagctcactgcaacctccgcctcccaggttcaagcgatactcctgcctcagcctcccgagcagctgggattacaggtgcccaccaccatgcccagctaatttttgtatttttggtagagagggactttgaccatgttggccaggctggcctcgaactcctgacctcaggtgatccacctgcctcagcctcctaaagggctgcgattataggcatgagtcatcacacccggctgaaatattacttctatttaatatttaagaaaacaaaatgaggaattcaattcttgatggcaacacagctcttgctagtaacttaaatgcctcattgtttctctgcaacaagaggaaaacttgggaaaggattctgtaggcactgagaccatcataaggaattgcaggacccagagattttcatgaaagtgaaattgctcataggaaatcaaagcaaatggccttaagagtggcatccagtggaccgtcctctgaaaagtgacccacaattctgcatgaatctttccaggacactgaattggagccagctgatgtaaggagcttaccttggttgccaccttctggtctctgtttgaggaacaactgcatgtgattaagggtaacagatacagaatttgtgttaagcccaggatgtaatttgttgaatgagtagcaattgacttgaaaattggatggatggggattgtgtttctttactctctctctcttttctttctccctctcaatacggctagattaaatcatctttagtctagtcaaatcagtgcttgctgttgttaagaaggatattcttgaggtatagtacttcagggatgctaattgggatttgagcaagatgaaatttctacccaggtgtgtgcatcgtatactggagatggcaaaaactggttccaaatgagggtgtgtttgtgttcctaggcatgttcctataggggccaaaaagatgcaaaatcttcttttctaaagcttttggtgttctcaagcttgtctacacaatggaatcacctggagaatttggaaaaccaaaaatactgataccactgatcctacccaacagattctattttaattggtatggagtatggcctcagcactgatattttttaaagtttctgaggcgatcctaatgtgcagcaaagcaccgtcaagccccctctctctgaggaggcaccagctgcaagcatgttttacaccaatatgtttgctgaatataaacatcccagtgcaaactcttgcaccccagaactctgggctgcttgtggacagtctttggcaaagtctgaatttataaactgataatacatataattccataggctccatatggttcgtgttatcctggggggaactatacacatttgccttgccccaggatggaaagataaataacagatgtggataatttttatcatacttgtactgaacaataataaaaaaattagaaatgaaggagcagagagagaagtaaaactcatgaaaacaaagctcaaatcaattattctacgttatatctttgcatttttaagaatccaaatacacagtagtactccatagaaaaacctgtcatacagttctccatttctaagggagactatctctagagtgatgagacataatattaaaattgtatgttaataaagttaatcaatttgttattagtgataaaaagtaaaatctacatagagcttactgtgtaccagacactgttctaagcactatacaagtattaacttatttaaccctcattataatcctgagacaaatcctattattatccttattttacagatgaagaaactgagaccccaagaatttaagtaatttgttcaaggcaacacactgctatgtggtagaactacaaattgagcccaaataatccagcttcagatactatgcaaaggtatcctaggtgtgggggtgataacctggtgacaatcccttctcagaaggaaaacaggtcccatctacagaggtgaagcagagtgtggaactgaaaaactcaatggaagaatggctattaagatttaggacggctgggaaataataaagtaataataataatactaggtattgacgtgtgctacatgccaggccttgggtgacatttggattgattcccattttctttacttttcagcagtggggtctttcacctttcaagctctgcctgagaagtcaacatggtggcatttggctaggttcttttaggcaaccaattgttttaacatgatttgttgaaaagcctattctctctttcattgaactataatgctagctctgtcataaatcaaattttcatttgatttatgatatgaaaattatatgcatttgattgatatgcattttttctccaatgatactcaactgtcttaattatataattttgtagtaattcttggtatctaattaggcaaatacccactcccaaccctgtttcttttgtttttaaatccaggggtgttttggatattctcgttcatttgtgcttccacc

SEQ ID NO: 303 - DNA, 6397 bp, Homo Sapiens
ggagcgtccgggacgcggcgggactcgagtgtttcggaaaaggagcgtctccccaggcggtggttgtcttcactagcgatggggtaaaaggaggacgcaatacctggttcaacttgagcaggtacattttgaccatattccaggtgtcatgtgaagatttaagcctctttccaacccccactccccccgaatctactgcatcctttttggagtcttcattcttaggcacattttgtcaagacttaaaacctaccaaagaaaagatacactgaggtcagatccaatcccactgggggccagcgagtgaaatgcgacggtttccttttataatctctgtttttcataatgatgacattaaaaatcttgaggtttcccagtagatatttaagctgaaagcaacattgtgcttgtcttcagagaccaagactttctggctcttgtcttggaatatttcgcaaagtcataggcaaaacacacacaaacaaacagaaccaaaacacagcagaccactcacgggggaccgaaccaggcagttagcccagcatccccctgctgcgggaggagggagcttggatactcctctctggagaatcctgctctggaaatccccacaccccaaaatgcaatgtagaggggcagtgagtcagcacctcaccccaaatgaatggccgttctgctcagcaggctcaacgcttagatccccagatccagtttctctttgctttctgtaattggaagaatggaataggattgctgctagaaatctttgaggtcactggtttgaaagtgggattatgagcatgaatttttgttgttgttgtttgtttgttttcagacggagtctcgctatgttgcccaggctggggtgcagtggcgtgatctctgctcactgcaagctccgcctcccgggttcacgccattctcctgcctcagcctcccgagtagctgggaccacaggcgcccgccaccacgcccggctgattttttttatttttagtagagacggggtttcaccgtgttagccaggatgatctcaatctcctgacctcgtgatccgcccgcctgggcctcccaaagtgctgggattacaggtgtgagccaccgcgcctggccgagcatgttaatttaagcaaatgaatgtccctgggaatgatcttcaaggagaattaaagtgggatagagaagtcatctatctgcacctgtgtctgaaccagaatgacgaggcacttccatgtcagctagttactggagcaggcggagtaaggagtacccctgggcttctgccccgaaaccaccacggctacttcaaaacaatattacattaattttcctgcttgttcttgagaagcactggtttgaaaaattggatggggtgatacatgttttaatcagtatttacaaggctccttaatcacttcatcagacaattcattgagcacctactatgtgccaggcagtgtaattcattgagcacctgctgtgtgccaggcagtgtctgaggcacttctagctattatttcctaagggttccagcagcccatggataaacttcaaagagtgtaagctcctaaaaattgttcgtattttctgcacatttttgtagttttggagaagagagttaatggagttcttgccattctcagaattatttgatccctttaggaatgagcatctctagcctctgcctgttcatctgggacaatctgcacctgggcgtggacctgctgcttcagatcagtaggtatcagaatgaactcagttggatggggcagttcaggacccctggcctccttttagtctggaccccactctcattcctcatattctcaattcactctttctactgagttactatcctagtaatgacaatgcctcctatcatctagagacttggtttgatacaatgcattcacatacaactgctcgttttgatttctataactggggaatacagaaagcaaatatgcggtgcaatggaggatgtctccattaccccagataactccaaaattcttcacctagttaccagtgcaggaaattcgttcgaaggcagaaatggaaaatgaataagaaacaatttggatgtgttccaaaaatggagagttgtcaggcactatatcatacaacctgaaatatcaatggtgaagtagacagttcacctccacagggggcaggaggttggacccagggcaatggatgttttatatggatggttaaccggtctgtggccatgaggtggaaagctgtgtacacctgtgaagccatcatcacaatcaagttagggaacatatccatcacccaaaaaagtgttctcatgccctttggtaattcctccctcctaaatgtccccaccctaccccacatcccagtttctatgcaaaaaccgctgaccaactttctatcactatagatttgtttgtattttctagacttttatataaaaagaattatactgtatgtacacttttttgtctgtttttttcacttaacatatttattttcagaatcatctatcttgttgcaggtgtattcctttttattgctcagtagtattccactgtatggatataacacaatttgtttatcattcacctgttgagggacattatacttgcttctaaatttttactatcacaaataaagctgctgtaggcattcatgtgtgtgtccatcgtgtggacattgtgtgcacacgtgcttccatttctcttggggaaatatctaggagcagagtgtctggatcccatagtaggtatttgtttaactttttaaactgtttttcaaagtggttatactgtttttcattttcaccatcaatgcatgagggtcccagttgctccacatccccacccatactttctgtggtcactttaaaaatttttagccgccccgtccgggagggaggtgggggggtcagccccccgcccggccagccgccccgtccgggaggtgaggggcacctctgcccggccgcccctactgggaagtgaggaggccctctgcccgaccaccaccccgtctgggaggtgtacccaacagctcattgagaacgggccatgatgacaatggcggttttggggaatagaaaggggggaaaggtggggaaaagattgagaaatcggatggttgccgtgtctgtgtagaaagaggtagacatgggagacttttcattttgttctgtactaagaaaaattcttctgccttgggatcctgttgatctgtgaccttacccccaaccctgtgctctctgaaacatgtgctgtgtccactcagggttaaatggattaagggcggtgcaagatgtgctttgttaaacagatgcttgaaggcagcatgcttgttaagagtcatcaccactccctaatctcaagtatccagggacacaaacactgcggaaggccgcagggtcctctgcctaggaaaaccagagacctttgttcacttgtttatctgctgaccttccctccactattgtcctgtgaccctgccaaatccccctctgcgagaaacacccaagaatgatcaataaaaaaataaaaataaaaaaagaaaccctacactccactgaaaaaaaaaattttactcactctaatatgtatataatggtatttcattgtagtttaaatttgcatttttcaaataactagtgatgttgaacaaattttattgtacttattgccatccagatatcttctttggtgaaatgtctgtttcagttttactttctttcttttcctttacttggtgatatggtttggctgtgtccccaccgaaatctcatcttgacttcccacatgttatgggaaggacctggtgagaggtaattgaatcatgggggcaagtctttcccatgctgttgtcatgatagtgaataagtcttacaagatctgatggttttaaaaagaggaattcccctgcacaagctctctgtctttgctttctgccatctgtgtaagacgtgacttgctcctccttaccttctgccatgattgtgaggcttccccagccacgtggaactgtgagtccagttaaacctctttcctttgtaaactgcccagtctcaggtatgtctttatcggcagcgtgaaaattgactaatacacttgggatgtttggttttccaattgttgagctgtttgttgagttttaagagttctataactattctagaagcaagtccattatcagatgtgtggtttgcaaatatttatttccagtctgcggcttgtcttttcattctattaaatgtgtctttagccaggcatggtagtgggtgcctgtagcttcagctacttgagaggctgaggcaggaggatttcttgagcccaggagtttaagcctggtctgcacaatagagcaagactctgtctccaagataaaaagaaattaaagtgtctttcaaagatcagaattcttaattttgaagtgcagcttattttctttaatggattctgcttttggtgtcacatttgcctaactcaaggtcacaaagattttattacagaagttctgtagatttcagttttacatttaagatggtgatccattttgaatgagtttttataaatgctgaagtatgaaacaaagtgtgtatctgtacgtatgtgcctagggaaatgcaatcatcccagcactgttaaaaagactattctttctccactgacttgcctttgcacctttgtcaataaccaattgataatatatgtgcaaatctatttgtagactctgttctgtcccatttatttgtttgtctctttttaaagttaataccacactgtcttgactatagtagattcataacaagaattgaagtcaggtaatgtaaatactcaggtagtgtaaatactcaaacgttcttctttctcaaagtgtgcagttgtttggttattctgttttctttgcatctacatatgaatattagaatcagctggtcattctttacaaaaagcctgccaagattttaattgagattgcattaaatctataggtcaatttttaggcaatgaacagtttgacagtattgaggcttctgatatgtgaacgcggtatatctttcatttatttaagtcttcttaaattatctccacagtctttcatagtattcaatgtacaggcctgatatatatgttattagatttgtttctaaatatttcactttctttgtcctattgtaaatggcattatttatttatttatttattgagacaagatctcactctgtcactgaggctgcagtgcagtgacgcaatctcagcccactgcaacctctgccccccagactcaagtgatcctgccacgtagctgggactacaggcatgcgccaccatgcctggctaattttttgtattttttgtagagatgggcttttgccgtgttgttcaggctggtcttgaattcctggcctcaagcaacccaccccccttagcttcccaaactgctgggatgacaagtgtgagccactacatctggcctttggcattgtttttcatttcaatctctaattgtttaaacatttgatttttgtgtatttatcttgtatcacacaactttgcttaattcaattattctgatttttttgtagcttcagtagaatttttcttacatagataatcatgctgtttgtaaatatagacacttttacttcctcctttcaaatctgggtgctatttaattcttttctgtctgattgcactgcctaataacctcccatgcaatgttgactagaaatggagacagtgtgtacccttgtgttgttcctgatcctatgtgaaaataatccagtctttcaccattaaatataatgttagctgtaggcttttcatagattctctttatcaggttgaggaagttctcttctatttctagcttcctgcaaattatgttttaaaaattaggaatgtgtattaaatattatcaaagttttcttctgcatctattctattgagatgatcatatgggtttttttattcattaatatgtgaattatcttgattgatttttgaatgttaaatcaatcttgtgtccctgaaataatcctaaccccacttggtcatgatatatcatagttttaaattattgatgaattcaatttgcaaaaacatgttaagaatatttacattgatgtttatgagggtactgatctgttgttttctttctttgtctggtttgatatctaagaaatgttggcctcatagaattgttaagtgtttcttccgctttaattttatggaagtgtttgtgtagaattggtcttatttcttccttagatgattggcaaaaatcacaatgatgccatcaggacctatagttttctttgtggggaggtttttacctataaatgtaatttctttaatatatattctttaaggctgggtacggtggctcacgcctgtaatcc

SEQ ID NO: 304 - DNA, 2420 bp, Homo Sapiens
tacttctgctttccttgggtttgtttgtctttcatttcaagtgatttcttaatttcctttaacagtttttaaactgtggaattattttctcagtatagtccaagctacatctaataagctctagcatgtaactttttcttttttgttcttttctaaatattgtgtcactgctgatttggtttttctcttttatccatgagatgactgttttaagttcccaggaagcgagtcttcttgttccaatttattcctgaatttttattttgactgtcattacactgtagttaggagatgtgacctctactgtctccagcatttagaatgtattgcggatccagggacacagcaagtcaggtgggctctgtcgcaaggatggttacaacatagactacttccatgtcagtcttccattatttgcatactcgagaccctgatgtgttggctaatttgccaagaaacccccgcagcagactgcgtccgcagggcagggctgagtagcaggggcagcacctctcacaggggcagggccgcttgcccagccttgaggaagggggacccagacattgcctttctcaatactgagcccctaaacaggatttctggtctggggtctgggactaggctatctggacagtcaaactcttcccactgcgccatcagccccactaggaaagaaagaggagaaattagggctttgctttaaagagttcaacggtcagaatatgtcccccgcaaacggacatgctggaatcctcatccccaagtgagggcggggcctcacattaggaggtgatgaggtcacagaggcagaaacctcacgaacgggatcaggctcatcaaagaggcctgagagacgacacctaccagctggaaggcggttccgcaccagacaccgaagctgctgggccttcgacctcggacctccgtcttccagaactgtgagccacacattcctgatgctcctaagccacgccgtgtacggtattttgttacggtagcccaaatggaccaagataggagctaaaggtgcttgtgagattccacgcatcatactagaggtgtgagcactgcacctaagggtgcctcggatcatccctgagatgcaggcactgcaccaggaggtgtcttggatcattcctgaggtgtgagcacatcatcagaagacccttttgtccatggggtcccattctcaccttctggatacacatcactctcggggccgccattctacctgcctcatctgtgcgcggcagtctggacctagaagctctgtcccctctgctgcccagtggagtcgagtgcctggcacccaacacccagacagggtggccaccaacctggttgaggggactgtccccaagatgatcacagaacatcaggcagggctcctgagccagcgccccccccaagcctgcctcgctcccagtacggccggaagagtagctgaggccaacccctgaagcagccaaggcgtcctctatgcccagaagtgccagggatcgggggctgcccagttccagacagggtcatcacactccgaccttcagaggggccccccgcctgccagctccagacagggccatcacactcccgatccacagagggcccccccacgcctcccagctcctgacggaagcgcctgtccagcttcaccgacctccatgccgctgcctggggtcttgctcgaacgcaagagaacacgggtctcgttgagggctcctctgccccgcatctcctgctcctggacacccaggcctgccctcaccactgctgctggacaccgggcaggggtcctggccactcttctggaaggccagtctgacgttgcaggcgcagccacttcactgtttgtccttcacggtatgccagactccctcctccctgcaagagcctctcccagggcccagtcctcccccgagaggtgctgatgagagtggagtatggaaccatctgccagccaaccccaggtggcctctcgggggtgccctgccccacagggccatgcacggtgtggccctccccggtgctgtcacgtctgaatgtggccctgcagacttgcccccactgggctggagcacatcccctggaatctgatcccaggagctccgggagcagctcgcacacagctccatggatgcccctcacagtgggagagacaggaaaggccagctccgagtctcacacctcactcttcaagctgggaaaatgatgctgttaccttgggaggtgagaccctccagatgggaacctcgacgctgggagctggtgtgttcccggaattcgggggaatatttcattccctgcgtatggtgtctggactttcagatccctcctcccaggcacccaggcatcatttcacaaccccatgctcagcaagccccagagaaaactcctcaataaactacgagtgttaatacccg

SEQ ID NO: 305 - DNA, 2029 bp, Homo Sapiens
aggtgggattgaacagcagcctcttttagtgggctttctttacaaaacccaacgactctacctctctgcttgctaagcatgtgaacttatcatctaatggggaatgcaagactcactctccagtaaacctagaaaacttagataaccttgcttctcatctaatgagacagatatattcttctctccagaagacaggtgtaacatggattccatgccactgggcaactgttcaactgccctgaagaaacggtgtacgtatcacaagtatcacaaagggctgctgggtccactgagtgattgttttgcattaggtgagactgtttcgaagccatgatgtttcacaagtctctgattctatatgtgctgtttgctttggagtgaaattacttcctcatgcttagcaccaccattgcctgattcctgtctgcctggaatgattatctccatcttcaatttgcaagtgaagaaactgagctatagggccatggcactaacaggttctctggaaagcagtggctaagatggagtcagaaatagaaaagcttattgtggattaattcctggggtgtgatggctcatacttgtagtcccagcactttgggaggctggggctggggctttgcttgagcccaagagtttgagaacagcctgggcaacactgggagaccctatctttacaaaatatacaaaaatttagctggttgtgatagcacacacctgtagtcccagctacttgggaggctgagaagaaggatcgtttgagcctgggagctcaaggctgcagtgagccatgatcatgccactgcactccagcctgagtgacagaatatcaggagccatcagaccaccatgcagacttgacaaggtctctgcacagtcccagaagaaacaaagcaaagactgcccactagaggagtccccttttgaaggaaatgcctggacccttttttctctaccatgcttagtcattggcaagggctgccctaagagcagcatgacttcagcttataagtgtggatgaactgtacgcctaatagctagaggccatcagctatccacactcttctcaactgagtagcaactccattcttgaaagggaacctgagaaacctatctctatgtctgccacaggtggtaaacttttccactgtcatgaatagtagcaagtggcaggaacaggatttgaatccaggtgatatgattccagctccagtgttctcatccactgcttactccagttgtgtctagcatagagatgccggagagaaattacaggggtgttgtctccatgtcttctgtgaagagcactctcttagcctaatgcctcctcagggacctcgaactttgatctctgaactgcgtcctcccagggcccagagggaagatcaatcactcaggcatctcccaggacaccaggtcaagtggcagaagttcatcctctgggattctttgtcctctgtaacatcgattgtcaacttggcaaagccagcttgacaataccagagtctttgtgtacaatccatagacagcactgggaagagcaaaccatgagaggccagcactaaaccctcagggtagctaaagaggaagcatggtaagacctcattctgcagcagaaaaaaacaaacaatctgctctacatgtacccagcatcatgtgaacatgaaccagttgagtatcgcctgggcctctgtttgctcatctgtaaatgggctggttgccccttcttgcaatggacaagcctgcatccgcagagttcgagtcctgtgtcttgtgtccttgccacatcctcctctgggagcactccgcaaaagctgttattgttagcccccttctctcaacctccccaatcattgcacactcatagacaaaggacaatctgatctttatgtgaccaagataaaatttgatgggagatcagcaagacataaaggaaggttcttaaatgacatatttatcccaacattgttctgggaagaaaagtatccattgtaaaaactaaacatgtctgattaaatgataaatgcag

SEQ ID NO: 306 - DNA, 4113 bp, Homo Sapiens
gaaggctatagccggagccacgaaaaagttcggaaacaaattgcttggtctttgaggaatcgccacactgccttccacatggaaaggacacaaatggttgaactgatttacactcccaccaactgtgtataagtgtgcctttttctccacaaccagcgtgaagactagaagaaaaagaatggaagaaagaagtgaaagagaaacaaatagggaaggggatccctcggatgactgggaaggaaaggaaaaccagaaaaagcagtcaggatgaatgcctgacaaaaaactctgctgcagtgacactttgacatgaagcagattcaaactttctatgactgaacaggacattttccatttattgctcctttgatacccaagctcctcaatgggggtattcttcaatgagacacttttaccagtgaccatattcttgcttgttggtttcttttttttttaaagtatgttgctgctgtacttttaagaaagttgtgttttatcttagtactttgatattcataaatggtataaagcataattttaccacatagctttaatggaatactttttacaaacaaaataaaacttgaccttcttccaccctatctccacatcggaactaattttactacattttatttttcaaaaactattaattcagtcaatgaatattgactttggactacattgggtcattttcaatggattgctctggtacagctttactttgtcatgtcctttgttcttgctctttcttgtctacctaccagttaaaatatgaaactcatgaagcatttagctccctggatagtgattcctgtatcagggtgaatcatgcaaactttcatattgtctaaactataattcagaaatataatgtggcttaaatgggaacttggggctaatgtttaacaagtgtgcaccatactttatcagttctctaagatttattttctacaaacaaaattttttatgtaacgggctacctttaagtggtaatcctaaaggccctttctgacttgttcattaactttttcaagtcttcaggccactgagttatctggtgcacagagtaataccaaatcatgtctgagaaaggttccatgattcccaaagtgcctgattttccacgtcttcctgtaagaagtagtaatagatatgctaaatgactggggaaataagaattaagcctacggctactttaaactttcctatggaaagattttaatgagtttccaagtagactgttcagctgagacaattttatataatgtggtatatatgatttaaaaatctacatccaaaaaacacataaaagacataccctactttagctatgtgtcactatactcagctatgtatgcataatataatatacatatatacatacacacatgtagtttagacacaccctactttagttatgtgatagtatatatgtttatgacttagaaaccctactttagctaggtgttagtttttttctctgactctaaaattatgtgttttgtttgtttgtttgtttttggagacagagtctcactctgacctctgtcgcccaggctggagtgaagtggtgtgatctcagctcactgcaacctctgctcccggggttcaagcaattcttctgcctccgacttctgagtagctgggattataggggtgtaccacaatgtctggctaattttagtatttttagtagagatggggtttcaccatgttggccaggttggtctcgtactcctgacctcaagtgatccacctgcctcggcctcccaaattgctaggattacaggcgtgagccactgcgcccagccaattctgttttgactatgaagtaatacgacttaaaatatgaattacggaagccatgcttctgagtcatgcagtgaccttcctccacccatccccacgccagtgcctcccactgttatttttgtgcatttggcataaccagttttctttaatgaaagagatttcctttccaagataggagtgcaagctccagactaaaattatgaaaatgcaaatgagtagtgcttcctttatccaagttgctttcttcaggtatatgttgtatgtgtgctgttgtttgctggtagctaaaagtccattctttcagcaggattgtcttctgtctctaagggaacaagaatgaccattaagtaaaaaacatgtatgaaattatgcgggtgagaatctttaccccactttttgttctttttgatggtagaaaaacctttgtcttgcaaaggcaaaactagtaaaaactttctgccttcggcttaaacattaaatgaaaatatatctatttaaacaatgttttaggctgggtgcggtggctcacgcctgtaatcccaacactttgggaggccaaggcaggcggatcacaaagtgaggagttcaagaccagcctggcttatatggtgaaaccccgcatctcctaaaaatacaaaaattagctgagcatagtagtcggcgcctgtaatcctagctactcaggaggctgaggcaggaaaattgagccgagatcatgccactgcactccaacctgagtgacagagtgaggctccatctcaaaaaaaaaaaaaattgttttgccctgaatgggtagaccggtgggtttgagttcagctttgggaaaaggtaggatggttttcctctaagcatgaagtaggcagaatgtgcctgttttgtcctttcatgagagcaatttgatctagaggaagtacgaggctttaaactccgggtctacagaattaaaggagggtaaaagaaggacagcaggacctgacactgggcttcttattgttcctgtcacaatttaaatcatttgttcacagttggtcacaagacctcagtctattccgtgctgcaagtgtattctttcaaaaaacaggaagcaacacttaagtaattgcagatttacagtgactaccaggctgatcccagctctttgtcatggctttcctgtttgggtctgaaggaagtggcggagaaaggagagagagggtgggggaagaaactgttagaaggacgggttagcctgagcctggctttgccttagtgaaagagtgatgaaaacactttaaacagttgccgacaggccggtagaaaatatttgacatctcacctacatcaacaagcaagagttaaaggttaaatcacacacaactcaagtgctgggaaaaaaggataggtttaggtcatcaactttctttgttctaggaccgccctatgtcaacaaggagacatattcccactccctggttggagacaccaggacaatagagactgatccacatttgctctgggtggtaaatccccttttaagcatttgtagcttgcctctagtctagccttcttcatcgttttttacctgcttccaaatacctatgtatttagggcaatgtggttggtggcctttcttctttcttcaaccagtttcttgagatcccaagcatgaagcttagtgtaggaggagaactaggaagtgaaaagtgtttgcatccatttcctgtgttggttccaaattcagtgagcatccaacctaaatcctttggatggtggtagggccagggaaaggtgctttacattgctggttctcacacactctaggtttaatgatagaaggacctttctggagaggcatttagtgcttttcacaaggactataacaaaaggtggggcagatttcttcactggttcaaggaagatttgaattgaaatttgggaagaaaggaaaatatgcccaggggagcaatgcaacactgttgtggtggatgccaacaggtgtgttatagaatgaaaaagaaacagcatagaaaagtacattttatcatttggtgggccaaggtccattttgagaatctggtgagagccatgattatctgcctacaccaaagtttgtatccatgcttaggaggatcagaaattttgatgatttttttttttttttaagaattcctagaagttcagctgggctcagtgtttcacgcctgtaatcccagcacttttggaaggccgaggagggtggatcacctgaggtcaggagtctgagaccagcgtggccaacatggaatacctgcatccacaaaatattaattgaagtcccac

SEQ ID NO: 307 - DNA, 8461 bp, Homo Sapiens
acacctctcttccggctggagcagcctgaccaagtcccacttgctgttctgccagggagcctgattttggcactggtgtatttccagaaccaaggctcaggaccctatgggattgcacaggtcgcagcccaagcgcagtacttgcgcacaggtcccagccccttccctctctgggacttgtcttctggcccctcactcctgcgatgagcttttctttcagctggtgaaaggccgcagacttcgaacctctgggcctttgtccaggacgttccctcagcgctcagtgcccttcctggtggcctcctacatcttcagatcccggctgagctctgcttaaatccgggaccgggtagtcactggggcagccacttggctggggcgaggccacctcgctttgggtcttgtcgcgcccaggccagcgccagcccaggcttgccatggactggctcctgggcgttagatgaatgaatcgactcaacccgggccgccacgttgtgttcagaacaccgacagtcgctcccaggcaaccagcacctgctgcgccccgtttccagcgacctccccaaccgcgtggactcgcatccacgtgcccggcggggccgcagcagaaaggctcggaccccccaggacgatcggccggtgggggccggtggggccgcagactcggggggcggggggcgccaggcttccgggtcctgcccccgccccgtggggaacagcaggacggcgccgaggccgtttcgctttcctccgcgcccatttgccgggaggggaccccgtgctccgacctgaagcttctctggaagacctggtgctggtccgctctcccgggacctcattttccttatgtggacaacgggggcggggtcacagcagcccctcgggcttatagccgggttgttctttccttaaatctcctccctctgccaaaataaaaaaccccacagggcaaggcgcggtggctcacgcctgtaatcccagcactttgggaggccgaggcaggtggatcacctgaggtcaggagttcgagaccagccttaccaatttggtgaaaccccgtctctactaaaaatacaaaaattagctggacgtggtggccggcgcctgtaatcccagctactcggtaggctgagataggagaattgcttggacccgggaggctaaggtcagtgagccgagatcgtgccactgcactccagcctgggcgacagagggagactccgtctcaaaaaaaagaaaaaaaaaaaaaaacccacagcgtcccggaggggcctgaggagttgtgaggggccgcctccgcctccagcatctggcatctggaggaggaggctgaggctgaggtgagggtgagggtgggtgacccgcacctgtccaggcccaggttgcctgctcccagcttgggctgggcagtggggcagggccatgatcccgccagtgctgtggttagccctacacctggcctggctgaggacagcgaacctggcaggtccaacctgggccctcccagcctaggatctccaaggcctcgtctcagtcaccatcagctgctctagggtgcagtggggcccaaggaggattgggcctgatctctgccccccagagcccatggacccaggactgggcccaccaggcgtgtcgcaggcatagggtcagtggcttctcaacagctgctggccccggcgcccctcaccaccccacctccactggtcagaaccaccacactgccagagactgggtttccctgcagttctgaccagtggggatggggtgaggtggaagggacattgcttggccgggcacggtggctcacacctgtaatcccagcactttgggaggccaaggcaggtggatcacttgaggtcaggggctcaagatcagcctggccaacatggtaaaaccccatctctactaaaaatgcaaaaattagccaggcatggtggtttgcacctgtaatcccagctactcgggaggctgaggcaggagaattgctcaaacccaggaggcggaggttgcaatgagccaagattatgccattgcactctagcctgggtgacagagcgagactgtctccaaaacaacaacaaaaaaggcagaggagtggggagtctggatggctccgctggtccagcccacccctcaggggacagactggttgacttgacgggttcactgagagtgctaggaccggccccaggtgtagtgccctccctgcggtgtcctgaggtaaagcctgccactctgagcctgctttctcttgccaggagacaggaccttgtccgctgcagctgggacatggtgtggataaaacctgtcagacagtgggcgtcctcctgccctgaagcctcccctctccctggtagccttcaggccccccagattctggtctctcggcctgctgtctcctttttccttggtaccttggcacctgaactcgcttggagtgtctaaggagctgcctgtgacaccatggggacctctattggtcccagcatcccctgcccagccgtggggggcatcggtgtcagccctgccaaggatcagtcagccaatcaacaaaccgcagggatcacccagctcatggatgtgggtgccgggaggcagggagggccacacaatgaagagatgtgtgtggtcctccatgctcagagatcctcatgcccctctcccagggatgggagttcccctccccatcaggggtagccctagggcccccagccccactctcactagggccagcctctctgtgaacccctggactcacatcacgtgtgcggggcccagctttgaggtggaagaccaaaccttggcattgcttctgtggaagctcaggaaatgcccacgatatggcctgaccaccccattcacacgaggatggagggagcaccctggtcacctgggggttgtggttagagtgccctccagccgagcctgcagcccagaccgagctagactggaaggggtagaagggcattcaggtagggacacagcctgggcaaaggggccctgacctttggcagctgcgggaagatgagcccacctgaaagggaggctgcattgagtgcagtcaggacctgggctgtagggctcagcctctagacagcaggagcacagaagggcgtggcggggtctcctgcccggccataataaacaggcccaagacttgttcacacaggtcccaggaatatgctgggtttgccttacgtataatttgtgattcatacctctcagtcttccagaaagatgcagtctacagaaattcagaaacaatcaatttgtaagaatagacatagataattttgaacaaccaagattagtgggagataggcatttacccaattctaggacattaatgattagtaatcaggcatcagacatagctgtggtcagccatggtggctcacacctgaaataccagcactttgggaggccaagacagaaggctcccttgagttcaggagttctagaccagcctgggcaacagagtgaaaccctgtgtctacaaaaaataaaaataaaataaaataaacaaattagcctgtggtcccagctacctaccagggagcctgaggtggaaggatcgcttacgcccgaggtcgaggctgcagtgagcagtgattgcaccactgcactccagcctgagtgacagagtgaggccccgtattaaaaaaaaaccccaaaaacttagctatgagtttcctggcagtcgaggcatgaagggaatgagaatggactatggaacttcactgtgtgatcacagcggagtatatcaggcagccaggaggccctcacttatatacccaagcctcaggcagcaggcatgttctgtggcggcctctggaaacaggccatcagggccgggaggacagagatggctgtgagctgggcctgcaccctcagggccctgcctgttgagtggctccagggtgtcttgccctctctgggcctctgggccaaggctaacccaactctctgggtcacaggggctcaagacctcagtggcaggtcatgaggaaggctgccctgccagcctcaccctggctccccacccactgcctgcttctttttttttttttttttttttgagatggagtctcgctctgtcacccagtctggagtgcagtggcgcgatctcggctcactgcaagctccgcctcctgggttcacgccattctcctgcctcagcctcctgagtagctgggactacaggcgcccgccaccacgctgggctagtttttttttttttgtatttttagtagagacggggtttcagcatgttagccaggatagtctcgatctcctgacctcgtgatccgcccgcctcggcctcccaaagtgctgggattacaggcgtgagccaccgtacccagccctgcctgcttcttaagtggcccaggaggacagggagtgagcttgtctctccccactgcagggtcctgagggctggggactgtgctgacactggtctctcccctgcctaggcatatcctgttcctagtgcttggaacacccttcccaccctcacatgcctggcaaattgttcttcacctctaggttcacatgtcgcctccttcagctttaaattcctacacgaggccaggcgcagtggctcacgcctgtaatcccagcactttgggaggctgagacgagcagatcacgaggtcaagagatcgagaccatcctggccaacatggtgaaaccccctctctactaaaaacacaaaaagttagctgagcatggtgtcatgtgcctgtaatccagctactcaggaggctgaggcaggagaatcgcttgaacccgggaggtggaggttgcagtgagccaagattgagccactgcacttcagcctgagagacagagtgagactccgtctcaaaaataaaataaaataaattcctacacgaaggctggggctggctccgagtgagcgggcctggggtatttgtgggataatgtaacttgggagtgtctaagtaggaaaaaactttaggttcttcagtcccattgtgcatggggaaacagaggccctgtgctggtaagtaatggggcagaagccagggtggctgcctcagttggagggaaagcggcaccaagattcacaggacagctctggggtcctggtcgcagtccctgccgtgccgccttctcactcagtgaccctgagcaagctgcttgccacgagatgtcggctccgtggcagtggatagcttcagccgtgggaagtccttggcaatcccctggctcgcggctggtgctcagctgggttcgctctgactagcactgcaccttggtcaccacctcgactgccacacaccctcccccagtggagacagagccaggggtctctcagcttccccaaccctggctccccattgtccagcctcagggatttggagactgggacaaactagccatgcgggggaaaggtgttccagaggagggaacacagtgagccaacaagaggatgggatggggcagggcctgttccaggaacaggctggggtcactctcccttctccagagtccaaggcacatgggtggtgggagaagagataggagaggctggcgaaaaccagcccgcaaggccctaaatgcctgactaagaagcttcagtctttcactgaagttttggagctaggttgggtgcagtcagatagcttgggggctgggccggagcatctggtggagagtgagacaccggtgtgagctgcagccctcgctgtgggtcccagcacccaggactgcacccagcccaggactgcagcaagcaggcacaggatgcgtggctgactgaggcctgtactccgactggagtcacctaggagattggctgagatgacctccagaagggccttgccccaggccggaccccaaggggaagctggctctatgtctttggacgagttaggaactcattgggggtggctgcggttttatttggggattcagctgtgccctgcacaccagctgctgagcaatgtctccaggaagccacagctgccctctgggaggcagggggccaggtgcagtagaggagatgccccagcggctcatgcaggagctcactcagacgccagaaccccagccaaggaggcaccccagacccaggcccaccagggccagtgtccccactccacgacaggggcactgcagccggggtggacacccagccttgctgctcactagtcacgtggtctgggcaagtctcttcctcttccctgagtgaggtgaggcaggatgggctaggatatgtggtggtaacaaacaactccagtctctttttttataatttcctacagacttttttttgttcttgttgaggcagagtatcgctcaattgctaaggctggagcacagtggtgctatctcagctcactgcaacccccactccccaggttcaagttattctcttgcctcagcctcccaagtagctgggattacaggcgtgcaccaccaaacctggctaatttttgtacttttagtagagatggggtttcatcatattggccaggctggtctcgaactcctgacctcaagtgatccacccgcctcggcctcccaaagtgttgggattacaggcatgagccaccgcacccggccaacctgtagattttttgagataaaacagctttattgagatctaattcacatatcacacaattcattttaaagcgtgcagctctctgtggtggatggtatattcgcagagttgtgcaaccatcaccacaatcaattttagaacattttcgaggccgggcgcggtggctcacgcctgtaatcctagcactttgggaggccaaggcgggcagatcacctgaagtcaggagtttgagaccagcctgggcaacatggtgaaacccccctctactaaaaatacaaaaattagctgggcatggtggagggcgcctgtaatcccagctactctggaggctgaggcaggagaatcgcttgaacccaggaggcagaggttgcagtgagccgagattgcaccacggcactccagcctgggcgacagagtgagactctgtctcagaaaaaaaaaaaaaaaaaaaagaacattttaatcaccctccaaacacaccatgtacccattagtaaccactctccatttacctgctctgcccagcccctggcaaccactcacacactttccatctctatgggtttgcgtgttctggacatttcatataaatgaaaccatatgacgtcgccttttgtgactgacttctttcacttagcaaaactttttaaaaatagcttttattggctgggtgcagttgtttgtgcctgtaatcccagcactttgggaggccgaggcgggccgatcacgaggtcaggagatccagaacatcctggccaacatgatgaaaccccgtctctactaaaagtacaaaaattatccgggcgtggtggtgcatgcctgtaatcccagctactcaggaggctgaggaaggagaattgcttgaaccagggagttggaggttgcagtgagccaagagcccaccactgcactccagcctagagacagagcgagactccgtctcaaagaaaaagaaagctggctgggcgcggtggttcacgcctgtaatcccagcactttggtaggccgaggcgggtggatcacaaggtcaggagatcaagaccatcctggctaacatggtgaaaccccgtctctaccaaaatacaaaaaattatccaggcgtggtggcgggtgcctgtagtcccagctatttgggaggctgaggcgggagaatagtgtgaacccgggaggcggagtttgtagtgagcccagattgcaccagcctggggacagagtgagactccgtctcaaaaaaaaaagaaagctttttttttcagagctgcctgaggttcacggccaaattaagcagaaggtacagagagttcccatgtacctctgcccccacacatgcacagcctccctcacaatcaacatcccccgctggagccgcacatttgttacaactgaggaacctacagggccacatcatcaccggaagtccagggtttccatgagggttccctcttcctgccggatgcttcacgcgttcgggcgaatgtataatgacttgtctccaccattagggttttatgcagaatagtttttgttttgttttgttttgtttttgagacggagtctcgctctgtcgcccaggctggagtgcagtggcacaatcatggctcactgcaacctccgcctcctgggttcaagcgatcctcctgcctcagcctcctgagtagctgggactacaggggtgcgcccccacatctggctaatttttgtatttttagcagagatggggtttcgccatgttggccaggctggtctcaaactcctgagctcaagtgatccacccgcctcggcctcccaaagtgctgggattacaggcataagccaccgcacctggcctagagttatttctctatttgactactaaaggacatc

SEQ ID NO: 308 - DNA, 4132 bp, Homo Sapiens
atgctccccagctgggccggctgcggacgcgggaagggaggtggtggcgactgacggaactgggtgaagcttctgcagatggcctcccctctctgcgactggttccttatcgaggcaatggagatgtggactgcggtgactgatcaagcctcacatatctactgaatcaggaagcccgaaggcctgaggcctcccgagtggccccatgggagcgtcgtgcatttttctgggcccgatgacgatgctggcctggcgggggacttggctgacccggcctccgcacaggtggactagttcacagagcttggccactggggggctgctggcaggcgagacaaacatcgctggctggtcggcaaagagggttccgcggtacggccctgcagacaagtggcactcgcttcggcacagctgtggggcagacagagatagaattacagagcataataaataccgagcctcagcagctttcatgtgccttgcaggagacagtggcagcaggggcaaatgattcttcctggatggtgactttaacaaagacttcttctggggggcaccgatctccacctggccatgtcttcaagcccaaggagaagtcccaggatgggtctgagctaatcacggtgatcgcaatacaaatgactgcgctaagcatggcacagctggcctcaatcctggccaatgcaacgtgagaatcaattgctggtgggattctgggggagtttttctcactgttataaacagatgcaaagcagaaatacttctctttgctggacactgtcatgtctaatgtgacgcctggatcactgaagcccccagaggccacgggacacgctgaaaatggcccagtgggaaggcggaaagccttgggtcctgaaaaacacttctaagtcactgacggaccaaactgaaatcatcctttattttgttcttttcatgtcagaaaaaaagacccctaaattctttaagtgacttttttgttaagtttttgtttctagaagcccaaaatatcctaataataataattttaaataatccacctatttttggaaatagcttgttcatcattgagattatgaataatagatcagttctcacccctgccttccccaccatttaccagagttaacaactgtgaaaaattctctgtgtatttttaaaaatcctgtaaaatgcacacacaacacacacacacatttatgataatgcttgttcttaaccaaaaactgagatctaatctctatctcactatatggataagcagtaaataaacctttttgtaatgcagtagaaaaggaaatcaacctctcgaatgtttaggatgtgacttcagtagctagtttctttgtgctgtgacactgccttcagaattctgatcttggccaattttcctatccagcaaataaagcaccatttcccccacactggtacattttaaaaagttagctgtgaattctaagctgcaaatattagatgcagcaggcggtgttctcattgtatcaccactggctctcgccaaggagcctgtgtgttacctggagatcaaggcgaaaagcctcaaacgcacaaattctgaagtcaacttgctgtttattattttcatggatttttcaatacccttggtaatcgcaatttacagcaatgtgctctaaactctaacttcagctgggcaaagtggctaacacctgtaatcccagcactttgggaggctgaggtagttggattgcttaagcccaggagtttgagaccagcctgggcaacataggcagaccccatctagatagatagaaagatagatagatagatagatagatagatagatagatagatagattagatagatagatagatagatggatgatagacagacagacagacagacatagataagcaagcccggcatggtgtcacatgcctatagtttccgctacttgggaggctgaggtgggaggatcacttgagcccaggaagttgaggctgcagtgaactgtgattgtgacccttcactccagcgtgggtgacagagcgagaccctgtctcaaaacaatacaactccccacccccaacaaaaaccaatgattctaatttcattgcaaacctttacacacacacacacatgcacacaccccagaaacaggagtgcgtgcaggacatgtggaggggacagacgtaagttggggaacgatggctcggtggcatcgtgttgttttatttttgttgttacctcagtgaaaacctcagatataaccaggctcatctatttatatattgacccagaagtttctagctaaaaaatgttaaaagataattttttaaaaatcataacttttgggaagctgaggcagaagaatggtgtgaacctgggaggaggagcttgcagtgagccgagattgcgccactgtactccagcctgggcgacagaacgagattccacctcaaaaaaaacaaaaaaaaaaacaaaaaaaacaccccccccccaccaaaaaacccataactttcatacaggtataaaataaacaacagtgtattcattttacttaactcaaatgctataactggttcaaaggacaatccgaagaacacatttaatgattaggaatactgatataaacttgctaatggacaaaaaatattggctttcctacaaggtaggaagcattccctctaccagacagaattcatttcctgcccacagacaagcgcgtttgcattgccagcagctatttacaacttatgaagctgtaaaacagctcccaagcaatgaaggctgcaagcagataaggtggcaggccgtgagcaggcctcaaatggagttttacagtgaagcacaaatgttcccctacagaacccaagatgtctctttaaaagaaatcatgaaagaagaggggattaagtggagcttatggactgctccagggttaagtggcctccaaaataaacaacaggactgctcagtagtcagagtgaattttgggtggggtttgaaagagttccagctttcctctgctaatggtgacataaaatgttcatttcatacccatgcatatacactgatgtatacatgtagttgaggaggcagtggcagaagccagaaggctttctctgccatgagctcctcctaggagccctgggttgcagagggtgaggactgctaggaaagtccgtcagttaaggccgaagggacattagctttgccttaaaccacattggctgtgcttgcctttgtgtcttcacctgatttaatgggttttagctcacactctccgaatctatttacctccaagtcagttaaggcagactgtactgttgacaaagctaagcagaacagaatttccccatggcttctagcttcaaggaatcccagctatttatccatcaccaagaaatgaagccccatgggtggctgacggttcatttactccagcccagggtgttggatttcaattagtgcattcgcttttccctctaggcagagctcaccctttaaagtcgctccttggcctgctaactgtcttaagatgcactttcccatctcaacaatgatacaggacgtgtcttacagggctgtagttctcattcacagcattcttcctctgagtggtccaggaaatactcgcaggccttacagtcaagtcaccttagatttaaagtacggaatacgcgaaaccttcctaactggtaaagcgctcagtaatgcaagctctgggtgcaactcagtggttcttagtatagtcagagttatgcgatcatcagcacaatctactcacaccctcctcgaggtattaaataaatatttcagaatccacaatgcagccaatctcatcaataactttactgaatcctgtagcccagcactcaggggttctctaaaaccctgccccgccttcccctccaattgcggtgcccactgtctcttttaaatagactctgtcctcatcaagcctgttctctgtcccccaaatatgccgtatcattccttaatgcatgcattttttccccagttccctacaatcttataattagtggttacgctaatctatatgtgtgtttaaactcatagaattgtatacaaaaaagtcaactgtactgtgtacacacatttaaaagataaaatgtgttcttttaacgctta

SEQ ID NO: 309 - DNA, 3185 bp, Homo Sapiens
gagaccccatttcaaaaaaaaaaagtgccaaatgtgtcccttcaattccagtcagcacttttggaaacacgcgtaaaattgttgccaatgtgcattctgtgtgtttgggagtcattgtgcaaaatgcgtgggcagcaagcactcttttgtgaaccaagttctatgaaccaccaagtattctttctctaggctgaattccaaggctctgttcagagagtacaggtttctgaaggaagggatttgatctatgtatgcggctttcttcttaaaatgccaggaagaaggttgcttaacaaatgcttttgacattcctgacaagtaatctccaggcttgacttcaggggtgagttacacctctccctccccacgcctttttgagagtattgccaacaagcagcagcaaaactgatgttcttcaactccaccctttggtgcatcactgaaatggcaaaaaggtaggaggtgcagaggagaacttcaggccacggaggcaagaagtcagtcattgattcctggcatgattgtgatagtcgtgtttggaaatccaacccataaaatgagccaccggtttcacagcgcacaccttagagatctcagaaacatgccctaggcttgcttgagtcacaatagctgggttcaaatctccactcctgttgtctaaagaacgaactgtctaggctagtctcagccttggtttacaggtatctctccgcagggtttttttgggagaactatatttgaaataatgtgtgtgaaagtttctgagatatagtaagtaataatacttgtggggattctaaggcttacttgcagtgatttaagtgtatatggggaatatttttattgtattgcattggcatgaataaagacatttgagatttggatgtttacgtcttaaaaagccagtggtatttaatatttgcaggaagaaaatgttgtatttaccctataatataggaaacttggcccatttttctaatgatatagaaaaagctcaattaggcttaaatatgacctagcaccaccccaagcctacagcacttgtattctctttaataaaaattgcgtaaattatagctttctcttgatttgcacagtacgggctcaattctaccccctttcccctaagtagagttgtttcttactatttttcaggttaaccaactaatgtcagacatatgtttcttcaccaaacactgcattaggggacgtttattttacatttgttcccttttgcaaatatttgcagttagttgcagaactgagctattttatgaagtacagaaaatatgtccagggaaaacataaggtttcaaaagtagcttttgagaaggagaaaggaagaaaagtctaattacagtgaagataggtactgatttgtgctaagagaatgtataaatcacgtccactacactcgtggttttaatgcattctgtgcatctgaattaaacaggagctagtgtttgaaattatgtctaaagctttcttcagtgatttgagaatataaaaagtagtgtttcttttctttcaaaagacatccctctcgcagtgtgccttctattcttgacttgtcttgctataaaagaaaaagctctcacagtcttttcaaatctaaatagtctgtacattaaaacagtttcttttttcatttaggaaactgaatcatagctatacagttacaaacataatatgaaaacctaaacaccttttatctaaaatgaaccctcagcaaattagcaagaggtaaggtttaggtatgagggacatttttttttttttttttttttttttttgagatggagtcttgctttgttgcccaggctggagggcagtggagtgatctcggctcactgcaacctccgcctcccaagttcaagcgattctcctgtctcagcccccctagtagctgggattacaggcacccgccaccatgcccggctaatttttatatttttagtagagacgggatttcaccatgttggccaggctggtcttgaactcctgacctcaggtgatccacctgccttggcctcccaaagtgctgggattacaggcatgagccactgcgcccggcctaaaggacatttcggtatacatttaaagtgaatgttttatacaatgagtcaaaagatgccctgacctacaataaatttaattcttttgttgataattccaggcaacttaaacatattcaaagcaaacatgggatggttaggacccaaaacagcatttgtttagaaagatgaggtcctatctgggattccttttgccaagggaagatgccactggaaatgagactactaatgccccaagaagtgactgatcctataatggaaaagggaaaaaagaaaaagagaactgcttccttcttcaagggacaaccacatcaaagcacaaatgcactcctgcgtaggtgtgtgagatgaaggtaccatctcagccactgtagaaactgctggcctcccttgaaagaacacaggccacattccagggcaaccatttctgtttaaactagtttttaaatgttaaaatgttatatgcatatgatgacaatataaatggtagcaaaatataggtgttaagaataaaagcttctgtcctcattagtcttctagtccctctctctgatttattggacatcattccagaaatttttttcctttaagacggagcctcactctgttgtccaggctggagggcagtggcgcaatctcagctcactgcaagctccacctcccgggttcatgccattctcctgcctcagcctcctgagtagctgggactacaggcgcccgccacaacaccctgctaattttgtttttgtatttttagtagagacggggtttcaccgtgttagccaggatggtttcgatctcctaacctcatgatctgcctccccttggcctcccaaagtgctgggattacaagcgtgagccaccacgcccagcctggaaattaatgtgtagacaagtacacagaaaatgcacatggctttttatacaaataggatccaccctttttaaaacaaatggtgggctgagtgcagtagctcatgcctataatcccaacacttggggaggcagaggcgagaggattgcttgagaccaggaggagttcgagaccagcctgggcaaaacacagtgagaccccgcctctaaaaagaaatttaaaaaactaaaatgaaa

SEQ ID NO: 310 - DNA, 9479 bp, Homo Sapiens
gtaaacagggtatactgttgcagattccgtggagtgcagctttaaatagatttggtttggaaatgggacagagaacacaccgcagtcagtggatcaacgttgagagcagagaaaaacaatgattacactcattaagtgggtacctgttgacacatttactgtcaagtctaattatttattgaaactgttattctttcttcattactgccactgataccaattattgccacaggattattttaaatttctacagcatgctcccagactatttacttctccacctcccaaaggttacttgagaggtttctatcattccctctctaccattccccacctccaaaatataacgaaaagagaaagagagaaaattcctctttcttgagagtaatttttgtaacctttcagggcttgcttaaaactcctcttgatagtttcaagatgggtttctgtggggacaggggatacagttaattacttttcaaagcttattctattaatatttaacaattggcatcggagggaaggttagtgtgataactgcagtttctaaatgaacaagttagatctctgcctcacagagctgtcaaaaactatgatagtaggtatctacagtacattcttttctgatatatttatccgtaaaaataaaacattagaaataagtttttgcagggttattttgtggactagaaaagaaataaaaggtggacaggagccattcttacattttttgctactaccttttttaaaaacaatgttctctttttctgtgttagtttgctgagaatgatggcttccaaacaccgcatgttctcactcagaagtgggagttgaacgagaacacatggacacagggaggggaacatcacacatcggggcccgttgatgggtggagggcaaggcaaggacaaatacctaatgcatgcggtgcttaaaacctggatgatgggtggatagggtgcagcaaccaccatggcacatgtatacctacgtaaaaatcctgcatgttctgcacatgtatccaagaacttaaagtaaaataataagtaaataaataaataaaaaacttcctgggtaaactagcttatattccacttgaaaaataaataaataataataaaaataaaaacaatgttctttttttgtaggaatgagaagaaaatctaaataacttaagtggctgttatgtctggtttaattacagaaatttcatagtccatacataacctaccttgtctgcacgtgttcttattatatatatatgatattagctttgaaaatcatgtaaacctgacaccttaatttcctctcaattctaaattttctaagtcctacaaatttggggcaataccaaccaattttattcttctcaaaggtctgtgcaactgaagtcatggttgcagttcgaggtcatagatataacataccaaaggaattaacaaaatattcagcagaatacatgtgtatagtactctaaataatgatatcaaatcttctacaaagttactattctacatattgactacttcacctctttttggttaagttacattacataaaacacagtagagctcattagaaggtacagattcagcaggttgactttaggagaaaaatcgcatctggtaaattttacaactatgatgcttcctttaaatgttttttctccattggcctccattttcttggcaaactcaagacaaatgtattcttctgccaaggattggtgtcattcccaacagtcccccaggagagtggcattcagatacaatggatgcaaggtttcaaaagactaactcaattttctgtgttcttaggatttttctgttgtggctttggattctagctttttgagatgattttgtttggcagctaagagagagtgactgacccagccataaatatttggccccttcagagccaggtaacactggcagtatagtgtagtcaaaaatgcgctcaatcaagggttaggaaaccaggtaaaaagccctcctgccacatactagttgaggatacaataaaataatggttaagcacattctactccattgcattttatggacacttaaatacatacacattaaatctgaatcgtctgtgtggcccagatttttggttttggtattaaaccttaagggctatgaattaaaagggaaaaaaataaatcaaaaaaacaaaaataaaaagagaggtcagctcactgtcttggccatttttcagttcttttcctcataaagtactttgtatttcttctattctttgtatttcttctaaaatcaacattactggctcagatgcctattagtatttcataaacaagaagacacgcctcctctcttacctcagatagctggctcctggaatggatggttgacacaaggttcagccaactgcaatgctagtgtttacaaatgaaataagtaaaaattacttccagacaccaaacccatatttattcattaatagtcataacctcttatatctacataatggtttcttgttttacaaaacattttcacattcattgcaccccacaggaacccgatgaagaagcaggaagagatgattctactggcttcataggtgaggaaacagaagctcaaagagggacagaaaggatgagaaaggaactaacaccatcctcatgattaactttacagaaaccatataaaatgaatattattgtccacattttacagaagtagaaactgaagttcacaaaaggaaagtaatttgcccaagattacacagtttagtatctggcagggcatgaatttggagccaaagtttgtgcctgctagtccagtaatccttcctttctacttcagtttttcctaggttattaggctagggaaagacaaagacaaacagcaactcattgtcttaattcacaaggcttggtggagagagaaaataaaataaaaccagctatttgattgaaatgaggaaatgggaaaagtacataggatttcgagccagtcagatttcctttaatcaatggccttaggcaagttatttaaactccatgagtgtcaatttcttcatatgtatgtgaagattatgatatatactccatagccaaagttgcccttagttaaactttttaaataagatttctctccattattccatatatatggttatagagagcagtgataacatttcttcccataaatccacatttatatgatcaaaagataacattataagcacattaggcaagagaatatctctttgacttatgtttcctagttttaaaacaccgaaatattaatctatgtcactctcacatgacctcatctaacaagagacagcccaaaaacttttaagattttaaaatcaaaagtttccttgacccctaaaaagcaaaacagatactgctttagttgaaagacctgctgatgaatcgcacatcattttcaactttgtgcccataatcatgccctaggttcagagagttggagtttccaccagactctaagaacaaagcaaatttgttttaatagaatggatggatttattgagaaatataagacttctaggaagttttgataaaatgtcccgtttacataaaggactcaaaacaggttaagaaaagaacatggatcctgcaactatacccctgaacttaaaataaaagtttcaaaaaaaaaaaaaaaaaaaagagcatgattgatcagatgccctgcaagaaacttgtcatctaccaccaaatgaaaacattaatcatcttttaacatcatgctttattttatagcttgaaaaatcacaatgaccattatgtctcaaaccattccctttataactccaatgagaccttattacccaaattttacaaatacaaaaaccaaacttcaaagatcacatggttaacatggagcagataaaaatgtaacactgtatcttgataccaaaatcagtaagcaccctcctactacatgacgtagcctcccaattgctatttgaagagggtaactaaacaacttcaggaaagggaaaccgagtgtatagcacagaaaattcaattgtcgaagcactaacacacacttagttctaagttctgctttattagcaagtgaaaggagaaagagtagacttcacatctgtggtctaaccagaaggtgacacattactaagctaaggcaaaaggagtgtttgatgcagtgttaccataaacactttctcagatctcaccaggaaagtttcaagatgcaacatccctgggcaaagtgtcgaagcacaagccatatacgcaagtctgtaccagtgaagttttgtgaagagtgtgatacagtttgactgtgtccacaccgaaaatgtcatcttgaattgtaaaccccatgagtcaagggtgataccaggtagaagtaatccgatcatgggggcaatttcccccatgctgttctcatgatagtgagtgagtctcacgagatctgatagttttataagcatctggcatttctcctgctggcagtcactctttcctgccgccctgtgaagaaggtgcctgttcctcctttgcctttcaccatgattataagtttcctgaggcctccccagcaatgtggaactgtgagtcaattaaacctctttctttataaattacgtggtctctggcagttctttatagcagcgtgagaatggactaatacaaatccttcaccaatcagtctcattttaagcaataggaaagctgaagtctttctagctaagaagttcaccagccctcttcacgtggattgagtggcatgtgtcctgagtagctcctgagtgtttcataatgcaatggagttttccataattccatacagacatctgggacaactgacaaatcccactctagccttttggtaatgaagccagttatccttggctgcctctgtgtattttataactaactgctgacccagaacctgacatgtctgcatcctttgtcaaaccatccatcctctctcccctcaaaaatatgctcaccctcagaagcaattttacagaagcaactatattttggagaaaaacaggatggagtaaatgaaggtaagataataaagagagagaagcaagaaaataacagggggtaaagaaaaagcagaagaaaatggaatgacatggaaatgaaaagtgcagagatcagctgcaatgggtttttcacaaaccatggtgtcctttgaattttccaccacacctcacaacaaaatgtaaccatccctaagatgattatcttagtattatgaacaaaaattctaagtgttattgaaccagtgtaaagctaactcaaaatacttgatattttgtaagtgctttagtacctcaataagcaatataagagtatcttataaaaactcccactaagtcaataaactggtacctctttcaccctggtgtccaagatattcattccgaatagggggaatcatattgaaaagaataatgaaatggggatggaggaactgggttctggttttagtgctgtaattatcaaatcttttgattagaagttgcataaaatacacattctgtgtttctcttttcacagttatcccaaaaccactgcgaaaaggccaataataatttggtcattttcataagtttcatgtggcaacagaggtagtagtaaaaggattacttaacctaacatttattaaaataaaacaatgttttaaacatagaagtctgtccccagaagcaactgaaatgttaaatcaggccaaaggaattagatgacaaatatggactgccctgcattccagtcatcaaataccacatacaatttaaagtgcactctcatgccaccctaagatacttatcaagaatacaaggtattccatagcttatgatttggttgtctcattaaagtaatgtttgccaggatttaattgcttccctctctgattttaatttccacacctgtcagcatctatcagaggcactgaaatcttctgacatctggttgattgtgttgaaattaatcagattttttaaaagtaaattgctttggcctaaaggtaatgctcaacttcttaatgttatatttataagggctctatcaatggaatgtataatctagaaataaaatgagagactttaggaattctgagcagaaatataagtagcttacaaatctccagcactggacttttaaagataagtactttaagagtgacatcagtagcatggccaaccagaggcccctagctctcgtctctttcacaaagacagccacaacaacaatcaacaactaaactttaacaaaaataactgggccaggcacgatggttcgtgcctgtagtcccggcactctgggaggccaaggtgagtggatctgttgagctctggagtttgagagcagcctgggcaacatagggaaaccccattgctatatagaaaaaaacaaaaagatgaactaaaaacagaagaagaaaaaataataactaaggcagtgtaccagactgcatcagagaagtaacagaaaccctggatagcaagaaactcagaatgaccacatagagaatagaaacaaaacacctggtctttaccacccatcacccacttgggatctgctggaaacagggaggaacttctctctagggtagaatggtacacaaaaggatcccagcaagccccatcaacaccttgaacagctacagacctcacccatggagtctcatgtagtcctcacaggagccaagtcccagctgagggacctgcctgaagtccacatagccgtgcttccccaagaaaaagagcaaccagtgtgacctgccctctgtggcctgcgcagctactgcgctatgccgtcttggaaatggagctttggctggagtgtctcttgctctgggagtgcatagctatgacactccatcactaaggctaagctaccgttgaaccacccgaacccagtggcccgacatccccaagccgagctgccagcaactgttccactcttccccatgggcccaggtgaaggtagagtcacttaatctacctttcaccctccccttcaggccagtgctgaagcagtaccctgcctcctgggaaaacagtacattggccactcagagcggtcacgcaccccagtacttaatctgaagtagcacccttcatcccagggaaatggtacctgggctgcctagaaaagtcatgtcccccaggcctgagctgaagtggcatattgtcccttggtgaattggtgccatcgctcagctgagcagctgtaaatcccaaagctgagctgatgtgataacccacatccttggaaaactgagcagtggctgggctgatctgagacactccagcctaaagggaaaacaactctaatacgctgtttccctggagctggtctacctgcttagtgtcagagctgctaagatacccctctccctgtggcatacagccaccactgtgctgtactctgcccccactcagggcacaagtaacagctgtatgttgccattctggggtactgctaccgcatgtggtcttacagagtctaaggtactgctgagtcccaacatccaggggtcaagaatcactactacatggtgcctcatcccctgagatccaagttgccactgaaccctactggctcatgttgccaaatcagggcatatcctgctctctgggtccaaacttccctgcactccttctttcctggagttgagccactcacagctgggactgagtttgtagagtaatgtctcagagtcacaaatcctggctctgtgggaagcctacatccaaccctagcacagagagtgaacctgtaacccaagacccaggtgtcacaataggttggcaagatcctgggcataagactctagtcccacagccacttcaagcacctgcacctagaactcagcaccactgcacttgcttgtaggtcatgtgatatctgacatgaagagcagtccccttggctaaatctccccattatgaaaaaaataagaataggaggacctcaaaagcccttgacactgaggacattaataatctatgccaccaccaccactgccacaaatttctacaacttaagctactgaggtgcccacagttattgctgacattgaacgtagctttagaagctgcatggagaccctatcactgcatctattcagaaacaaagtcatcacacccctcccaactgtaacaccaaccctaattgcaagcggaagtctttttttatgaaaaccactccagaaagtttgtatagaagaggtaattgttccaccggatgcaaagacatcaactcactgacacaagaaatatgaaaaagcaataaaatatgacaccaccaaaggaatgtagctctttagtttcagactccagtaaaaaagaaatcaataaaatgccagaaaaggaattcaaaataatgatcttaaggaacctcagtgagatacaagaaaatacagatagacaattttactaaatcaagaaaataattcacaatatgaagaagaaattcaacaaagatagacataataaaaaagaataaatctcaaaaataaagaatttcatgaatgcattcttaccctcataccaaaaccagacaaggacaaacatgtaaaaagaaaattataggccaggatctctgatgaacatagatgcaaaaatcctcaacaaaatactagcaaactgaatccaccaatacatttaaaggagcatttactatgatcaagtggtatttatccgagggatacaaggatagtttaacacaggtaaaccaataaacgtgatacattacctcaacaaaacaaagtacaaaaaccatgattatctcattagatgcagaaaaagcacttcataaagttcaacattccttcatgatataatatctcaagtcaggtataaaagaaacataccttacctcagcataataaacacttcacatgataaacccacagtcatcaacatactggacacgttcaaattgaaaggtttcttttaagctctggaacaagacaaagatgctcacttttaccacttttattcaagatagttcttgaacaggcgtatacaccaatgggacagaacagagaacccaaaaataaatccacgtatttacagccaactgattttcaacaaaggaaacaagaagaatctctttaataaatggtgctgggaaaactggacatccatatacagaaaatggagccaccatgagatatcatctaacccaagttagaatagctattatcagagacaaaaaaaataagaaacgctggcaaagatgcaaagaaaagggaattcatacactgttggtgggaatgtaagttagtacagccattatagaaaatagtatagaggttcttcaaaacactaaaattagaaatattggctgggcatggtggctcaggcctataatcccagcactttgggaggccaaggtgggcggatcacgaggtcaagagaaggagaccatcctggccaatatgatgaaaccccgtctgtactaaaaacacaaaaattagccgggcgtg

SEQ ID NO: 311 - DNA, 2003 bp, Homo Sapiens
atccgcgagagaggcgcgcgcccgccaccgctgggggctccagccgcccgccgacccgggcctggcagaggggacgcggcgcccaagccgctcctccggatggcgacagagacggcctgacgcgcccgcagcctgggccccccacggggaggacggccgggccaggtacaacttgagctctcatctacataactgaaggctgcacccagggctgtaaagagtgaaaatgcattgccgaagcatgagcacctcctgcagttctcagtagacatttgggaagcgagtgaaccgccctgtatggagtgtttggaggaggtcggagggtgtcgggcctgagccaggggctgccctgggcctgtgtcgggtggcgcatgccagaggaatgagatgggaagggcatgcacgcggggtcttggcagccctggagctggcctagatgcagcagctttctgataaagcgaaattgttccatcggcttgccatgctttgcttagccatccgcacttcactgttgggcgaaagaagattttaaagaacacccttagcagatgtcagagtttgggatttggggtccatgatacccaaataagattccacttgaagaaagtaacacgaattgctttcaacacatcaatcaacaaagagcattgatggatgaagaggacattgataaatgggatgtctttttgctgaaactctaacttacagtaaaggggggaaactcacagaagcccagtggaagcttctggagccaggagctacactgactctctccgcagagggtgtggaggggtaggcggcagtcagcccccagcccagagtggagggcacctgggcacatgtgtgatcagagcccacatggagggaggccagggtccagcttcccttcactctgggaacatgggaggccctgtccccaggccatggcacacagagggaggagcaggagctctggcagcctcagaggtgtgtgccaggccgcagcctattggaaattcctcaggagtgcatggcctggggtcccccagcctgcgggaggcagagggggcgaggccaggtcccccggcctgtgggaggcagagggggcgaggccacgtccaccagtccgaagcctgtcctgcccagcttgctgtgtgactctggcctcggggggaacattatctgaaatgtacatagtggaatccaggcagtgttcaccccttccctctgtgccctccgtggtcttctgtgacctgggatttgttggtcattggcagaaacagaagatgcattattattactgtaaaaggtaaagttgtcccctaactggctcaactgtccgaagacccccctgctttttctgcttttccttgtgactcagcctggtctttcttcttccagggtggcatcccactgactcctacgcagccccaccctggttccctcactcccaggttcctggtccctcagggtcctagggctgagtcctccatagcccccacacacagcccagagctgggactgacccacggcataggacaaactcctccaggcctctgagagaactcctgggctttcatctacatgattcagaaagaatcttttttctctttcaaatgttaatgtttttaatttccttttttttttcatttttcattataactgctaagatttttctaattggcatgccaactgcttgcagacttgacctgtttcttgcaaaaaaagaaaatcgcttaatcattaaatacaattattacttcattcttctatctcttcagtctaccaaactattatatactcttgatgattgtcattttcgtcaaaagaaaactgtatccagaatcccataacacttacaaattaagtgtcttaatttttcaagttcttttggggcttgccatatgagtgtattattcttgcatattgcacattcattttctattatttttaatacataattctacaaaataagcattcttcatgatatatatttgtttgagaatttcttaataaaagatggg

SEQ ID NO: 312 - DNA, 6403 bp, Homo Sapiens
ggcagaagggacgtccccaaatgacactcggaggccgcctccctgggctccggtgctcggtgccgggaggagcggcacggctttctaccccgcctcaggtgcgccagcacgttttctgggcagcatctgtgtgttaggcgaccggagaggtgggttccttatagggaataagaaaactgaaactgacttccaactgcaggcagaaggaagcagtggtcattgctggaggttaaaactgttctgaccgggcgcagtggctcacgcctgtattcccagcactttgggaggctgaggcgagcagatcacgaagtcaggagatcaagaccatcctggccaacaaggtgaaaccccggctctactaaaaatacaaaaattagctgggcgtggtggcgcgcgccggaagtcccagctacttgggaggatgaggcagaagaatcgcttgaacccgggaggcggaggttgcggtgagccgagatcgcgccattgcactccagcctggcgactcagcgatactccgtccccctctccccgccccaagaaaaatctgttcagtggggagcgacaaggaaggagctttcagcccgactggggtcgcagggaagaattcaagatggcgtgtttaggagctctagctccttgacaaattagtaaaatgttagtcttaggagaagaacgaaaaggctctcctaggctaagaaacagcatacacagtgagaaacctcagaagaaataaaattcaaggaagatagcaacaacgaaaacatcagaaggaacactaaagtagtcaaatcagcctagcagaaacaaagtacgttaaccaatggaaaactgacggagagaaataaactgtttttgcacagctaaatggaaatgacttttgaattatctgctttggaagattatccatgacactgttctgccctgctctgctctaacaacatttgtaagtcactcaacagttaataataaaagtcagttttgaatattgcaggttttagacacagaacaaatgtaatgtgacactgtaggaagaatgaattctccttagtcccaaattccttttttttttcttagattcgggaataagtaaagatacaagatcctcttaaccagtatcagtataattgttccctttagatttattgctgtcaccccaatgctcttctttctttctagaggaaaggaaaagaaggaggtaataggaaaagtaatgggttgtcctgatgttactgtgtctaggatgtcattgccactggtctcctcagatcaatcattctgcctaataaacagaaaaataacatgggcagcctcacatgcaagcctttacacacactgctaaagagacctcgcttcctctgagaagtgaggatgtgagaatgaaggattgattttacagaactggatgacaggttaaattgggcatctggaggtttatattcccatctccactcaccaagtttcatcctccatttatgaccaaggataggtataacatctgatcttgatggttactgtttcaaaaaacaatctgatcttttttataaagttaaacatttacttaatcatgcagcatactaattcccactcctgggtatttatccgagtgacataaaaacaagttcacacaaaacctgtaaacacatatatgtctttattcatataatagaaaaaacacaaaccctaaaatggaaaaaacataatgtccttcacctggtgatatggtttggttctgtgtccccacccaaatctcatctcaaattgtaatacccacgtgttgaaggaaggacctataaccttcacgtgtcaagggagggaagtgattggatgatgggggcggtttcccccatgctgttcttgtgatggtgcatgaattctcaccagagatgatggttttaaaagtgtttggcagttcttccttcattcacacacactcactgtctctcccctgtgccacataagatgagcttgcttcccttctaccataactgtaagtttctgaagtcctccccagccatgcagaactataagtaaattaaacctcttttctttataaattacctagtctcaggtatgtctttatagcagtgtgaaaataggctaatacatctggtgaatcaataattaaaatgtagcatagctataaatggaatactactcagtaataaaagaataactcgatacatacaataatattgatgaatctcaaatgcattatgggaagtaaaagaagccaggctccacttatgtgacattctggaaaaaggaagactatacggtcagaaaacagatcagtgtttgccaggacttgggggtggggggtggggagtgattgactacaaaagggcatgaagaaattttgaaggggaggtatggaacaggtctgtatcttgactgcagtggagttattgatacttaccaaactgtacaataaaaagtaaatttttattgtatgaaaattatgcctaaattaaaaactattaataaaatcagcattagcaaaatatatgagtttatacacaagagactactcaaccattgggtaaactaattatttttaaacaaataccattgattttaatctttttatagtttttatacaggcagagaaataatagtgattctgctcacctaaaggaagatagacccaattcaaaggtacagaattttccccaaatagtatcataatttttcctttcagattccaaaggatttgcatgtaaattctatcatgtgatcctcagaaccaccctatgagggtaagcagaacagatgatccatgatattccattttataaatgaggtgcaggttaaatatttagccagtatttcttgataagtatagtccatttatttcaacaaaccttgattgagggccccaatacttgttgagcttttgctgagccacccctgctctagaggagcacatgctctggaaatctctaaggaaactactacaactctaaatagatatggtgtatagtgatactgtgactaaatattcactgcaaatttcctctaaaattatagatatacattactggaataattagtatctcaacatcttcattaactatgaatctactatgtatatatcatcaccatgtgagtattaatttggtacaaataggctgccaactctaaaattatttgatgtagggcaagtacttttatctttttagccataaattttctcatctgtaaaatgagaggagtaggcatgtgatcattaaatcctgggttacggtaggaggcatcaatatgaaatgtttagcttaatatagatacagatgggtaaatatagaaatacttaaaaatgcatgtggattcatgtttaatacattagtatacacacatatatttccaagttctgtcctccgaaggcctagaagcaatgacaagcagaagcaaggagcacacccagcatccagttttttgtttctaatactgttctccaacaaagggaaccagagcccttgagaaaaatgcctaattctaggactggggcaggggatatacaagatgagtctgaaacatcttatagtgccagaaaataaacaagtgctttaaaaagacacaaaaaactgatggtatatcaaagtgacataggagccaactaaaagagctcccaatagctaaagctagaataattcaaaaaataagtaattcagcattggatttaacccaaattataaaataagatccatgagttcatactgatacaagtaaatgattgaagaaacaaataattgggagataattctcatattgaaaaattccaaaaaatttatgtactctaccctcgagaagatggaacataattctccaccccataagcatgagtcaagcctagtaaatgtttttcaaagagcgcagtatggaaaggaggaagaacactacctcaaccagctgatcaaggctaacatctctagtatgtcattagtggcatgtaaccttgatatgatatgatgagaatagcatttgatctttgatctgtttcctccccgaaactcattgccccagcctaatcatgaagaaatatcagacaatctcaaattaagtacaaaataaccagtactcttcagaactatcaaggccaccaaaaacaaggaaagtataagaaactgtcacagtctagaagagcctggtgatgactaaatgtaatgtgatatcctggatgggatcccaggacagaaaaagaacattaggttaaactaaatcaaacttgagtatgaaacttctttttttttaagtgcctaagtcctgaatgacaacaaaagactgaagaactgacaacgattagaggacactaaggagacttaacaactaaatgcaaaatgggaccctgaatctgatcctggaacacaaaaactaaattagtagaaaagtggtaaaataggtggtcgcgcgcccgaccgccgcagtcccagtcgagccgcgacccttccggctgcccccaccccacctcgccgccatgtgcctccgccgcccagcgctgttcccgggcgtggcgctgcttctcgccgcggcccgcctcgcggctgcctccgacgtgctaggactcagggacgacaacttggagagtcgcatctccgacacgggctctgcgggcctcatgctcgtcgagttcttcgccccctggctgattgcactgccaacactaacacctgtaataaatatggagtcagtggatatccaaccctgaatatgtttagagatggtgaagaagcaggtgcttatgatggacctaggactgctgatggaattgtcagccacctgaagaagcaggcaggcccagcttcagtgcctctcaggactgaggaagaatttaagaaattcattagtgataaagatgcctctatagtaggttttttcgatgattcattcagtgaagctcactccgagttcctaaaagcagccagcaacttgagggataactaccgatttgcacatacgaatgttgagtctctggtgaacgagtatgatgataacggagatggtatcatcttatttcgtccttcacatctcactaacaagttggaggacaagactgtggcatatacagtgcaaaaaatgaccagtggcaaaattaaaaagtttatccaggaaaacatttttggtatctgccctcacatgacagaagacaataaagatttgatacagggcaaggacttacttattgcttactatgatgtggactatgaaaagaatgctaaaggttccaactactggagaaacagggtaatgatggtggcaaagaaattcctggatgctgggcacaaactcaactttgctgtagctagccgcaaaacctttagccatgaactttctgattttggcttggagagcactgctggagagattcctgttgttgctatcagaactgctaaaggagagaagtttgtcatgcaggaggatttctcgcgtgatgggaatgctctggagaggttcctgcaggattactttgatggcaatctgaagagatacctgaagtctgaacctatcccagagagcaatgatgggcctgtgaagctcagcaaagacctgaatatcgtcatagccaagatggatgccacagccaatgatgtgccttctccatatgaagtcagagttttcctaccatatacttctctccagccaacaagaagctaaatccaaagaaatatgaaggtggccatgaattaagtgattttattagctatctacaacgagaagctacaaacccccctgtaattcaagaagaaaaacccaagaagaagaaggcacaggaggatctctaaagcagtaggcaaacaccactttgtaaaaggactcttccaccagagatgggaaaaccactggggaggactaggacccatatgggaattattacgtctcagggccgagaggacagaatggatataatctgaatcctgttaaattttctctaagccatttcttagctgcactgttatggaaataccaggaccagtttatgtttgtggttttgggaaaaattattggtgttgggggaaatgttgtgggagtcgggttgagttgggggtattttctaatttttttgtgcatttggaacagtgacaataaataagacccctttaaactgtaaaaaaaaaaaaaataggaatgcggtccatggtttacttaatcgtataatatcagtgttcattttcttattttgataattgtcataatgttgtgtgaaatattctctttagggagcctgggaaagaatatataagaactctactatttttgtaacttttgtggaggactgcaatcatttctaaataaatagtcttaaaaataactaaagtaataaaaataataaagtacatgaggaagtccagtgtcatgttgtatagtcagaagattcttcaaatgagagaatttgcacccagggaaatag

SEQ ID NO: 313 - DNA, 1137 bp, Homo Sapiens
atgattaatatacataaaatacacccactaattaaaattataaattattcatttattgatctccccacaccatccaacatctctacatgatgaaattttggctcacttcttggtgcctgcttaattctccagaccatcacaggattatttctggccatacactacacaccggacaccttaactgctttctcttcagttgcccatatcaaccgagttgtaaactacggcagaatagtccactattttcacgctaacggtgcttcaatattcttcatctgcctcttcctgcacgttggccaaggtttatattatgggtcacttatgtccctagaaacctgaaatactggtattatcctcctactcaacaactatagcaacagcgtttataggctacatactcccatgaggccaaatatcattctgaggcgctacagtaattacaaatctattatcagccattccatatattggaacggatcttgttcaatgaatctgaggtgggttctcagttgataaagccactattgcatgacttttcaccttccattttatcctacccttcatcattatagccgtagcaattctccaccttttattcttgcatgaaacaggatccagtaacccttcaggaatttcatcagattccaacaaaatcaccttccacccttactatacaaccaaagatatcctaggtctaatatttctcctcctccttctaataactctagtattattttgacctgacttcccgagcaatccagacaattacactttagccaaccccctcagtatcctaccccacattaagccagaatgatattttttgtttgcatacacaatcttacgatccatccctaataaactagaaggtgtactggcccttctattctctattctattctagcagttattcttgtactacatacgttcaaacaacaaagcataatattctgcccattaagtcaatgcctgttctgaattttagtggcggacttgcttacagtcacatgaatcagatgatagccagttgaacatccttttgttaccatcggacagccagcatctattatgtaattctccattttccttgcccttataccactcactgccctaattgaaaataagctacttaaatga

SEQ ID NO: 314 - DNA, 3105 bp, Homo Sapiens
cagacggttaccagggcggctttgggtgaggacattgaaaaaggtcagactccctgggagcagcgccctggactccattctcatcacagaccagtggttcccaattgaagtcagttttgctcctcagggcacacttaacaacatctggagacatttttaattgtcctgaccgagaggacaatgctactggcatctagtggacagaggccagggatactgctgaacatcccgcagtgcacaggacgcctgcaacacagattatccagccccaaacgtcaatagtgccggagttatggaaccctaatgaagacaattcttgaaggcatagactgaatcttatttatctttgtttccctcatgtctcacaagcagagtatgagttcagcaaataggagttgaacagaaatcaggaggaggtgctgattgacaggaaaaaagaaagatttagtttagagctgagaattcagctggacagccataggggctctggcatggagactggaagtcagaagagaatttgcagcaagacatttagagccatttatccagccatcataattttattgagtaactattttgtgtgaggcactgtactggatgctttggcaacagagataagcaaggcaacccctgtgaataaggcactcctggtctacacacagtgggagaaacatagaaattcatctcttctgagcggagcctgtgggaacccagaggatggacacccagcgtggtctgaggaatcatgggccaaaacaggaggcatcaggagagatctcttgggtaaagaagagtgagggctggaaggatattccaggcagtgggaacaacttacataaagtgagaatattgcaaatgcctagcgggtctgtagtgagagggtcatgaggcggaggagtgaggtgcgtagcaaggaatagcaggtggggccagagcagtaaaattaaccattgttctatttgaagaagggtaggacgcatttttaggttttttggctatttctccttttggtaatagcatctattttcttttaaaggactcacttgtacgtgtacacatttctcaggagtcctgtcaaccactgggaagaaagaggctggacttctgcattgaacccaggaacggggtttcacagcaatggaaacctggggttaaatatcaatggaaccttacatgacttgaagaatctttaatacaagctaggttttgaccccaaattagacatttggcagcctctcattacagtctatcttgcaaacctcagtgtggcaaggaatcagattcacccacactccctagtctaaaggattgtcctctgatccttccaggtggattaagccctttctaatctgtcatggacagagcaatgtacctgcctttgtttgttttccttaattctttcaagtgcctttgggtaataaatggttgcgtactcaggtttttagtccaaattttttttcttcaactctaggtaattgctttacttgccagaataggttaccatagcaatattttctgagcaataggtgaactgaattgtactattgaggaagcccaggagaaaaatactaataacaacctgagaaagtctaatcactttatggagcctcagggctgtgaagagggggataagacggactccctgggtgattaggaagtgctgctgccagctcacacaggacgcaatgtgagaagccacccatggtccccaaattcccccatctcctgatatccaagtcccccatccaagctgcttaaatgacaaaagacaaatgtaaactggggaaacatttgaaatgcatatcaaaaaggggtatttcacaaagctctccaacaggaggcctaggaagatggtaacagcgataccagaataatgtttggatcttccagagtgcccatgtgaaaacagagcaaccaaactgaaaagccatggacaacaaaagtcggtgacaaagtgtcaccttgaatcctgaaatacaaatgagttcaactgtcaaatggctcaggaaacagcgaaatctccaatggaccgtacaggcaaacacaagaaacttgaaaaagaaaaacagagaaaacaagaaaatcctccatgacaagatcatctgggagctgaaaagcaatttggatgtagtgcttcataacacaaaacataagctcctttaaagcagtgcaagtcccattaagtctttgtgatatttttgcatttcttcacacatgatttaaaattcacctatttccaaaaagatgtacaatgaaaaaagaagacaataaacaataaaaatagagataatttataaaagtacaacaaaggaagggaaagatatatgcaattaataattaaatatgagccacagtgagatacaaggaacactgactgagatggctataatttaaaaagaaaagaaaaaatggaaaataacaaatgttgcaagaatgtgaagaaattgtaacccttatacactgctgggggagtgtaacatggcacagccacagtggaaaacagttcaccagttcatcaataagttaaacatagaattatcatatgacgcaacaattccactccaaaggaaatgaaaacagggactccaccagatacttgtatgtctatgtctttgcagccttatttacaataaccaaaagatgtaaacagcccaaatgtccatcaacagatgaatccagaaataaaatgaggtttatatattccaacggaagatgaaaagggatgaaattctgacacatgctacaagatggatgaaccttgaaaacactttgctaagtgaaaatagccagacacaagaagacaaatactatacaattttacttaaagtatctagaataggcaaaactaatagaaaaataaagttaattagaggttaccaggggttgggagaagggaaaatgaggagttatggcttcatggttagacagtttttgtttgaggtgataaaaaaaagtttgggaatagtagtggtggttgcatatgttgtgaaggtaattaatgctgctgaattgtacactttaaaatgtttaaaatgataaattttatgtttataaaatgtaatatgtatatatgtgtgtatatatatacatatatatatatgtaaa

SEQ ID NO: 315 - DNA, 14733 bp, Homo Sapiens
agagctacagcggtctccgggtggcgaagtgcggagacggggttttggagacggtggatggaggagggggagggaaagctgccaactttggataccaaccccgtacacccaccgaaggggatgtcccactttttccagcgctgggagcaaaaagataacagtgagcgaggttgaaaaaaacagggtcttgcttcgttgcccagcctggtctcaaactcttggcttcaagcaatcctcctgcctcagcctcccaaagtgctgtgattataggcgtgagccaccgtgcccccccccttcttctgtgtttaggcttatatgctgttctctaatttctaccactgatgtttatttttattcatatttcttatttattactatatgtatttatataaattttcccctaagctctcccttaaccaatgtactatatagtgcttttatagttgtcatttttacagtctgattttcttagcattgatatcctttttttttttacatttttatttttatttcaacagttttgagggaacaggtgatgtttggttgcatggaaaagttctttagtggtgatctctgaggttttggtgcacccatcacctgagcagtgtatactgtatccaatgtgtatgtagtcttttatccctcactccctcgcccacccttccccgccgccagtccccaaagtccattatataattcttaggagtttgcatcctcatagcttagctcctgcttaatagtgagaacatgccatgttttgttttccattcctgagttgcttcacttagaatgatggtctccagctccatccaggttgctgcaaatgccattattttgttcctttttgtggttgagttagtagtattcccatatatattcccatatatatatatatatatatatatatatatatatatatatatatatatgtagtattcccatatgtatatatatgtatatacaccacattttctttatccactcgttggtcgatgggcatttaggctggttctgtattttggcaactgtgagctgtgctgctataaacgtgtgtgcaagtgtctttttcatataatgacttcttttcctttgagtagatacccagtagtgggattattggatcaaatggtagttctactattagttctttaaggaatctacatactgttttccatagtggttgtactggtttacattcccaccagcagtgtaaaagtgttcccctttcaccacatccatgccaacatctgtttttttttattttttaattatggccattcttgcaggagtaaggtggtatctcattgtggttttgattggcatttccctgataattaatgatgttgagcattttttcatttctttattggcaatttatatatatatatatatatatttgttgttgttgttttgttttggtttttgagacggagtcttgctctgttgcgcaggctggagtgcaatgactcgatcttggctgactgcaccctctgcctccctggttgaagcaattttcctgcctcagcctcctgagtagctgggactgcaggcgtgcaccaccacccccagctaatttttgtatttttagtagagatggggtttcaccatgttagccaggctagtcttgaactcctggcctcagacaatgctcgcctcggcctcccaaagtgctgggattataggcgtgagccactgtgtccggtgaatttgtatattttcttttaagaattgtctattcatgtcctttgcccactttttgatgggataatttatttttttcttgctgatttgtttgagttatttgtagattctggatattagccctttgttggatacgtagtttgtgaagatttttctcccactcaatggattgtctgtttactctgctgattatttcttttgctgtgcagaagctttttaatttaattaggtcccatctatttacctttgtttttgttgtatttgcttttggattattggtcatgaactctttgcctaagccagtgtgtacaagaatttttcctatgttatcgtctagaatttttagtttcaggtctcagatttaagtctttgatccattgtgagttgatttttgtatcaggcacagatggggatccagtttccttcttctacatgtggcttgcgaatcatcccagcaccatttgttgaatagggtgtcctttccccactttatgtttttgtatgctttgtcaaagatcagttggctgtaaatatttggctttatttctgggttctctattatgttgcactgatctacatgcctacttttataccagtaccatgctgttttggtaactatagccttgtggtatagtttgaattcagagggtgtgttgcctccagatttgttctttttgcttagtcttgctttggctatctggggtctttttttgtttcatatgaattttaggatttttttttcaagttctttgaagaatgatgatggtatttgaatgcaaattgcattgaatttatagattgcttttgtcagtattgtcattttcacaatattgattctgaagcagcatcattgtctggggtaatacccaaggcttgttgtctcacaccaagggaatcgaggatgtggacacacacatgaagtgaggtttaatagcacaagaaagagaaaggagaacagctccctctcttgaagggggggagggagagagagggagagagacagacagacagacagacatgggggcagctccctaatgggaattctagcccacgggggagtgcaccagattttatagacaggcttgaggaggcagtgtctgatttacatagggcccacagattggttggaccgggtgtgatgtttacatagtgtgcgaggaagctggctgccctaccctaatcttattatgcaaataggctttccacttggtcagtaccatgttgtctgctccctactgcacacacggttggaaaagaaaagggaagatggagccaccattttgaacatgcctagtcccaggtggccttttcctattggcacaactgctggcattcacccatgcaagcttccagcttgcttgtacatgtgtgcagctccattttacaggctgctctttgttagaaacaagatgatttgggggctgcttttcattaaaaggaaaaccttactgagaacttcctcaccctcactatctgcctaaataatttctctttaactcctatatcaaaattccggcccgggcgctgtggcatatgcctgtaatcccagcactttggaaggctgaggcgagcagatcacttgaggtcaggagttcaagactagcctggccaacatggcaaaaccctagctctactaaaaatacaaaaattagccaggtgtagtggcatgtgcctgtagtcccagctacttgagaggctgaggcaggaaaattgcttgaacccaggaagcagaggttgcagtgagctgagattgtgccattgcactccagcctgggtgacggagtaagacgcctcaaaaaattaattaattaattaaataaataaaataaaattcttcccatccatgagtgtgggatgtgtttccatttgtttgtgtcatctattatttctttcagcagtgttttgtagttttccttgtagagatctttcacctccttggttaggtgtatttctaagtattttattttattttttttgcagatgctgtaaaagaggttgagttcttgatttgattctcagcttggtcattgttgatgtaaagcagtgctactgatttgtgtacattgattgtgtatcctgtcagatctaggagctttttggatgagtctttagggttttctaggtatactgtcatatcatcagcgaacagcaacagtttgactttctctttactgatttaaatgccctttatttctttctcgtctgattgctctggctaggacttccagtactatgttgcatagaagcggtgaaagtgggcatccttatcttgttccactttgctgtgggaatgctttcaacttttccccattcagtgtaatgttggctgtgggtttgtcatagatggcttttattaccttgaggtatgtcccatctataatgattttgctgagggttctaatcataaatggaggctggattttgtcaggtgctttttctgcatctattgagataataatgatttttgtttttaatactgtttgtatgatgtatcacattttattgacttgcatatggtaaactatccctgcatccctgatatgaaacccaacttgattgtggtggattatctttctgatatgctgttggatttggttagctagtattttgttgaggatttttgcatctgtgttcaccagggatattggtctgtagttttctttttttgttatatcctttccaggttttggtataagggtgatactagcttcatagaatgattcagggaggattccctctttctctattttttggaatagtttcaataggattggtaccagctcttctttgaatgtctgatagaattcagctgtgaatccacatggtcctggactttttttccattggcaatttttaaattactgttttaatctcactacttgttactggtctgttcagaatttctgtttcttttttatttaatccaggagggctgtatatgcaggaatgtatccacctcttctagattttctagtttgtgtgtgtaaagatgttcatagtagccttgaatgatcttttgtatttctgtggtattagttgtaatacttcctgtttcatttctaattgaacttatgtggatcttctgtcttcttggttaatctcactaactgtctatctcttttgaaagaaccagctttttgtttcatttatcttttatatttatttgtttcaatcttatttaatttggctctgatctttgttatttcttttcttctgctgggtttgagtttggtttgttcttgtttctgtagttatttgaggtgtgaccttagatttctatttgtactctttcacactttttgatgtaggcattcaatgctatgaactttctcctcttagcacgacttttgctgtgtcccagagtttttgataagttgcatcactattatcattcaaataattttttaatttccatcttgatttcactgttgacccacagaccattcaggagcagattatttaatttccacgtatttgtatagttttaagggttccttttggagttaatttccaattttatttcactgtggtctgtgagggtactaatataatttcaattttcttaaatttattgaaacttgtcctgtggcctatcatatggtctctcttggacaatgttctatgtaccgatgaaaagaatatatattctgaagttgttggatagaatgttctgtaaatatctgttaaatcttatttgttctagggtatagtttaagtccattgtttctttgttgactttctgtcttcatgacctgtctagtgttatcagtggagtattgaagtcccccactattattgtgttgctgtctgtctcatttcttaggtctagtcgtaattgttttatgaatttgggagctccaatgttaggtgcatatatatttaggattatgatattttcctgttggactaatcattttatcattacataatgtccctctttgtcttctttttaactgttgttgctttaaaatcttgtttgtctgatatgagaatagctactcctgcttgtttttggtttccatttgcatggaatgtctttttccacccctttaccttaagtttatgtgattccttatgtgttggatgagtctcttgaagatagcagatacttggttggtgaatttttatccattctaccattctgtatcttttaagtggggcatttaggctatttacattcaacattagtactgagaggtgaggtactgtttattcatcatgctagatgaatagaatagggccaatggggttatgttccagaggggattatggctgtctctgttgccagggaagtgggagaaaaccagtagtgataggcctcacccagctcccacgcagttgacggggccagtctcatttctactgtggccctgctaacagcaccaactttatctccaggcaaccttcaggcaagagtcagacctagccccaggctgtaagtttccccactgagaaagcaaatatggctttcaagccatgcctcaccccacctgcccacactctccaccataactcctgctctcctatctgcagcagttttcgtttgcccctggattctgctcaagagagttcatgcccagtcaaaattattacagagttcatttagaagtttctttcaccctgtgacccctcccgaattctaccagctactttccctgagggcccctatgagatatagtcggggttgtcttccctgggcttgaactggagaatggcagtgcctacttggctcttcccactgctgcttctacttttatatttcacgctaaatctgtttcagctctaggtacggttaaatccctcttccataatctggatttttggattccccagtggggatgtgtgtccagatgcaggttttctacctctcacactttgggaactcacagtttttcaccagtcttgaagaattggcagcggcctgccacttctttcaaaggatctgtgatttcttttggtcttcctggttcacttctgcagtggttcctggagcaagtgtccatggtgtgagtcttcacacgctgttctgtccatccaagggggagctgcacatcagccctgtctcctatctgccatcttccttggtcttcctgatatcctttgtgacccaaaagtagtgtgagttagctatttaaaattaatagactaagtttagagcagttttgttaccagaaagtggtcccgatctagaccccaagagagggttcttggatctcttgcaagaaataattcaggatgagtccatagatagaagtgaaagcaagtttattaagaaagtagagaaataaaagaatgactactccatagacagatcagccgcaagggctgctggttgcccattttaatgtttatttcttgattatacactaaacaaggggtggattattcttgcctcccctttttacaccatatagggcaacttcctgacgttgccatgacatttataaactgtcatggtgctggtgggagtatagcagtgaggacaaccagaagtcactcttgtcaccatcttggtattggtgggttttagccggcttctttactgcaacccgttttatcagcaaggtctttatgatctgtatcttgtgctgacctcctatcttatcctgtgacttagaatccctaaccgtctgggaatgcagcccagtgggtctcagcctcgtttcacccagcctatatacaagatggaatctctttggtttaaacacttctgacagttttactgtataaaaaattgagcagatagtacagagagttcccatatactctctctttccccatttaaagattcctctattattgtcttgcagtagcttggtacttttactacaattgatgaaccagtagtgatacattattattaaatgaagtccatagtttacattaggatttacttttagtgttgtatagtttcgacaaatatataatgccatttatctgcccttacggtctaatacagaatagtttcactgtcctaaaaattccttgtgctccacctttttatctctccctctgtcctcacaaccactgatcttttttactgtttatatagtttgcctttttcagaatgtaatataattagaatcatacagtatggacccatttcagaccagcttttttccctaagtaatatgcatctgagtttcctccatgtattttcatggcttgatagctcatttgtttttattgctgaataaaactgtctagatataacatagtttatccatccaagcaagaccttgtctctaagaaaaagaaactgctctaaaaagtaaaacctattaatttttaaaaaggtaagaaccatcaggaatggtggctcatgtctgtaatcccagcactttggaggaccgaggcaagaggattgcttgagcccaggagtgcaagaccagccttggcaacatagcaagaccttttctctacaaataatataaataattagcctgatgtggtggtgtgcacctttggtcctggctacctaggaggctgaggctggagaatcacttgaatccagaaggcggaggttgcagtgagccaagatcatgccactgcactccagcctggctgacagaatgagaccccatctccaaaaaaaatacaaaaataaaaataaggcccaactatatgctatctacaggaaatgcactttaaatataaagacacaaatgagttaatgagttaaaaataaaatattggaaaaatgtataccatgccaacactaatcaaaagaaagctgagtgactacattaatatcaaaatagatttcagagcaaagaatattaccaaggataattaacattatgtcataatgatacaggggtcaattcatcaggaatttgtgacaagcctaaatctttatatatctaatagcagaacttcaaaaaacttgaagcaaaaactgataaaactgaagggagaattagaccaaaaaaagagttaagaataacgtgcatagcatgctattttttatgcaaaaatactaatgtatgcttgaatttataggctacctatgaaagcattatgtaagaaactgataatacttgttgcctccaggaaggggagtttgatggctagtgtacagagagagaagggaatctattcccatgtatgtatattacctattaaaaataaccatcctggccaacatggtgaaatctcgtctctactaaaagtacaaaaattagctgggtgtggtggcaggtgcctgtaatcccagctactcaggaggctgaggcaggagaatcgcttgaacctgggagacaaagattgcagtgagccgagatcacaccattgcactccagcctgggcgacacagcaagactctgtctcaaaaaaaaaaaaaaaaaaaatagaatgtttgccaggcacagtggcttatgcctgtaatcccagctctttgggaggccaagacaggagtatcacttgtatccaggagcttgagaccagcctgggcaacatagcaagaccccatctctacaaaaaataaaaaattagttgcccacagtggcatgtgcctgaagccccagctactcagtaggctaagatgggaggatcacatgaacctaaatcgaggctgcagtgagtcatgatcatgccactgcactcagtctgcgtaacagagtgagatcctatctcaaaaaataataataataataggccaggtgtggtggctcacacctgtaatctcaatgctttgggatgccaaggcagaaggattgcttgagctggacaacatggtgaaaccctcatctccacaaaaaatacaaaaattagccaggcttggtggtgcatacttgtggttccagctactcaggaggctgaggtgggaggattgcttgcacccaggaggtcaaggctgcagtgtgccaagaacataccactgcactccagcctgggtttcagagcaagaccctgtctccaaaagcataaataaaaatagaatttttttttttttgagacaaagtctcgctctgttgcccaggttggagtgcagtgacacgatctcagctcactgcaagctctgcctcctgggttcacaccattctcttgcctcagcctcccgaatagctgggattacaggcacccgccaccatgcccagctaattttttgtgtttttaatggagacgaggtttcaccgtgttagccaggatggtctcaatctcctgacctcgtgatccacccacctcggcctcccaaagtcctgggattacaggcgtgagccgccgtgcctggcaaaaaatagaatttttacagataaataagaaccgaggagtagagaaaagttgtataaataactctttcaaaaaacttttgttggcttcctttccaatttgggcctggcaggatggctcctgcaaagaagggtggcaaaaagaaaaagggcagttctgccatcaatgaggtggtgacccgagaatacaccatcagcattcacaaacacatccatggagtggacttcaagaagtgtgcccctcggccgagcgtggtggcttatgcctgtaatcccaacactttgggaggccaaggcaggcggatcacaaggtcaggatttcaagaccagcctggccaacatggtgaaaacccatctctactaaaaatacaaaaattagccgggcgtggtgctgggcgcctgtcatcccagctactcgggaggctgaagcaggagaatcgcttgaaccccggaggtggaggttgcagtgagctgagatagtgccactgcactccagcctaggtgacagaccaagactccatctcagaaaaaaagaagcatgcccctcaagcactcaaagagatccagaaatttgccgtgaaggagatgggaactccagatgtgcgcgttgataccaggctcaacaaagctgtctgggccaaaggaataagtataagtaatgtcccataccgtatccatgtgcagtttccaggaacgtaatgaagatgaagattcaccaaatgagctctatactttggttacctatgtacacattaccactttcaaaaatctacagtcagtatggatgagaactaactgctgatcatcaaacacatcaaataaagttataaaattgcaaaaaataccacaaacttttgttgcatagaacaaagaaatgtgatggttgttggaggagcctgtcaggtcaagaaatagtgtttttaagatgagggataacagaatgtgtagaattatgggaataaagtaatgaggagagtaaccatgatgatgaagagacagaggggacatctgagacagcaaagtatttaataggtagaggtggtacctggtgaccaaatagtgacctttgctaaaaggaacacctactctctggtaaccaggggaagaaagagtccatgggtacaaatgcagatgaggatatactatgtggaaaatgagggagttcctttctgatggcttctgtctcaacgaggtcattagcttgtcaaaaaatagatgaggtaaggccgggcacggtggctcacacctgtaatcccagcactttgggaggctgaggcgggcggatcacgaggtcagaagattgagaccatcctggctaacacatggtgaaaccctgtctctactaaaaatacaaaaaaattagccgggcttggtggccttccaccacatgatgatgcggaaagaaggccctcaccagatgttagtgccttgatcttggacttctgagctctgaaactgtgagccaataaatttctgtttgttataaatgaatcattcttagatattctgttatagcagcacaaacaaactaagacaacaacctacagaatgaaagtatttacaaattatatatctgattaggatctactccgtagaatatagaaagaactcttacaactcaacaacaaaaagacaaaccccccaattttaaaatgggcaaaggacttgaacagacattttccaaagagggtgtacaaatgaccaagaagcacatgaaaagatgttcagtatctttagtcattagggaaaggcaaatcaaaaccacaatgagcctgggtgaggtggctcatacctgtaattccagcacttagggaggctgaggcaggtggatcacttgaggtcaggagttcgagaacagcctggccaacatggtgaaaccctatctctactaaaaatacaaaaattagcggggtttgatggtgcatgcctgtattcccagctactcaggaggctgaggcaggagaatcacttcaacctgagaaatggaggttgcagtgagccgagatcacacctctgtactccagccttggcaacagagcgagcctctgtctcaaaaaaagaaaaacaaaacaaaacaaaaaaaccacagtgagataccacttcatatccattaggatggctagaattttttttatataacaagtgttagcaaggacatggagaaattgaaactcttgtacattgctggtgggaatgtaaaatggtgcagccactgtggaaagcagtgtgatggttcctcaaaaagttaagcatagaattaccatataaccccaagtcccactgctaggtatatactaaaatatttgaaaatgggtatttatttatttatttattaaatgaggcaggatcttgctctgttgcccaggctggggttcagtgttatgatcatagttcactgcagccttgaacttctgggctcaggccgtcctcccgcctaagcctcttgagtagctgggactacaggcacatgccactatgtcttgctaattttttaaattgtttagagtgggtgtttgtgtggcgggggtctcactatgttgctcaagcttgtctctaactcctaatctcaagcagtcctcctgacatggacttccaaagtgctgggattacaggtttgagccactgtgccggcctgaaaataggtatttaaacaaatacttatatgtgcatgttcatagcagcactatttacaatggccaaaaatgtacaaacaactcaaatatccatcagcaaataaatgcataaaccaaatatggcatatacatacctacttccccccaatggctcctcctatccctcagtagatttgatgttctctcatttgtgacttcagagtatattccacagcttaagctttagtacccaacttgtttgtggccagaagaggtcagtgtccctcttctaacctctgagctgcttcccatgtagtgattgtatctcgttcattaatacatccctagtacatggcacatactaaacactaaaaatacttattgaacaaattaatttattttgtcctatttcagatcccatatagaattatatattgcacatcatttatatgtcaaatgcttatattgtacttttctgtttttgttctttcatttttgcctctcttgctcatcagattataaagtatcccaggacagtgctctgtaaccagcccatagtagctactgctattttaccagctactgtatctttccttctttgatttccagcacctgacagtgaaaagagcaatttgaagaaaaacaaaatttatcttcaatgtgaaaagcaatttataaaaatccgaatacttgccaggagcaacttgacaaaaaagacaaaggtggtagaagaaatgtaaccagcccacaattccaatgttgataacagatgagctccctttcaaggtgactgacatttacacaagtacacagagcaagaagaaggtctgagtgaactgccaagcattttaacttctcctgagaccaagtacatcaacagttctcttggaaaagaacaactgatttgggagtctagcagactgccagctgcaagacattcatccagcatcaggaacacaatgggccttcatttgcctgcctttctgagggcaccaatcaaaagtaacagctgccacctttttctatgagacttgattataattttctatggccaagggtttgctgtgacacttccacatcattcttcagtatgtagtccagagattagctacagattcaagaaacacagactgtaaactattatatacagacatatctcaaaataagcatacccattagtgccagctgccctgaaagactgaatgaccccagctattttccaaatgttttttcagaaagccatgaacacacctttctgggatcctatctatttcaaagacaggcaaagctctgtggttcagttccaccacccagtaccaagcccacagtatgcagaccatacgccttacacatggccttttctctttatgtaattgctgtaccatattcagcagatctagactgactcaaagcatgttccctcaagaagctccacagaaaaaaaggtttctgtgatcaaaaatcatttgggaaatgctgcaaaccctatctgcctcttagagcttaaccatgcatgtcggggcataatataaaccttttccagtctgggccacagagtgagaccccacctctaaaataataaatcaataaactcttgagaagtacacagaaaagaaacttctgtaactttttaggtcttaattacaagcaattgtagcttaatctaaacttgctcttcactttatttctatgctcttgaaaactagtgacataagccttatgaattttttgtttgtttgtttcttctttttttaagagagagacagggtctcattctgttgctcaggttggagtgcagaggcacaatcatagctcaccgtaaccttgaattcctagtctcaagtaatcctcccatctcagcctccctaataactaggactacaggcacataccaccacatctggctagtgtgtgtgtgtgtgtgtgtgtgtgtgtgtacaggggtctcattatgttccccaggctggtcttgaactcctgggcttaagcgatcctcccaccgcagcctcccaaaactttgggattacaggcatgagccactacacctggctggattattctttctttaaaaaaatttttttggccgggcgccgtgactgtaatcccggcactttgaggggccgaggcgggcgaatcacgaggtcaggagatagagaccatcctggctaacacggtgaaaccccgtctct

SEQ ID NO: 316 - DNA, 1984 bp, Homo Sapiens
gcctcgagacacaacaacaagttgtttgtcccacatcatgctggggtggctgggaggggatagggtgagacagggagcagccactccactgaagaccaggccatgcagaggggatgagaagggcagcgttacctcccgagaggctactccaaggagagcggctcggggtcactgtttcccccttttcaggctggcccgcttcactatctgcgcccccttcctgccctctatcaggtccggctgtaggccactccctctcagctccacctgcagacagcagcagagacagaaagcaggacagatcgcaaagacgggcagaacacaggcagaagatcgaaaggaggccacacggaggtggcagacacactgcccaccagggagaagagagactggagagagagctcataaagagcactttgcagtatagaaaagcccttcgacaggcagcatcacccagaatgtgacttgcttgaaaccccagagccagttggtgacagaaacaggacgatccgggtgcaatcccatggtggctcacgcctgctatcccagcactttgggaggccaaggccggaggaccacttgagcccaggagttcaagaccaatttgggcaacatagcgagcccccatctctacaaaaatttttttaaaatagccaggcatggtggtgtgtgcctgtagtaccagctactcagaaggctgaggcaggaggatcacttgagcccaggaatttacagtaagcccaggttacagtgagccatgagcatgccactgcactccagcctggactaaacagcaagacttcatctctaaaaacaaaagaaaaaagagaagagaagagagagaaagaagaaagaaacaaagaaagaaacaggatgagcgcagcctcccgagacccaaagctgagtgtttaatgtcactgtcacaatgcactgggcaccagagggcaggttctggtgggcgcacacacactctggctcccagggtggaacatgatccctgggggcctcctggtccttttcctccggcgtctcccaactctgggtccggagctccccacagcagcgtcccctcagccccggcctccggcgcccacaccaccagccctgccggcctcctgccaggcggttaccttcaggaagacccgccgccggaccaccctggtggagatggtctcctcgtcgtcactgaggccctcgctctcccccagctccttgtccagctcctggtggatgtgctttagcacaaagcacagggaccccctgacaatgtgcatcacgttctgacagctgaccaggaagaagctcagcagcaccagcgtgaccaacagctgggtgacgaaagtccacatcctcgcctcctcaccagcccggtcctctggcagccagggccccggccaccacggggggcctgcctctcattctccactgggactcctgagtcccccagggaccccttgcattccccctccctatctctctggtttgctctcttggtctctcactgtttctctctctgtgggcaggacaccgaatggccctctcggctgaagcagcccggcccaagtgcccttctgcccagcagccaggctctgccctgagtggcccgggtgacatcacgctcctataattttacctccccaaaccagctgccggagctgtccaaccgggctagaaggaagccggcaggtgcccatgtcctgagcactgaaagcacaagtgaaagtcactgtgtgagtgacacccgctgctgcctaaccccgccctgcccagagacctggaagtgggggctcggcctctcacctatcctgcccatccccatgggaactagaaagagttctgcccagggaaagtttcttactttcagaaaataatacagtccgagaaagcagctacttgtgtgtctccttgggctgctactgcggtgatccaaatgctgttccccggcatggtagggatgagaccagctaataccctgggtacttag

SEQ ID NO: 317 - DNA, 3931 bp, Homo Sapiens
atgtcaaactgatgagcatccatcgtatttgtagacacccctcaaaggagagttgtacagcctattccactgacatcctgaccaaggcatctccatcatgcctaggtggagttggcctttttccttacattctgtcttcactggagaccaggcaggtgaaatcagctgggtgtgaagtggccttcagccatgtcctctcctggggaatccatccccctccttccactctttccttgtaattggaattggaccacctggtgcccacggctctctggggtgaagctccctcttggtgtgtcctgttcttcagtgacatttatttttgctttcctcatgtcccctcttgcagtgctcatcctgttgttacagtagctatttgtagcctatgcaccagcctgtgtgttcttggggccaaggactgtgtcctatgctccttcctgtcccctgtattgcatattgtaccatgaacctagtagtgagtgtcccatgcatgtttgctgaatgagggagtgaatgtctgacagacgtttcatggcttgcatccagcctgcccctaaatgtttccctaatttctaatgctgacactagacaccccactgaaggactagggtgtctaactattccatgctaagtatgggcaaaagaggacagtttgaccaagatgctcttttacccttgtgtatccaagttccctctgatcattaaatgagcagagacttcacacagaaggtgttgctactgctgcagatggaggtcagaattaaggtactgctactgttgatctcagacctttgaaagccagacccaagcttggggtcttggggatggggatgctaggggatgggatggccagatacaccagagtggctgggaatgaaagagtgtcccggaaaacctgcttcctcggagccgatcctgtgtgagcagaagaaatctatccacagaggggtgagatcgcagagcaagtgggttacctaaaaatagcagtgctggtttcccacagttagagatgggtcctctgccattcatctcaattgctttgtgcaagtttgcttatttattgagagcgagagaaaaggatcaaaccattcatccaaagatggaaatctgcaacctcttctacaatgatcagccagacagatgagctgagtgagaagtccctgaaatctcagaggcctagggctggccaggagagtgggatgggcatgcttaggagagtggggtgggcatggttaggagctgcccccagcttgccctgccttcgtagcagagttgatggtgggctgaaccttacccccaacatggggacttttgcaggggaggcagacctgtgtgtacatgtgagggtacatagacatacatgaacgtctagctctctgagggaagagatgagatgcataaatcacctaacccagcacaaagtacacacaataggtgcttagtaaatgttaattagggagtcaagtaggtagaagttgaggtcagggcaggaggaggcagggatagaggaacataatgtgaagtagccagagtatttttgacaaaaaggtgtggattttggagtcaggaaagcctaggttcaaatcccagttccaccacttgttaacatggtaacctcaggccagttacttaacctctcagagtatcagagtcttcacctatacattttgagaatggcatgacatctcatggtgttactaggattattaagtaaaataatatatttagagtacctgtaccagcccggggttcgataaattacagctgtttttctttttattatcatttattgtgaatatcatggacaatgaggttcctcagtttattaacagttagaatcttactttaaaaaaagaacccaaattaggctgggcatggtggctcatgcctgtaatcccagcagtttgggaggccaaggcgggtggattgcttgaggccaggagttcgagaccagcctgggcaacatagcaagatcccatctctaaaaaaaaaaaacaaaagaacccaagttggaaatacttgcaagtcatgtatctaatctgataaggggttaatatccagaatatatagagaactcataaaactcaacaataacaaaacaagccattcaattaaaaaatgggcaaaagacttgaataggcatttctccaaaggagatataaatggccaataaacacatgaaaaggtgttcaacaacactaatcattagggaaatgcaaatcaaaactacaatgagataccacctcatacctatcggtattaggatggctactatcactgtcaatggggatgtaaatgatacagtcactctggaaaacagtatggcaattcctcaaaaaattaaaaatataattaccatatgatccacaattctacttctgggtatgtacccaaaataattgaaagcagggtctcaaagagatctttgtacacccatgttcattcttcacaatagccaaaatggggaagcaactcacccattgtccattgtacattgatagatgaatggatatgcaaaatatagtgtatacatatatatacatatacacacacacaatggaatattattcagcctttaaaaatgaaattctaacatacattacaatatggataaacctcaaggatgttatttttggtgaaataagcaagtcacaaaaagacaaatattgtatgattccatttatatgaagtacttagagtagtcaaactcattgagcagaaaagagaatgatgatccagggaatgtggggagaggaaaatggggcgtttttgtttagtgagtacagagtttcagttttgcaaaatgaaaagcattatgaagatggatggtggtgatgtttgtacaatattgtgaatgtacttaataccactgatgtgtaatttaaaaaggattaagatggtaaactttgcatgcattttatcacaacaaaaaaaattggaaaagcactaaaatcaaagataccaattttcccccaatcgatccatagatttaatgcaatcccaatgaaaacatcagtaggcttttaaaaaactgaaattgacaaatgtattctaaaatttatattgaaatgcaaagacctcataatagccaaaacaattttgaaaaaatgcaaagttggaagatttatactaccagacttcaagagatactataaagctacagcaataaagtattggcataaggataggcatattaatgaatggaacagaatggagagtttaaatgtagatccatagacatgtatggtcaattgattttcgaccaagctactgaggttttccacgaggaaaggttagtcttttcaacaaatgatgctgaaaaagttggatatccatttggaagaaaccccaaaaacccaaaaaaacaaaaagccttaattcttcttacttatcacaacacacagaattcaactcaaaatggatcataggccttgggacaagtaatattatgtgtcaacttgactgggtcacaggtgcccatacatttggtgaaacatcattctgggtgtttctgtgagggtgtttttggatggaattaacatttaacttggtaggctggataaagctgagtgctctccctaatgtgggtgggcctcgtctaatcagttgaaggcctgactagaacgaaaaggctgacattcctttgagtaagagaggattcctcctgcctgatggcatttgagctgggctgtcaactttttcctgcccttggacttgaactaaaacactggctcttcctgagtcttgagcctgccagctttgcactggaactataccatcagctttcctgattctcaggcctttagagttgtccagaactatactgtcagctctcccggctctccagcttgccgactcactctgcagatcttgtgacttgtcagcctccatcatcatgtgagccaattcattataataaatatcttttcat

SEQ ID NO: 318 - DNA, 3616 bp, Homo Sapiens
agtagtaggcgcatgcgtggttgcgatcatggctggcggtaacttcgcgtttctgttacccatttttaaaacgcatcttcaggtgttccttccttctcatggaaggaacattaattaaattcagagggactgggttttagtcctaactcttattcctactggctgtgtaaccgtggacaaattatttaacttctcagaatcaggttgttcaaacctgaggttgaactgcaaaaaggttacgaagtgacactcagtagggcccgaatccatgttttctttgatcccaatcttttttaaaaaaatttcttttaattacttgccaacattttagaatttggaaatctcacatgaaattctggacttttgaagctgaggaattccattgcaacaatcaaggagactaaataggaaatgacacttctgtttggccatcttgccctcattggtttagaatggcagtggttctcaaccctggctgcacattagaatcactttaggagaggtaaaaccatactcacgctggagacctactcctagaaattctaaagagtttggggctgggaactggccattgatctgcctttgaagtttcccaagtgattcccaacctctgatgtaataaatttctggctgctgtcgtatttgagatttgacccccccaggtctaagacttaattgatttttaaggctgtaagacatttctaagactttgacttttaagactttcctgcctcattctgaagagaaaaggccacatgaggacaccatgagaaggcagctgtctacaagccaggaagagagtcctcaccagaaaccagctctgctggcaccttgaacttggacttcacgcctccagaacagtgagaaaataaatttctgctgtttcagccgcccagcctgtggtattctgttatggcagcccaagctgactaatacactacctaatagtgaatgagaagaattaaatcagaaaatataaatgcattaataaacataccatgtattgggcacctccctgtgccaggcacttcaccatcatctctagtcctccaaaacacatgctgtttgcaccacatcatgctgccaggcacatagttggcttgttgatttgtgtgtgtgtgtgtgacaagatctcattctgtcgcccaggctgaagtgcattggcatgatcatactcattgaaacctccaactcctgggctcaacagatcctccttcctcagcctcttgagcagctatgacaatgggcatgcaccaccacatctggctaattttttttaaatgtttttgtagagacagggtctcactgtgttacccaggctagtctcaaactcctgaccttaagcaatcccccgacctcagcctcccaaagtgctgggattataggagtgagccaccacacccggccggcttgttgaatttgggatatgaatatcatagtcttattaacaccatgtttataagccataattgtctttatgaatgtattcattttggaaaagtaagtactaaggatgttcagctttctgtgctatggattattatgtgtggagaaacaagaaaatgagtcacagtcctcacttaaatattttaccatctagttagagatgaagacaagtatattaatgttactggcccatatgactatctttggaaaaacaatcatataaagtcaagattcagcacagggacccagggtccaaaagatttgcatttgactcccagctctataacttagccgtgtgatcacagtcaaattgcttaacctctcccttttctcatctgcaaaacagggaaataatagcacccacctccatcatttattatacacaaagagataatatgcctgaaatatatctagctaaataaagacctaatcaaatgtaagctgtgactattaccgtttgttgtttgcttcctgctttttactattgcaatttctaagatcagcctttttcaaaagatttttctttcatcttaaggctacctgggaactgactgtacctactacatacaccgtaacatgtatgtactatatacagccataatggggcaaggaaagaaaatggaatgtgtaatataagaataatggcatatagtcctcaaagactgtgttttatattttgtctccattagatattaacacagtgctatgtaatggaggaaacccaagaaatattttttgccttgaagaaaagaacacaaactcagaagtcacatggatctaagataagacttgcaaagatttaaattcaattctgccatttacttcatatgaggaccttgagaaccagttgatagcatatcagaaaagctaattaatttgccatggttaccaggaaaacagggcctagtctccaaagtacagccaaatagaggagccaaataaaaaagagggaaatttttgtcatgcatcttgtttttctgaaatgttatgttttaaaatatatcaatattcaaaacaccatgtgctttattgagttttaactcttaattttgtcctcttttttctgctagggtgtttttgagcagacaaacaatttcttattgccaggatacagcctggaactcttaagcacaccaggcaagcatatgtatgaaataaaatttctacaaagaagagattcgtcaaaaagcatcactgggacaccaaccaagtgtaaggctctgtgaggaaaagggaatttcagaaaactgtcatacccagccactgccagtgaggatatggtaatcttctttggggacagagtgcacattcccctgataagtctagaaagcataggattagggcccagtgtcgggcagacaatacatattacaggaatttaggagagaggcaagtcacaaaaggctgaagagttcagggaaaacctcacagaggtgagccagggatgatttctgatggctggagaagaggaaaagaagaaatgtcacaaagtgcaccattatcagaaaaaagacagagagtcaaacactttaggtggaacagaaagctccagtcaggaaataatgagatcgaattataaaaagaaccaaaatgtcaagctaagaaatttggaactgatccagagagtagctggaaagctgctgaatattttaaagggaaaaaaattacaaagtgaaagcagttttggatttgattttttcagttttctttattttgctgaaaggaaataagttcacatagtctaaattgaaaaagtacaataaatagtgaaaggtctccctcccacttcggtcccctgctgcctatttttctccctggaggcaaaccaatgttagcagcttcttatatattcttccagagataactatgcccatggaaataaagacgcacataaatttttccctcctcctttgtaaatgagatgcgtagacacttatttaccttgcatttttcactccaaaatctaacttacagattattttgcatgaatacataaaaaaggtcctcgttcacttttttaaattatgctatgaaaattcaacattcactcttttttaaatagatgcattggtacaaaagaatatacaggcgaaattgtctctaactcttctgcaacttgctgcgctgttctccctggaggcggtgtctagtttcttatatatccctccag

SEQ ID NO: 319 - DNA, 1111 bp, Homo Sapiens
tttgttactctttcttattctaattgtgtattcttatttactgacgtgtctccagctttcaaggcagagtctcacccattaggtcttctatatacaattaaatttacctagaaagtatttccttcttatttaaaactttttaaaagtaaattcatgtatacatatgtaaccaacctgcatgtcgtgcacatgtaccctaaaacttaaagtataataataataaaatttttaaaaaagaaagataacaaccaaaaaacaacaaaaaagtaaattccaaaatttctatatcacattacaaattcacatgccacccacgaagaatacatttgcaaaataaatgatgtcttgagacgaaatgagttttcaatgaagattttagagactctttatttttatttttattttttagacagagtctcactctgtcaccctggctgtagtgcagtggcgtgatctcggctcaccacaacctctgccttttatttattttttatgtatgtatttatttatttttttgagacaaagtctcactctgttgcccaggctggagtgcagtggcatgatctcggctcactgcaacctctgcctcccaggttcaagctagtctcctgcctcagcctcctgagtagctgggactacaggcgcccaccaccacgcctggctaatttttgtatttttagtagagacgggtttcaccacattggtcaggctggtcttgaacttctgacctctggtgatgtgcccgcctcagcctcccaaaatgctgggatgacaggtgtgagtcaccgcacctggcctctttgcttttcttaagtgactccatgggggacccatgcagccagcagcatctcggctttttctccctggaaggtgtctgcaggaaaccagcatcccagttaacttcagacgcgagagtgttgattatacactcaaggccccacattagggaagtttgtgagtcacagccccacactgggtctcccagggatcaacaagatccacaaaccagcatggttaggacaagtggttttacagtccttttttttttttttttttgtgagatggagtcttgctctgtcgcccaggctggagtgcagtggcgcgatctcgg

SEQ ID NO: 320 - DNA, 2309 bp, Homo Sapiens
ataaaataaaataaaataaaaaagaatatgaagagggggccaggcacagtggctcacgcctgtaatcccaacactttgggagcccaagtgggcagataacgagatcaggggttcaagaccagcctgaccaacatggtgaaaccctgtctctactaaaaatacaaaaattagccgggagtggtggcacgtgcctattgtcccagctactcaggaggctgaggcaagagaatcgcttgaaccctggaggcggaggttgcagtgagctgagattgcgccactgcactccagcctgggtgacagagcaagactccacctcaaaaaaaaaaaaaaaaaaaaatatgaagagggtggaagatttcgtatgttaacactctggaaagtcatcactcccagattctttccatggaggctctctcgaaagcagaatgacccccattctagaagcagaaggtgaatatggcaaaggcctgtggaggagctagtgtgaaaggaactgacatgaggacagctaccaactggagtgagaaagtcaggtctcagctacaagagcactagctgggcaagcgagaccggtagggccttcatcagaaatgccacctattttgacattttgagtccaaaaatgttcctatgtactacactgaagtgtgtccctgaaggtggccccagaaatggcccagatgaagtcctgggaaggccgtggaggtcatcctcttttgtttccttcttcaacttggtccaattaccttgctctccattgaatttcaaattagaccttgtgtcttcacacctcaagcctttaccctaagccttctctttgcctggaatgacctctttcctctcacatcattcaatttccatcccacctttgaaataaagcctacctttcttgctattgtgattactttagcttgcagtgacttctcctggctctaatatctgaatcttgtattcaataatcattctttagtaggttttccttagaaagcccactggacaaaagtcagattcatattaaactacagactaaagagcaggaagagcccctagagatcccctagccctactatttctgtttaggtgagcaggcaaaaatgtagaaggaagtagtgatttccttaaagttacaagagagtcaaaagcagagaatgcataaatccatgtctactgactctcaatctggaatgtcttccatgcatttttttaaatttcttttatgcctaagtagtttaacttgagatgaaaatgcaataagaatcacatttccacagaagtgataagaaattgatcagggctcctttctgatgtttcagcatgctatgagtctcacggaaggtccctgtttttgcacctcagggtgaatcatggatttctgaatgggcaggaggaaactgaggctaagtgaggctacctctggaatcactggaagtcctcccaggagggaagagaaagagacctatgacatcaaccttgagctttccttctttgttccttttatggccttcctcactttatgtgagttctgggatatgaaagtgctcaggggtagggaaagctgtaaatccccagggccttgcactataaacttcatttcctccctttattgcagttaactgcccatgaactctattaatattttgcaaattgagatccctaaaacacatgttactgttaattttaacctcatgctaactaggatgtggtcaaattttcacaacaaattccaaggatattttgatatgccttggaaaaatgcatttaaaggtgcctcgggggtatatactttttctaagtctacacattttctttcaattcttgctgtttaggaacaggcagaagtaaactgtcttatgtgaggaggagcaataatacaaagtgattcagttatgatacgggagtgacagaagcctctaacagaccaagagggacagtcaaggaacatcaactttctgaacttaccatagtaaaaatctgatgtcaacaaaactgttacacacttttgcgtacaggatcaatttacttagaaacacttcaccgttctataaacacaattcttcccttaggcaaaagccatgggttttataaatttaatgagacaaaaatgaatttttcccacctccaggataccaaatacattatcacagaatagtatcacaagtgtgacctctaaatctgatgagccagaagtaagaaactccttccttccttctttacttccttcctccctccctcctttccttccttcctcccctccttccttcctccctccctgtctccctccctccctcctttcctttcgttccttcctt

SEQ ID NO: 321 - DNA, 2426 bp, Homo Sapiens
atgcctttggagatggggcccaaaatgagcaaatttgcctttaggtatcagagaagttccatatcagataatgattctggctgtgcactggaggagtactccgaggtcccctgggccttagaccagagcaaatctagctctcttttgcttgcttatcagaggaaaatgtccttatattaacatccctggaaagaaacatctgattaaagggcttgtataccagttgctacaacatgataatgacatatagtattgtcagtctttgaaagaagatgagaataaagaattccaagtgttcagtgcttagcagcagaaagaagcacttggaagaggcatgattaaacttttgtctagagcaggaatgcacgctatgtgtgagcaatgtgggttgaagatcaactgaggtaaaattgcagtgtttgcctctcgagtgggccctggagtgtactggtactcattctgttttgtctgtttcacgtgtaaagagctgctggtcaacctcgtctatttttatcaggatgaaaaaattcactgtggcaggcaccatgctgaattgctcaaaccctgatgctcagcatgtgctgagataattttgttgatgtttgcacagaaactgagagtcaccattggcacatgaaacacttctgctgccttgagcgcaaaatggtccccagaggacaaggtatgttatgaaggatagccacccattctgctgtggtggttttgagcctgtctatgcagagtgctgtgaaatctgtgggaacatattagtgtcgaccatgtgcagatgacctatgatgggaagttctggcgtgctgcagaagcatgcttttctcgtgtctagcataaatcctttttgttggatgtctcttctttaccaaagtcagatttattactcaaaaatatgccacctcgggccaggcaatacatccatgcttctaattcttccaattatccatttcagtgagcttgatcaagaaacaccagaaaaagtatctgaatgagcaaaagcagttggtcagcagatcagtgtagacagtctctcctcttgttccctgctctgaactacaagttttctggccttttgggcgatgctgatgacactctttctcagaaattgtatattctgagtctctccaggcaaggaacatttttatcaatgcggaattttggaaagacagagtacagcattaaaccccagaagaccctgaaggactgggtgggcatgaagattatatgacatagctcctcctcaaatttggtgataaaagcctcttcagcagcagcccaatgagatggatatttgagccaatcagcactggatatctgatagcataaaataagaactagctaaagcaaaacaaccagaaccttgcaaataaaaattactgacctgatatggactgggcacaagatgaacagtgtttctgctcatggcaaccacacaggccctgtaagcagtagaaggctctagaaattgaatctggaccatggggcttcagggtaggctaatgatcaaacacaggggtatgaaaatcccctggggtttttgtcagacttgaaaccagagaaacgtgctcaggattctatggattctttggctttgtccaacatcacagtagcttcagcggatggatgaagcaagctgaggtcatccttatattctctgcaaactctgaaaaaaacggaggcagaagattatgagaaaatcagcagtatggaaactttgaactctgctgcatggaagtgcagaggccttaaagagtctaagttcagatttttgtctagaaaaaaaacatcatgcctcatgaaaaactagtacatctgccagtactcagacaatccaagtctcaatctagaccacagaaggtcagaggatgtcactgacaatggaaactgcaacatcaagatcaggcagcgtccaatgagtgacaagacctgggtgtaccattttgaagagaagggatccagatctcatcaccatttccacagaagtagaaagccccactctgacaatatcctgaatattgttatagaaagagaatattctcccaaggacaggctgcagctttacatccccaataactacagtaatttatgtggaataaaagggctcaggacatccaagcgtacatccagaatgccgatctctatagagagcatgcccgttcacttccctccattcctatgtccccgggagtgaagaagtttctgggattcctggtgtttctccttctcgtcctcctcttccgactcagaacaaaaggattattttcttgaacaatcaatccctcagccccacgccacagagatacgcctactatacagatgacctttctagtccaactccctgcccgtcagtttggttagaggaccactaaattcaagaagaaaagtggacacacatgcaaaaactattatttctt

SEQ ID NO: 322 - DNA, 2572 bp, Homo Sapiens
gatttatagtcctttgggtatatacccagtaatgggatggctgggtcaaatggtatttccagttctagatccctgaggaatcgccacactgacttccacaatggttgaactagtttgcagtcccaccaacagtgtaaaagtgttcctatttctccacaccctctccagcacctgttgtttcctgactttttaatgattgccattctaactggtgtgagatggtatctcattgtggttttgatttgcatttctctgatggccagtgatgatgagccttttttcatgtgttttttggctgcataaatgtcttcttttgagaagtgtctgttcatgttcttcgcccactttttgatggggtttttttcttgtaaatttgtttgagttcattgtagattctggatattagccctttgtcagatgagtaggttgcaaaaattttctcccattctgtaggttgcctgttcactctgatggcggtttcttttgctgtgcagaagctctttagtttaattagatcccattggtcaattttgtcttctgttgccattgcttttggcgttttagacatgaagtccttgcccatgcctatgtcctgaatggtaatgcctaggttttcttctagggtttttatggttttaggtctaatgtttaagtctttaatccatcttgaattgatttttgtataaggtgtaaggaagggatccagtttcagctttctacatatggctagccagttttcccagcaccattcattaaatagggaatcctttccccattgcttgtttttctcaggtttgtcaaagatcagatagttgtagatatgaggcattatttctgagggctctgttctgttccattgatctatatctctgttttggtaccagtaccatgctgttttggttactgtagccttgtagtatagtttgaagtcaggtagtgtgatgcctccagctttgttcttttggcttaggattgacttggcaatgtgggctcttttttgattccatatgaactttaaagtagtttttttccaattctgtgaagaaagtcattggtagcttgatggggatggcattgaatctataaattaccttgggcagtatggccattttcacgatattgattcttcctacccatgagcatggaatgttcttccatttgtttgtatcctcttttatttccttgagcagtggtttgtagttctccttgaagaggtccttcacatcccttgtaagttggattcctaggtattttattctctttgaagcaattgtgaatgggagttcactcatgatttggctctctgtttgtctgttgttggtgtataagaatgcttggccagggcaattaggcaggagaaggaaataaagggtattcaattaattaggaaaagaggaagtcaaattgtccctgtttgcagacgacatgattgtatatctagaaaaccccattgtctcagcccaaaatctccttaagctgataagcaacttcagcaaagtctcaggatacaaaatcaatatacaaaaatcacaagcattctgaaaagttttttcttattttggatgccttgttaaaaggcaagtaccccagcaggtgtcagtggagactgtgaccgctgaatagcaatggtgatggggtgaggctggatctggccagaagagggctgaggggcatggagaagactcggggagcacagggaagatgtgggaggtggggaggatgggagggaggacagggagaggacaggaaggactggctctgctcattctccttcgcacttctgtggagcagctgctctgggcccagataatgatctctcgagggcaggacttgtggttttatttgcgtcatgagcctttaggaagtttggggtcgtgcatgtagagctgaacgtggggacaccgagaacgtgcaccctgcatcccgactgctgagttcacttctctgcaaagcacaaatcgctgtcccatcctgggtcacactcctgggagccaaacctgggtgggattctgtctctaccccacatcagctgtaagatttggggcagggcgcagaaccccctgagcacgtgggaaactgatcaccacgtgggggatgtttgttagagagattcagtgggtgatgtgggggcagaaggaggcccctagagcagagtatggcatctgttctgaatgccgatatggcgttggggggacagcaccctggcggcctgcagcaccctctgtgaacagggaaggctggaaggaaggggtgggtccccctgacaggtaggggctgctggatggtcccactttgcccgcccggtctcttcctacactatggttctcactgatgttccctgggcagacaactcaggatgagcctctgtgagtgctggacttgtgttccatccagctcctccccaagagaggggcaggggctggtgccccaaagcaccagcaccccacatggactggcacattttgaaagatataacacaaagaacttccattataatcgctgcccaggcgaccattctcaacgcgtacattatttgttaaagtaatttttaaagcctcaaagtcatgagtcc

SEQ ID NO: 323 - DNA, 2740 bp, Homo Sapiens
atagtacttggatgttttagaaggttttccaagtattacataattcctagatgttcacccttattacactccaactattaaaaaggtcaaaattcagcctattttttttcattattttagattcctgtggttgggatattttaacattgatgagaaaaataattgaggttgatatttttacaaaatcatgcggtaataagtcttgatttcatgattcaaaagaatcaataaagcctaaaaataatagattactttaagctgctatgtaagatatatatggaataaattaaaaacctttgtgaattcaggtttattatttttaacctaaaacattctctttggttcattcatcccctcatgtcatgggggctcattggttttccttctttgtcatatttaagtatgatttttcaacaaaacttctagaagtcagcttattatgtcaccattcatgcaaagtgctcatgcctctgattggtccattcactgacgtgacaatttcaggtcctatgtttaaaaagaaggggctggccgggcacgatggctcacgcctataatcccagcactttgggaggccgagaggggcggttcacgaggtcaggagattgagaccatcctggttagcagagtgaaaccccgtctctactaaaaatacaaataaaaattagccgggcgtggtggcgggcgcctgtagtcccagctacttgggaggctgaggcaggagaatggcatgaacccgggaggcagagcttgcagtgagccgagattgcgccactgcactccagcctgggcgacagagcgagactctgtctcaaaaaaaaaaaggaggggggctaaatatccagtgagatgcactgaggaaaggaagcattttgctgaagacagcagcagcaacaaacaatggtctgtttgttgcaaacaagatgtagcttgatttctggtctgacatatgccatatacagatattagaaacgactgtttgaaggccacactggtcatctacaaagtaatgtttaccaattgacgacagggatttaactagattaaaaagatcaaagtgtggtttttctctgctttttaaaatttcactcggaatttgtagctgggccaattcaacacattttacttttcagtggaattgatttttctaatgtttcagaattttaacatatcaagaagaaaacaacgttctcaaagtctggcctctttagcatgatgtaaacctatagaaatgctttgaaatgtgctggtgtaagataagagttatcttgtatgatttaatcatatgcagtgttgtctcagttacgttcagggaaatgtttctgtgtcattcagagatgcttgatgaattaacacctcccaccctgagtgaggggttgacttgttgggagatgatttgggcttcactgggatctgtgacaggtgggggctgggctgggtgtcacaaagagaatagtggtagaaatcgggcgaaggaagaaagaagttactggtaaaaatcattacaccataaagcaccaaggaaataactgagttaaaataggtgaagtttcttttttcccccctgtaacaggagagttttccttatgataattattctgagacttggtcactttgtttttgaatgtggagctgctgaactcattcagaagccatttgctgcctatcaggactttctgaagaagttcttttgcctctgcctaccctctggcaccctcccatggaggcacaggggacccagagctaaagcattaccaggccatctccaaaacaccccgtgtgtgtgtgtgtgtgtgtgtgtgtgtgtgtgtgtgtgtgtgtgcactttgcagcccccgaggtggagaggcagtgtctggatcactgtgaatgcattgccccattggtcagttggggacactgttacaaatccactgaagtcctggtaaaactgtcaagagtaacaggcctcttctgttctaccctgctcacttccacggtgagttaccagcctgggcaacacagcaagaccccatctctacaaaaaaaatttttttaagtaattaaccgtttaaattttttcctaaagatttaacatgatttttccctcctatgtaaagtttactggagagacttgaattacttaaattcatgttaatatgatttttttttaatccaggtcacattttaacaaagtttattatgaaacaaatgaaatttgaactctaaaatggtactccttggcttcctcaagtcacaatgaactttatattttctttgtccttaaggactaagatagttgttttatttcagccgaatcacagagataaccactcctgcaggcccccacagctggcccaaaggggctgtctttctgacctggctgtgttagcactgattgagaaacgcaggctcccaaatattgcctttattaaaaacacaaactacagaaaatgggttaagagtatacgcatttcatcaaacacatataggggaaaaaatccttcaatttagagttaaataactcagctttgtatagtagagttagcgctccagtatctaacaatctcagaatcatctctgaaaactggtaactatgcttccatttttaattttgtcctaaatatcagatgtctttgatgtaagggtagggaatggagaaatattttcaattgtgtatttgtattacaaagaacttgaaatttactttcttagttgattatattaaatgatgtatatattatatgtggtttataagctc

SEQ ID NO: 324 - DNA, 12261 bp, Homo Sapiens
acaggcatttttttcttgtcattattccccacataataccatggaaaacttattatccagtatttacattgtattaggtattataaataatctagagacaatttaaaatacacaggaggatgtaactaggctatgtgcaaatactatgccattttatataagggacttgagcatccatagagtttgctatttgcaggggtttcttgatatcagtccaccatggataccaagggatggctgtacttttgttttaaaacattccatgctatccactgtattctgtattttctaaagaaaagctctaattctcagaacaacagaacaactctcaaaagaggttctcttaccctgtgttaccaacttggaagtttagttttaggatttttttttaaattattagccaaaaggccaataagacaaaaatgtgtgtgatccaagatatttatataattcaaagcctgtacttgatccaacaaaccctattgacagtatcattctgcttcattcagtctctgacagtaactgttgcttgaaactgatgtgatgaaatggaggaatagggtaaggatgtcttatcgcatgttctgaatcatctcaaaatttattcacaaatatgctataataaaaactctgatataaaacttgactaaaactttttatttttatatatgtgctatcctataccaatgaccctccctctcagtatacacatacacatatcactaacaccgataaatgaaaacataacagatatcaaaaatttactgaatgttactatagggttagaccttagcttctttatgtatggaaaagcagattcttgtctgtaaatgaaaaaaatccaacgttaattaatatcataaccccaaaatttctgcctgccataaaaagatagttaagtaaacatatctgttcaaaagttatggtaggacttaccaagtcacaatatttggttttcctctcctttcaggtatctggagaattacttttctctgttcctttgagtgtaagagtaaaagtatgggcatatgactaatcctggtccctaaaatctgggtagaagttgtatgtggcatttttcaggaaatacttttagttaccagtaccagtttagttcaattctccatttttttcttctgcctctgcaaaccctaaagcctcatagtaggatggtaatatcacaagatggcgactactctcttcctttagaagtctgagcatctataatgagcagagttcttctggtgacatgtggaatgagccagaaatacgagttcatatatgaaatttttatgtgcaatatgtaatataatttcaaagagatatatagcttgcaacagtccagtgtgggctgtgaacatatacctttggtactgtatatttatactcctctgcctgagtaatcctgcattacaacaaaatggttatagctttatactgtccaattctgctcctcattcaaccacgttcaagtctacagaatacactaaaaaaatctctaggggatttttctgttcaaacaatatttttactcctaaatggaaccagatggaataagatgtctcgaatactgacccatatcaatctaaaaaattaaaatacaaaaaaaaaacaaaaggcagagttgatccagcatgtatttattgatccagagataacttcagattactagaacatgaaagggagacctgaagagagcacattttgtctgtgtgaatttattcccatttgtgttcaatttctactctagtatttttccatgataacgtactgtgagtcatctttttataaccaagaaaatatttcttgcttttagcagcttaaggaaaaaaagcagtttagaaattattccaaactccacatctttgaagaaacaacttttttgttgccttagacattattttatcattgggaactccacaaaaactcatagctctggatattggacagatgtttggtgggagaattaagtttagagtacaaaagatgatttgtgcataaaattagtttttattgtttataaaatacatgcatatttatgtaatcatttatacctttcatcagttacttttccaatgtcacatatttacaactttaagcaacattatttaattgtgatgatataagacaactttcactttccttatcaaattaagcatgatgacagtgtatttctctcaaaatgtcataacaaattactgcattatttgtaatatgtaagtactgcatatttgtaagttcttacaaatctaatatatttaattgctttcatacatatgtgaactttttgtcattaaaatggttaaaactccagagaagtaaaaatattacccaaaaatgatagtaaagtaacatgagctgtggtcgagacatttaaagggagttaagtgaacatgcacaaatcaaagatgggatataataactatctctaaagtacagataatcaaaccattaaaataattctttgtacattttatgtttactcttacaatggtcagagctgtttcacattcaaccttttaaatgatttcttaaagctagatgactgtgttgaagaaaaaaatctagattcaaatccagttgcagtctactgtattcacttctttaaatgatgtcaacacaagtaatataacctcattattatgcagaagaaagtcatcccaagatcaaagaatgagagctgatacaaattatgattaacatgcgatagctgtttaagtgttcagtgacttcagttcattttatgtgatcattcatttaattatcctctgttgtctgcttccataggtgacgaattccagttatgaaatgcagtctctatggagttgccaattcttctgttttgttactgtcttttgggctcaagtcattaaaattgtgtaattctatgcctttaaaagtatgaagatatttttatttatataaattaagttatacaaaaactggacaagttgataattatttactatctctttgtcaagtttaattttatttttctcatgtctcaagctatttctctttttcttttctaaggctttgttaaaattagaagctgggaaaaataattttcagttggcctttggaagtatataatgtgaaaaatttatcttcttaattgaattgcacacttatgatatgtgtgcttttctgtttctacatttcattttaaaagttaaaagaaatgtaaccttaatagagtagtttcaagtatatctacatataaggattatctgtgctttttcaaaattcgagacagagtcttgctctattgcccaggctggagtgcagtggcactattataacacactgcaggcttgaactcctgggcccaggtgatcctctggccccagctttccaaagtgctgggattacaggcgtgagccaccatgcctcattctagttgtacatttttgctttattttatttttatacaatttcctcgaccatagtctgggaaactgattcagaaggtctagggtagagtcagattatttgaaattatttttaagaagatctccaggtgattttgatcacctcccagatttgaaacaactctaacacacagagatgaaacagagggaaaaacttacatacccacaaaccagaagggttcagtaattaatatggatcatttacattgcagtttattgatttgattattgcatttctcaataaataaaaagtcatgccaatgaggtaactatgagcagaacaaatgaattgtggggtgcatgtataatggaatacactattccatcaatattgaatgaactagatggaaactgaatggatctcaccaatatatttagcaaacagaaaaaaaattgcagaaacatatatatagtgtgatacgtgtaaacagaagttgaagggcaaaatataccatatattacttaagtatatatcaatgaacacacaggaattttaaaaataccaaattcaatatagtctttacctctggtggagagaagaggagagatactcaagatcaaccttggtaatgttgatttctttttttagtggtgagggtaaaatttttttgttttaataggagccttactaccatttgtatctgaaatatttcataagaaataaagtttgttggttatggaaatagcctgattttcattttcatacatgcagaggagagtaaagggagcaggcgttttatgtatcttcaatacaataagtttaaaatgtcagaaatctgttgactcgtttttgaaagaattgagaaaataaaaggtagaaagtagtgaagaaagtttctctaagattgccttaaatgccttgaattgtctctcatctcatggatgccatgagggaggtttactcatttaaaatagtaagtgaggcatgcaaaataaaggaaaaagttctgtatctatgttctttattagtttccaatgtcatcatttactttgttaaattaattcacgttactttagtctaaaaaccactaatgaaaaaatccatttggattcatagattaggcatgtgacaggtaagatttgaacttacatgtaccatgcttcccttccatcctcaatattttttttaaaaagcacacaaatgcatgagagtggttgcagattactttctgaaaggaaggaagcttttgttcttcattttgattttagaggagttatttaaaagcccagttatactctttacttgcaaacatttttggctatttgtgaaagttcacctccaaggaaatctaatcagccagacaagttattgtttcattttagcctgaaaaaaaaaatcacacatatataaaattacacacacacacacacttttattttaaagataggaggtctaaagaatataaaatatggcaatgtgtttctaatgtgtttgaaatgatcatagcaaatagtgaattgccactaaattatcaacaaattatttgcatttgacttttgcgtcagtttctaattatcatataacttgaaacataaacattggttaatactcttttgcagacatatatgatcttttaatggaatttaatcatttaattatactactcatgtaatatttttaattcattaaaaatattgctataaaaatactatgttttataaatgaatggtaagatttgaagaaacaagtttgaatgttatcacttttttcatggttaaaaaaggagactgtttttttcttttataatatacccagaagcccaattgccaaggtagttttatgtacttttccacagatgaagacacttacacattaatctacactctaaaacatggtaggtgcctcaaatgctaaagaaacatccagtttaactgtgaggctgacgcctcagatgtaccagaggattttgtcatttaaatacgaaaattcatagatctttttatatttatagcagcattgtcagagcttatcaaaaatgagctgacttacaaactatcaatggatttaacagtatgatctaatattcataacatcagagacagtataagttgagagacagattttatctttttattgttaaagatgtgttttttaacttttcctagtagattttgtcttttcatctcataactgctctaacgaaaggatcatgccaccaattttagtatattccattattcatgtaaaatcacagccagttcaatatccagagaagaaactagttaggaaagtttaatattacccatgttcttctctatgagattcatattaaagttttaattttgattttgatctttgcccaaaacattgtttattgtacataacagtctgcttgtgtataattaaaaagttgttaaaggtgttaaataaagataattgagatgagaatgtaaatcccttgcgaaaaatattcctctattccaaaaacactgtaagaaatatatattttagcataattcattgactatattcctatactaaattactagggtcagaatttctagaacaaagagttatccaatttaaattgttaccaaatttaaacatagaagattaaaattagtggagccagctacacagttgggtgtgttccaggatccttatattcgtgtgtattttttgtttttatagaaagaaatattttaagttacttttcatttttattgaaaaatatacacacaactaaatttaaatgttataattgcacatctggctatatttttggaaacttaacatcatgtaaccagcaccacccacatatcaaggttaacaccatcctgatttctaacagtgaaagttagtttctctggttttgttctaatgtaaatagcgacatagagtttacgttgtgtctggcctcttttactcactgttatatttgtaatatttatgcatgtgtaaattgtttattctcattaccatgtgatactcaattgagtgattctggcacattttttctatattggaatattggatggaaatttgggtagttatcagtttaggctattttgaagagtgctactatgaatattctactcatctttgggtgaaatatgctttcatttccattcagcatttacatgggaaaggtattgatggattacagagtctgtatgtgttcagctttagtgcatgctggcaaaaggttttctaaaggcgttttagtgatttacagcgtcatctacaatgtataagtgtttcaattgctccatatcctagttctgtttctgttttattttgttttcaggttagacattttgctaaatatgtagtggtacccgattgtgatttcaatttacattttcttgatgaccaataaagctgagcatctcttcaaatgtgcattggtcatttggttatcacctagtttaaagaatttgttcgtattctatggagttgtccttttcttagcggttcatagaagtcctcaatatattcaaaatatgagtcacacattgggaagttatatcacaaatattttctcccacttgtattatattttcagactcctaatgatatcttatttagataggtcacaaaaacatgaaacataaaagtaaaaatcagtaaactggagttaatttaaattaactacttttcaaaaacagtcttaatatcacagaaaagcaagccacagattgggagggggaaaatatttgctgtacatatatccaataaaagaattgtttttggaatatgtaaagtactacaaactcaaaaataagcaaatgactgaaaaacaatgacaagagtttggtgaagacactttacaaaagacatcttaatatggggcatataatgaataacaagatgctcaacatcattagttttcaaagaagtgaaaactaaaccaaaatgagataccaacatacaccaataagaatgactaaaattagaaagactgataatacgaagtgatggcaaaaaatgcacagcaactttgcattcatatattgttactatgaatgcgaagtactataggcacattagaaaacagtgtggaatttcttataaatttagacgtacatttactacctgagccaccagtctcactcctagatatttacacaaaggaaatgaaaaattatacccacacaaaaacttgcccataaatattcatggaaattacattcacaattgccaaagactgcaaaaaacccaaggtttctctttttctcttttaaaaagtttgagtaaacatctgggaataaaagtatgattttggttctcctccatatctcaggcattttcttcccgttcttttgagaacagcctatctcaaactgtttagacacaatacttatgagaggtttaatctttcctacagaggttttgaacttttctctatggctcccacattgtgttaaagattggcaaatattttgaaaaggtgactagccatgtgtttggggaaagtaccattcccccggcggagcttggttttctaaataatgagagactgtgagaaatttcaagttcacttattagaagccctctacattctgtgtgactcaggtttcagaaaatgtattgtcttagctcatttgtgttactatcaaggaataccagagactgggcatttgcaaagaaaacaggttgatttggctcacagttctacaggatgtacaagaagaatggtgccagcatctgcttctggtgggcaattaagctacctccactcaaggcagaaggcaaagtggagctagaatgtgctaaaatcacatggttagagagaaagtaagagagtaagaggggagatgtcaggcttttttccacaaccagcttgccagggaactcttgcaggaactaatagaatgagaattcattcagttccctccccacagggaagttattaatctatttatgagggatctgctcccatgaccctgtcacctcccattagccaccacttccaacactgaggatcacatttcaacatgaggttttgcagggacaaacatccaaagcacgcatgttgtgaaaaaatcagccttgtttggagatctaattttttttacattgtgcccaatagaccacagaatcgctagtttctcttcctcaagccacattcttcttcaagggaaaacctgatttttattcccaagattggaaatctgcaaacgatcctagggagggaaatgactggaatttccattatttaattctctctgttttcacagatctcttatgctttaaacaacgtaaattttacaattaatctgtcttgtatatcgtcgtgatgggaatattgtttgcagcaacctactattgcttttttagcattagaagtttcttctatatatttttatgtcaatgtttagatttctaagaaaaactttgatatattctccaagttaaaatacacatatttttaaagtttcaacaaacttttaagtttataatctgagaaacagtcctaaatttcaaaaataaatatctgaattatttaacataaaaattaatctgatttttaatattgatttgtccttttgaaatttgtcattggatttatatttttaaatacttacacaaatggtcactgtgttattttcttagctacaagttgaatcacagcattcccctttgggaaacctttgtttctttcttttaaagaatagaatttcaattccttttatggtggtcaataatttccataaacttgtcttaactacttttatagtagctacatctcctactgcatctatccattaatctgagtcactgattattcaaacatattctctaggtatccctatatactctcaaatctatgcgattttaccactgtaatcttctaagtagaacacaacaatcaacctttctgcccatctaaatcttactatttttccaagggctaactcacatagcccctcctccattgaggattactctaatgagaagtatactcatcttcctttaaatcctaatcattgttcatttctcttatcacttagtttttcctaccccctttttttatactcgctggtctctagatctttcccatatagtaggaaactccttgaggaggagccataccttaatcatgtgtatatttcttatatacctgcatgaaaggtactaaaatatttgttgaatatatgtgactattgtttttattacataaatatggttcattggtagaaaacagcactaatattttatagttaggatccattaccttaaaatagacattttatctagttgacgtcctagcaaattacctaatctttaagtacttaaaatgtatattttaaattactaaatcttgctttattttccctttaagagcaaactactagctacaatcttttctgaaagcttttcctactgtatcttttggaatagagtaaccttttgcacaaatcccagctcagcacttggataatttgaatgacgatttctctatttcaatatatgaaatcagaggagtttaaggtgaaaattcactaagtatatataggcattcctcaacttgcaaaatattttcatgaacaccttaattttataaatgatgtgttgcaagcttttattcagactacttaaatataaaacacttattgctcagactgggcgtcaatattgttctctaaggggggaaatagcagcagtttttgattgcaagaaaattatagtctttcctgtactgtaaatatcaaagacatcataaggcaggtagaaagttgtaaaatttctctttcagtagttggacaataaagagaaaaataaatatcatcatggactttaatgtgcacagaaaataaaatgttcaataaaaaatattaattatttctagtttcatgctttcttgtttacacaggtaatatatttcaaaatattttatttacctttaaaatgaaaatactaaaaaatgtatgagaaaagaatagagtaaagtcaagatgctttagcttggtggttcacagtagggagattaaagtaatcccaatattttcttgatttcttaaggtttaacaagtcatattctttgacagtaaatgttactagaaataagtaatcccaactggctgagggatatgagaaaaaagtatcagctctatttgagatataaaatgagaatgctagtaataataaatctctctctttatttctctctctctctctttcttagaaaaggtgtctccttattgactagaatggtaaatttatgttcctaaaaatggccttggtggcagcctaataccaacttgcatttgaagaatgttagaattgaggtacataaagtgaagtgatttgtccatggttataaaacatattatcagaataaggattagaagctgcttctaaacaagattgggacccaaatcttctgttaacagttctatataccaactcactttctttgatttttcatctgattagatcaattggaacttctttgtgtgtaaaacattttcaaacttaacagaagtcaaaaaacatggttttgatttagtttaaactttccaattaattttaattattctttttcatactcaaaatttctagagcctgcaaagctgactacctccatgcataaaccaaaaattgaggtttcttacatttttagtaaatatcttcattttatggagcatgctaattgacaaaaaatttggtcatttggaagtagtacaaggttgctcttggctgctctcatttgtaggaattcctgatctgagtgctgtattctataaatgatttctggaatttggcttagatgcttagttcagtctgcatgttcagctacattttctcctctctactcatctgctgctcatgcctccctacaactaactacctatagaaacaaagcctatgtctccagccttctgtgacaccaatagctaccactaggtcctcctatttcaggcatattccaggatgatcctgcctcttctctcatttcagatatcctgccttgtctatcttcatgcctatcaagctgacagaaatggaccgttcctttcttgtctacagagagggaaaagaatttcagtatacaccactctcaccagtctccaacaacacagctctttgtggcatttggggctgccctcaataggaagcatgtcattctacatacagagaatggttggtttacacaagacttcctgctgctgccatcaccaacagagattcctaatgtagacatctaacacattctgatcttgcagtaagcttagcaaagatatttctggtaaaaatgtattcagcagcagaatgacttcagcagttcatttatcacttgatatgcctgttttgcagttgtgtggtcccaggaatgcttgcttactatgatattttataatagtttcccaagattttttttcctggactctgaaaaattgctatgaaaaccaatagtgtatcttttttccttgggggataaggtttggaagaagtagtagaaatggggtagaagcaattcaggttgggcatatttaaccactcataagaaacttagtcaatattaatggaggcataattgccagatcaattgaaataattatccctccatattctgcactgggaagactacatttatagacagtttagaaacactggagtcagatttatcacaattacaatcccaactctgtggcttagacctaacctcataatgacacatggttgttaacctctactttatgactatctaacatttaattacagtatatttatatatatatactgtatatatacacacaaatatatagaacacacatatatagaaatatatactgtatgtatatatatttttacatatactgtgtgtatatgtgatatattataatcatatatatgattatgatatatatatcatatattata

SEQ ID NO: 325 - DNA, 5374 bp, Homo Sapiens
gagtgttccggagagcacgtgttagggaaggaggaggctgcgggctaacctgccgggagggagggataaactggtaaacacctcttgggttccaagagaaggaagaggacacatactgctcttcagatccgtatactgatccccactacaaccagtgaaccggaacattgaatctggatagggggccctggtgactaagatggcacgctctaaagatctagggcactctcttggccctgttttgcatcctatgcaggctgtgtgtacacagcaaggatatttcctggagggaattcatgaaacagcactacctaagtccaagccaagaattcagaaaatacaaatgcaacgtcctcatgagggaaaaagaagctctgaaagacaagagctcttgggtgttcatctatacctcatggtacaaatggagcatatatgcgtcaatgacaactgaaatgaccgctacagaaatgtatgtatataggcccagaatgccctgaaagaactcagttgtcaccaggagaattcaaaaaaaagcaacacattgtctgggtgcagtggccataactatattcccaacacttgaggccaggagtcaagaccagcctgggcaacatagccagaccccatctatacaaaaaaataaaataaaattacctgacataatgatgcacatgtgtagtcctaactagtggggaggccgaggcaggggaattgcttgaaccctggagattgaggttgctgtgagccatgatcacaccactacactccatcccaggaagcagagcaagaccctgtctctttttttttttttttttttttttgagacggaatttcgctcttgtcgcccaggctggagtgcaatggcacaatctgggctcactgcaacctccacctcctgggttcaagcgattctcctgtctcagcctcccgagtagctgggattacagacacccaccaccacgcctgggtaatttttgtatttttagtagagacggggtttcaccatgttggccaagctgatcttgagctcctgatctcaggtgacaccttggctttccaaagtgctgggattataggtgtgagccactgcacccagccaaccctgtctctttaaaaaaaaaaaaaaaaaaaaaactacccagagagcagaagtttcaactacattgaattccactaacgcggatgagtaggttgatagcacagaggacctgaagatgatgagcctgtcaactactagaaggtctacccacatccccaaattttgctacagtattctgtgcttgccaagcagtggccccgtctacatcattcgcccctgccactctctcctttgcatttatgtatcaatgttttcaaactacttagagttatgtatcacatggtctcttgataccatacctttgcctgtgttgtttctctgcctggaatacacttctgtcctatttacctaatttactcctactttttttccccaagattcagcttatatgccatctcttcttgactaacccaagactttttctgataacaattctccttatatctacccaagctgaatgatcttcccttcctttaaataaattatattatatcaaaaagaatttttctttagagaaatcaaagatgatctaaatacatggagggatcaggcatgatggctcacacctataatcccagcactttgggaggaggaggcaggaggatcgcttgagcccacgagttcaaggccagcctaggcaacataatgacacccatctttatttaaaaaaaaattttttaaataaaaaataggccgggtgcagtggctcatacctgtaactcccgcactttgggaagccaagacaggcaaatcacctgaggtcaggagttcaagaccagcgtggccaacatggtgaaaccccatctctactaaaaatacaaaaattagcttggtgtggtggtgcacacctgtaatcccagctacatgagaagctgaggcaggagaaatgcttgaacagaaaagacacagaaaaagatgttcatagcagcattctttgtaaaagccccaaactgtaaataatccaaataaccatcaaaaatagaatattatggcatgttcatgcagtgtaataccatgcagtaatacatacgaatgaaccaaagctctttgcaaaacctgaatgaatctcacaaaaataatgttgaataaaataaatcagaaatgttacaatttcattgatataagcttcaaaaaccagcaaagtgacactctgttgttacggatgcatgtttagggagcaaaactaagaaaagcaaatgaggttaccttaaggggtagcagttactttatgggggaggaaggagtatccattagaaagtagcacaaggggaatctctggagtgctgacagtgatctattttttgacctgggtgttggttacagggtgttcatttattatcatttacttggctgtacattttttttttttttagacagagtctcgctctgtcacacaggctggagtacagtggtgtgatctcggctcactgcaacctccacctcctgggttcaagtgattctcctgcctcagcctcctgagtagctgggattacagatgcccgccaccacgcccagctaattttttgtattttagtagggatggggtttcgccatgttggccaggctggtctcgaactgctgaccttgagtgattgacccaccttggcctccaaaagtgctgggattacaggcgtgagccactgctcccagccttagctgtacatttttgttttgcataattttctatatgtgtgctaaatttcactatgagaaacgatttttggctgggcacagtggctcacatctgtaatcccagcactttagaaggcgaggtgggtagatcacctgaggtcaggagttcgagaccagcctgaccaacatggtaaaaccccatctctactaaaaatacaaaaattagctgggcgtggtggcaggcacctgtaatcctagctactggggaggctgaggcaggagaatcgcttgaacccaggaggcggaggttgcagtgagctgagatcgcaccactgcactccaacctgggcaacagagcgagactctggctaaaaaaaaaaaaaaaaaaatctttttacggtggctcatgcttgtaaatttagcactttgggagtctgaggcggctggattgcttgatttcaggagttggagaccagcctgggcaacatggcgaaaccccgtctctaccaaaaacaccgaaaattagcccggcatggtggtgaacgcctgtagacccagctactggggatgctgacatgggaggatcacttgagcctgggaggtgaactgaggttgtgtcactgtactccatcctgggtaacagagtgagactgtctcaaaaaaaaaaaaaaagataaaaataatgttttgtatgaaaggagagaacgtcagcactcctcttgacaaggatggaagaggctctcagacctgacaacatgcatgaagttaaggcattgccacctacttcatggcatctaaacatgttgttgtggtggttgttttttaaagacagagcctacttgatacctatatacatatagaaacattaactcaaggtgagttgtaaacctaaatgcaagaactaaagctctaaaattcagaagaaaacatatgagtgccaggtgcggtggctcacgcctgtaatcccagcactgtgggaggccgaggccggcggatcaccagcgcaagagatcgagaccatcctggctaacatggtgaaaccccgtctctactaaaaatacaaaaaattagccgggcgtggtggcgggcgcctgtagtcccagctactcgggaggctgaggcaggagaatggcgtcaacccgggaggcggagcttgcagtgagccgagattgcgccactgcattccagcctgggaaacagagcaagactccgtctcaaaaaaaaaaaaaaaaaaaaaaaaaggagtgaatctttgtgaccttggattaagcagtggtttcttagatataaaagcacaaacagtgaagaaaaaaagataaattgaatttaactcattttattttaattcaatggataaattggacttaaaccaatttaacacttttgtgtttcaaaggacgccatcaagaaaggcaacccatggaattggagaagatatttgcaaattatatatttgataagggactagtgtctggaatatatataaaactcttacaactcaacaataaaaggacaattaaccccatttttaaaagggcaaaggggaaacaaggggctgaaaatgagctcaaatttatttttttcagacagggtatttctctgtcatccaaggctggagtacagtagcacgatcatggctcaccacagcctcaacctcccaggctgaagtgatcctcccacctcagcctcccaagtagctggaactacaggcgtgcgccactatatctggaactcctgggctcaagcaatcctcctgcttcagcctcccaaagtgctgaaggattacaggtgtgagccactgcgcctggttttaaacgtatgaaagaagatgagtaaataacagtaaagccctgggttgtgaagatgtaataatacaaaaagcagagagaaggcaggatgtttgactcctgactgttccatcaaggactgtagtctggaaaataaatattttgaaggtgaaaaattaaagctcatattaggataaaagactatcagagagcactgagttgtcttaaattaagtcaagcctcctaaccccaataaaacacatcatagtgccaaataaagttaaaaatccagccaggcgtggtggctcacgcctgtaatcctagtactttgggaggcccaggtgggtggatctctttcagctcaggagttcaagaccagcctgggcaacacggtgaaattccatctctacaaaaaataccaaaatgagctgggtgtggtggctcatgcctgtggttccagctgctcaggaggctgaggctggagggttgcttgaaatgggtggcagaggttgcagtgagctgagatcacgtcactgcaccccagcctgggcaacagagtgagaccttgtctgaaaaacaaataaataaatatataaatatataaataaaataaagttaaaaatctgaaaaaataaaacgggtaaattatttcaatcaatatttctctaaggaatatatacaaatggccaatatgcacataaaaatattctcaacatcatcagtcatcaaagaaatgcaaatcaaaccagtgatgtgatactacttctcagccactaagatggctaatattaaaaagacagataggccgggcacagcggctcatgcctgtaatcccagcactttgggaggccgaggc

SEQ ID NO: 326 - DNA, 931 bp, Homo Sapiens
atggatgacgaaaatgcaacattgctgacagagtttgttctcacaggacttacatatcaatcagagtggaaaatacccctgttcctggcattcttggtaatatatctcatcaccatcatggcaaatcttggtctgattgctgtcatctggaaagactcacaccttcacattccaatgtacttattccttgggagtttagcctttgtggatgcttggttatcatcctcagtgacccctaagatgctgatcagctttttagctaagagtatgattatttctgtctctgaatgcaagatacaatttttttcctttggaatcagtggaaccacagaatgttttctcttggcaacaatggcatatgatcgctatgtagccatatgcaaacctttactttatccagtcattatgaccaatggactgtgtatctggctattagtcttgtcatttataggtggctttcttcatgccttaattcatgaaggtattttattcagattaaccttctgtaattccaacataatacatcacttttactgtgacattatcccattgttaaagatttcctgtactgacccttctattaattttttaatgctttttattttgtctggttcaatacaggtattcactattttgactgttcttgtctcttatacatttgtcctctttacaatcttaaaaaaaaaagtctgccaaagacataaggaaagccttttccacctgtggagcccatctcttatctgtttctttatactatggcccccttctcttcatgtatgtgcaccctgcatctccacaagcagatgatcaagatatggtggagtctctattttacactgtcataattcctttcttaaatcccattatctacagcctgagaaataagcaagtcatagattcactgacaaaaacattaaaaggaaatgtttag

SEQ ID NO: 327 - DNA, 4063 bp, Homo Sapiens
gaggagcccagggacatatttcacagctaagtcaactgcttttcttcaaattcagatttaatccttgagtgaaatgagtcactggctcatccagttaagatcatcacccactttcctaacaaaacttctcttcaaagaaggactcgctcatccatcaggtggacctccacaggaacaaatcatatccatgtcaggcggcaccaaacctaaatctgcttctgcctcagcagacaggacatgagattagtgccaccatcaaggacttgaaagatgcaggggtgatgattcccaacccattcctgttcaactctcccatttggcctgtgcggaagacagatggatcttggagaacgacagtgaattatcataagcttaaccaagtggtgactccaattgcagctgctgtagcagatatggtttcattgcttgagaaatgtgtacctggtatgcagccattgacttggcaaatgcctttttctccatacctgtccataaggcccaccagaagcaatttgccttcagctggcaaggccagcaatatacctttacagtcctacctcagaggtatagcaactctccagctctgtgtcataatcttattcggagagaccttgactgctttttgcttctgcaaagtatcacactggtccattacattgatgacattatgctgattggatccagtgagcaagaagtagcaagtacactggacttgttggtgagacatttgtatgccagaggatgggaaataaatccgactaaaattaaggaaacttccacctcagtaaaatttttaggggtacagtggtgtggggcctgtcaagatattccttctaaggtgaaggataagttgctgcatttggccactcctacaaccaagaaagaggcacaatgcctactgggccgatttggattttggaggcaacatggtccttatttgggtgcattactgtggcccatttatcaagtgacctctaaggctgccagttttgagtggggtccagaacaggagaaggctctgcaacaggtccaggctgctgtgcaagctgctctgctacttgggccacatgacccagcagatccaatggtgcttgaggtgtcagtagcagatagggatgctgtttggagcctttggcaggcccccataggtgaatcatggcagaggccgctaggattttagagcaaggccctgtcatcttctgcagataactattcttcttttgagagacagctcttagactgttactgaactttggtggaaactgagcatttgactatgggtcatcaagtcaccatgtgacctgaactgcctatcaggaactgggtgctttctgacccacctagccataaggtgggtcatgcacagcagaattccatcatcaaatggaagtgatatatacgtgattgggctcgagcaggtcctgaaggcataagtaagttacatgaagaagtggctcaaatgcccatggtgtctacttctgccaccctgcctgctccccccacagggtgcactgatggcctcatggggagttccctataattggttgacagaggaaaagaagacctggttcagagatgattctgcatgatattcaggaaccatgcaaaagtggacagctatagcactacagcccttttctaggacatccctgaagggcagcagtgaagggaaatcttcccagttggcagaactttgagcagtgaacctggttgtgcacttagcatggaaggagaaatggccaggtgtgcgattatatactgattcatgggctgtagccaatggtttggctggatggtcagggacttggaagaagcatgattggaaaattggtgacaaatttggggaagaggtatgtggatggacctctgagtggccaaaaactgtgaagatatttgtatcccacgtgagtgctcaccaacggatgacctcagcacaggagattttaataatctggtggatagaatggcctgttatgtggacaccactcagcctctttccccacccacccctgtcgtcgcccagtgggcccattaacaaagtggccatggtggtagggatggaggttatgcatgggctcagcaacatgtacttccactcaccaaggctgatctggctacggccactgctgagcgcccaatttgccggcagcagagactaacaccgaacccttgatatagcaccattactcatggtgattagttacctggtggcaggttgaatatattcaacctcttccatcatggaaagggaagaggtttgtcctcactggaatagacaattactctggatatagatttgcctatcctgcacacaatgcttctgccaagactaccatctgtggactcacggaatgctttatccactgtcgtggtattccacacagcattgcctgaccaaggcactcactttatggctaaagaagtgtagcagtagacttatgcttatggagttcactggccttatgttccccatcatcctgaagcagctggattgataagagtggtggaatggccttttgaagtcacaattacaacaccagtgaggtgacaatactttgcagggctgggacaaagttatccagaaggccgtgtatgctctaaatcagcatccaatatatggtactgtttctcccatagccaggattcgtgggtccaggattcaagggatggaagtggaagtggaaatggcaccactcaccatcacccctagtgatccactagaaaatttttgctcctgttcccacgacattatgttctgctggcctaaaggtcttagttccagaggaaggaaggctgccaccaggagacacaacaacgattccattaaactggaagttaagattgccaccaggatactttgggcttctcctcctgtctttaagtcaacaggctaagaagggagttacagtgttggctgggatgattgacccagactatcaagatgaagtcagtctactactccataactgcggcaaggaagagtatgcaggtaatacaggaaattcattagggcatctcttagtattaccatgccctgtgattaaggtcaatgggaaactacaacaggcaggactacaaatggcccagacccctcagaaatgaaggtttggatcactccaccaggaaaaaaaaccacaacctgctgagctgcttgctgaaggcaaagggaatacagaatgggtagaagaaggtagtcatcaatatcagctacgaccacgtgaccagctgcagaaatggggactgtaattgtcatgagaatttcctccttcttttgctaaaatcatgtttgtgcatgtatacacttgtactaagaaaatatcttcattttatttcctttttctctatgatgtgacataagatttattgacttcatagcagcatttaagtattgttaactttatataatagtatttgggttggggattggtgcctttctggttgtatgaaggatagttgtattatgttaggtgtaattatgacattattgtctttaagattatgtatgacctcaggaggtgtgtatgggttcaagttgacaggggttggagttgtgattgttaatgctctgtgtcaacttgattggattgaaggatacaaagtactgatcttgggtgtgttggtgagggtgttgccaagagatattaacatttgagtcagtgggctggggaaggcagatccacccttaatctggtgggcacaatctaatcagctgccagcgaatataaagcaggcagaaaaatgtgaaaaggagagatgggcctagcttccagcctacctctttctcccatgctggatacttcctgcccttgaatattggactctaaggtcttcgctttcaggacttggattggctctccttgctcctcagcttacagatggcctattgtggtaccttgtgatcatatacgtttatacttaataaattcccctttatatatatatatctatgtatatcctattagttctttccctctagagaacgctaatacaccatccttgattaaatcccttcaccctctctccatctttgtaaaaattctcctcattaaattattgttcagtg

SEQ ID NO: 328 - DNA, 3988 bp, Homo Sapiens
gagtcactggctcatccagttaagatcatcacccactttcctaacaaaacttctcttcaaagaaggactcgctcatccatcaggtggacctccacaggaacaaatcatatccatgtcaggcggcaccaaacctaaatctgcttctgcctcagcagacaggacatgagattagtgccaccatcaaggacttgaaagatgcaggggtgatgattcccaacccattcctgttcaactctcccatttggcctgtgcggaagacagatggatcttggagaacgacagtgaattatcataagcttaaccaagtggtgactccaattgcagctgctgtagcagatatggtttcattgcttgagaaatgtgtacctggtatgcagccattgacttggcaaatgcctttttctccatacctgtccataaggcccaccagaagcaatttgccttcagctggcaaggccagcaatatacctttacagtcctacctcagaggtatagcaactctccagctctgtgtcataatcttattcggagagaccttgactgctttttgcttctgcaaagtatcacactggtccattacattgatgacattatgctgattggatccagtgagcaagaagtagcaagtacactggacttgttggtgagacatttgtatgccagaggatgggaaataaatccgactaaaattaaggaaacttccacctcagtaaaatttttaggggtacagtggtgtggggcctgtcaagatattccttctaaggtgaaggataagttgctgcatttggccactcctacaaccaagaaagaggcacaatgcctactgggccgatttggattttggaggcaacatggtccttatttgggtgcattactgtggcccatttatcaagtgacctctaaggctgccagttttgagtggggtccagaacaggagaaggctctgcaacaggtccaggctgctgtgcaagctgctctgctacttgggccacatgacccagcagatccaatggtgcttgaggtgtcagtagcagatagggatgctgtttggagcctttggcaggcccccataggtgaatcatggcagaggccgctaggattttagagcaaggccctgtcatcttctgcagataactattcttcttttgagagacagctcttagactgttactgaactttggtggaaactgagcatttgactatgggtcatcaagtcaccatgtgacctgaactgcctatcaggaactgggtgctttctgacccacctagccataaggtgggtcatgcacagcagaattccatcatcaaatggaagtgatatatacgtgattgggctcgagcaggtcctgaaggcataagtaagttacatgaagaagtggctcaaatgcccatggtgtctacttctgccaccctgcctgctccccccacagggtgcactgatggcctcatggggagttccctataattggttgacagaggaaaagaagacctggttcagagatgattctgcatgatattcaggaaccatgcaaaagtggacagctatagcactacagcccttttctaggacatccctgaagggcagcagtgaagggaaatcttcccagttggcagaactttgagcagtgaacctggttgtgcacttagcatggaaggagaaatggccaggtgtgcgattatatactgattcatgggctgtagccaatggtttggctggatggtcagggacttggaagaagcatgattggaaaattggtgacaaatttggggaagaggtatgtggatggacctctgagtggccaaaaactgtgaagatatttgtatcccacgtgagtgctcaccaacggatgacctcagcacaggagattttaataatctggtggatagaatggcctgttatgtggacaccactcagcctctttccccacccacccctgtcgtcgcccagtgggcccattaacaaagtggccatggtggtagggatggaggttatgcatgggctcagcaacatgtacttccactcaccaaggctgatctggctacggccactgctgagcgcccaatttgccggcagcagagactaacaccgaacccttgatatagcaccattactcatggtgattagttacctggtggcaggttgaatatattcaacctcttccatcatggaaagggaagaggtttgtcctcactggaatagacaattactctggatatagatttgcctatcctgcacacaatgcttctgccaagactaccatctgtggactcacggaatgctttatccactgtcgtggtattccacacagcattgcctgaccaaggcactcactttatggctaaagaagtgtagcagtagacttatgcttatggagttcactggccttatgttccccatcatcctgaagcagctggattgataagagtggtggaatggccttttgaagtcacaattacaacaccagtgaggtgacaatactttgcagggctgggacaaagttatccagaaggccgtgtatgctctaaatcagcatccaatatatggtactgtttctcccatagccaggattcgtgggtccaggattcaagggatggaagtggaagtggaaatggcaccactcaccatcacccctagtgatccactagaaaatttttgctcctgttcccacgacattatgttctgctggcctaaaggtcttagttccagaggaaggaaggctgccaccaggagacacaacaacgattccattaaactggaagttaagattgccaccaggatactttgggcttctcctcctgtctttaagtcaacaggctaagaagggagttacagtgttggctgggatgattgacccagactatcaagatgaagtcagtctactactccataactgcggcaaggaagagtatgcaggtaatacaggaaattcattagggcatctcttagtattaccatgccctgtgattaaggtcaatgggaaactacaacaggcaggactacaaatggcccagacccctcagaaatgaaggtttggatcactccaccaggaaaaaaaaccacaacctgctgagctgcttgctgaaggcaaagggaatacagaatgggtagaagaaggtagtcatcaatatcagctacgaccacgtgaccagctgcagaaatggggactgtaattgtcatgagaatttcctccttcttttgctaaaatcatgtttgtgcatgtatacacttgtactaagaaaatatcttcattttatttcctttttctctatgatgtgacataagatttattgacttcatagcagcatttaagtattgttaactttatataatagtatttgggttggggattggtgcctttctggttgtatgaaggatagttgtattatgttaggtgtaattatgacattattgtctttaagattatgtatgacctcaggaggtgtgtatgggttcaagttgacaggggttggagttgtgattgttaatgctctgtgtcaacttgattggattgaaggatacaaagtactgatcttgggtgtgttggtgagggtgttgccaagagatattaacatttgagtcagtgggctggggaaggcagatccacccttaatctggtgggcacaatctaatcagctgccagcgaatataaagcaggcagaaaaatgtgaaaaggagagatgggcctagcttccagcctacctctttctcccatgctggatacttcctgcccttgaatattggactctaaggtcttcgctttcaggacttggattggctctccttgctcctcagcttacagatggcctattgtggtaccttgtgatcatatacgtttatacttaataaattcccctttatatatatatatctatgtatatcctattagttctttccctctagagaacgctaatacaccatccttgattaaatcccttcaccctctctccatctttgtaaaaattctcctcattaaattattgttcagtg

SEQ ID NO: 329 - DNA, 1428 bp, Homo Sapiens
tttccctgtcctccttcccacatcgatttaaaaaattagatgcaaatgcaaaatccttaaattatagatttatgataaatttaaattctggtagaatcaaggttttataacatttaaagtgtctgacactaagtgtatataatcttttaagaaacgtcttcttaacagcgcatggtattctgtgactgttcgtgtaccatgaatattcttattgggttctagagttagttactgactcttgaagatgggcatctaatggtcctcctgtggaagtggagagcagctctccactgtttgataacatttaaagccaagggtgaaccactcaagaaacatttggtggttataatatttttttgttgttgttaagtaccatcaataaaactgaaaaatctcttaagtacctgactcctgcagtgatacaactgcagtgataaaacttttagctttttacatcaggggtattaggtattttctcacagaaatagccttttgaggtgaaattcacataacatacaattaaccattgtaaaatgaacaattcagtggcgtgtaagagtatgtttacaatgttgagcaaccatcacctctgtctagttgcaaaatgttttcatcactccaaaagaaactcctttattcatcatagcccaaagttggaagtattttcttgattgggctcttgattacatggatgcatctgagtcattgaattgaagcctaagatgtgcttaatttcactgtgtgtaagtttcacctcagttaacaagagagaacagaacaaaccaaaaatcttaattcttttgaaaaaaagactttctggctgctttattaaagaagccaggggaacaaggttaaaaggaaatcagttagcagtgaccaaggcaagagatgatggtggcttggctgaagatggtgacagtggaggtggtaaggtgatcagattctggatatattttgaaggttgagctaatttggtcagctgatgggcataatggatgtgagggaaagaaagttggaaaggatgatgtgaagatttttaatgggatggaataggtgtttaatgaacagccatttaacaacatcagggtaatttcatcttgtgtatcattctctacaacagggttatactctaggacagtagatacccttagtactctactgtcctagagtataaccctgttgtaaagaatgatacacaagacaaacttaccctgatgttgttaaatatatgttagatgaccagttgctttgatttctttgctcaataaacattggattacagctggtttgctgtgtggcatgcctacatggagggaacacactgagccaatgatttcatcatctgggtccctttggtttatatcagtttccaacatgacttgtttgtggggcttgtgggaggggcacatacatcggccccaggattct

SEQ ID NO: 330 - DNA, 2225 bp, Homo Sapiens
gattctcacagctactccatctgtgaaagctcctgggagaggggtaaggcggcctccaaagaccacttggaattgcctcacccagaagatcagaaccctactttctgggcagatacatgggatcctctataatctggttcactagaccaatctcactgatcaccattcagtgagagttgcaaagatacggagaaatggaattaaagctatcaaaataagaaaattcctgatcaaaagttttcaactacttatctacaggaaaagttattttatgtgtagtaaactaaattcatttacaatgtctttgtgagttattaatcatccgccagtgggaggcaggcaacaggagaaacaggctgtgtatctgagagtgggaccccttaagagtgcaaaggagaaggggagaggagagaaggtgacaatatgttgcagtttcattattacaatttacaacagcctacacatgtttaatcctgattttcttctctttgaggcactcacagtgcaagtgaagaattaaatcccgtctttatttaaaatgttgatattttgttaatcatagatttttgtgcattgtttgatatctatgtacttgtaataggttgtgatacacataatttgcaactatgtacaaataaactgtggtatcttactaattgaaacagaagcagtagttgaaatttataaaaagttttgtaggtatacagtaacggaactaatttattttgggtgtgtttttgtatgatgaatacaaaagtatactacatagtattttaaaagtgtttgagcctttgactgttttatgaattaacctaagtaacagtaccaaactttttgtaaatgagtcctcaaagttttggttatattttatttaaaattagttgaaaattgtaaatcaaaatattttcaatggagtactcctacatttttaacttctgaagcttttggcaagttgcaatttctcaatacaaatctggcaaacaaaaaagacattgaaattcatttctataaaagccagagacaaactgcatgaaataaaaactgaaagctcctatggggtgcacaatttaatttggaaattcttgattggctcttaggaatattttgattagaggaaagaatcttttgatggatttcttgttttttagtaaattgttaatattctctatcaaaataaagtataaaattgagaaaatttcatttctcacaattatagtgattaaatttggcaaaacactaaaatgaaacaacctgtcaactaagacaacttagttttgtcttcttagttttatctcttaaatctaaccttctgtacctctgtgctgcattctggttaatttttttggatcttccagttcactgactctcttcagcaagtctaatctgctattagattcgtccactgagttttatattttaactgttattattgttcatttttagaattttgattgcatatttttaaaaatgtctagtcattctttataatttttactcactcctcatattgtcagacttctttttatttcattatacataataaacataatttatatttagtgtctctgttaactctaatagcttaagtctctgggtttgcttctgcaggttctcactcatggtgacctcttccattatctgttttatgctcactgcatactgcttattttctttggaactttatctttgaggatttgttgatgccttgttgaaggtgggttccttcagagacgatatacaattgtttttgccagaaacctgagaatacttccagactgggaccactgcaaactggatttcagagtgaggtttgttttagaccaaccaacttaaatgaatttggtctgcatccccatgtgaggatactttttctgctacgaactctcagaagagattttttttgttttctgtcgacagcaccaaggttggagatgggcaagtttcctgcagctgttggcaggctaggcattcgtttctagttctcttttacactgaggatatagctttttggtttccaactttaagggaaggtggcctattagacaacccaccttgggcaggtcctaggctttgtttcttgtccccatactctgtgagtcaaggtcaaggtcaaaagcccttaagacaaaagccagcttcactgctgtcagtatgtagaattcctgccattatttaaattttgacttgagcattttttacttcttgcaagacaatgaatgatttaa

SEQ ID NO: 331 - DNA, 4449 bp, Homo Sapiens
gctctggtgctggcggacctcgggtcgcgcagtcagctgctctaagatggcgaaactcaccttcaggacatgctcccttgggctaggagatcaggtgggctccgggtgatgcgcaagtccacccctctagctgcagttccgcctttttctctacaaccaagcaaacattttggcaggcacgtgtgagtgacgaccttgaaaccaatctgatttatttttctgaaaagtaagttattgacaaatgtcaatttttaatatcaacttatttaggatgtatctccaaacctatccttacacacagtatgtctcagcaaggcagctataagccctggtgagctaatgagtcttccatcaggaaagtaaaatggtcaaatattgttctaggaaaaacattctattgattttcttcagaatctctagcaaagcacttgatcaggtactcagaaaacattaccaaattgaagtggcaccacgtatgcattaaaggatttgggaaggaatctcgattcagcatacaaggcttacgtttcctgatgggcttttctttaagtaaaatcaacaaatggtgttcagcacctattgctgattagtgctgtggggtgacaccaagcagtatgtgaaatgacctctagtcttaaggagtgctcatcgtggttggggacataaactaacatactttaaatactaggcaacaagtgaaacatattgtaaggagtaagggttgtaatgtttctgtcccccgccccccccaagttcataggttgaaattaatcccagcgtgatggtctttggaggtggggcctttgggaagtgaataaatcatgagggtggagcctcatgaatgggaatagtgccataacgaggccagagagctctcttgcccactttccaccgtgtgaggatacagtgagaagatggcctgcaacccagaagagaggcctcaccagaacctaaccatgctggtgcctgatctgagacctcagcgcctccagagctatgagaaatgaatttctaaacccagtctatggtactttgctgtagcagtctgaacagtctaagacagggatgaaaaagcttcaaggagcaagtttgtgaactgagcctggaaggaggagtaggatctgacaaagggttagaagaggaaggactccaagcagaaggagcaaacctaggaaagagactgagggaaaaattcaggagaccaaactctcatgcgcaggaggttcatgctgaggggagcaggaagcagagctggactggggaggccttgaaggcaggcagagcaaggagccccaccaggtgactgctcattggcctcccagatggattcgatggtatcgctcagatgatggaacaaaaaagaaaaagagaaaacacaaatgtgacatgtgaaaaataggaatgaaagagaaagataaaagagaaggaaaatcttcccaggtctagaagatacattctcgtatcgaaagggcccagcaggtgcccagcacaacaaacctaggaagaccaacaccaaggcacatcgccacagcattcagaacaccaaggataaagaaaagatcttcagagtttcctgaaggaaaaatgaaaaggtcacatttaaaggactggaaatcagaatggcatggaaattctccacagaatcccaggaagctggaatacaatagggcattaacttcaaaattctgaagaaaataattctaacatagaattcaactctcactatattagctgtttgtgggtaggatgtagatattttcagatatccttatctcagaaagctactggaggatattcttctccaaaattaagaaattagccaagaaagaggataatatttgggacctaaaaaacaggaagtcccagcttaggagagaggagaagggaagtactaggacagaagctaggacttatacagtaggggatagaggcctctaggagagatgtttccagaaggaagtgaatcacatggaatgcctgttatggatgaatatcttaaaagggatcttcagaatttgatgatgataagtaatagctagataggaaagtgaataaggaaataaatgaggccattattgaatctagtgaaaacaatatgcaaaaaaggatatagcatatgtcttggctgtgaataaatatgtaattataacaagataattgctgaatgggagtttaacccaaaggggtgttataattatttttgaaaaaagggaggtgaccttacgtgtgtttacataaatgtgcatgtgtctaggaagtgagggtgggagagttaaatccttgtcttctagagttaggaagtccatagactatacgcacaattgaaaagtaaggacagaacattaaatatgtgttcttagaaaatatgagcataaggccgggcacattggctcatgcctgtaatgccagcactttggggggccaaggtaagaggactctgtgagcccaggagttggagaccagcctgggcaacatagtgagacctcatctctacaaaacatttttaaaaattggccaggcatggtggcatgcacctgtagtcccagctacttaggaggctgaggtgggaggatcatatgagccccagagtttcagtctgcagtgagctgggattgtgccaccacactccagcctgggtgacagagtaggacgctgtctcacacacaaaaaaaggaaaagaaagtagagtaaattctctcatatacaaaagaaatatataagagataaatgtaagagaaggaattgggagtgggagtgtgtggtgtgggcaactactatttttgttaacaaatctagaaataccatttgaattttaagattataaatatttgatataaggaaaaatttttaagttttaaaaagttattcactaatacaagtggtagtaagtggcacgactgtcactcaaattccaatctgtctaaatcttgaagctttaaaaaattgttatgactacagtacactacagcaaagggaaggaaaagtcaaatattacttcaaggtctctttcctgggagactacaagaaaagttgcatgcagaaatcagtgtaacaagagcaagaagagttacgtaggattatccacatcctgcttcacctcctgcttcatagctcaggcaagcacttccctgtgctctgctgtgcacagccagtttatcagtgtgggaaaaaatctataaataggatggaggtttacataaaagagaaacataggaaaagaaaggggaataaaaaagaaactgtagagcgaatttgggggttaatgcagaggaaaaagctaaagtgagagacatcacatcagctgtgagagagaaacccagaaaatgaatggcaggggcatctgggacaggtttctcttggtaacaagttgaccctttaaatagactgcaagatgtatttgcagtttttatttggatgctgaatgaaatttcttttgagtataacaaccacatgagctcaagattttatttgggcaatgatatggtttggctgtgtccccacccaaatctcatcttgaactgtagttcctataatctccacatgtcatgggaaggacctggtgggaggtaattgaatcatgggggcggttacctccatgctgttctcttgatagtgattgagttctcatgagacctgatggttttataaggggcttttcccctgcgtcactccacatttctccttgctgctgccaggtgaagaaggacttgtttgcttccccttccaacacgattgtaagtttcctgaggcctccctaaccatgctgaactgtgagtcaattaaacctctttcctttataaatcacccagtctcaggtatgtctttattagcagtgtgagaatggactaatacagcaaattggtaccaggtagtgaggtgctgttgtaaagatacccaaaaatgtggaagtgactttggaatggggtaacaggcagaggttggaacagttgggagggctcagtagaagataggaaaatgtgggaaagtttgaaacctcctagagacttggagggctcagaagataggaacaggtgggaaagtttagagcttcttagagacttgttgaatggctttgaccaaaatgctgttagtgatatggacaatgaagtccaggctgagatggtcttagatggagatgaggaagttgttgggaactggagtaaaggtcactcttgctatgctttagcaaagagaatggcaacattttgcccttgccttagagatctgtggaactttgcacttgagagagatgatttagggtatctggtggaagaaatttctagacagcaaagcattcaagaggaagcagagcataaaagtttgaaaaatttgcaggctggcaatgcaatagattaaaaaaacccattttctgggggagaaattcaagttggcaacaaatttgcataagcaatgagaagaagaatgttaatcactaaaacagtggggaaa

SEQ ID NO: 332 - DNA, 1279 bp, Homo Sapiens
aaatgtcaattgactcctctcactcatagttgtacaaattacagggcttttttttaattgtcataaaacatatacattattcatctattcagtttcatctgaagagaatccaacaaagaagaaattttattttccaataaaatattaaagctgctttaccccacaagagacagagcagaaattccatccatgatctatgtaagtacaaaactttttgcctatcagagcatgtgtgaatttaattttatgaaaatgtagacctgttttttcctgttatgcttcatagtacttgtgtatgaatatgtaacaatttcaatgtttttattagtttgtgaagccttggtaccatgatgacaacaagaacatcctgtgcttttcctagcaaatattgacttagaaggacactgttgatatttgtgctgcatccttaatggaaagcacgtacatattacaagatttgtttccctctaatgtaaatacagtggagcagaaaattcaagtggtgattatacacacgtcattacctttgcctctgggttatggattgaactagaacccaggttaaggtcatcatgacccccccccaccccgccccttatcgggcacttctatcactaatgaaaagagggtgtgccaagctcaacacacacacacatctttctaattaacagaatcccgctctgattcataaaagtcctatctaaaagggagggagaaatgatgttagcattgatacagaggtacatgtcagctcagtgcacaaacataggtaaattatgtaaggataaatctttctcttttccaggagacagttcaccactctccctctgtaaaaggattgtgggagacacataggtagtaaggagaaacctccatctatctcccaacgaacctctgtgtccccatgttccacccaactctccatgattgaataattaagcccttaagtagttaccatatgtccttaaatagttacaatcaacctcaaatgaaaacactcagcaaaaaaaagatgtgggatcaatgctcttggtccaaagataaaagatacattatgaaaaacataggaatgactttataaacaaaacagaactttctcaacaatcttattaaccaatactctttcatcgtaagtgatcacggttatttggcgtcagaagcaaaatatggagagatctttctgcagacaagtggagacaaggcacaataaagggagagttaggtgtgtaaagaaagtgatgaaatggacatactttagtgtttaattcataaggaagaa

SEQ ID NO: 333 - DNA, 8517 bp, Homo Sapiens
ctttccggccggactgccgcgcctgtggccggaagagccagctagaccagagagtctgtacctgcaaccctggcggcgtccgagcccaaggcggagtctgggagacaaagaagtcctcgccgccggccgctggaggattctgccagtagtgaagtcagggatgggcccgagagagcttggaaagaggacaaggaagggaaggagtaggagtagaaaagcatgactttggctggagatggggtctcgttatgttgaccaggctggtcttgaacacctgacctgaagtgatcctcttgcctcagcctcccatagtgctgcgatcacaggtgtaagtcactgagtttggccattattccatttctgtacacaaaaacctttctcattctgtgctataactagttagcatttaattgggtggatgtggtataactagtgccttgttgatattgatgcatatttacatggttttgctgttataaacaatggtcccttgctattataaatcacactgctataagtaaccttgcatctaaattacttcaaatgtgtaactatatgggtaggataatttctagaagtggaattgtgaaccaaagttttaggtgcatttgtaattttgatttataaccaatcttttcactgatctacttctctgcctctacctccacctctctacctctctacctctctacctctacctctacccacggtctccctctctttccatggtctccctctcatgtggagccgaagctggactgtactgctgccatctcggctcactgcaacctccctgcctgattctcctgcctcagcctgccgagtgcctgcgattgcaggcacgcgctgccacgcctgactggttttggtggagacggggtttcgctgtgttggccgggccggtctccagcccctaaccgcgagtgatccgccagcctcggcctcccgaggtgccgggattgcagacggagtctcgttcactcagtgctcaatggtgcccaggctggagtgcagtggcgtgatctcggctcgctacaacctacacctcccagccgcctgccttggcctcccaaagtgccgagattgcagcctctgcccagccgccaccccgtctgggaagtgaggagtgtctctgcctggccgcccatcgtctgggatgtgaggagcccctctgcctggctgcccagtctggaaagtgaggagcgtctccgcccggccgccatcccatctaggaagtgaggagtgcctcttcccagccgccatcacatctaggaagtgaggagcgtctctgcccggccgcccatcgtctgagatgtggggagcgcctctgccccgccgccccatctgggatgtgaggagcgcctctgcccggccgcgaccccgtctgggaggtgaggagcgtctctgcccggccgccccgtctgagaagtgaggagccaccccatctgggaagtgaggagcatctccgcccggcagccaccccgtccgggagggaggtggggggtcagccccccgcccggccagccgccccgtccgggagggaggtgggggggtcagccccctgcccggccagccgccccgtccgggaggtgaggggcgcctctgcccggccgcccctactgggaagtgaggagcccctctgcccggccaccaccccgtctgggaggtgtgcccaacagctcattgagaacgggccaggatgacaatggcggctttgtggaatagaaaggcgggaaaggtggggaaaagattgagaaatcggatggttgccgtgtctctgtagaaagaagtagacatgggagacttttcattttgttctgcactaagaaaaattcttctgccttgggatcctgttgatctgtgaccttacccccaaccctgtgctctctgaaacatgtgctgtgtccactcagggttaaatggattaagggcggtgcaagatgtgctttgttaaacagatgcttgaaggcagcatgctcgttaagagtcatcaccaatccctaatctcaagtaatcagggacacaaacactgcggaaggccgcagggtcctctgcctaggaaaaccagagacctttgttcacttgtttatctgctgaccttccctccactgttgtcccatgaccctgccaaatccccctctgtgagaaacacccaagaattagcaataaaaaaataaattaaaaaataaaaaaataaaaaaataaaaaaaactcattaagctctaaaaaaaaaaaaaaaaaagaaagaaaaaaagaaagtagtgaccaattcctgaaaattggcaaaaaaaaaaaaaaggcaagagtaaggcatttatcttgtctttccagtatgaactctagttcaaaataactgatgagaggaaggttttgtttgttttttgagactgagtctcactctgtcgcccaggctggagtgcagtggcgcgatctcggctcactgcaacctctgcctcccaggttcaagcaattcttgtgcctcagcctcctgagtagctgggattacaggcgcccgccaccactcccggctaatttttgtatttttttagtagagacggggtttcaccatgttggcgaggctggtcttgaactcctgacctcaggtgatccgcacacctaagcctcccaacgtgctgggattacgggtgtgagccattgcccagcccgggatttttttttttttttatagattaacagctagtaattgtgcaaagaatgatagaaaaaaatcactattttgcatgtcccagtgaaataattcaggcaacaatcaccagtggatgaaatccctaaagagcttttaggaagctttaaaatgcctggacccactcatcactgaacatgaaaccaccagtcattgtttgcctcctgatgtgaggcaatataaagcacacagaaccacttattaaacattcttgcccaaaaaattgaataggaatacaggacttaggggccaggcgtggtggctcacacctgtaatcccagcactttgggaggccaaggagggcggataatctgaggtcaggagttcaagaccagcctggccaatgtggtgaaaccctgtctctactaaaaatacaaaagaaaattagctggatgtggtgacgcacacctgtagtcccagctactcgggaggctaaggcaggagaatcacttgaacctgggaggcagaggttgcagtgagctgaaatcgtgccattgcactccagcctgggcaacagagcaagactccatctcaaataaaaaaaaaagaaatacaggacatagggaatgagtgaaatgacaacataagaaagcaaacagtcaaatctagaatgcagaacatttcatatgacaatcaacatggcttctgtaagccaatgtcaatgtaaaaaggggataggagactgctcttttttttttttttttgtttgtttgtttgtttgtttgtttgagacagagtctcactctgtcgcccaggctggagtgcagtggcaagatctctgctcactgcaaggtccacctcccgggttcacgccattctcctgcctcagcctcccgagtagctgggactacaggcgcccgccaccacgcctggctaattttttgtatttttagtagagatggggttccactgtgttagccaggatggtctccatctcctgacctcgtgaactgcccgcctcggcctcccaaagtgctgggattaggcgtgagccaccgcgcccggctgaggagactgctttttaaaaaatgtaaccaaatgtaatgtgtggatttgtttggatcttgagtcaaactaagtcatttttcagccaaggaaatttgattatggattgaatactaagaaagtatgatttaataagtgatattatggtaaatttccatatttcttaagagacattgaagttaaaggagtgaaatgatataatgcttggatttgatttaaagtaacttcatcaaggaaaaacaagaaggctgagtgctgtggctcacgcctgtaatcccaacaccttgggacgctgaggcgggcggatcacctgaggtcgggagttcaagaccagcctgaccaacatggagaaacccccatctctactaaaaatacaaaattagctgggtatggtggcacatgcccataatcccagctactcgagaggctgaggcaggggaatcgcttgaatccaggaggcggaggttgcagtgagccaagattgcaccattgcactccagcctgggcaacaagagcgaaactctgtctcaaaaaaaaaaaaaaaaaaaagaaaaaagaaaaacaacaaaaagagaaagtaaatgtggcaaatttgataactgttgcatctggtcatggagattctttgtatagttctacttttacgctgcttaaaaatgtttgataaaaccaacatggcatatgtatacctatgtaacaaacctgcacattgcgcacatgtactgtagaacttaaagtataaaaaaaaaatttgataaaatggttgggtgcagtggctcacgcctgtaatcccagcactttgggaggccaaggcaggtggattgcttgaggtcaagagttcaagaccagcctgacccacatggtgaaaccccgtctctactaaaaatacaaaaattagctaagtgtggtggcaggcacctgtgatcccagctacttgggaggctgaggcaggagaattgcttgaacccagaaggcagaggttgcagtgagccgagatagtgccattgcactccagcctgggagacgagtgactctttctcaaaaaaaaaaaaattcaataacacacatatatacccaatagataactcttcattttaagctaaccagtggttggactcacagtctggccccaacttacctttgcagtttgatcactcaacaataagactcagttctagcctcactatactatgtgacacttttacattggccactcactttaaggcctattctttgtgttcaagctgtttcttctttttttttcttccctaactgggcaattacttatctttcaaggactaggttagatgtgacttgtaagttttcaccaatcttttgttcatactactactgggttacctcatactgtagatactatcttcttatgccatggtaagcgttccttaagggaatatagcacaaaagttaagggcacagtttctagatccagactgcctgaggtcacatcctggtttagctactgactagctgtgttacctagggcaagtaacttcatctctctgtctgccttgggtaagtaacttaacctttctgtgtctgagctgtgttgccttgggcaagcaacttaacctttctatgcttccattatctcatctgtaaaatcgcatttacttcatagagttgtattattatttttatttttagagatggagcctcgctttgttgcccaggctggagtgcaatggtgccatctcagctcactgcaatctccatctcctgggttcaagcgattcttctgcctcagcctctggagtagctgggattacaggcatgcgccaccacgcccagctaatttttgtatttagtgtagagacagggtttcatcatgttggccaggctggtcttgaactcttgacctgaggtgatctgcctgcctcggcctcccaaatgagccactgcgcccagccttcatagagttgtattaatcttcctaaatgggtaagaaagggttcagaacagtttctgacacacagttaaatattcaacaaatgctaatttataaggttaggactctctttttgagacagggtctcactctgtcacccaggctggagtgcagcggcacaatcatggcttactgcagcctctacctcctggactcaagcaatcctctggcttcagcctcctgagtagctggaacaacagatgagcacaaccatgcccagctaatttttattttttgtagagaccggattgccatgttgcccaggctggtctcaaacctctgggctcaaacaatcctcctgccttagcctcccaaaatgctgagattacaggaatgagtcactgcactcagcccaggactatttgttttcatattcctcctcacacccagtttagtgtctggcatgtagatgctcagtgaatgattgatttgggtagttttggttctttatacgggtcttcaggttagtcccaatgtactggcatggagctagttacttgagcaggtcttcacaaaggtctgagtagcaggtgataaaaggggttgtgaagtctggactcctaacttaagtggtggagatgctaaaagagaaacaaaggcagcagagttgctgagggtagggagtatggcatttattaaccctgtgtttcccccgtcactggtcactgctcttgactcgtagaacaacaggtacagaactgcaagggatcatccccagctccgtgatcaccagatccacaagctctgggggagtcacatcatagactagattcaacaaccgtagggatgcgtggttctgccagttagccagcgcaacatgttctccccgcttacattgcagatcatcagggtcatctgcaatggaaggcgtacccattatgttctttcagaaaagaagttctagtttatccgcccctctccctccctctcaagtcttcacaggtagctggaggcttctcttttgcctccttacctagctcattagagacaaaggcatcagtctgcacacgctcacagaacttgtatgtttcacagcaaaccagcactggtacattatgggctcgagccaccagggctaactgtgctgtccctacccgtgacatcacagacccgttggccaagagtgcatgagctcccaatagcaccttggaaacctgtttcacaggagaagaggaagaaaaaaatgtcattgttgtatcaatgcaaaataaggtcccctacttacaggacagcaacattaagacaagtaataaatctcaacacctgtgaaaagaagggaaagaaacaaaaacagacaacaagtaataaatcttttttttttttttctttgagatgaagttctgctcttgttgcccaggctggagtgcaatggcgcgatctcggctcaccacaacctctgcctcctgggttcaagtgattctcctgcctcagcctcccgagtagctgggattacaggcatgcaccaccactcccagctgatttgttgtatttttatatttttagtagagacggggtttctccacgttggtcaggctggtctcgaactcccaacctcaggtgatctgcccgcctcagccacccaaagtgccaggataacaggcgtgagccactgagtccggcaattaataaatcctttttttttttttttttgagatggagtctcgctctgtcgcccaggctggagtgcagtggcatgatctcggctcactgcaagctctgcctcctgggttcacgccattctcctgactcagcctccagattagctgggactacaggcgcccaccaccacgcccggctaattttttgtatttttagtagagacggggtttcactgtgttagccaggatgattgtgaactcctgacctcgtgaactgccctcctcggcctcccaaagtgctggaattacaggcttgagccactgtgcccggcctaataaatcttaatgatggcttttcttctgtgaaaacacctgaccactgacccaccaaatctcccacaggaaaagtaaactttgaagttacttttgtcttgttccctcttcctggttgctagtttaatgtaatgtttttgcaatagctagactgctgtaatatactgtcagtgtttttccaattaaatagaaacagagctatataattattttttttgacacagggtttcattctgtcacccaggctggagtgcagtggtgcaatgacagctcactgtagcctcaacctcctgggctcaagcagtcctctcacctcagcctcctaagtagctggaactacatgcgcatgccaccatgcccgggtgtgtgtgtgtgtgtgtgtgttcaagcagtcctctcacctcagcctcctaagtagctgtgtgtgtgtgtgtgtgtgtgcgtgcgcgcgcgcacgcactcaagcagtcctctcacctcagcctaagtagctggaactacatgcgcatgccaccatgcccggggtgggggtggggtggggtgtgtgtgtgtgtgtgtgtgtgtgtgtgtgtgtgtgtgtgtgtgtacagggtctcattatgttgagcaggctggtcttgaactcctgggctcaagtgatcctcctgccttagtgctgagattgcaggcattgagccatggcaccaagccagggctatataattctaatatttttaaataattgtggctgggcacagtggctcatgcctatgatcccagtactttgggaggccgagacagggggaactgcttgagcccaggagttccagcctgggcaatgtagcgatatcccatctctacaagaaaaataaaaaactagctgggcatggtggcacacaccagtagtcccagctactcagaggcggaggtgg

SEQ ID NO: 334 - DNA, 755 bp, Homo Sapiens
acctatctgctctctggcctgcgtcagtggtctacagcagttacacacaggcagtggtatctgtgagcagctctgtggactcaaaggttttctccctgagaggcatgacccaggccagctgattcatcagaatcagatgagacgtctggggtcagagaggcagtaaccggcctgggaatccggacatgaccctgagttttgctctcagccctgccgtgtgctgtgctggaattcaggcctgaaccctgtgacctccctgccctagatcccaaatctgcccaggtttcccatcccgatggggcagagcctggtcctggcagagccactggtatagagccactggtacagatccactgacggtcctcagaacacctctgtgccctaagctgggtcctgatggtcgctgtgggccccactgaacacacatggtcccttgtccgggggagcctgctgcccttgggcagctgtggaaaatgaaggagccctggagggctggctgaggggagactatcttcccttgtgttcaaaggggtccgggcactagggttctccccaggtatttcttgctctgcgtggtcctcttgaggccttgccctccttttgcctcgagtattcccaggagggacggtccatccagctgttctccaggaccaaggacccactgttcttcctcagtgacccaggaaaatgaagcctcctcctgttgggacggctcagaatggtggactccacagtccctccgcgagagacgtggt

SEQ ID NO: 335 - DNA, 2317 bp, Homo Sapiens
cctaattaggagtcactgaaaacagctgtgcttttgtaaagccctgcaaactgaagctagacaacttaaacttcagaagaaaataacagcaacctatttacacgcataagccactttcatacctgcctactgatgtatggacttcagaataacgtggcctatgtatattttccaggattgttcttttgtttgttgtttttcacccttcctccccctattttctcttcacaagacatgggagttcacagccttctaaaaattagctttcctaataacttgggacttacctgtctaggaataaaccatcctagcatgagcgatcagatgaaatctgggaccaaagactcatttttcttctaaaatgctttctccaaaaaaaaattttttttaaaaaaaagaaaaggaaaattcaagctaggaactacttaagacaaacttgcctcccattctattcaaagtcatccctctgctcattgagataaatgtgtatctgactgcctccttaggaaaggtaaatcagaaactcaaaagaatgcaaccatttgtctcccacctacccgtgacctggaagcccccttcccgcttcaagttgtcccgcctttccgaacccaaccagtgttcattttacatatattgattgatgtcttatatgtccctaaaacgcataaaaccaagctgtgctctgaccaccttgggcacatgttgtcaggacctcctgaggctgtgtcactgcgtgcgcatcctcaaccttggcaaaataaactttctaaattaactgatacctgtctcaaatttttggggttcacaaggtttagttataaatgcttcttatggagcatgattttcttacaagcgaggcaggagaatcggatctggaggcagggaacctagggctgtttcacgctgacttcctagaactaaattgaaagtaaaaccctaacttcccacaccaagtaacaaaagaaccagaggcttctccctttccaaacccccaccttttctgtgtggcagatgggaaattgaaagtacctctgattggttgcaaaaagcaaaattacgctaagaagtaagttatcccttaaaaaaaattattctttctgcaaccaatcagatcttcccataggagtgtaactatgtaacttcaccatctgattgcacgccacgtcttcgtttgcatataagggcaactttgtaacttcactttagcctttcattggttgcttttcacagccaattgtgggtcaccacttcatttacatgagatgagtaccaagtggccaataggagacttcaatggggtattagggcccctgagctgctgctccacaccccaaacacaggagtgtcctttcattttcagtaaatccctgcttttggcggggcatggtggctcatgcctgtaatcccagcacttcgggaggccaaggcaggtggatcacctgaggtcagcagtttgagaccagcctgaccaacatgatgaaaccctgtctctaataaaaataaagaattagccaggcttggtggcgcatgcctgtaatcatcccagctacttggaaggctgaggcatgagaatcacttgaacccaggaggcggaggttgcagtgagccgagatcgtgtcactgcactcccgcatgggcaacagagcaagactccatctcaaaacaacaacaacaacaaacaccttcaaggtctggcgtggcggctcacaccagtaatcccagcactttgggaggcggaggcaggcgtttcacctgaggtcgggagttcgagagcagcctgaccaacatggagaaaccctgtctctactaaaagtacaatattagctgggcatggtggcgcatgcctgtaatcccagccactcgggaggctgagtgaggcaggagaattgtttgaaccagggaggtggaggttgcagtgagccgagatcgcgccattgcactccagcctaggcaacaagggcgaaacctcatcctaaaaaaacaaaaacaaacaaacaccttcgggctttgtgagtgctggtctcagaaaagcactcagtcttcctccaagggctaacttacttcttcaggagttgggtgcctttgagaaatttcccaaaccactacagaggaacaacttctcccttcgttcaccactctaccaagcacttggcttttgtaccttattgcaattatttatcttctaatcttctagagcctagagaattagactgtaatgtgccttaaatgcagaggtttctcttactcttctctggagcaatgcagacgtttgttggttgaaggatcaaactccaaagtccctcccagccttggaact

SEQ ID NO: 336 - DNA, 3210 bp, Homo Sapiens
agtggcagctcgctgggggacccaaacgctgtgctcgccgggcacatggagcgacagcctagaccgagctgccgcttcgatcactgccccctgcacccgccgtggccatcccggagccccggtggaagcaacgccgcgggcaagtaccgagcctctcggggtctcccttccctggggaacgaggcgtgtggggggagggacagaaccaagaaagaatttttccccctacggtgaatttgggggaggtaaaataaaaataaaataaaataaaaataaaccataaaaataaaaggaagccaggcacttagaggagggttcaaaggaggtggggcagtattagcatgtaaaaggatgtgcccgcctactctccccagtcacacaagattgtcatgcgagctgaagggggctgaaattattccctctgaagaagaagaagaagaagaaaacatactgcagctcccgatttgaaacatcatatttgaaaacaaggtggggccttcatcatatgcaaccttcatattttagggcctgcctctttctattccttgacataaaccggactcttcatgctaatcaggctggaagtgtatcataaggatgctgaagctaaaaacaatgtccaaggccaaataactgacaagaagaaggccaaggcatctagaaaccatgtcttctgattcacagttgatcatatttttctatcacctttgataaggcataaaatattattttgatgagtaaataaaaagactttggacacctgctgtttgtctaatttatggtttccttctcttttctctagttgatatgactatattaagccaagaaaaaagttagatttgacaaacggattttaacaattttatgcacagaatattttttaaagttatttttacgagtctacagttttacaagtttaatgacatgttcagagggactagaaaatttacaaataacatgatttataaaatccatgatttcccaggaatatttttgccaccacatgggggtgtagtgttcttaatatgtactttgcaggaattctgagcatctcagctgagcaagcctggggagcagcagggagaactggattttatgtgcaagtttgtcttatctgcaccaagcatgaggccaggaataggagtcgatcttaattcatcctccaagtgtctcaaatataaaattggctttgtgatattaatttgtttaaattgttcaatctcaggaaaaacttcacagtatgtatgagttacccacatacagcagcaatttcaacaaaagcagccatattagtatgtgccatgctatattctccagtccaagaaggttattagaaaattgtttaattgaggccaggcgccatgactcacgcctgtattcctagcactttgaggccgaggcgggcggatcacgaggtcaggagatcaagaccatcctggctaacactgtgaaaccccgtctctactaaaaaaatacgaaaaactagccgggtgtggtggcgggcgcctgtagtcccagctacgcaggaggctgaggcaggagaatggcgtgaagggcgcttgcagtgagcggagatgcaccactgcactccaccctgggagacagagtgagactccgtctaaaaaataattgcttaattgagaaaaagttgcttttgtcgctggaattactgtgagataattgaccgtgatgggagctgtgtcccccagatgaaagcaaatcatgggagccagggtcaatcatattaatgtctgcagtgaaaagaggtgttgtgatcatcataagacataaccataaaatacttaaagtcttaaatggccaaagcctttaaactacattataatgattacagatccaataaagtttaattaaaacaaaactactacattgaacatccataatgattagaaaggtttctaattggggacaaatttggtattgagaacacatcaaaagaatttcccacgttctttgttacatctgtttgtgctggttttctgcttctgcatctgtacagggcacatttctaaaaaactgaccagtttaaaaattactttttaagtttataatgctcattttaggtaagtcattaactctttccataatttaggtgatcatttaatgttttagggattgggaagcacagcttacttttagttaaaaaaaaaaagcaaaaaaaaaaaagcatgagctttggaatcaggcagcctggggattctaggctagaattctaggtttctcatgtactaattgtgcaatttaactgcataatctctctgtgtccatagggtcctcaaagaaaataataggaaattatggataggaaataggaataataggaaagatggaattccaaagataatgtaataaagggaggtatgataggttaggggaattaacaaggaataatgaagcactccggaacccagcagcagcagcagcagcagcagcagcagcaagaaacctttactatccctaaggattagggcaagagagaagaaatagggagttacagtctgatgagaagaggagccttggaagaagtgttgactgacaggagctacggttatggagtgaccaaccccagtcactactatggcagaaaataaataccctggtatttttcttctcttctcttctgatctcttgcaggaatcaccctttggccaaacccaattagacaaccagaaacaagtcagcaaaaaaaaaaaaaaaaactctgggtggtgcagtcaatagtggtaagccctctaggcactgaaaaaaggccagagatgagcagaggaattgttctgtgttaggggggatgaaagtagaaaaaagcaatttacgctctttgtttctttttcctcatcttttcttttctttctttcttttatgaggcagagcctagctgtgtcaccaggctggagtacagaggcgcgatctcggctcactgcaacctccacctcccgggttcaagcgattctcctccctcagccacctaagtagctgggacaacaggcacgtaccaccacacctggctaattttttgtatttttggtagagacgggtttcacagtgttagccaggattgcctcaatctcctgaccctcgtgatctgcccgcctcggcctcccaaagttctgtgtttactggcataagccacagcgcccggccctttttccttgtttctaagtggagatatgaatcaactcttgtccaacaaaa

SEQ ID NO: 337 - DNA, 1806 bp, Homo Sapiens
ctaccgcggtcgctgttggtggcgccgccgggcctgcgactaggtggcatccttcagacactataggccgtctctgcacacgtgatgcggggctcggtcacgttgccccctggaagcttgaggatgcgccaggtttgactctgcagggcgtacgcgctttagggatggaaggaagaggaacgcggcaggaaggcgagccccaaggtggagaatcgcctgggcgcgcaggctgcggcggcttcgcacagccgccctgggcgctgcacgggtccgcgcgcaccctgctgcgcacccactcgcggccagctccctacagaggagtggagtgactgctcgactaccacccctcttttagtgtgagcgtctggagtcctgaccgccccagccagcccagctacgatgaactgtctaagaggatgtggcaagacccagaagtatgggtgaccttatgtcagaggaagtggctttcttattgcagcaaaaattcccgtaccaatgtcagtgctaggatggagtttcactgtgtcacccaggctggagtgcagtggcacgatctcagctcaatgcaacctctgtctcctgggttcaagcaaatctcctgcctcagcctcttgagtagcctgagtagctgggactaaagtatgaaagttttcaagacgcctacaagtggaaaatgcactcctcccagccaaatcaagcttcgccagattccttacagctgtgtgcagtgaaatgactaatgaaagagccctctgctgctggtggaactttcacatatggcactgttatgccactcagcaggacccgaccctggtatttacatattggatgtcaccccaaaagcccctgaccagggggtttccgggatgtaataagaatgccactctgggctttggaaggtgcaccgtatgcacacccatactatagggcaggggttagcatttcagacccctgttcctcccttgacaagcaagtgcttttctccagggaagacgttcaggttcattcatagatccattggtgccgtgggcagctcagtaacaatagctctgctgcctaccagctgctggtggaggtgttgagaatacctaatgaggaagtcagggcccctgcgtgcttcagcagagctggatgcctggcatggcaatcaatggacacaaacctttggataatttccgtccttggcggtgtgttctatagcataggtatgaagtgggtgctctgggagctcagaagaggggctcttctcttaacttatgggtggccagggaaggcttcctggagctcaaatgactgagtggagtcttcaacattaaaaaaaaaaaaaagaaaaaaaaagtgcttccctcccacccccagttaaaaaggtaatacacctcattgaaataatttaaactttacagaaatgtgttcctttaaagttcagagagtaaagaggaagtaataaagctgaaatagtagaatttctaattaactggagcctgtagctttcttcctgaaaagggagtggtgtgtgtgcatgtgtgagtgtgtgtaggtgaatctgtaaaggatggagtagtactaaaaagagggaggtgaagacggaggtgagatctcatctttgtgccctgaacctctttgttataatgtcaggcaatgagagaaatcagtactcaccctctatgggactctggctttttcaaacttggttttctaggttttggtcttggttattgatggcttgtaacttcagagtctcattgctggccacgcttccacgtggtttattaagatgttttcctaaacaaaattgatctctcccta

SEQ ID NO: 338 - DNA, 10095 bp, Homo Sapiens
ggtgtgcgcccccggcgctggagcagccgcgtttcggggacccgggcaggcgtggggggctgcgctgagctccaggcctcctgcaggtagggatgctttgctgacagattcgggcgtcctcccctgaacgaatgtcctggcggggcgtgcccagccaccatccagcttcagaggcaatggccgggcgtcgtgagaaggggagggagaaggaagcggaagagagagagttggaaagactagaggaagaggtggccacgtcttttgccatcccagctttaaactgcagtgtttaaggcctcgtctgccctgctaaggtcaccgaactttttactttatgtgaaaagtgcttcccaagggaggcacagggactccggttctgaaaccgattaatggtcttagagcccccagtaagccgttaccaaagtgtccgggtcacagttgcagaggaagtgagaagcgtgttcgacctcatttgaaacggcttcacagagggtaaacctcaagttgattttgtaaaaaggaaagcctgtggtttggccgagaagaataaataatatattctagatccacgtgtagtgacttggtttgggaaaaaagaatccacagggagaggaacagcgcagagggttctgtggtctatcgcccaggctggcttgcagagaacggaattcaatctagttagtttaagcagaaagggatttgcggcaggatattaagtggtttacagactctttgggaagactgaaggatcagattccagactgatcttttaagaacacgacccaaagccaccctgaagaactaaagaatctaatgcccctcctcgaattcagcagacaccagtggcgtagggaaacggtggccacagctgctagccccagaaccatgccacctgcccgggtcggaaaccaccatgacaggcaattgatatagtcaagaaactcccccaagccgaaagctactgctagtgctgccaactctaaaaccgtgacacccctggcataacccacaccagcaaataggttccctgggcagtgctttttaatactccacaaagccagtaagtagacactgagacctctcctcccgctttcagagcgaaaccaggtaccttcacaatggtgcttgtcagcagaatattagaaacatgccttcctaatctcgcactaattctcctgaatagtggaatctaaatcaccgtagaaccctagatgcaagggagttggggaaatatagtaaaaactccagcgtcccagctcctacaatacatgaaggcatgctaggatgatgtcagcatggttgctggtgactcaatccgcagttcccatcacagtcctccacctggttactcaactcccatgcactcctctcttctcatacgtacacttccaaatggcaatgattccccctgcagtaaaacatggaactcactttcttcccaaaatggggaagtgccatgagccactgcatcctgctgtcacggaggttctatgttctagattctgtcctggtgttcattcgagttcagtcataatcctcccttgatatcttataacccgtagacctaattataaagtcacatcttatataaaacacatccaatataaaatgttaagggaaacggggaggacaaatataaattgactaggatagagaaaagaaggaaaacaatgctattacagtcctcatttttccaaggcttgtgagtctgaggttggactgttgagcatccttgctttatcctggcatgtatttcctttcaccatatccggcgcctctgctggttagtgctctttatctagtggagcaatctaagtcttttttcctgagaggtcctatttctgtgtggtctttcttgtattgagatgctgtagtcttccaccaactctgtgattggacatacagccttgcctatgattttccttgaggggttctgcagtggcatattctggcagtggtatgttcagtcttacatttttaaaataagacctaacattttaaaataagacaccatcgtatcctgattggctatggatgcttccagcactattagatctgttacggatccaagtggtggtaaagctgcttgcacatggcctgaaatttttgtttttgttttttaagacagtctctctctgtcacccaggctggagtggcacagtggtgcaaccatacctcactgcagccttcaactcctggggctcaagaaatcctcttgcctcagcatcctgagaagctaggactataggtgtatgccaccatgcacccagctaattaaaaaaaattttttttgagacagagtcatggtttttttttgcccaggcttgtcttgaacttctgggttcaagcgatcctactgccttggccctcacaaagtgctgggattataggcatgagctaccatgcctggcctgccctgggattttctcaaagctggcagactaatgggttattcagaatatgggtcagagctgcacacacacccacatacacacacacacacacacacacacacacacagtacatattggttccccaatccagagtcgtatcaagtgctatagctctttattagcagtagggggtgcaagattcagagagatatcccatcgctcaccagatcactgggcacagcaattctgctgagagagcaggttcttgaattcttgtgacacaacattccactctttggcacacatgtaggcacataatgtacttgtttccgctcactaggtgcaataagaatcgtattactaatgtggtgtcctctggaatggtcacatgaacacagttccctgcagatgtaattgggagagaaggcacagtcctgacacagggtaagactgtggaggtgtattgctgtccctaccaggtaaaataatattgcttctggtggttttattgggaaagagacaacacatttaccaaactgatagctgcatattgggtgctgggggctgtgttgatttgctacagtcataaaactatgtctagaacaaaagctgcaatggaagccatctattgactaaattaacagtgaacccttattatcctccaacagccatatgtgttctacataggtgaagcaggggagttaagtggccgtaataggaaatgtcatctctacatcttttttgtttgtttgttttgtttttttttttagacagagtcttactctgtcgcccaggctggggggcagtggcgtgatcttggctcactacaagctctgcctcctgggttcatcccattctcctcctcagcctcccgagtagctggaactacaagtgcccgccaccaagcccggctaattttttgtatttttagtagagacagggtttcactgtgttagccaggatggtcttgatctcctgacctcatgatccacctgcctcggcctcccaaagtgctgggattacaggcatgagccaccacgcccggccatctctacatctttcaagtctttggcagttcattcagggatgtgatgttgcttttgataactcttgataggaagaagtggttccagggttttccacttgctccttcttacctaaatagtcctcacttcctgggccagggatgagtgtggggattctgtagctgggtgtttctgcatacattcatagagtttctgcatagagagtgctctgcattcagaaacccaggaaatgctacaggataagtttatagacctacaaggtacatcatgagaagcacgtgagccaaaactccacttatcacttgactcctataaccccaactctgaaagcagagttcaagcaactgttgcgtcacctcttgctacagagcaccagggtcccaccttctgatgtgaatgagacctcctgtgcttcaagcccagccaagtcagataacttagtggtcttcaaatttttttctgcatacactcctgaagacaatttagaaaaaatttagaaaaataatgtacccttcacccactttttttttttctgagatggagtctcactttgttgccaggatagagtgcagtggcaggatcttggcttactgcaacctctgcctcctgggttcgagcaattcccctgcctcagcctcccaagtagctgggactacaggcatgcgccaccactcctggctaatttttgtatttttagtagagacagcgtttcaccatgttggccaggatgatctcaatctcctgacctcaccttcacccactttttaacttgacatctcaccttttcctgataagtgtaaatagttgaaatggatcacagaacattagaagtttaaaaaaagctaacatgacaaaacctaagaaagagatctttttattgaagatctgcctgattcatctctattatgtttttacgtagactggcttctggttgtgtacatttccaaccttatttcttctctactgtccacacattcatggtgctggtcaccacagaaaatgaatatcacagcatgacttctggtcctcaggaccgtgggcagagggagtatttctagaaatcatttttacactagaggggctagcaataacataatcatatgtggaagttactgcaccagtaaatacatcctctgaaaccccaactaacttgtttatcccaattcaattagtggactttcaaaagcacccatggccactgcaatgccaccacacatggggagaagaaagacaaaggggagtgtaaaaagaggtattaatccttaaggttgaaaggtcttactcttgtaaattttactaaaatatgtgacccagaagagccatttctaggccttgggggtggcctgtgctagtgaaagcctctgaagattggggtttgttagctacggggtgaatctaccgctgcactgtcaatagggacattatgataaaaatgtcatgtaactttgtgaaaagtatccatggagcctaaacactataatgacatgctatccatcatcatttactttgaaatatttgaacaatctctttaattttcgaaaatttttcaaaattttgaaaatttgtctttttactcttgaacatataaagttccatttcactttcttcttaggattccttcataatgtaatgtgtgtgtgtgtgtgtgtgtatgtatatatatatttttagacagggtctcactctgttgctccagctgaagtacgtagtgcaatcacagctcactgcagctttgaactcctgggcttaagccatcctcccacctcagcctcctgaccagctggggttacagacatgtgccaccacacccagctaattgctttttcatttcttttgtagagatagagggtctcactgtgtttcccacgctggtctcgaactcctggtctcaaacagtcctcccatctcagcctcccaaagtgctgtgattataggtgtgagccactgtgcccagcctaatgtatatttttaacagctttattaagatataatttatctattgtacaattcacataagtaaagtgtgctattgaatggcttttaatatattcacagacttttacatcgtgaccacaatatatgttagaacatttttatttcaaaagaagccctacacccctcagctatcaccccggcaattgttccatctccctcaaccccacccagttctaggtcaccattaattcactttctgtctctatggagttgctcactccaagcatttatatgtaaatggaatcatgcagtatgctatcctttgagactggcttccttcagttacaaggttcatcctatacttacgcttgaaacatttattaatcacccttttctgcaaccaaaaatgtatgtgaatcgaaattgtaaagtgttctttatttcctgccaccaaaagactttaggaatttaaagtattttctgggtcatgattacaatggttgttatcatgcaacttatgaaaacaacataaatgttataaacgttgctaaaaaaattgtgttaattcaaagagtgaaattttattggaaatgtctcacttacatgatgagtttttaaaattttctctgtctttctctctctcgggatctcactttgctgcccagcctggagtgcagtagtgtaatctcggctcactgcagcctcaaacttctgggctcgagcgatcctctcacctcagcctcctgagtagctgggactacaggagttcgagagcaacctgaccaacatgtgaaaccccgtctctgctaaaaatacaaaattagctgggtgtggtggtgcacgcctgtaatcccagctattcgggaagctgaggcaggagaattgcttgaacctgggaggtggaggttgcagtgagccgagatcacgccattgcactccagcctgggcaacaagagtgaaattccatctcgaaaaaaaaaaaaaaaaaatgagccgggcttggtggtgcacgcctgtagtcctggctacttgggaggctgatgcgggaggatcgctcccagtccaggaggttgaggctaccttgagctatgcttgcaccactatactctagcctgggccacagagtgagacttggtctctaaaaaaacaaaaattaattaattaaaaataaaataagataaaaaattaaaaacaaagaccataaatgccatgagttatgtttgttttttctaaaattttattcccagcatagggaataaatgcagaagaggtgcttcataaatatgtactgaattaacagataaaacgagggttcataataagaacctagactccttggagggtccatgagaaggtttttctttgtgtctgcgtgacaaattgtcagtcccaggatggtgccagaagtaaagttgggtcattggagggtgactttgacaacgtctgacatctgcagagaagaggcagatgtttcgatcacctagccgacactgttcatgacgtcaaaggccacggtggctttacagctacaatctcaacagcaacaagaatttaatgagggccgattatgtgcaagatactatagtaagtgcttaatattcattatctcatgtaatccttacaataggccttggggtagcttttattattcctatttataagtgagtaaacgttgtctcaggtaggtaagtgaccaacccaaggtccttggattagagcctagttgaattttcacttgagccatttactctggccacagaataggaacattggaaggaaatccagaggacttggtgatatggtttggatctatgtccccacccaaatctcatgctcaattgtaatccccaatattggaggtggggcctggtgggtggtgattggatcacagggctggtttctcatggtttagcatttggtactgtatagtgagtgagttctcatgaggtctggttgtttaacagtgtatggcatttccccctccttcttcctcctgctctggccatgtgaggtgtctgcttgccctttgccttccaccatgtctgtaggcttcctgaggactctccagaagccaagcagatgctggcaccatgcttcctgtacagtctgcagaactgtgagccaattaaatcccttttctttataaattgcctagtctcaggtatttctttataacagtgtgagaacagactaatatgcttgggctctggacccagctctgctgctgcctgccctggcttggtggacgtcgccagcctctctcctgccctgcccacaaagagaagtgtacttcccagccactgctcggggacagtcacgcggccaactctgcccaacaggcagtgagtggagatgacttgtgctctgtgtgggtgaagcactttgatcgctggtcgcctccttttctctcaccgtgagacggaggagacacgtgttcgccagcctcccagatgagaaggccgtgtgctttgatgctgtggctgtaagatgaaagagcctccatcctaggtcccaaacagggctgtagagcagaattttgtgcaactcatgttggataccatgtgagcaagagcacacgtgtatgttgaggcactgggattttaggattgtttgtcaacataggtaacccaggttattgtgactaatgcatttgatccactcttgttaatcctctaagtatcggttttgccatctgtaactgatgataataatatctatcagccagctatctgggggctgttaaaagagataagggaggaaatggttccctccaggtctaacattctccagaaccatctagcttagtgaaatggcatgctctaaaaatagagttttcttcatgaccattgtattatgtgcttaaggtcttaagatctgaccctctgtattcgcagatttgatgacaaagagccggaactagagatgtccagggcttcctgtggctttgggttgggatttttccaagcttctgtcagaggtcaattctgttattttgagaaaggtgttgcagtgagccttgtttttgtctctccctacccttgtaatgcaaaatatgggaggtatagaccattcccaaagctgccctgtgggttattaaatagtgactgcagtcagggctggtgtggaagacatttcgcaagctccctaatatttttattctccccttcttggacataacggaggattacatttctccaacttcccagagccttgctttggctaatgagatgggagtggcagggacacaggtcacttttgggtggaggcatggaagagctgctgggagacttctatgttctctctacccacagcagtgaacttgaagactgtctggggagatggccatgacctcagatggtgaaactctgtcagccgaagtctctgactggctgaggtgagcagagcacccttctgcagaacagctgtggacatgtggtgtaggcaggaagtcaaccattgttgttttgagccatggagatttggccattggttcctattgcagaataaattagtttgaactggctaattccattaggactgagacaaaatagcaatattagacctctggactgggaggcagcagtcttggattttaggtctcactgggggaaccatggacttggtctccctgggcttcagcttcctcatcagtacataaagggaaatgaactacattttctctcaatcatctgatgattctaatagtttctctatttgtctctctctctctctcttactcttttcctctccttctctcatccatccactcacccttccacctatccatccatccgtccatccatccatccacccatccactcatccatccacccatccactcatccatacacccatccactcatccatccatccacccacccatccactcacccatccatccacccacccacccatccatccatccacccattcatctacccacccatccgttcacccatgtactcatccatccatccatccacccaccagtccactcatccatccaccgacccacccatccatctacctatccactcatccatccactcttccacccacccatcagtttattcttctatttacccatccttccattcacccatccacacacccatcaatccctctatctctttatttattcatccatccttattctaaagaccaaagcaagtgactgaatcatgatattttcacaaaattcaactaatattttacttaattaacatcgtatgcaaaagttaccttaaaagaagaaagcaaacttatcatgaacttttccttagatgacattatttctgagaggaagaagaatccaacattttcattgtgagaaaaccttttgtttctaaggtgggccttgcttcattttgtttgcacatagaaagaataaggagctcttgagttggggtcagacagctggaaaagatatttaatcaaacatattctaatcaaaatagttttgcttcccttcttacatcaatttactgactcaaaaataaacttcctcttattgaaacttgattcctgacagatggagaaaaaggggtaggaacctggagaaaagatcacaactgagtgacttggcaacctcgtggtgagagtctccatccaaaagggcaagcaggcaagaaaatgagaataagatttacaggagaaatttatatcatgaaagcaaagattggtgcaaacccacgtgtataacactttaaggaatctggcaa

SEQ ID NO: 339 - DNA, 4602 bp, Homo Sapiens
gcaaacttcttggcttgtgctcggacccttttctcgtactccactctgttttggctgaggaggtcaaaagagaagagacgtgttagagggctgagctgcctggccctcacgctcgccccggagccagctgggcagaccaggctgcaggatgggacctcctgggggagggcagtgtggagctcgtcatagtaacagaagcagaagcccggagaagcagggaggcctgcgtggtggggagcccatgctggctctgacgtggctgagactgtcccgtggtctgacgggggcagaagggcagggaggagaggaacccacgctgggtgaacgtggtgttcaagggggacagaggggtcccgcagggctgcgaggagggctcaggcccagagggcccacgccagggcctgcaacatcgttgccgatgccaagtctggtcctaactagtaatcagcagcttctcttttctgtaggtctggggacagtcctaataaactgaaaacactgactgcttgccactgtttttgttaattcccaaaaatagacaccaatttctggagggtttttccatgaggctctcagccgcaggggcaaaggtgtgggaaggcaggcctggttgagaaggcgttgtgcccgagctgggcagtgcaggggcatcagcgaacaggtctggagctgggtagagtgaggctcagcctgcaagcagctgcccaggagagtggcatggcacacactgcccgggcaaaacaggtgggcgggagggcggccgaggctgcacctaggggctgatgggtcacagggtgcagtgtgaccctgaggatgggggaacaccatgacatttatggaggtggctcctggggtcgcagtcctgccagtctcgccaggattggacctggtctgagacactgagcctcactctgcatggtggaacagcccaggacggcagcagcgccggtgccacccccacccacgccaagggcctggaccgcagcccagaccccagcgccctccttgggccaccagccggccccagggcagagcagctcagctgggtgggcgtggaaggaaccagaggcggtggctacacgtcccagctcttccttgaccaagcagaggccccgagaaaaggcacctgccagggcaggaacacggtccaaggcctccaggaaacccaggaaaaacgatctgaaacccgcacacatgcttcacaaagggtgcttttcaagcggatgtgtgtaggagaaagaacgtttgtttacgtgcacgcaagtgtacagtgcagcccagcaggcaccaagcccaggagacgctggggagagtcacacggggcgggggactgcaaccctgcccagcccacgccgcagatgggagccacagcccagctctggagatggtcggcaaatggggtgcaggccagacagagctcacgcccacaccatgctggggatggcagaccatctaagggctaggcaggaaaacatttgccttttgttttgtttttttgagacagagtctggctctgttgcccaggctggagtgcagtggcgtgatctcggctcactgtaagctccgcctcccaggttcaagccattctcctgcctcagcctcccgagtagctggggttacaggtgtgcgccaccacgcccggctaattttttttatttttactagagatggggtttcaccgtgttagccaggatggtctcaatctcctgacctcgtgatctgcccaccttggcctcccaaagtgctgggattacaggcgtgagccaccgcgcccggcatgcttttttttttttttttgagacagggtctcactttgtcacccaggctgcaatcttggctcactgcagcatcaaccacctgggctcaagcagtcctcccacctcagcctcccaaatagctgggactacaggcatgcaccatcatccccggcttaattttttttttttttttttttttaaagagagcaggtcttgccatgtggcccaggctggtctccaactcctgggctcaggtaacgtcccacagtggccttgcaaagtgctgggattacaggcatgagccaccacccctggcaaattttttaattttttgtagagatagggtctcgctatgttgcccagtctagtcatgaactcctgagttcaagcaatcagcccaccttggcctcccaaagtgttgagattacaggtgttgggccaccacacttggcctagaaatcattttccaggcacggtggctcatgcctataatcccggcactttgggaggcgaggcgggtggatcacctgaggtcagaagttcgagaccagcctggccaacgtggtgaaacactgtctttactaaaaatacaaaaattagtcaggtgtggtggtgggtgcctgtaatcccagctacttgggaggctgaggcaggagaatcacttgaacccaggaggcagaggttgtagtgagctgagatcacaccactgcactccagcctgggcgacagagtgagactctgtttaaaaaaaaaaaaaaaaaaaaaaaagaaaacattttctgcctcaagggccatgtggacacccacgagcactgtggcttcctgtccaagggaatgcatttcacggactcctagggcacagcaggccagcacacaaacccaggtcacgccacgtcccacgagccacttccagcaatggcttggctgactgagcggctatgagtttttttttttttttgagacagggtctcgctttgtcaagcaggctggattgcggtgctgcaatctcaactcactgcgcatcaacctcctgggctcaagcagtcctcccacctcagcctcccaaatagctgggactacaggtgtgcaccaccatgcaggggagccaggctgagcctggggtggctgctgtgatacttgctccctgcctggggcctctgtgccaccctcggccaccagggagggcaccttgcagacacctgggctgggcccgcatccagggagaaacacatctctccaaaaccacgtgctttttttttttttgagacagcattcctccgtcgccaggctggagagcagtggcaggatctcggctcactgcaacttccgcctcccgggttcaagtgattctcctgtctcagcctcccaggtagctgggattagaggcacccaccactacgcccaactaattttttgtatttttagtagggacgagggtttcgccatgttggccaggctggtctcgaactcctgaccgcatgattcacccacctcggcctcccaaagtgctgggattacaagcgtgagccactgcgcccggccgaaaccaggtgcttttcctcacgacctgtgcaggccgggcctaaggcaaccgggacccctcagcctcccccctcctgaccaggagatgcaccctggagggagagggcctctgatgcccacagtggcagggatgtgtggggtggctgcaggtgagccttctgggtccctggccattgggggccctgagaccccctcagaggtgtggggacccgtggtgagatggggctgggtttctcaacgctgcaggcggagcagtggggggtcggaggccccaacccaccttcttatggacctgcccagaacagctgcagagggaacaggacaggcgggcgcatggcctctgctcagggcagggtcctccctgctttccccagcactgtttggctgtcgtctgcatcctaactcacaccaggccctcctcggtgcagacaggaccccaggcccacggggacccttctagccacagcagcacctcacagggacagggtggaagcccagggtccgtgtgacagcatcacgtcactgagccctgctgggctgggcccccccacagaaggaaccaagttgtagaggggatggggacaagcagcaagggcggcgcgggaggctggggtccatgggaggctgagccggtggagaggcctctcagcatggcctcctctggcacccacgcccagggtccttcccctcctagctggccacaactcactggggcagtggcccaagacagcccgtcacctggcctgctccctccccgggacacggctccggcgccatccatgcccaccgcagacggtgtgcaacggtgcctgctgcccacagggtttatgccccccgaccttccccacagaggcgtggaccctggctgtccgtagggtgagcctgtgtcctccactcccgtcctgccaggcggccttggctgggacggggaggagctgccaccagcggggccagggctgctactaaccagtaaatcgtgtaggcctctgcttgagctgggtcttggatatttggttcatttagaagttcctgtattcctaataggatctgtgccagagacaaaaacacaagacgggtgtgagcagtttgaaagggagacaccgtgagactcggcctcagccacagagaatgaccacagacccacgtgtccggaggggagactaaggcagccctgccggtgccagaggcggaggccccgtacctgtttgattgtgatggctggcctccagtccttgtcctcctctaagatggacaggcacactgtccccgaagggtacacattcgggtgaaataatggtggttc

SEQ ID NO: 340 - DNA, 4105 bp, Homo Sapiens
gcggcgggcgcagcagagcggcgggcggcggcggcgtcgtcgagcgacaatacaagcgcctcggaccgagtccccgaacctgccctagccaaaatggcggccgagaaagagcggaagtgacggtctcactctgttgtccaggcatgatcacagctcactgcagccttgacctcccagactcaagtgaacctcccacctcagcctcccaagtagctgggaccacaggtgagtgccaccacacccagctttttttatatttttgtagagacaggatctccctatgttccctaggctggtctcaaatgcctgtgctcaagccatcctcttgccttggcctcccaaagtgctgggattatagacatgggccattgtgctgggcctcaatttcttcagcagccaagttaagccaggaaaatgtagtaattaggaatactgttcaataaataatttagagacacctcttacttttatttccagaagaaagtcaacttaaacttacttgctcaaagcatgcccttactcaaattttaaaagatactacatgaccataacctatgctacagttagaaattaactgatctcttctgaaatacctactttagagaaagtgggtaaacataatatttgccctggctttattggatagcttagcccaaattttaactggcagaacacttttctaaatggagagaagagcttaaggcagagatttttcaaattagtagggatgtgagctttgctgagggtctttaaataatatgaaaacaagtcttttgagaaaaaaattgttatataattcagtaagatgtttaaaaattactgtagcagctaagtttctgcctcagtgtcattaatatttttccttactgatagaggttattgctcaaaagagaaaaaaacggctatgtaatcaactgctgtcaaattgtttcccaattcacaatatgcattttaaatagacctgctttgatagatgaaatgtttcatcaattcaacagctgaaaagaaccgaactgtaaatgcctgctctaaatgtattttctagtttaagaaatttgagatacatttttaaggaaagggcagaggtgtgtatttctttttcaattcatacagacacagccataaacatttcatcagttaacattatcttacttctgagatcaattaggtataaagatctatgattccagtttttaaaaagactatttcaaattattccccatgtaaaaaattctacattcacatactctaatgaaggcagcaatactttatgcaaaaaaaaatatacatttatttataggtctcaatacagcaaaatgaaaacgaaaattgagaacattgctcattaggccagcaactttaaaattatttaatttgaaatataaaataggtggtcttcataaaaagatgcatgaaatttaccttaccttatattttatactttaagagtacattttatacaaatcagtaaccaggcttctttcatgtttaacctgaaatgaacgtaactataaatgagtatctttcttttatgtagtagcaaaaagagtcaataatcctttcaagaaagatactatttcatttcctcccaacttggattcaccataaacacgatccacaaatgatattggaacctagtttaaaaaaaaaaaagtaacgttagtctttaaaaacaattaggcagcttagccggtataccacattaccaacacaacagaaataggattagtcctacaacagaggtccttaaagtaagtataaaattaggggattatgaaagcaactgtgtgtatctccaagtctttaaaattaaacatgcattatctaaagataggtcacatgaaacaaatctgcaactgtttaaaaagcactgattctaggtattaccttggtttactcaagtttcagtttgcatttcaaggaaaaattatactccaaaagtaaaatggccttgtgcgtagatttttcacttgtcaaatttagctacaatggtttagcattaagtaaaatagcttgtaacttccacaagagaagtgacattccatagctattttcttgctctgaataagagttttactattaaatgaggagagtcttccctaccctaagagctcactaacgagccctaaatattacagatcaccacctccttgctctgtaattcctggtcttctcttactaacaggaaatggacatatggaactcatcattcattttaaagtatggtggccattggcggtgacaaaaggaaaagaagcaaagagactcagtccataatgctgattagttagaagaaagggctaggattgagaaagtaccaggaacttttaattatttaaaagagaatgctgactgttaatgttttaaatcttactgttcaaatgtactaatatgaatttttaccctttgtgcatgaatattctaaacaactagaagacctccacaatttagcagttatgaaagttaaactttttattataaaaattctaaaccttactgctcctttaccaggaacatgacacactatttagcatcagttgcatacctcgccaatagtataattcaactgtcttgcccgaacaatcatctccatctggaagacgtagcctttagaaacacatttttctattaatttctctagaacttcttttcggtataatctgtaagaaattaaaaatatatatcaacttctggataaatacacatgcctatgtatcctgacctttcaaagagttcactggtatgtataaagcctaaaactttcactggccattggtaaacagaaaagctcgcacacttgatgattatgatacatttgtcctaagcaagaaaggccattaaatatttgctaaataacttagaataattgtgaaaatgaattctcagttatctttttatagaattattttcccaccatactatcagaaattagtgaaatacggtaaaatgaatcatttgatgcagaaccatccattatttaagatttccctaaaatttaaagttgaaagaaactgttccaaatattgaacaacagggtggacagatgatcatgaagcaactatatatgttagatgacaagaaagaacctcataattcacagtcattttccaataaatgtttatgatgagttttgatttctcatgatttcctttataaattccccaggataaactaagttgctctaggatgagcttgggaagctaggttaaaacaggaacgaggcatcacaggatagaaacaatcctggtgggattcacctatcaccagttgaggtcacagttagacacttaacagtgggtgaatgtgcagcctaactttagatggactgcaggccaaacaccagatttacaaagacagcggagttgggcagtccagtgggtagacccaagcactttcttcagtaactaaatagcagggagctccgtattttcagagtcacacttttttttttttttttttaaagatcagtgtctcagttcatagggaggcagcaatttctacctttttttgtggggagaggggagaaagcaagaagaggcagtttggtgtaactttgttctcttcaaagttaaggccatctggacctactgtgcctcagggtttcaccctgaatccacattttttttccctcagacttctaaggcgaccttatcttttgactatgaagtgggtataggacagcacagcccttagaaaaacctgacagcttagtgtgtgcaatcctttatccacatagtttccttaaggattcaaaggaatcaatttggaataaatatggagagaggagaatctgatggtagcaatatttattcaataataaatatttattgaccaatgtactgggtttcaggttttttttttatgttttggggttaagaagtgaacttaaaaactcaatgaagatatataatatgtcagatgctgttaggggagggagcactgggattgtggggtgggaagaactatgatactgatgggactatgtttccacattacctttatttatatatttgtatttttggagacaaggtctcactctgttgcccagagtacagtggcacaaccatggctcactgcagtctcaactttccaggctcaaaagatc

SEQ ID NO: 341 - DNA, 3253 bp, Homo Sapiens
gtggacccaggtgctagtccagactcctccccctcaaatagacgcagcaaggggacctgacttcagggagcctccagctggtactggagccctctgccaagggtgaaggggtaaagtcagggaagagagtcgacaggactcctgctcgagcaaagcagagaggagcagagaccacagcctggcagagggactccccagatctctggtgagtgttcccccagcctggcgtagggcatgccccagttcactttcgcctgcttctgtggtctccacggcttctgcaaaatgaagaggaagaaggaggaagttcacagagagcgggagacggcggtgtgatcagaaccagggcccctccatcaagcccccagcaggtcccaggcctgatggtgcctgcttctggctggggcttggagcaggaagccgtgtgtgtatcttaagtcttgatttagccagtgctcttctcagcctgactctcacccgagggcatcagcctcctgtgtgcctctcatcctcctcatgcccacacccattagcttccaattctcagacctccttggagagaggccccagccacacaagggggaaccccaggacctgccgcatgccttccagagactgagaagccccagggaggccaaggagtgaaacttctttcctgccctgagagcttcgggggactcttctcagggtaaccgcatgaggcatgtgccgccttgggctaggagagctgttgctaaatgggaaactggctgctctagcagagaacttccagcagccctgaccctggagaaggcctccagggcggaagtgtgagactctcctgggattccaggacctggggcaagaatccttttccagccccctgccagcatcctcctgggccaggtggggccaggcctgaggtggccagcccagtgaggaggaaggcagaggtggccagtggctccgtggctccctctgttcttgctctccagaaagcagtgtttcctccagccccggccctgacccacccgtgttcatgatgcctgtgcctccttgccagcatcacagatgtggggaggcctgttccccaggccctgactcccctcctcagggactgtcttgccgtggccagactgagggacccctttcctggactgagccgtgccctcccttgattctcctgtctcccctgcctttttcttctctcctcagaagccatagaggggactgcgttcatatgtggtgccttcagtggaaactcttagggtggggggacctctaggaccttcctcgactttttccctcatcccccacccccgccaaccttccagcttcagcctctgcccttacccccagcccatttccaggaggtaggaagcaaaagaaaaaagcatttccttccctctttccttcttccttccttcctctctcccttcattttggtataacttagccttttgtctttaatcctggagttctccggggctagaagacaggcagagacgaatgccagcagcagagatgcttcaggcagattctgtaagcctgttctccctcatcagggagcagctcagccaaggagcaaagtcagaccccctctagctccccagggacagaatagcccttctgacaggtaaacaggtgacctgggtagagagggcaaggccccaagataggagagtcagggctcccctttccttggaatgtgggcctctctgggcaactagggagggcaaaagtcttcctcggctggttcgcccaaaacctgggagaagcaagggcacattctatgctggcagcctctgcctgcccagctcatgcccacactcaggggcctttcctgggctttgggcagattgggtgggattcaggttgtctttatgaggcttgagcacagcttgagttcctcctcccatcctccaaccccttcctttgcccctacctcctagcccccaccttctacaatctgttatttccttttatatccaaagaattataaacagaagtccttccctcaagggaacagcaagattcagcaataaaggccagtggggtcacaaaggacagaagaaaaactccctggttctttgtcctcttggatagtagaggccttgggtgaggcaaagagatgggcagaaaaagttaccttgatacagaggccagagagcctcctggagggcatgtgtttccctagcggtcacctgcgaggctgcaatcctagaaaagtcacttctgtggcagaggatgaaattgtatccccggagactcagagatattgggtgttatgtcctgaccacacaggctcaccaggaggaaaggttaggaaagtggagaaagtacgtcctggggagcgggtggccgaggagagctttccccttgtgcgcctctcaggccttggcagggattgcagctgcaggggtttggcagtgagcccatccagagagcttcctcccccgggagaactcccttggctccagagggatactagatatcttgagccctggctttgggaacatgggtggggtcccaaggtcaaagtgttctgagtggaggtccagttgtcctctgcctccaagccggcagccccttcttcacccagggctgaggttggggccagcactgcagctggaattgtctgagcaggaggtagcagcttctagccaggcacaccccaaccccacattctattgtccctcagtttccttctcaggaaaatggggactttgctccttttagcatctcaggaagcagtctggacacctgtgccctcctctaggcccttggatgagcccagggaatagggaaaggccaaagcagccccagcattcgcagaccctgcgccctgggcctctgacttcgggccaggcttctgctccttctagggttggcctggctgccctgccttcccatcctctctccatggttctctcccagagactccaccttgaggtgggggccctgagctcttggggtgagggaggggcacatgggtagatgattctgtggaggagatcaggcctcttgttcttgctgcgtggcactgattcctccttgcagatgggtgagggggccagttttccccatctgtaaagcgaggacttcccatggccattttccctcttgggcttcaggctgctgaatggaagatcaagaagtgtgaagggtgcttggggtccttgtgacttgagtgttgcctaggaccctggcccacaggacccaaggggcttcttgtctcaggttgaaacctttttatcagaatgtcatttccttc

SEQ ID NO: 342 - DNA, 7823 bp, Homo Sapiens
cgcgtgacgcaccgcggggcctcgcccgggtgttcgctccgccgcctgtccgcggatcggcgctgcgagccccgcggctgcctgcgggacacctgagcgcggagggtgcggcaccttggcaccttgaccctgtggcagggacatctcggcccaggaaagaatgaggtttaggcacggcctaaccacctaagtgagggcactgaagctgccgggggaagggcaaggtccgcgttgcagagcccaagcccagtggcgcaggatttgttttggtaagaggggatttagcgtcccaattgctgcaaattgacacagttgcggacgtgcaagcgcagaagaaatttgtccttcctcaccccacagaacagaaacaactgtacacttctgctttttaacttacatctcctctgtcctccaaacctgtgtgtccagatgtgaaactcagatccccaggggctgtggtaatttttaaatctggggctagccccccccacctctaggccctctgtggctttggctcttggtcaagcttgtgtatttgacaaggccaggccaggctcttcaccaaagagcaatggccttgcagaaagaaaatctagcttctaagtttatttgccaagtatgtattgagtgcctttcgtgtaccaggcactgttttagactctgtggatacaaccgtaaataaaacaaaaacccggcattccgggcatagagcttaaatggggatggagagaacagacaatacatatcttaaaggtaaatagtctgttgaagagtgaaaagtgctattggaaaggggcggggtgcggtgggggagagtcaggagagaggtggagaggcaaattgcagaattaaatcgtgtctatgtaggccttattggtaagatgagagttgagccaatttaaataaggagagttcgctatgtgtatgattggggtgtgctccagacaagaaaaaaaaatcgaaggctctaggtgcgttgtgtgtttgtggaagattaaggcagatccgtgttgctggagcagattgagcaaagcagagagtagtggagagcaggttaaggtgatggaggggaaggattatatagggtcttgtaggtaattgcagacttttgaagggtgtgacttaaaattttaaaaggattgcagtgttgagaatccacctattaggaagctgttacagtgttccagtagagagatggcggagcctagaatcaacatggtgaatttggtgagaagtaagaggattccagctctattttgaagatagagccaatagaatcaaattcgatatgggatacaagagaaagaaagtcatgagggatgatgccaaaggcatgaattaagtaagttaatatatgtagggaacttaaaattatgccaggtacatagtaagcattcaattttattttgacattctcaactctaatagtaggggtgactagagcagtgacagtctacatatcagttttagcgtctagaatcatacagctttaagattttgcagttatgaatatttaccaaatgagtcaagtatttaagaagtttgcagtctaattggaggagataaatacgtgaaacacacttaaaatgatacagctccaatgagtggaagaagcaccagggctctcgtctcatgccgaattgggtaaaatgacacagacacacatggagtggttttaaggggtggagaatttaataggcaagaaagaagggtgaagaaaggaagaagctcccctgtagagacacatggaagtgggctccaaagcctagagaggaaacccccagtgctggggttaacaggcagttatatgaggagactggaagaggcggtgtcagatttgcatagggctcaggggattggtttgaccaggcatgtcattcacatagcccacgaaaaacctggctctcccaccctagccttttaatatgcaaatgcaggtcgccttgatgttctacacgtgtggcgatatgtggggatggccatgttgccagacacatacaggggcaagggcaagaggacagcggtggctatcgccatgtttgtgtggacccagtttctaatggcctgcatttgcatatcaaaggtcgccagccgggctctaagagcaggggctttcctgctagacaagaaacatttctggagctgctttaaaagagacaaaaactttccaaggaccccttttcctatctgcctaaaattatttttttaataaatcctataacagtaatccaagataacacattttgaaagtaacaagttatgtaatgtgtatggcaagagtcccatgagtcaaactcacagggtaatggctggaatgaggatgggacttgaaagatgagtagaattgaacaggaatgggcggaacttccaaacaaagcaaggcaagaatgagcgtggtgtgttgaacaacagggggtagactagcttgactaatttggaaggtatatgggaaagaagaaaaaataagttgaataaataggatgaggccagtttatccagggtcatggaaaaccaaaatgaggaatttcaaaataaggcaggttactgtggctacttgacatcatttttcaggagattgtgtgaaatagcagtaatgaacatgatgaatgattttgataaaataggcactcccaaagatgccaatggattatcttttccaccaagggatatcttttccttgccacttcccaggagggataaagagagaagattctaaggctaccttcctaaaactacatctttaggattatttttttgtttctctttgcgctctgtaggcttcattttaagacatcctcaacaaacaggtttattacagtgtgtatatcctggcattaaactgtatgttaggaaatatgttgaggccgttctccaaggtcacccagtttttagcttgatggtgttgctttccccactcgattctttctagcacctgtggtatctctcctccaggtccttttgaccccttgaacaaaatttctctcagcacctattccctccttttaaaactttctaccagaattatttaaattaatgaatgtttctggttgcctaatgtaacactgcaacgtgtattttcttaaaaatttttatatttcctcacattagtgcctttctctcagcattaccacacaaggctctgtgcttgaatgtcctatcaaggccaccataaaaatggtaggttcaattcattttggttcaatagacatattggtatttccgaaattaatatatgtcagattggtcttgacccagccatcaaagttattcttagagtcatacatatttttgaagttctttttttttatagctaactgaacaaaaccagattaattattgacccctgaaaaacttgttaaaaactagagattaggccatgctctaacttttcccattgagaatctttcttaattcattgtagtcacctttgtgggtgtcattttcttttgccgaaatttaaaagcaacacccagtttgtcaattacaggtttctgagaagcagatgccaagacgggattacatgtgcaggagataagagaaaatgcctgtgaaggacaaagggagaccagcaagagaaggcagggagactccgattggaatgcaggggagtcgaaatctgaaaaagcagaatgggaaggaagaataggttgaaagaacctgtttgtaatgtcattctgagagactcagccaggtcaatggggagtcctaagccaaagttgttcattagaggaattccaaattggtcaggatctgctgtgctcagtaactgtctgagagcagtgcaggaaaaacttagtccggtgcaaactcagtggtgaatccaaaagtgcagtaggcggagactgtaaatcaattcataataacattcatggtgtcgcttcatgatttctgtaaacctctctaaaaacttaggaaagggaagttaataggacaaactatcatcacaggtggtctgggaccacactagtacttaccctgtcctacactatccactctatattcccatcactctcagctctcacttcagcagatcttgttgacttacttggtggcatgacctaaacattcactcctaagtggtcttgggcttttgtcatcatactcttctcagtccgtgactgcagtttgtgtccattcacagttagaactaggtaagggcataccaagaggcacccaagtggatcatctgagtttcacatgtgtatttctccctgtccccaaggtgtaaaggtggccccacctcctcatactaatcaattatccttgcttgctggcccctggctgcaaagagccaaaagtgtcgtgctatacatagcttatagttcaatggattcccgctctacccctttgcaagagagaaaacctgtaattctactcaacccagagttggggaaagtgaagcacagagttctccagtgggttattaggagtgattttaaataaagccatttgtgatttcaccttttggttcctagatccatgtatttgccgtactagagacacagtgccatgtagaaatctctgattagtgcctatactaaatactgagagatgtcatgccatccttgcagattattgtctctgagctgctgatttcgctgtgacttaagtaggcttttccagtactctatgaggccaacttcacctaaatagtgcagtatatgataaaacaattagacctcatggacatggcctattcctgtacctccttttctataaagtaagttttcttgtggatgctctgctaggtgggattctgtgactagagaggcattctgctagtggtgccagctaaatctttgcagacaggaaaggccaggttctagtacctgctcaatcaaagcctggaagcagccaggggaagcgtggcttatcacgaactccacagtggatccaaaggtgtggcagctgaaggctgtcagtcagctgcgctctccacagcaggtgcttttgaggagagatctgagtggaacacttgtaaggctgccagagcaagacagtgactctcacaaaatcatatgaggagcgggaacatttgcagcgccctgctggagtaagaaatgtagaataaagagttattcaaacttagaatagtacttgaaggagaacctacctaaatttgtgaaagtctaaattataaacaatactgtttttaaggaaatgccttaatttacttccaaacaaatattctaatcttgagcatactaacatactgatattgaatcctggctaagggttttactataagttaatagaggaaacatttttaactagtagtatttatttgcctacatgtaatttgctcaaattttaaggacagttcatttaccaagacccctacattcataattttccacatggatagtgtaaaggcaacttcagcccagtaaatgtcaataaattaaaagacttttttcttttgattagtgcagtctaaagtaattctttttgcaatatattaaaatgacttgctcaagattcacttttcaaaggcattgtgagcttacttcctacagtctgagactgttacatatgagtaactatggattagcttgtagggccagcaaaataggtgaacagaaaatcagcctcaaaaaacctccatcctttgccaatttacttaaggaaaactctccatagccaaacactgttgctggtaataaaagctgcaagctgtcactgaattctgctttcttggcagcacatctcgatatactgattgataaagactcagataatcaaatcaagaatgctacaggtggttactcctcagaaaccttgaaaggatttaaattcattctgcttaaagtcatgccatacaggaagccatcagaagttgcctggtaaggatttaagaaaaaaggaattaagtggttatttgggtcataaattttagggcatcaggttatgagtatctgatgtatttatattaataattacagcttaccatgggccagtcactcttttaaatgccacagcaaatttatgaagtaggatatattattatcctcatttgcacatgaggaaactgtgcacaaagacgttaaatggactgccaaaaatcctaaagctagtaagtgccagtaccagtattcaaacctaggcagtctagctcttaaccgctatactatatcttccattgaaatggacagctggttattttgactaaatatcctaagatatgtttggaagggaattaccatcactgacctcttaaatctcctttttctgtacttccaagctgatcaactctttttttgtgaaagactcaaattgttgtgttgtattacatgaatcgatatatgggataattgctaaacattatagacctgagagtcattctatctcttttagaaatctttttctttattccataatggataatgacaaattcaaaagctttaggaagtaggcagataacataagtgagggagatggcttggtataagacaatttgaaatggcgagaactgtggcaaaccactactcactcgtcacttggctccagctgctctgtgcaaatgtggatccaatgttatcagatattttaaggccaggaatggtggcttatgcctataatcccagcactttgggaggccaaggtgggaggattgcttgagcctaggagtttgagacctgcctgggcaacacagtgagaccctgtctctaccaaaaaaaaaaaaacattagcgacatgtggtggcatgtgcctgtagttccagctacttgggagggtgaagtgggaagattgcttgagttcaggaggtcaaggctgcagtgagctatggttgtgccacagcactccagcctgggtgacaaagcaagactctgtctcaaaaaaaaaaaaaaaaaagatatttgaaattttaccttaagggtaagttattacctctgcaaatagctcatttcttcatcgtctgttttactctattcagtttcagagagagaccacagtcttgactttattttcaagttctgtgaatccattatttttagagcttttacctctttacagtctccatgtatatattcaataatgtaaaatatgttaacagttcattgtttggactgtgtcctttttacagacaattgactatataaaaggctgaagggcttttccagtatatccctagtactacaaagtacgttttggagtcagacaaatctgagtttgaattctgtttctgagacattaacttgtaatttcagcaagatgttttttcttcatctgtacaatagggttacttatacctcctaattagatgaggattaaatatatataaatacactgatcatagcagctgtcatatgcaaattctgaagcaaacaaaaaattaaaaaacaatgagttatcattaataagtcataaaggaaataaaggaaagattatatggaatcgtataaaaatactcaaaaagggccaggcatggtggctcatgcctgtaatcccagtactttgggaggccaaagtgggtggatcacctgaagtcatgggttcaagatcagcctggccaacatgggtaaaccccgtctctactgaaaatacaaaaattagccaggcatggtggcatgtgcctgtaaacccagctactcaggaggctgaggcagaaagaactgcttgaacccaggttgcagtgagccaagatcgtgccactgaactccagcctgggtgacagagcaagaccctgtctcagaaataaataaatgaaaatgaaaatactcaaaaaggacatttatatgtaactatatcaaaatcaaaaaggcgatttatatggaatcatataaaaatagcctaaaagaagtcagaaaaaaagaggaagaaaa

SEQ ID NO: 343 - DNA, 1838 bp, Homo Sapiens
tttttgcatatacctcatgtgaacgaaaggacagaaaggggagtgaatatactatgaatgtgctatagtcggagttggggggcaaggaagaagtcatcgatgatggctcttctcaggccctccctcctcccacctctttctgccctccaccccactcccactccatcacctacatctatgaccttgcagcaaaatcattagagcagagcctacaaaaccggccccaagtcccaattcctctacttccttgttagaggaccccaaataactcactcagcctctctgagccccaatttcctcacctgtaaagtgagggaataacatctacctcgcaaggttgttgtgaggacgaaatgagagaacatgggcaaacatgaatgttcttgaattcaccaccccaggagaagccaggggtctgagctgggaggagcagaggttctgggtgccccctgcccctacagagcctggcaccttcagcttttctcaacttctgagggctgcttcctacaggccaaatctcccagccggaaccacttggtcagaggaacactcacagcagcctttcccagcacctgacctcaagggatatggcgtctaccaatttacataattgcctttgtcatcagttttcccataacatggtacgaagttaaatgagagcacctgagctccccttcctctgagtgcatttattccatccctccaagctgtggccttccatccccatccaagagacctgcagctgtgaagaagctcaagacttctttctcattgcctgcctcccagccattagtccccaccacagcccaggccacctggaaaatgggttccaaagcactatcactactaggtgacccctgaatgtggacaaggccacagctcttcaggcagcatttcaggggctatccagttgtcatccctctcatacccctctcctacccacccctatccccactattgtggaatgcacgaagggacagctggcaaaggcagtgaaccaagatgcagggaaggccctgtatgatggggaggatctaaagcaaaagccttttgtgcattgcctcaggttcagcagcagcagccctcactctgaagcctaccttgagaagccaggcatttctgtgaaaagctcatcagcatgcatttacaatgcaaactagaaccaactcccagtcagctaataacagaccccaggaaaaagaaaaggtcttccagacctccccgacacactttagaaccctcaggggtgaaaaagagggtgctccagggcagtgcaacttaaactgtggttgaaggacaaacagcctctgcaatacttgaggagcttgttagaaacccaaactcacagccccctccagacctacgtacagaatgtatattagcaagattcgctaggtggtttatgtgcacgttaaagtttaagaagcactgcctgagaatcccttggtcctaattaattcttttccacactcagatttgctaatgggtttcaccttatctcttgactcttgtttgatggcaacaggaaatagtagcatttcaggaagggtggaaaatataaaaagcactcccaacccaagcctccaaaaaacagcaattttcattttgtgtccatatattcccttctaatcattgtcctcatgcaagattttttttcataaagatgatctgctacataattttatatcatactctttctcctaacattacatcacaagtatactttcatgttgctgctacattcttcacacttgtcattttaatggccataaaacatgacatctagtgcacatatataattatgtagactcctattattaaatatttggatttcttcc

SEQ ID NO: 344 - DNA, 2036 bp, Homo Sapiens
aacaaaaggcaacatttcctgagtaaagggcttgatatcaaccccagggaggatttctggactccagtgcagtgcctgctatgaagcacacacaatgcttatctgctgctccattggaaagccaatagcaaagaagggaaaggaccttctgattggagagtggaggaagaggcatcatctttgatcatcatcagattttacaactcattgttcccttccagtccacagggtgagagaatcatgtaaatggtcaaacaaacacttggattatagaagacacttgatattaataatgacaataaaaatgtttacctaacttggatagattttgtgtatagataggatgtgtgtgcgcatgcacgaatgtgtgtgtgtgtgtctgtgtgtgtgtgtgtgtatactccccccttactgggaaaggacatatcagaagatcaggaaatgcattacacaatttttgtatgcaatattagtccatttcttggcggagacccaaatctattgtggcgagaaagtaatagatgaactaactagggactcagacttactggctagtgtccaagaaacattaaaaaattgagtactgaacataacaagtaggatggtgcatgcaaatttagatgtcttattgaaaacagcacatttattaatatattagacttgtagacgtgagggtgttttaatacctactcagaaattactcatgggtcggcttcacagaaatatcacttgcataagtgtgagcttcagagaaatggtgccaggcatgagtgatcatggctggactaatctaaagaaaactggaatgcctgtagttaatgatactatattttacacgtaaaaatttttaagagggtagatatcatgttaactgttcttatcacaatgaaataaaaatttaaaaataaaactgattaatgggcaaaatatgttattgtcattgtcaaactgtcatctttcttcctaattccttagaaactgcttaacataactttatttgatgcctactatgtgtcaggctattttctaagacactagaaatatccagataaagtaaaaagattaaaagcatgattatataggaactacatttttgtcagatttatttaagatagcatttatgtacagtaaaatgtaccctttaaaatgtacagcttgaggagttttgacaaatatatacagatatatgaccatcactacaatcaatatacaaaacttttccatcatcccagaaagttcccagctgatctctgtagtcaatgccttcctcagacccccagcctctggcaaccactgatctgatgtttgtccctgaagttttgccttttccaaaatgtcatataaatgaaatcatacaaaatataaccttttgtgtctgttttctttcacttagcacaatgcttttggatccatcctagttcacacctttttatcactgagtggtatttcatttgtttatacattattcagttgatagacttttaaattattttcaattttgtcaactatggataaagctgctgcaagtatttgtatacaggtcttgtccattgtgtgggcttatattttcagtaggcaaatacctgggagtgagattgccaggtaatatggtaaatatatgttgaacattgtaagaaactgccagagagcttttgaaatgattctaccattttgctttctcaccacaatgaatgagatttttagtagatctgcatccttgttgacatcgccagtcattttaatttaagcaattctaatcaatatgtaatggtgtctcatcacagtttttccttgcatattgctaatgactaataatgttgagtacatttgtatgtgcttatttgtcaacgaggtctcttctttggtaaagtgtgtgttctatcttttgtccatttttaaaaattgggtttttgtctatcttactgaactcttctgtgaatttaaatattgtttcctaatgtgttaaatgaagataatgcctatctcactgttttgtgtgtgtgtgtgtgaaaataaatgaaacatatgtacaattg

SEQ ID NO: 345 - DNA, 2149 bp, Homo Sapiens
ggttcacgctcctgcctcagcctcccgagtagctggaactacaggcgcccgccaccacgcccagctaatttttgtattttcagtagagacaggatttcattgtgttagccgggatggtctcgatctcctgacctcgtgatccacccgcctcggcctcccaaagtgctgggattacaggcgtgagccaccacaccccgccacttcaaatactctttaactttacacttaagcaaagaaatattacatatttcagtcctgaaaatattatgataaatcaaatagaccctatgacataggatatattaaatatttaagttttggaaatgtcctttatatacaaaatatttccattgttaacaagtgcttttcaaaaaatatttttattataccttagaaagagccaatttagggtctacactatctttgttcatctcgttttcttttttgcacatattcctttactaatgtagattagcactacaagataaaaagtatccagcatcataacattgtaattaattcccccatatcaaattatatgaaaaatcccacctcagacactctgccaaagggtatggaacatttaatcaagatgaagtgcttcaattgaagcagtatatgctcacctctatcagtaattttgtctcactttatttcaaagtattattatttttcgtcccaagattttagtaacacgttgtgttaaattcttgtcatatttaaaattaaaccctcttattcgtattatatttaaaagcaaattttcattgtttcaatgaaatcgttcagtatactcggcaaagtttatagtaaagttctgaacaataaatacattctgaaatgtcctgtgctttcaaaagtacatattagagctgatggcttaagcaccattatttagtggcatttctaattattactttcctttatgtggttttttttaagaggcaccaaagttccttttgtcacatggctcgtgttgccttcagtaacagccacttgaatttgcccttagttgcaaactcagatcatgacacaaaatatactcataaaagaactttattctggacattcttccagactatggaaatgatgttagacaaaaagcaaacttgagcgattttctcattcgagttcaaaatgggtcataaagcagtggagacaattcgcaatatgaacaacacatttggcccagggactgttaatgaaggtacagtgcgggggcggttcgagaagttttgcaaaagagatgagacccttgaagacgaggagcataatggttggtcacaggaagttgacaacaaccgagagcaatcattgaagctgatcctctcacaacaccacaagaagttgcagaactcattgttgaccattccacagtcattcggcctttgaagcaaattgggaaggtgagaactctagataagtgggatgccccatgagctgagccaaaataaaataaaaaagtcattttgaagtgtcatcttctcttattctatgcaacaacaatgaaacacttttctattggattgtgatgtgcgacgaaatgtagattttataggacaaccagtgatgaccagctgaataactggatccagaagaagctccaaagcacttcccaaagccaaacttgcaccaaataaaaggtcatcgtcattgttgggtgctctgctgccagcctaatttactacagctttctgaatcctaatgaaactattacatctgagacgtatgctcagcaaatcgatgagatgtcctgaaaactgcaatgcctgcagccgacactggtccacagaaaaagcccaattattccccacaactacacgtgaccgcatgtagcacaaccaatgcatcaaaagtcgaacaaattgggctacaaatttttgcctcgtccactttattcacctgacctctcaccaactgacctcccaactctctgccacttcttcaagcatctcgccaactttttgcaaggaaaaagcttccacaactagtaggaggcagaaaatgctttccaagagttcatcgaatcctgaagcacgtatttttttttttatgccatggaaataaacaaacttattttctttctttggcaaaaatgtgttgattgtaatggttcctattttgattaataaagatgtatttgtgccta

SEQ ID NO: 346 - DNA, 1212 bp, Homo Sapiens
cgagaacacaccctttccagtttgctggagaaatataagagaagtccagtgaaagagagctgagtttccccaatgatgccatcaagatgaactaactacagttaaccagccagctgatagcagatgcatgagtgagcccagctgagagcagtgcctacaatagttcctggtatgtagaaggtatacaataaatattggcggagtgaaggaacaaatgggatttgcttgattctgctgcagaagactaagaaaaagacataaatgaataaataactagtagaatgttaacacaatcagaaaaaggaccatttcttttcatttggatgtctcaaatctatttgttgtttttgttgttgttgtttttctggctgggcttgaaatgtaggcatgcagccaggaggctccatgctgactaatgagatagaggtacccatttagcccagcaatattcatacattgtatatgcattcatttttctctagtgactttttaatatattttggtgaagatattcccaagataatgaagatatgttgagtgggcattaaaagtgatgagtctttttttccattatcaaagacaaatacaggtgtgtgatgtatgcagagaattagaagtagggaaaaaaatgagggaatccaaaataatgaaaagaaattaaagctctccaataatcgaaagaaaggccaaactgaaaacataaatctccagactctgcaaggatttatactgatgtggggcatgtggaccaatggctttcaggatgtgattcattttgaaaaaagtgtcatttccattgccaagtagagttcatggtttagtgaaaatttcatcttcagtctgatcacatgagccaaattctggccctatatattctgatgtgaggaatgaagtatttctagtttatttgtgagattccaagcataatatccaggagggttagtcacattacagctaaggtaagattttgttatatttgtgttagtccttattctaggcactgaaatttccttgtaacattacttgaaaaagcataagaactatttaatgaaagaatgctttggctctgcccaaatgaccaagaaagacatcaactcacttataacacagtcttgatggtcagaccaaaaggtacgtgattgtcaattattttcagcagagactcatagaacaacaaagcagggaagaatctgaacagggattggactttaa

SEQ ID NO: 347 - DNA, 12826 bp, Homo Sapiens
ctttctggattcactctaggactatctggagaaagaggtaagaatgatcagattctgtaacttattgcttttcctttccttctgtactatccctgcacacagatctacagtttgaaagtacagtaataagatcctcacccagccccatccgcaggaatgcatcaacagctggccaaacataatccaacacacagagctgcctttgtagaattagtaacaaacagtggaagggccagacaggcgtcccagaagagctccccatgacaactgggaaacctcctcacccccagggttgagctgactccactgagctggggttggagaaccccagctctcacatctgaatctacaacaagcctcaagtgcctgccctcaacctcactagaagctattcagagggcattcggctctccataacagcaagttagaagcaagcattctccatactaacaacagccatactctgcctcatggcacatgccttttgaaatgcaacactgcaaatctccaaatcacatgaacagcatttacacctgtacctaaccatcagctgtgagctggtaggaccacctctcgtctttagaaaataatttctttttgcaaattataggctgatcccggcactctgaaacatgtaaatataacactgtattcatctccactgagcatttagcatctgaagcctgtggtagccagctggtctcaaagtcatctgggatacatttattttgattaaattgatcagatttctatttacaggatagaatttttttgccattactgaatacagctgtgtttacagggatttgtagaagaagaaaacaaaaccccacaatcggtcctagcaaagcacagagcattcagaactggaaggagttaaaacagagggggcttgctttcacagtaaaaagaaaattctgcatgcagctgctttggccatgctgtctcactagtcaggaaatgggtgttgaactggagctgaaaacacaagctgcaatcaagcccgatccagcaaagtgacagacttcctgtgtaaaatggtcagaaaccttttttcatgtctctacatgcatgcacatgcatttaaatccatgctgcgaggctgcgattttctctggggacactggtacagtcacctagcccatcagttccttcgtcgacagcgccggggacatccagactacaatttacagttcctctatccatgtgctgggttataaattatgccatcctccctagaatgagaatgcacagcaagcggcagacaatcacccggcattcggcatctctttcttttcacgcgctccctcgctccgcctttctccagctctgccttctcaggcagatacatcagataccttgtttatccatcttcagctccactctgaggtaaaatgccaccacatctcgccatgggttgtccccccagactaaatccctgggaacagcctgagctgggtgcacgcggccgaggcgacggctgcccttgccctgcggagcacgggtgggcattggatgtaaggtattcctaacttccccttccccagtccttggcgtcctctctagccatcccaccccaggtcttctgcagcttcaccctgtcctccaagtcccctcgcccagctgcgaggcaggagaccccggccggagctccgccagcaggtccttctttcgcagggcgcagacgcacgattccgggatcgggtgcaccacggcgaagcccaggcgggagacggcaggagcagctcagatgaagaaactgaaacccacagagatgaagtaacatcctcaagatcaaaaggtaacaaacgattgaggcaggatttggatattgctctacatgacgggaaagcctgtgctcttggaattacagtcatagtacaacagatcaagttcaaagcatcatctaagtcaaggaaaaccagtaaagaggtttggagagacaaacagggtcaactccaggcatttgggtcagcagaaacggcacgattgagcagcactgtgactataggatcatggatcagaggctgcttcctctttggttctgggcatcagcctcatgtccactcaaagatcccatccgggccaccacattgaatttatttgtcattttaggtacctcttggctgtgagtttcttagactttccttgtttttggtgaccctgacagtttgagggagtactagtcagtcagttatttttgcagaatgccctaaatttgagtttggctgatgtttttcttagggtttgactggggttatgggttttggggaggaagaccacagaggtgaagtaccattctcaccaaattatattaaaggtacataccatcagcatgccttatactattgatgtgaactttgattgcctggctgtggtagtgtttgtcatgtttcttcactgtaaagttactcttctcatcacccacttttctgtactgtactctttggaagaaagtcactatatgcatcccaaatttaaggagtgggaagttatgctccacccatttgtaagcagaaaatctacataatttgtttggcattcttctgcataggaaaatcatctcactctcccagttatttatttatttgatctttttttatatcagtatggactcatgggtatttcttttatactttgggttataatccaatactaacacaataaagaaatttttaatggagatgcattcaaattcgttgctaaaatgggcctgacacctcttgaccttggctaaacagagattctggatggagcaaagcactgtgacgtcatgtggactttgaaggttaagaaactacggatcatcaggacatatttgctcttccatctcacagagaaaatggggatatacctcctcattccaggaaactttcttcctatatttctaatatatccaggataaaattcaatatatatagtcagtagcttcaaagttaagcataatttgtttactagaattcttaaggcagatgttggatcattaactcattctcttagaaataactttggtgcttataagtaggcatcacataatctgatacactgatattatatatataatcgtgaaaaacatatcagattatatgatatcacataatctgatatatgtgatatataatcagattatgtggtatcatataatctgatatataaatgtttttcataattatacatatatttcaagtataattgtgaaaaacatttgccagtttaaagtttaatatgtagacagaataatgcctggaggtatagggatataattgggaattagagtaataaaataaatattttaagtacttactacatattactcattaacacaaaagtaactttacgtataaaatgcatgacaagactccattataaagaagtgtctgaaagctatagggcagaaaggtatagaacacagtatagactagaaggagataaagacaatcagaagattttattcattcatttattcaacaaaaatttacagagtacctccaattatcagcagctgtgctgaagattaggtatattacctacacagttacaaattttgctttcatgtagtctgcaggaagagagacattaatcaaagaatggcactattgacacttgtgcaggaaagggttacgtcaacaggcctgggctgctcaaaccttgcgtattcccagagtctcaagactggtcttggcctggctcctgggaagattacttctgagcccttggctgagataggagtttatgccaacagtgtgatttatggcaaacacctgtttttgtatgcctgaggctttggatcatgctgtaccaatttgatctgaggcctgaagactggtagctaaggtgctgcatgcctacatgactgacctccagtaaaaaccctggacacatgcctcaagtgagtttcgttggttggcaacactttacatatgttgtcacacgttgttgctgagaaaattaagtgtactccatgtaatggcactgggagaggacaactggaagctggtgcttaatttctcctctactccacgctatccaccttttcacttcgctgagttttttctgtatcctttcaatgtaataaactttaaccatgagtataacagcttttttgggtcctgtgagtctttccagcaaatcactgagcctgagaattatcttggggatccccaacacaatactacaattaaaaaatgaggtacatattctaaagaagaagaatatagtttgtgggagtttataacatagtaacctgaagtagactaggaggtcaagaaagtcttccccgaaaaagagaggtttgagctgtgataatggatgcataagacattgcttataaaggtggagagagctttccagcatgatgaattgcatgtacaaatcctctggtcagggagagtaaagtgtgtgtgagcagctgaaagtgacatgcacagctggagtggagagaacagcaggaggtgggatgggagatgtgtgggacagtcctcagaggctgggcttggcaaaccatgtgaaggattttggtcattatcctgagagtcacgggaagccatggaaaggctggaagcaaaggggggctcagggtggtcttctgaaataagcattctggcaatgggggttggggggagaacttatagggggtgatgagtcgacagaatgaaaacaaggcaatctctttttatagaactcagaagagagatgatggtatctctggctattgtgctggcagagggaatgttgagaaatggaagcttttcatagaaatttagtgggccaaattactttgctggcttgtgcaaatgacagaatggttggaccactcattgaagcaggacacactaggagagaccaggtttatttttgtcaggatgaagcacaagaatgacatacatttggtcttggatacactgagtttgatgtgcctttagagttgaatatggagatagttataggccactgaatacataggtatggactgatgtcattcaggtttcatccacaaattgtaactacagctatcgactcaaggggcaactatcatttgcctggcattactttaagtactttccatatatgaactcattatatcctcacaattattaaatgagcagatcctataactagcctatgtcattctcatagcaagccaaggaagggcgttgaaaccaactttggagacggtagggggtaaaaaagaagagggattttgacgttgccagtattagtaactgattcctggcagacaagactgagagtatatcaccagacctgaaggaggaggaggctgggctatcctggaagccaagggaagttggtgctccagaagaagacagtttttatttaatgctgttaagtttactaagaagaggactatgggatggacaacagtcagtcattgcaagtaaaagttgttttgatgaagctggaagctaaattagagaagggtgcatggaaggcaagaaagtgaagacagggaagtgctttcagcacatctcgctataaagagtaggaaagaaagcaatacctgcagggagctaaaggagtcagggaggagctgtttgtttacaggtgagatgggagagctgtattcaagtctgaaagtcaatggaaaggattcatttgagagggaatagttgagtacacatgagagaagtacatcgattgcagtgagctgagatcgcaccattgcattccagcctgggcgacaagaacaaaactccgtctcaaaaaaaaaaaaaaaaaaaaaaaggagtacgttgatagtgtaagcttcttcagcagtccagagtgagagagatgggatgtaaatatggtcaaacatatttgggcagagccagtcagtgaaatgatactcttcataacacatgtcacagaaaccagtaatagatccaagccctgcctatgctccactctgctctcatacccattggtttccttatttctctttggctatccctgccttccttcatgactccatatgccacgttcctctcacttcggacacatcgcacttgctgtttttctcagctaagaatgtttttcactccatccaatgccccacctcttcaaccagtttctagcctgatgaagatgttcaataaacagtcattggttgaacaacttgtgttcaaaacatttactgaaacaaacctgtattagtccgtttttacactgctataaagagctacccaagcctaagtaatttataaaggaaagaggtttaattgactcacagttcagcatggctggggaggtctcaggaaatttacaatcatgatggaaggcaaaggggaagcaggtatcttcttcacaaggtggcaggaaggagaagtgccaagtgaaggtggaagagccccttataaaaccatcagatctcgtgagaactcactcactatcagtatgcttcaattacttccacttggtctgtcccttgatacgcggggattatggggattacaattcaagatgagatttggatagggacacgaagcctaaccatatcaaaacccaatctgaaactcaatccgattttggatatttgcttctgattttggtcaccaataagtatttttatcaatataaatttgaatcataattaaagaaggcattgtagtctaatatttagttatacttttatatccatgatcatattcatccctcctacaaatataaaaacatatgcatatgccattttattattttatacaaaagagtatttttaagcagacacacacctgtcaattaattctctcctactaagcaaacaacacggaaagaaattctaatcagaatgtcaatctattaatttacaatgagatgtacaactgtcaattcaaccagatatttttgttaatctgaccaatgcatatttttaccctggccaagccagccacagattggtaaaccttacattaaaaaatgtaggtaggcccatatctctcaccatatacaacaataaactcaggatgaattaaaaacttaaatgtaatacttgaaactgtaaaaataccagaagaaaacctagagaaaactcttctggacactggtctaagaaaataattcatgactaagacctcaaaaacacaagccacaaaaaacaaaaataaaaaactgagacgtaatgaaataaaaaggtttctgcacagcaaaggaaataatcaacagagcaaacagacaacctgcagaatgagagaaaatattcacaaactatgcatctgacagaaaactaatatccggaatttacaaggaatgcaaacaactcaacaacaacaaaaacaaccccattaacaagtgggcaaaggacatgaatagatattttttaaaagaagacatacaaatggtaaacccgcatatgaaaaaaaatgccccaaatcactaatcatcagagaaatgcaaattaaaaccacaatgatattatcttacattagtcagaatggctattagtaaaaagtcaaaaaacaacagatgttggcgaagatgggaagaaaagggaactcttatacactagtaaaacctctgtggaaaacagtatggagatttctcaaagaactaaagatagaactaccactcaggtcagcaatcccactaccatgtgtctgcccagaggaaaagaaattgtgtcaaaaagatacctgcactcttatatttatcacagcactattcccaatagcaacgatatgggatcaacctatgtgttcatcaacactggacaaagaaaatatggtatatatacataattgaatactattcagccataaaacaagaataaaatcatgtattggagcaacatggatggacggagaggccattatcttaagtgaaacaactccaaaacagaaagtcagataccgcatgttcccgcttgtaaggggaagatgaaaaaaaaaaaaaaagatagacattagagactagaaagcggggtgcagaaggagagtgggtgatgaaaaataacttagtgggtagaatgtaaattattcagatgatggctaccctaaaagccaagacttcaccatgcaataaatgcacataacaaaattccacttgtaccccttaagtttacacaagtaaatataattttaaaataaaaatacatttttaaaatgtaggtgggaacggaagacagagcaatggcttccaggtacttagagtaggaatatagggattgttttcaaagtggcaggagagatttgattatcttgatggctgtatgactctatgtgttaagtgggtacttcaaggagtataagaagtttattttacttatagcaaatagtcttggtacaagaaaattatatagcacagttagtgagactgtagtctttggaaccctaaaaccttggttcaaatcccagctttataactgaattacttggtaataagaaatttattagaacgaatccctgacagttcaaaacacaacagtagattctaaaaaattgaggaggagggaatcctcctccctaacacattcaatgaggccagtgtcattctgatactaaaacctggtagaaacacaacaaaaaaaagaaacttcaggtcaatatccctgattaacatggatgcagaaattctcaacaaaatgctcgcatactaaatccagcaccacatcaaaatgctaatccaccacaatcaagtaggtattcctgggaggcatggttgcttcaacatatgcaaaccaatcaatgtgatttatcacataaatagaatttaaaaccacatgatcatctcaatagatgcagggaagtcttttggtaaaatacaatatctcttcatgttaaaaaccctcagcaaactaggcattgaaggaacatacctcaaaataataagagccatatatgacaaaccacagccaacatcatactgaatgggcaaaggctggaagcattcctcttaagaatcagaacaagacaaggatgcccactctcaccactcctcttcaacatggtactggaagtcgtagccagagcaatcaggcaagagaaagaaacagaaggcatccaaataggaagagaggcaatcaaactatctctcttcacagatgatatgattttatacctaggaaacgccacagtccctgccaaaaagctcattgattccttgatctaataaatcagcaaagtttcagggtacaaaatcaatgtacaaaatcagaagcatttcaatacatcaacatcaacaatgtccaagtcaaatcgagaatgcaatgtcattcacaatatccattaagaaaaaaagaaaaaaaaaaacctaggaatacagctaaccaaggaggtgaaaaatctctacagcaagaattataaaatgctgctgaaagaaatcagagatgatagaagcaaatggaaaacattccatgatcaagaatagaatcaatattattaaaatggccatattgcccaaagcaatttacagattctacactattcctatcaaactatcaacaacatttttcaaagaaatagaaaaaaaaactattctaaaagttatgcagaaccaaaaaagaggctgaatagccaaagcaatcctaagcaaaaagaacaaagccagaggcattatactatccaacttcaaactatactatacactacaataaccaaaacagcatggtatttgtaaaacaaacaaacaaaaaaaaccagacacatagaccaatggaacaggtcagagaacccaaaaataaagctgcacacttacaaccatctaatctttaacaaagctgacaaaaacaagcaatggggaaaggactctattcaaaaaatggtgctgggataattggctagccatatgcagaagattgaaactagaccccttccttacactatgtacaaaaatcaactcaagatggattaaagacttaaatgtaaaacctaaaactataaaaaccctagaaaaagataaaggaaatacattcaggacataggccatgacaaagatttcattttaaagactccaaaagcaattgtgacaaaaacaaaaattgacaaacaggacctaattctacacaacaaaataaattatcaagagagtaaacagactacctacagaatgagagaaaatatttgcaagccatgcacccaacaaagatctaacatcctggatctataaggaatgtaaacaaattaacaagcaaaaaacaataccattaaaaaatgggcaaaggacatgaacaggcacttatcaaaagaagacatacacgcaaccaacaaacatatggaaaaatgctcaacatcactaaacattatagaaaagtaaatcaaaaccacaagatactgtctcacaccaatcagaatggctatttttaaaaaggcaaaaaataacagatgctggtgaggttgcagaggaaaaagagcacttatacactgctggtgggaatgtaaattagttcagccattgtggaaagcagtttgaagatttctcaaagaacttaaaacagaactaccatttgacccagcaatcccattactgggtatatacccaaaggaacataacatgttctaccatgaagacacatgcacacatacgttcactgcaggaatgttcacaaaagcaaagacacggaatcaacctaaatgcccatcaacagtggactggataaagaaaatgcagtacatatacaccatggcatactatgcaaccataaaaataatgaaatcatgtcctttgcagcaacatggatacagctggaggccattaccctaggcaaattaatgcaggaaaagaaaactaaataccacatgttctcacttagatgtgggagctaaatagtgagtacacatggacacaaagaggggaacaatagacaccagggcctatttgagggtggagcgtgaggatcgaaaaaccacctttgggtactatggttattaactgggtgacaaaataatctgtacaccaaactccagtgaccgtaattcacccatgtaacaaacctgcacatggatccctgaacctaaaacaaaagttggaaagaaaaaaatgcaacagtaggtcaaaagtccttttaagaagttatgagaatagtgcagataaagtttttagcatatgcctggcacaatagatgctaaatttatcagtagttttgctggtaaggttcaagtcttttattcaagacttcctctccaccagactttgcttacatgaacatcaacagtatttgcctttgtgactttccttttctacattttcttagttgctaacctggttatatttgtatagcccttttcaaaacaggatacaatactccgataatgtttctgattagcaaatgataaccactttccagtcctgcctctcagatttttcccagagtccaccttgattagcatctatgggttctgtaatctcttgagtctctatttatagaaaattttgagttaacaattactcatgataaatcactttgtgcagatttatgcaagttgactcttaacaggccaatctaatgtctatggtagtaaggtatacgttctcatcatgcccacagactaacaacattgtttaaatgccttcagagagctaatgccggtggtagaacctttagactcatctatagaaatcaagacccaaaagaaaatatcctgcaaagatattgcttaaagcagcaagcttcaatctgataagattgctattgctaaatcaggattgaacaggggcagaaaagtggataattaatgtatatagggcccattctgggatgcaccaagcagatgtgatgttctatctataatctaattggtagcatcacaaaggcagaaaggataagatacagaaagttcacatgagatcttgaataaaaacctaggaggtactaaaagtcatcaaaaaaatcagagtgaaacaggagtaacagtaatttggacccagaggacatgtacaattttcaggacagtagcaggggccctaatcaatctgccttataatgaagcaatgttaaaaggagtgtgcccatcagttcatgttccccaacctcttaaatgtgccactcagcctttgcaatggagaggattaatgaatgatcataaaacatactttcagttgtggtgtgtgatatttgataatcaaggatatgcagaagttcatggacaaagtcaggtatctcgagacattcctatactctaacatactccaggagacaacagttcaagctttcaaaattccttccagaaaaaagaaaaaaaaaatccagtgcattttatcacatttataaaactaggctccattcttgtacacaagaaaatacatatgaggtggccacaactaacatgaatcaaatcagtctgagactaatgcatagactcatgccaagacatgacaaggtaaggaggcagaatttggattcagaggttttgtaacacgactctttgtaggctgaagggaagtttgaagaaaaagttccaggtaaggccagtgcagtggctcatgcctgtaatctcagcactttgggagcctgaggctgaggcaggtgaatcacttgagtccaggagttcaagaccagcctgggcaacatagtgaaaccctgtctcaacgacaacaacaaaaaattaaccaggcatggtggcacatgcctatagttccagctacccaggaggctgaggtgggaggatcacctgagccaaggaggtcaaggctgcagtaagatgtgattgcaccattgcactccagcctgggtgacagagcaggaccctgtctcaaaaacaaaaacaaaaacaaaacaaaagtgccaggtaaaagagaatggctttgattcaaattctgtctattcaaacccaaatattaaagcatttaaaagggaaaagaagtctttttgtttgtttgtttgttttgatatggaatctcg

SEQ ID NO: 348 - DNA, 3188 bp, Homo Sapiens
gctgggacctgttggacgtgagggtgttgagcatgtagaacatctcctggatcaggaagtagatgttagggtcactgttggtggctgccccagtgctgccacagtcccacttctatggctcattcaggagcctaagcagcgaggggctgttgctggaatttgccttctggaagagctcatacgtgtttagcaggtcccccgagggagggttcttcttctccatgaccttgtgggagatgccatacagaggcttcttgtagtaaggggtggtggcatggttgcggggctcctccttgcctggccacacagagcccgagctcctgccttgccggcctgctctccattgccttggcagggcgagctgttctcgggttccacatgcctgctaggagcgcctctgggatcagctacctcctctccacgctggggatggagtctggctggccattgctgaccagctgagtcctggagggcagtaaagacgctgtccagaaggtgcttctcagaagtcctggaattcacggagcagcctagagcagcatctttggcctctgtctccactctcacttcttagaagttcttctacatcaattttttttggagatggttctgactctgtcacccaggctggagtgcagcagttgctcagagctcactgcatccttgacctcccagactcaaaagagcctagctacttaggagtagctaggactacaggccacggccaccatgcctggctaatcttttaaattttttgtagaggcagaggtctctcattgtgttgcccagacaagtctcaaattctcgggctcaagtgttcctcccaaagtgctgggattaatggcgtgagccactgtacctggccatattttttttttcaaaaaattcatttgtagagtttaaaaagtatcttttgatcaagagttcttattgtatttatgtttgcaaatttcatttcccattctgttgcttgccttttcactctcagtgagttattttatgattacaaatccttattttttatgttattttattactatttattaacttatttatcttatttattagccttcaatcgttactttttgagtcttttttaaaatcttaaggtcatagaagtgtcctctgtattactttttaaaaactgtactgttttatgttacacattggcttctatatgaaataatttttgtgtatgttgtgaggttggatgttaatattcatttttatctgtaccgatgtatgaaagacagcacaatttattgaaaatgaatcttttcctcattgtactgaagcactatttttttcacaaatcagctaaatatattgtgtggttctctttacgagctctctattctgtttcattgaaatatctatacttgcaccttttccataatgtcataattaatatacatttataaaaactttatatctaatagtgtaagtcttcacattatattttttcttcaaagttatctatacactgcatttttatttgcattttatagtcagtttttcagttgccaccaaatataatgcagacaaattatgctattactaatcacagtattgtgattttcagtgtattacaaatatagatttatttaaaatactgaatctttcttctaataccaggaatgacataggactcacagtacacctttatttctgttgaatatctttaatttctctcagtaaaatttcacaattttcagtaaagggattgcatatgatatgttacattttatattaggaattcaatgtttcttcctggaaacatttcagatttttaatattttatttgatttagactcactacatttggaaagctttaattgtaattttatttttaatagatatagagctattaggatttgctatttattcttgtgtcactattaatgattttctagaaatgtatctatttcatcaaattatttcaaaatttttgacttaaagttacttattacattctctttttctctcccatgactatagaatctataatgatttccttgttattattcatgatatttagaatttgtggatactcttttttttaaatttcatgcataatcatggtatatttttatcagtcttttcaaagtaactttggcttttgctgatttcatttattttatgattgtttccttttctcatgcttcttatgtatcttctcttttctaattctttggatttaatttgacatcacattttaaatttttgaaattgacaattagattattaattttcaagctttaattttttaaacatatttatgtaagcatatgcatttatctccaagctgaggtttgcctaagcctcccatcttttaacaagcagtatttttactttcgtttttattaaattcaaaatatattttaatattcactgtaattactttttcgatccatgaataacttagaaatgtgatgcttaatttctaaacatttggtcactttcaaagtcttgctatagatttgcagcttaataacattgttgtacaaaaaacactgtcaaggatttcaaatttttggtatttattgattcttgttttgggcctaacctcagcctatatctgtctatctaacctatctatctatctatctatctatctatctatctatctatctatctacctacctacctatctattatctatctacctagatagacagagatatctatagatagctatggtaaattttgaaacacgttccaaatacattataataaattgtgtgttttgctatttttgggtgcagtttttatatcaaagtatttaatcctactgctttaaatttttctattattattgatattttgtatcctttttgctatcagttattgaaaaaggtatattaaagtctttatgattgaagacgcggctattgctccttttagttctataaaaattgtaaatgtgtgttaactgtgtgtgagtgaatatacatacacaagtttgacaacttcctcaatagttgattcttttatatggatgatggatacatcttcctttcaagtaataatttctgccttaaaatctcttttgtctgatattaacatagctaaacaaattttcatttggcttgtgtttgattaccttttatatgcatatatgaaaggtttttaaattaagatggttctatagatagatatatagatagaagatagtagatatcttctac

SEQ ID NO: 349 - DNA, 1620 bp, Homo Sapiens
gggtttccctgctatgttttgtcacacatcattgctgggagagttcagtgctatccaagtgactcccccgggagaggacaactggaaatttatgcctggtgtcttcctggactccgacctatgcacctttttccttggatgattttaacctgtctccttttgctgcaatgaaccataaccatgagtatatcagcttttctaatttttgtgagtccctcaagtgaattatcaaacctaaggtagttttgggacccccatcacagagagtcaaacaggggcagggcaagaagagctgcttttcctggaaggctaatgagtctgaacttcgccctggaggtaatcgttatagtaactccaggctctaacctggagctgacatgataaggtcaaatgtacacctctagaagacttccgactgcagaggggaatggatgggggagctgagggaggagagctgaagcaggaagaccatggcctggaaagagatggctgaaccagtccaggtaagagctggtgggcccttggtagtgggcagtggccacggcaaaggactaaactcaagagacagaaaatagatacaacaagacttgccagccaattagactgtggggtgagggagacaagtcaaggacgactcccagatttctggcctgggcaattggagggatgatgaagtcagtcactgaagtgagaaatcctgagtggggaagctgatgttcaggggcttgagggaggttctgacccccaagcccagcctggtactttcactgtgttcatttctacaattcaggaaccatccgattgctcttttttctctccttgaagccatccccttagccctctgcccacagtgatcactaactgattgctcctccttaaaagccaccgaaaagtgtgcttggctgatctccctgacctcaatttctctgctggcagaatcacaagaaaggcatcagcaccttctgtgaaatggggagccatgcagaggaggtgcccaggtggcgaggagtccatgtcagctgccgtcatccacaccacagatcagacatggcaaagagtggccaggccttctgagtgaaggtgatccaacctgtcaccaagcctaagggcaaatcctggctgtgctgtgatggctccaacaaccccaaacagcagcgcagaggctgcagccgccctcggaggcaacactgggaaacgctcattagcagccttccattgctcacccgccccatcccacctctgtgcatcccagatcatcagcgaagtgcacagctggcttccatcctcggagccttcctccttcatttgcctattcaacagttacaaaggcctgagttgcaaaggggcttacaacccattccacccagaagaaagagaactgagactgagcaagacagagaataggtggaaggggagatgaaaccaagcaatctctagatcccaaatggggaccctgatgtagcaagagcctcttttaaatccttttccaatagggtaatatggaaaatagttgaaagcacaagccaagtggggctggaatcccaaatgggccatttactagctgtgtgactggacaagtaatttcatatttctgggcctcgatttttctcatctgtaaaa

SEQ ID NO: 350 - DNA, 1643 bp, Homo Sapiens
tcagcggactacaagaagcagagccaccctcaatctgggtagacaccatctaatcagctaccagcaaggctagaataaaacaggcaggagaagatggaagagcagacttgctgagacttctggccttcatctttctcctgtgctaggtgcttcctgccctcgaacatcagactccaagttcttcagctttcaaaatcttggacttatattggtaatttgccagagacccttgggcctttggccacagactgaaggctgcactgttggcttccctattcttgaggttttgggactcgcactgatccaccactggcttccttggctcctcaacttgcagccggcctatcatgggacttacctagtgatcatgaatgctgtgacctctgagataattcacccaccggagtcagactgctgaagaacactggatgggtggaaaaggaacatctcaaccaggagagaaggaactgagtcaagaaagggctgcatctggtgaatatgtccctcccagtgatggaacccagggctgctgcagccaagagtctataacagtggagacgccttgagcaaagccccagagcccttgagctgcctgttcccctcctctgacatgatgggtaatctgatggaagcgctgagaggcactgcctagaattaagccctatgtgtaaacgaagcaaggaagaaagaacatgtgctatcaaatatgattcatgattcaaatatattttaatatcttattcttttcacactctgagaaactattctgataatgtgattgttttgtaaaggagtgtatcttcggataatatacagattttatagctattgcacagttttaataagcaaaagacttgctaggttgaactgggttcaacccaaaccactgtacaatttaattcaacacaatattcctctgtttaaagtgcatgtaattgccaatttatacagtcaccaagaccaaaggtttgctaaatagagttctgcaaacatagtatggcatgttttatccccaagtaccataaacgaagaaagaatgaaactaatcattaatcaatcatgtatctaattcatttcaagggcttctttcaactgtacaattatccaatgaataaattcaaatccacctgtgttagtatttttctagactttatcaccataagtttttaaaaatccttagaaactcaaggaaatgcgtaaaatgaaattgacattatcttaaacagtattagattgctattccctcttctttcataaagattttctttatggagagttattcttaaatagcactgatatttctgaaagtttccccaagtgctccattcttaaagaaatttttatttaaaggatgaacaatacataacactgcttagtgtgtgtgtgtttcagtgaaaaccattatactgtaaaaactcattctacaactttttttctgtctaaattgtaatttttgagatgtagtaaacatatcactgtgtgtaaatagatctaattctactaactggaaaaaacgctcaacactcatgacagaggttatttctagggacctagggaggggaatgaggcttggaatcccagacaaaaggcatgtgaactttatatataatgtattatttattttattaaatattgaagtaaat

SEQ ID NO: 351 - DNA, 1363 bp, Homo Sapiens
atgctaaaaataactattcctacaattatactactaccaataacatgactctctaaaaattatacaatttgaatcaatatggctacccacagcctaatcaccagcttcattgccctattattctttaactaattcaacgacaatctattcaacttctcattaactttctcctctgatccgctaacatcaccccttctaatcttaacagcctgactactacctcttataactatagcaagccagtaccacctctccagtgaatcacccctatggaaaaaaccctgtatttccatattaatttccctacaaatttttctaatcatagcatttacagccacagaactaattatattttatattctctttgaagctacacttatccctatcttaattattatcacccgatggggtaaccaaccagaacgcctcaatgcaggtacatatctcttattttacacactagtgggatccctccccctacttattacacttatttatgcccaaaatatcctaggctcactgagcatgataataataacatttaatatcaagaactaccaatctcctgatccaacaatctcatgtgattggcatgtataatggccttcatagtaaaaatacccctatactgacttcacctatgacttcccaaagcccatgtataagcacctaaggctggctcaatagtacttgcagcagtgctcctaaaattgggcggctacacaaaatgcgacttaccctcatcctcagccctctgacagaacatatagcctatcctttcctgatattatccttatgaggcatattatgacaagctccatctgtctacgacaaactgatctaaagtcacttattgcacattcctccgtaagccacatggtacttgttactgtggctatcctcattcaaaccccctgaagttttaccagtgcaattatcctcataattccccatggacttacttcgtccctactattctgcctagcaaattcaaactacaagtgaatccacagctgaatcatattactctctcgaggacgtcaaacattacttccactagtaaccttttgatgacttacagcaaatctcaccaaccttgccctaccccccactattaatctagtaggagaactccttgtaacaacggcttcattctcctgatcaaacactaccatcatgcttataggacttaatatattaatcacagccctttattccctctatatacttgtcacaacacaacaaggaacactaacatactatattaacagcattaaaccttcctttacacgagaaaacatactaatactcatacacctttcaccaattctcttactatctctaaatcctaaaattattatag

SEQ ID NO: 352 - DNA, 2952 bp, Homo Sapiens
gactcgtcgctgagggactttaagattgcggaggagtcggcaccggggcctggctgccggggaaggagagcacgggagcggggactcctgtgtctggcggagggacacggcgttccggtggagggatctgttccttgtacctggtccagggttgcggtcggggatggagcggttaccccgaccctgcgggaccttcttcctctggcggaggtgcacggcgcggcgtggtgtttttctggcggaagtatctgtgcgtggccccaggcccttcccggcgcggtctcatctggggccacttgttggccctcgcgttggggaggttcatgtggtgcatcctgatgagaaggggggtcacaggggtctcggggccagggttcagccagccaggccccagcttgctctcttctggtgctgcccctgtccctgaattcatagacccggctttccctctcttgagcacctactatgtgccaggctgcgctttgcgcatgtagcagaggcaacagtgtcacctgggaagctggtttcccccaaaggaactcttgtctgtccgttgttgcagagccagcgcatgagaccaagtgtaacctggatcccaaaatgagaacagaagaaccacttcatgtgacttgaaccagatctgaaatctgaagtgaagcccagaagagtgtagctgaagacaagtgaacctacttgaccagcaaacgcacatagttggagatgaggtctggagatgtttcccaggctggattcgaacttctgggctcatgtcatcctcctgtctcggcctccagagtagctgggaccacaggcacatgccaccatgcctggctggttactgtacacatttaaagattaaaaaaaaaatcaagggtgtttgaaaaaaaaaatactaccctgtctgtgtgttcatttacatacccctataggcactggagtttttgatatctaggtaggtcaacagaacaaaaagactcctttctcacctaccccaaagcccagatcaacaaaacagttaaaaaaaagaaagaaaaaaaaaaaaaaaagaaaaaaacctcagctgcgcagacaaacacagaaactgaggatggggagaagaaagttgtggattctattccagatgcaatttccaatctcctatgcatagtaacagacaactccttcctaatgtaaattgccagccatcaagtattcttaggtggtatttgaatttaagtaaaatgactccttgggcaactacctgacggccaacagcttttacaacatgttttctgatataaactgttttacaaagagcttgtatctttttactaccaagcattacattctgaacagaaacttaataagatttttcagcagagatttttaagagtttccatcataggacctaacaacaactgtgttctattatttttagtgcaagagtaaagacccaagagaaacagcattttcaatttgactttatggccccccaagttgtgctcaaggtaaatcagagttaaaaactggtactgggaaaagagcaaagactttcgactccaacttgggtttgaaatccactactacttatgagctattgcactttgggcaagttgcttaagtcatttgtgtctcagttttctcatctattaacaaaagtaattctactctatagaattgatgcagcaaaggtttatagtatggagcctcatacatagtagggtatcccaaatgctttagttctatgtaactcaactcaaaccggcttaagaaaaaatgaaaatttcttggcctgcctaactgaaaagttcagcgtaaggtggcttcaggcatagctggatccaggagctcaaacaatgtcatcaggatacaatcacccccaactttaggcttcattcttcattgagcccagtggactagctagcttatttctggagcaagcaaaacagaaaactctgaaagaacagaggctgagatgcaggaaggcctggatgaaccctttccggacaggaaaaaacaggtttggacaccatagcccatgtgatgtgtcctagtgggaatggcattcaggccagcgtaaggacacatttcatctttgagggcagcaaagatcccctggtggccatcaagcagaccacccggaggcaaaactccttagctgtggaattcagaagtaattagacttttctattatctgaaacagacatctggtaccaggcttcttttctaaaatgtgtaagaaactagaatttctatacatctctgcatagcatgcatgtcagaactcattgtgcaaaccttgctgacatcaaggcaccaaaatgtctacaaatgtaatcatttatcatgaccaacatggatgatagggcccaaattacccttaggctctgtattagttcatgctcatgctgctaataaagacctacctgagactgggtaatttataaaggctagaggtttaatagactcacagttccacatgcttggagaggcctcacaatcatggctgaaggtgaaggagaagcaaagtcacgtcttacatggtggcagccaagaaagcatgtgcggggaactcccctttataaaaccatcagatcttgtgagacttattcactatcatgagaatagcatgggaaagatccacccccatgattcagttacctcccactgggtccctcccatgacatgtgggaattatgggagctacaattccagatgagatttgggtggggacacagacaaaccatattaaagtaaaaatccacaccatggcaccctcagtcctctcttcctggggcaccttgatgccctcttctgcagggttctttctttttaacaaaacctatactgttgttgggaaattcttcttactaccggtgagccaatcactttccattgccagggctctgatgcctctcctggtaatcatcatcaaagtcccatggaacaggcaggtccaagattataatttcc

SEQ ID NO: 353 - DNA, 4766 bp, Homo Sapiens
cccaaaaaattggacacagcctactagcccaaaaagaacatgttgccaattatctccatgtttatttaaatattttgctctaaaggaagcaatcattcctttatacttctttaaatttagtattaaaccttttcctatttgccatggccactgcttgtgaagctaaaggtggtgaaggcagacacaggcaatggggccaggagcatatgcctttcaattccttcctggcaaccttcctgtcttctcctccactgactcttccctctcatcaccctctctatggtgccaaaataggcttagtggaatgctaatttggcaccctgacatataatgttctaaaatggatgcattctgaatttcttcttcccagatttgaaatgttttgaactgaatttgaactgaaattctattgactttctctttgatttcttcacctataaactggaccagtaccagccactacaaaaacataccaaattgtataggccatcgacactatgaagaaactgcatcaactaatggactaaataaccagctagcatcataatgacaggatcaaattcacactcaataaaatactggcaaactgaatccagcagcacatcaaaaagtttatccaccacgatcaagtcagcttcatccctgggatgcaaggctggttcaacatatgcaaatcaataaacataatctatcatataaacagaaccaatgacaaaaatcacatgattatctcaatagatgcagaaaagaccttcgataaaattcaacacccccttcatactaaaaactctcaatagactaggtattgatggaacatatctcaaaataattagagccgtttatgacaaacccacagccaatatcatactgaatgggcaaaatctggaagcattccctttgacaactggcataagacatggatgccctatctcacccctccaattcaacatagtattggaagttctggccaggacaatcaggcaagagaaaaaaataaagggtattcaaataggaagaaaggaagtcaaattgtctctctttgcagatgacatgattgtgtatttagaaaaccccatcatctcagccccaaaactccttaagctgataagcaacttcagcaaagtctcaggatacaaaatcaatgtgcaaaaattacaagtactcctctacaccaataatagacaaacagagagccaaatcatgagtgaactcccattcacaattgctacaaagagaataaaatacctaggaatacaacttacaagggatgtgaaggacctcttcaaggagaactacacaccacttctcaaggaaataagaaaagacacaaacaaattgaaaaacattccatgctcatgtataggaagaatcaatattgtgaaaatggccatattgcccaaggtaatttatagattcaatgctatccccatcaagctaccattgactttcttcacagaattagaaaaatctactttaaatttcatgtggaaccaaaaaaagcctgtatagccaagacaatcctaagcaaaagaacaaagctggaggcatcatgctactttacttcaaactacactacaaggctacagtaatcaaaacagcatggtactggtaccaaaacagatatatagaccaatggaacagggcagaggcctcaaaaataatgccacacatctacaaccatctgacctttcacaaacctgacaaaaactagcaacgaggaaaggattccctatttaataaatggcattgagtaattggctagccttatgcagaaaactgaaactggaccccttccttacaccttatacaaaaattgactcaagatggattaaagacttaaacgtaagacctaaaaccataaaatccctagaagaaaacctaggcaataccattcaggacataggcatgggcaaagacttcatgactaaaacaccaaaaagcagtggcaacaaaagccacaattgacaaatgggatctaattaaactaaagagcttctgcacagcaaaagaaactatcatctgagtgaacaggcaacctacagaatgggagaaagtttttgcaatctatccatctgacaaagggctaatatccagaatctacaaggaacttaaacaaatttacaagaaaaaaacaccatcaaaaagtgggcaaaggatatgaacagactcttatcaaaagaagacatttatgtggccaacaaacatatgaataaaagctcatcatcactggtcattagagaaatgcaaatcaaactcacaatgagatatcaatttacaccagttactagagaggatgtggggacataggaacgcttttacattgttggtaggagagtctagctatgaaagtcctagatgacatcttctaatagaagactatttaatctacattggaaatctgttgtttagggtaaccaccttcatcagtaatcttagctagatcttctggataacttctccatcagctcttgctgcttcaccttgcacttttatgttatagagactgcttctttccttcaacctcatgaaccaacctctgataggtactgacttttcttctgctgtttctttgagagcctcatagaattgaagagtgttaggggcttgctttagcttatgagtatgttgtggctggtttaatcttcccagatcactaaaactttcaccatgtcaccaataaggctgttttgctttttttgtaattcacctgtttattggaatagcactttagttgcctttaagagctttacctttaaatacagaacttggctgtttggtgcaagaagccagtttagcctctctcagctttcgacatacctttctcactaagcttaaacatttgtagcttttgatttaaagtgagaaatatgtgactcttcctttcacttgaacacttagaggcaattgtagaattattaattggcctaattttaataatgttgtgtctcggggaatagggaggcccaaggagagggagagaggtgggggaatggctgtttagtagaccagtcagaacatacacaaaatttgtggattaagtttgccgtcttacattggtgtggttcatggtccccacgacaattaaaatagtaactttagagatcactgataccagatcaccataccagatatcataatgaaaaatttgaaatattgtgagaactgccaaaatatgacacagagacaagagctcatgctattgaaaaaaatggctctgatagacttggcttgatgcagggttgcacaaaaccttcaatttgtaagagacatggttatctgtgaagctcaataaagcacaatacaataaaacaaggtatgcctgtatgaattcctttaatataatcctcataataatctaacaaggtagacattatgcccatttgatagaactaggaaattgaggcataacaaggttaagcaaattgcacaaaatcacttgctttgtaaacggcatgatcaggaaccaaactaggccagcctgatgccaaaacttgttcttaatgcactaaattgattggtttcaagacttaactcctgctgcatttaaaagtcttcctatctcattggttccctttattctcacttctaatgggcattttgggcaaactttcacgatttagcttccttgaaatagcaggtagatttcttacctttgagcctcgctctgaccccttcccggtagaagactcatgaaccataggttgaaggtgccttctacttgcagggtattttggtttagctggatgggggagggatgttgatcccttttttgattgatttacatttggtggctcagcatgataaagtagaaagagtattgatggagtaagattcagtagatccaaatcccagatccagtgcttgcagcagcatcacttcaggaaaacttgaagagtttttctgagtcttcctatcacagattataggatttctataaatatttagttggaatatataacaaaataattaggaaagttagttttctttctacttaattggcttaaagcaattctgtaattttattcttatcagtttaaaaatatctcctccgctatttaacatttgatattatattacttctagcactaaatgcataatcaatgttgtggtgtgtttgaaccagggaatttatcagtttctgaggatgttagaaatttaagtgcctaatgtaagaaccatgcccagtttggcagagaaattttcagttcagagacaattcaagtaccctcccacatttcccactcctctagaagttaggcaatcccgtctaactacttctggccagtgggctgagatgggaagtaatgtgagtctcttccaggcaaaatgcatttatgagctggtgtgtggtgcttcagctctctttttccctaatgcagcaaccttgaagttgaatattcctgttgacatagttagaagatataagtagtctgaatccctgtgacatcacttggaagccagcaaacccacagaggactttgcatgagcaatcactaaatctttatgaattatactgtgatttgggggatttgtttgttattgtattatagcctaatctaacttgactaatatacatagcctttggaggtgtgtggtttttgcttggtaaggatataggtaactaaaaaatactaagaagagttgcagcagacacccaaatctaagtagactcctaatcaaaaggtcattgttaccaataactagttctgtggttctatagatagagaaaaatttttttcgtaacattttcaaagcaaacattttgt

SEQ ID NO: 354 - DNA, 969 bp, Homo Sapiens
tgagaatgggcctacaaccgctggatttactggttgtatcatatacttacagtatcaagaagtaactggcctgttgctctaacaggccttctagcaatggccttctcaagacataggtgaagctccagcttgaaggcaataatccgaaaggatgaagaagcaccatactcagaatgcacactatacatttaaacagagacctaaatgtgatgctctgccaataataggaagaatatatgggcccaggtaccaaggtgggtagcagaagggttcctcttgccatcatctctgacatactggaggacattgtacttctcatccctataattctgggcattgcattgctagagttccttgcctaaagtgagaggactcttacaaggagacatagcaagagtttcattcaactggaacactttggacatcttgtgttcagggtctcacaggtaagaagagactcatcatttggtagaataattgacactgatcagcagaaggaggtagcgaaactttcagacattgatggttaggaggaatgtatagaaagcaagtaatctctgagcacatcttggtactctcttatctcaacataagtctacatggacctatgcagcaactctgaagaaagaaccgtgtgaaaaccaggagatcagatccttcagaaatgatattttgggtcacaccaccaggttccattgaagacttgacgaaggcgaagaatctgcaacaccttttggacctttgggctcacaccattgatacctctgatcttgatgacaaaggccaatttggcttctgcaggtacatagaaattgccagcttttcttgccatcctcgccattcgaatttcagttctgtaaatctgcctatattccttgtaatagtgcttctctttttcatagataagcttcctccttgcctttcaaagcatcttttgggcaaacttctttctcaggcgcttgatcttca

SEQ ID NO: 355 - DNA, 772 bp, Homo Sapiens
ctgggtgaactgtctgattacattcagaaacgctccatgcaataccgcatggaaatcaaaaatgccttttaccacagacacggcagattccaattattcctcagatcggaatttttttcccctccattgataatcaatgaatgatatttacatgatttttatcgtatgtgttccctgcagagcaaactagtatctgaaaattacattgtcttgtctacagtttcctatgttcaattttattgagttttgtcttccttagtcaaactacagtagacttggggaacaaatgtatcatctctctctctttctcccctctctctccataccgtgaatatcataaaactttttattttctgctaattcggaacacaattttctactccagttttgggggtttcctgtcatttctaactgaatgaaatttatgcctttttcacatctttaatgtattcccaagtctcaatcatgttacctactgtaggtcatcttcttcatgctttaagacatcattttcagaacattaagaccttctgttcaatctggatcattttctgtggaaaagccaaagttgtatgttcaccaaactgcttgagtttttccttggcacacacaaagattgtctctcccagatcatttaggcgatgtcatgtgattaattttggccagtggaatgcagtcagatgcgacgcccaccactctcacctctagtctatgagaaatctcccacacacaatctccactatcacccctttcataacagtcttgggctgat

SEQ ID NO: 356 - DNA, 1257 bp, Homo Sapiens
aagtcttggaggacagtcaccaagaactgctttggattcgggaacagagctgcctaacccatccgcagccctggggtcctgccctgttcctctggccccttcagggcagcgggggaagcagggaaaacagcctgtcagagatggcagagaaaccgagcaagaataattatcctggaaaagactttcagaagtaaccaccagaaacttcgagtccccagatccaaacagctgagaatgtggggcctgagccacgctctgactccactcccaccacatgaggagaaacaagagctgcttttctggaagacttgaacaacccctgctgtgctctggaaggacacatatccaaagaacaacaggactcagatgaaaactggatgacaattagaagaactatttctcagggctgggcgcagtggctcacacctgtaatcctagcacttcaggaggccgaagccggtggatcatgaggtcaggaggtcaagaccagcctgaccaacatggtgaaaccctgtctctactaaaaacacaaaaattagccgggcatggtggtgcatgcctgtaaccccagctactcaggaggctgaggcatgagaatcgcttgaacctgggaggcagaggttgcagtgagctgaaatcacgccatttcactgaagcctgggcaacaagagcaaaactctgtctcaaaaaaaaaaaaaaaagaaagaaaaagagaaaagaaaataatgccggccagaggcggtggctcacgcctgtaatcgcagcactttgggaggccgagccaggcggatcacctgaggtcaggagtttgagaccagcctgaccaacatggagaaagctcgtctctactaaaaatacaaaattagcctggtgtggtgacgcgtgcctgtaatcccagctactcggaagccagaggcaggagaatcgcttgaacccgggaggtggaggttgcggtgagctaaaattgtcccattgcaatgcagcctgggcaacaagagcaaaactccgtctcaaaacaaaacaaaacaaaacaaaaaacaagaaagtaatccccatctccctcactgtaaagggtttcaatgaacaagaagataatttggacaaagcaatctatgaaacaaagagaaacaagctatgatgacgttgatatgtgacttgggtattgcacatgaacaataattagtatgtgagtaggcaaaatagctaggcatggtggtgctcacctgtggtcccagctactcaggaggctgaggtggg

SEQ ID NO: 357 - DNA, 1000 bp, Homo Sapiens
ggtgaagaatttggggttgtaggtcttagcagtctggaatgggtccagttatctgaactgttgagactctacctaaaacaggaatagaaaatccaactatgagaactaagagatgagcttgatagagcgactcttgagaatgataacattttgtatcaaatataaaaaatattaagatctaagaggtttaactaactttttttgaatcttctccagaaacttttattgtggctgccaatattttggacagatccttggcttttctgaagttgaaacctaaaattcatctttcactggggtctgttgtttatgctgattgccagaatagttgaaaaagaatgccatgttttatctactcatgaagtaatcttgattcgtcaatgtaaacgcactgcttcttctgacagaaaactgatggaaaaataatttcagaaaaaaatttggaactatgaattggaacgtactgtaccttaaacttcttttgcttctataagactcatatttctttatatttgagaaaggaaagaaatattgggccttataaaccggaagctcagctgaaaacttgcaattttttgctaatgttttcaaaagcaaaaccatctgtattagttttgtgtcttcttaatctggaagtagaactgttgtaatttactgaattattgaaaaatgtcctgcttcttataaggcattcaaagattaatgacaccgaattcttttagtggagggaactagtttctaaatgcctagctgaatattttctctatgtgttggaagaaattgctttgcattgtttctagatgcagagcccagaccctccaagacagctactgtggtgttcctaaattgtcaacaatattggaggataactgtcctgatgaaagtgaaagtgaggactctgaagatgtgagttgtggggaatgaagtctcagcagctttcatcgcagagatcaaagacgtacatctttttgaacttgaaagtgacacagtctctgtgctt

SEQ ID NO: 358 - DNA, 1816 bp, Homo Sapiens
actcccttatgtggggagcaggactgatgccttgagttacttatagtgactcgttagttgggggatttgctagtattttcatcaaacttgaatctagtgaaacatttgattgaactggcttccaaattgaaaataaaccaacaccactcaggaaacctatttacagcgagaagtcaggagtgggaatgcatcttgcactgtcaccttgattaacaatagctctgacctgtgggaggacggtcctctctcctgtaacaaacatagggtagtgatgggccaggtcctgctgctcctacattctcatcacttagataagcacaggcaggtgactgcaagccttccagcctccaccagcatcctccagttctcccctgaccgctctcattcatattccgcactgattcagaggtccagtcctgagtggcaaaaagaaacatgcgtgagcctttctagaaatcaatcaatcattcatggattatagtgaattcttccctactaaacacatctccagaaattcaggcgtagtaactcccttcctgaatgtctttccaaggccctaagtgacattgatgttccatagacaatgtcttacacggcaaagtgcttctgggggtgggaacctgctgaccttccctggaatcctgactgcaggttctgtttagaacatggggtctcattttgagaagctcttggtatttatcattcacgggaagttcacaggttccagaaaacactggacagcattcaggggaaagaaaaggggcagagatggagacacctggtcagtttggccagagcatcctgggggaaatgcactgagggacagaggggcaaatgcacatgggtggtggggagaggagcaacgcagatagcaaagacactgtccagacaacctcccaactcaggagaagggactgaatccaagaggagaagaggagggatgaggctgggtgctgaggcatgccccaaagtctttgaagtctgaaaatcagacacccgtagacttgattttggtgtcctgatagaaaaacaaaaacaatgctagccataatttttaaaggctttcatattttgggaaataagcttctcatttgaggctagatttagttccttccctctgaaacatgttcaattcatgatttctacttaattcagattttctagttttgtaacaacttaagctggttgatctagctttgcaggcaggcaggcaggcaggaaggaaggaagaaaggagggaaaagaaggaaggaaggaaggaaagaaacagtaaaagaaaaaaaaggaaagaaggaaggaagaagactacaaaagtctcaacatgaagtgtttctgcaagtaaacaaggaattcctgcttttgtaccaaggactccatagttgtctggactccttaggggccacaaggccactggccgtgatgtttcagtgaactgtgaaacaaagcactgacccgctgctgttccaccatgatgcctccaatctctgggcctcgagggaagatagtattcgttcattctgaaaatacttatttaggatgtaccacttgtctggtgagtggtgagcatgatggctgacaggcagacacaggcaataatcaagtacacaagtaaagagtaattaagtccgcttattttggaattaaataatttggagttcaagtcatagttcagtttttgacaaccatgtcactttgggtgagacacttaaatgtatagagcctgcacttcctcacttgtaaaggggaattaaaaatgtgggtattgagaagattgaagcagataggttaggtagtgcttagaaggcagttccaagca

SEQ ID NO: 359 - DNA, 2619 bp, Homo Sapiens
tttgttctttcactcttcacagtaaatcttggctgctgctcactctttggttctgcattacagcaagggtctgctgcttcactcctgaagtcagctagaccatgaacccaccaggaggaacaaactctggacacaccatctttaagaactgtaacactcactgggaggagccacagcttcattcttgaagtcagcaagaccaagaacctaccggaagtaaccaattccagatacaatgtcatactacatttcaacaaacattgtgctacaatacaatgcatttaaaatatttggactttttcaaactttcaacttttagaagactaacattttctttaaaatatatgttgcttttctctgttatttatgggttatttagccaacaatttgtgattgaagctgtgtgtccaagcaattggagcttctgaatttaataaaaacaaatcttcaccatttggtttccattatttagcacaatgaagtaaatactgtgcctttaaatgcttttttgacatactatttaaatgttttattgacatattatttaatctgtgtaataatactatgtataggtcatataacacctattttaaaatgaagaaataaggcccagagaatttaaataaatcacccaaggtcacacagacaatcaaaagcagagctaaatttttaacccaggtttatctaactccaaagctcatggtcttaatcacactgtagtttacattgcattatttaaatgagtgagcatcattattaagtgaatgagtatataacttattttcttttagccatttcagggagcctgttttccatcacatggaagataatttcacaataatatgactattcttctctcatagccataagatgatgaaaataaatcatttaaagtgcattttcttacctagaaatgtcttttgtttggcagaatgattaaaataactgtcacttattcacttaggaaaataaaagtagttgaaggggagaataactttataaagtgatattttcagcagcaagggtggcctctttttcttctcttcaacacaattatttctagttaattttactgagggagggaatttcatgaattttgtactctgtatttagtgaccaatatgtttctcaaggtgctaattttctgttaatgagcaattgctgtggttggttggcattataaactgaagtttataaactactttaaaaaattagttaaaatatctgattgtgatcctaccagaaggtaacattagaaacctattgaaatgatccgtagctttattttttttgttaagcataattgtattgcttgataatatgtactaatcatcaagagtcatagtaaacatataatctactcaccaactgaaatcttatggctcaggaaaattttttgttttgttttaataagcagtttctttgcaaattaagatatttttaaattgtcgggataaatataatggggactattctcatacattcatacatactaaaaactgctttaggcaattttttgaaaatatttccacattatatgcaagctttggaaaacaggaaccaccgctataagcatatctgctatgttagaacatgaagcaaaggttaatttccaatttaatgtttcctcccagatggagcttctacctagcttgtcatcaacatctccatttagtgtgaccaaaatgaatagtgaccaaatcagaattctagagtttatagaaatgttgagttcatcctccagcctctaagctgaaatgtggttaattctcccctggcccaagtctctctcaatgtaatgctgttcatttcccaaaggtttcttcttcttcccttatataaacatgactgaagcctacaatgatacactgtaggagcatccccactgatgcaatgttggaaggaagcagagattggcaccttatatccttattttaattattagattttggagaaatccctattctgagcttctccacaaaaagatctcaggtgcttttcttgcctcgcagcaccaattcctcttctgttaatatcacatatattcacttgaggaaaactctcctcccagacatgatttaggtggaattgctccgatttccacttccttcacttgaaaggaaaacacacacaccaagacctaaaaaactagtgcttaagtgcttggcagacaaacccaaatttgcaggcttctaagagctcacattctggatctgaccgccccaagatcctagtttacaggtagtcatatgtcaccttcaggatattcgccacagctaaataccacctgttctgtaatttacttactcttttttctctaatttgactttgttaagtaaactttctattttgaaatgattttaaattgacatgcattggtaggaaataatatagagatgcatttgtaggagataataacatgcatttgtaggaaataatatagagatgtttttacctggtttccctcaatggtagcatcttgtaaaactatagtaccacatgccaacgaggatattgacattaatacagtctaccaatcttagttggattttgctgctacccagttttacatgagctttggataccagatacatagaatgacatgtcctcatttgcatc

SEQ ID NO: 360 - DNA, 4642 bp, Homo Sapiens
gtcaatgggcagggcttgcgatcttcgcatgtgtcttatcgtaaagaattgttaaaatttaggatagggaaaaaactatttaatggatgaagcgagaacagcaggaagaaaaggagggaaggtagttttctagtacaagcatattgagaagaatggaggacaaagtttgcgaagagccaggtataaataggctggggcagggtgctagtaactgggcggggtggggtggtgggaagtctcccgaaatcaggaggtgcgtgcctctggcttgctgtgtgaacagacacactgggtccggtgatttaagctgtaaaatatgtgattagactgcaggtagtctaaatgtcaaaactgcagcactccacagctctcactaggcactgctgccttagtatttattttaaaatatagattacaaggccgggcgcagtggctcactcctgtaatcccaacactttgggaggccgaggcgggccgatcatttgaggtcaggagttcgagaccagcctgaccaacatggtgaaaccccgtctctactaaaaattacacaaaattagctgggcgtggtggtgcacgcctgtaatcccagctacttgggaggctggggcaggagaattgcttgaacctgggagacggaagttgcagcgagctgagatcgttccactgcactccagcctgggcgacagagctgagactgtctcagaaaaaaaaaaaaagaataaaatatagactacaggccaggcgtggtggctcacgcctgtaatcctagcacttagggaaactgaggcagtcatatcacttgaggtcagcagttcaagaccagcctggccaacatggtgaaagcccgtctctagtaaaaatacaaaaattagccctgcgtcgtggcgtgcgcctgtattcccagccactcgggagggtgaggcaccagaatcacctgaactcgggaagccgagtttgcagtgagctgagatcatgccattgcactccagtctgggagacaaagcgagactccctctcaaaataaataaatagactacatagagatatatagactgtgtatatatatcatataatccatataaatgcagaaacatttattgaaagacatttcgaagccatcgtgtttgtatttcatgttcatgacaataaaacttgtaaacttcagtaacagttaaaccttctttaattatggattagccattaacatttttgaaacgtggaccatttaacctcggcctaccccctccaactgtcctggtgatgagttcattagctaagttaaaattaatttgaactttgatctaaaccaaaacaaatcaggaaaataaagctgtaaaggaactttatcaagcattccaaaaccaactagaaattacttgaagttttcgagtgagcattgcctgtgccagtattcttcattataggattataaactcgtttttttcccaaagcgcatgtctacgccaggcagaggagtaattattcagccaatttcatggatgtaaacgatggatataaataattgatagcacctagaggcttccagtttgggtggaaggctaaaagtagaggggaactcactcacttgagaaatgatatttaagtgaataaatagttctcttctatgaaactattactatttagttctctggaaaacttaagtgtattaatgattagaacatcaaatcctaagtaaagaaatgacattttaaatataaaaagccaaactttaaataaatcatagagacctcagacataatataggaaagaattcttttgtccttgtttacactgtgtacatagtacaaatataattttaaagctacatcctataacatttaagaaataacagtagtttcaaaatgcttaagatgaggagaaaaatgccttagaagactaggtttctaaaagtcagaaataaaagtacaagttatttttcttctatccagcaactttataaagcaacttgagtcctgaagaaaagaccgttgttcttttaagaaatgggtcttctcgaattataaactttaacaccattttgcatcgaagaatgagaatatttagtgagtaatgcacctatggtttgcttctctccacacaattactgaatatatggagcaatatcttcttctgtccacttctcccttagagagaaaaggctattaaaacgttcctgattatcctcaggtaaatcatctactttcagcaaaaatatgatttctggtctcgagtgtctatccaccagcgctaaaccctacaagaaatgagaagaaacagagcagttaaagtaatgttgtaatgtttaaacatgactcattcttttacctttaggtttagcttagctcaagatattcaaaatgtcagctacatgaaacttaaactatccagagatttacaatcgcctttttcatacaaagagctcctttaagcagtgacttctttcctcctctgcaatctggcttctaccatcagcagtctatcaagacagctttggttctaaaggtcaccagtaacctgtcattgccaaatccagtgggcccttttcttggattcatcgtgttagccctctattttctattttgtttttttttcctttttgagacagagtcttgctctgtcacccaggctggagtgcagtggcacagtcttggctcactgcaacctctgcctcctgggttcaagagagtctcctgactccgcctcctgagtagctgtgactacaggtgcacaccaccacatccagctaatttttatatttttagtagagaaggggtttcaccatgtaggttaggctggtcttgaactcctggcctcaagtgatccacccacctcaacttcccaaagtgctgagattacaggtgtgagccactgtgcccagtccctagccgtctattttcgttactgttgattactcctcctcctttaaatatctctccatccctgacatcagtctttttattttcctcgtaacttgatgttgtagctccctgaggcttccatcccaaccactccacttgcttcactgtcactctactgagtaacctcatctaaacctgtagcctgagccaccacttacttgctaatgactataatacttatatcttcagctgagatgtctctcttgagtcccagacctctatatccaaatctatacatgaactcatttatcatccaaacctgctctagttccactatcctaggaaaacaggaaactgaggcatcagctttgattccattagtcaaaccccacacctatgtggtcactaaagtctatataataggtgttaaggcttcaggattcctctgtccattcccccattacctatctctttagccagtactctcttagttgggagcatatgtgttgacagcctgcacagtaatcctttttcataatctaaccaaccttccgtctgtccatcttgtttattgtcatagtattcttttcaaaaggccaaactgatgagttcctgatgaggtaacctctctaactgatgtcactcagtggcctcaaagagctttctagaaagagttgaaagtccttagcgcagtccacagtgtccttacctcacaagcatcctttactccagcccatgcatccctacaacagtgccttaatttttatttgccccccacctttgaccgtgctctcctagatttccacctctggctttccctccatctagagagcaacagttcatctttccatactcagcagctaaaacgtctattccgtcagaaagtcatccgtgattgaccagtctgatggctaagccccttttctttgttctcataacatcgtgtgcatgcctttcccatggcgtagatcactctgcattgtaagaacagatttatgcatgtaatatgtctcccccattgccagttcccaggctaagcaccataatgacacctggtatgacatttctcctgagcacctagcatggtgcctcaacataaaaagaactccataaataccaagcaaatcttttcatttaactaacaaaatatttaccaagtatacgccacatgccaggtagtatgctacatactagcaagcaacagcaaacaaaatgccatcaaagtagagagtggtgaaccacataaacatttttccaagctaaggggagagtgccatgaaggaaagaatagcgtgctatcaaagagtaaaaccagaggtctttgcttcaagcagagaatgaaggaaggcctccttgaagtgactcaaagatgagcaggaggtgaccagatgaaattagagagaatatcattctagaacaaaaagctttgtgtgaaggtcctaaggtaggtgagagcttgatgatgttgaaaacctgaaagagggttggtatgcagtgagcagaagggaagtagccagagatgaagctatgaaggtgatcctgaagggccttataggccaagacatgaattctgagttttttatcctgagtgcagtaggtgaccattaaactgatttaaggccgggtgcagtggctcacatctataatctcagcactttgggaggccaaggtgggcagatcacctgaggtcaggagttcgagaccagcctggccaacatggcgaaaccccgtctctactaagcatacaaaaattagctgggtgtggtggtgggtgccagtaatcc

SEQ ID NO: 361 - DNA, 4674 bp, Homo Sapiens
agcaggagtcggaagtggcccaggcgcaggagagcgcggagaagggctgggcggcggcccgggagccggactcggaccgcgaggcccagatcgctgggcgctggagaacaggaccctcttgggagatgtgcataggatacggtattcctgagcctctcagtttcttccgttgtaaaaatgagacgccaacctcgtagtgtgttgagatggttaaatggggccatacacatttgcactgtgccttgcacttaacaagaacgcgtgaatgttagtgtctgctgccatcattattgactattatgatgatgatccgtgaaagcccctgaattccgcctgctcttttgcttttaattttctgcgggccttaagtctaccctacgatagctgacgcgctcccgattcctggtttccatttgcggagaatgcagggcttcctcttggagttaaagactcattggctcctggaaagccctcgctctctgccgccccccgcggacttagctgtgactgtccttgcctgtggagcagaaggcttgccctcctcaggggccacccgagaccgccaggatggagtaggatctggaccttcagtctgttgaggagccctggcccggggtagccattttcaagggcgagggaccttggtgggagtacgatgaatccatccatacaataaacatccattaagcacctagtacatggcagcggggggcagagggctggaaatattaataatactagtaaaacttaatatgtgtaggtcaccgttctactccttacaacaatctatgatatagatcctgtcgctatccctgttttacaaagggaaagggagacatcgtgaagtaaatagccttcccaaagaaagttacacgtttgggaaatggctgagtttggcttggagagaggaaagtaaactcttgataggtgaaatagacaaaatcacaacacatttgggtttaatgcaaaagatagaaacatacacaaggtacggaggtttttaaaagaggaccttgtcctgtggttataactttggggaagggcgtcagggagatcttcctggtgtaggtgatgtctgagctgggtttggaagaagaaatgggagcttcaaaggcagcttataagtgaagaagaatcacagtaaactttttcaagcctgaataaggatggaggagaagtggaatggtggccggaataaagctaaaacagtaaaacaggaccaaactcaagggctgttttcctatagaaactaaacaacattaatttgacctttgattggtaggaagccagaagggttttaagcacaggagatatgtcaggtgtggttctagaaagtttaatctggaaacatagaagatcccagaaccaagaaacttgcttaggaaatattgaaatatgtcggtgagatacttcagtaggcagaatgagtagagttacagaaagaggtccacttcttaatccctggaacctgtaaatatgttatcttacatggcaaaagaatttttgcaggtgttaccttctcattcggtcatgggaaaaaaaagaataaagaaattttgcaggtgtgattaagattgatgccattgagatgggggattatcctggattatttcagtgagcccaatctaatcacatgaatcccctaaaatggaagaagagtgggtcaaagagattcaaagtgtgagagggactcaacctgaaccacgaaccaaggactgtggataacctccaggagctgggaaaggaccttagctgacagccaacaaaaaattcactttctttatctggtctagacttgtttttcttccacagtcctacaacagcagaaactgaattctgccaataacctaaatgagcaaggaaatggatcctcccttagagtcttcagaaagtgattgagctctactgacaccttaattttatcctgaaggggtttcaccatgtttcccagactggtcttgaactcctggactcaagcaatcctcccactttgacctctcaaagtgctgggattacagacatgagccacccctcctcccctgctttttttgagacatggtctcactttggacccagactgaagtagtggtatgatcactactcactgcagcctcaacctccccagctcagacaatcctcctgcctcaagtagctgggaccacaagaatgtgctaccatgcccggctaatttttaaattatttgtagagatgggggtcttcctatgttgcccaggctggtcttgaactcttaggctcaagcaatcctcttgcctgggccttccagtgctgggattacaggaactggccactgcacctggcctagcgtgtttttgtatgttcaaagaaacgttttgagagtaaatttgtgtggatttttttttcacatgtggtataaactattcacgttacaatagtaaacaatcttatggacaagtgtaggggggctgtttttttcattcaggagcacagtgctttatttgtaaaataaatcacgatttcctttaaaaaaatcacacacctttatggaggatatttttggattctttgatatcttgttaaacgacacttaccttcatttacttccttctctcccttcaccaataagcctccaaaggacatcagttcctctgaagatggcctatttcagaactaatttcccaaaatattcacacctaatcacatacaatttccaactctatttttcagtagccagttatttgttctatttcaccattcagaatgagaccctctccttctaaactccagttcatattgtgtcagtaccagtagaatcctgcactcttctatgtaccccttttccaatcattttctgctacagtgtggggtctgggagactcagatatttatttcctaaattatatgtaatttaaaggttgctgtcttctctgccatctaatatgcttaggtatggtatctgagtgatttgttctttttgttctttaaagggatttgtgaaacagttgaaatttagatgactgtcattactgtataagaatcttgggcttctgactatgaggtacagggccatggtgaatgcttatataacttattagggggatgtgttggggtgaagtctagccctcgcttcatttgctgtttcttgtggaactgcattatcagaagatatgcctcatttgtagggctacatccatgtaacttcatctacacatgaagttttctttaatgtaaactccagatggggcattcccccccgtcataaaacttctcattaggaaaaagccctatgagatcttaacatacactgcaagtattgtagcttgcttagttatcttcatgtctgaatggccatagtaatctgatgcattttctgcaaaacacagaatgaaacaacccaaatacagacaaccagatcctattttaaggaattatctttgcttgtgttcagaataaactgaaaaaaaaaaaaaaaaggtatggcttcagaaaacaaatatgctgcaatttcagaaatgatgctaagagtagattccaaaggatttttaaaacttatttaacgtatgtccagggatacaccatactggctgagttctgttacacaggtcatacctgtacattgcatagaaaattgattgtccatgaataaagcattttttccactgtggagtgaaatgtgttgtcacaccaattgtttctattagtcatctgtatttgcagtggaagaacttaaaagtgtttttgttccaaggacccctgtgaaacaatgtgacactctcagtgttagttccttgagtaatggaccatatatgtgcaatgacagccaagcagaaagaaaaaacatcttgaaaagctcaaaaacagattcagctttgaaaataactggactgaaatctacacacatttctagaatactaacaggcacattcaaataatctatgatcaactttttccaggtactccaatgcagcaatccccaacccttttggcaccagggactggtttcgtgggaagacagttattccatggagccagatggtttcaggatgattcaagcgcattacacgtattgtgcagtttattattacattgtaatatatgatgaaataattatacaactcaccatgacataaaatcagtgggagtcttgagcttgttttcctacaactggatggtcccatctgggggtgatgggagacagtgacagatcatcaggcatcactctcataatgagcacacaacctagatcccttgcatgcgcagttcacagtagggttcctgctcctatgagaatcgaatgcctccactgatctgacaggaggcggagctcaggtggtaatgcaagcaatggggagcagctataaatacacatgaagctttgcccaacactcacctcctgctgtgcaacccggtaccagttgtcacccatgggctggggactcctgctccaaagggtaacattttaacattcagcttaaataaatttcaccaaaaatatctcaacaattcaaagaggagtgttcctgacaccagatcactttattcaacagagcagctcccaaagtcatgaagtactacttggtttaaaaataaagctgtttttcccacgtacacacattcaacaaaactatctttggtattactttactgagtgaggtttaaaggagtttgggaaaatattacagccttcttcctttt

SEQ ID NO: 362 - DNA, 4392 bp, Homo Sapiens
gggacacggacagccgccgcctgcggctccgaagctcgaggtctcccggggtgcggggacgtggggccgaagaccccgctccgcagccgcggcgaggcctcgtccttcactgtgcagatgcgaagctttcaaggacacgtctgcaccggcccggcgggagggaagagggaaggagctgccatctatggaacccaatctcacttcatctgcaccgagcatggtctcagggagcatagcgagacatctcaccatccacccagctttccgtggggtgcattagtttcaagatgaaagattagaaacctgtggtcatgtactttcggatacaaacgttttagtgagtataaagcagtggtggtttttttttttcattcatattcttttattaggtaatgtaccccctaatttataagttgagttccatataactcaataaagggggtgtcatttttaaagttaaacattttctggagataattttagattttcatgcagttgtgagaaacactaaagagagatcccatgtacccttactcagtttcccctgatgataccatctcacagtgaagtgggctgtcacaaccaagatactgacagtgacgtgaacgtttccattaccactggattcctcatgccaccctccagctggccaccccttaaccctgaacaatgactaatctattctctttttctataattttatcatttcaatagtgttatagaaatgaactcattcggccaggcacagtggctcatgcctgtaatcccagcactctgggaggctgaggtgggtggatcatgaggtcaggagatcaagaccatcctggctaacacggtgaaaccccgtctctactaaaaatacaaaaaaaaaaattagccaggtgtggtggcgggtgcctgtagtcccagctacttgggaggctgaggcaggagaatggcgtgaacccggtaggcagagcttgcagtgagccgagatcaagccactgcactccagcctgggcaacagagtgagactctgtctcaaaaaaaaaaaaaaaaaaataaagaactcattcaaggccgggcacagtgcctcatgcctggaatccctgtactttaggagactgaggtgggtggatcatttgaggtgaggagtttgagaccagcctggccaacatggtgaagccccatctctactaaaaactaaaaacattagctaggtgtggcgtcaggcgcctgtaaacccagctactcaggaggctgaggcaggagaatcgcttgaacctgggaggcagaggttgcagtgagccaagatcgtgccattgcactctagcctaggaaacagagcgagactccatctcaaaaaaaaaaaaaaaaaaaaaaaaaagaaagaaagaaacgaactcattcagcatatagccttttggaactggctcttttcaccaagcataaccctctggagattcatctagattgttgcatgtgtctctagttcacccctctgtattgctgggtaacagttcatggtatggttatgccagcatgtaaacactcacctgttgaaggacatccgcaggatttctagtttccaactacagcttagaaaactgaggccagagagtgaagcaactgcacaggcataatacggcacagctggcatttcagctccagtccatttgccagagtcacacgggatgacaggtgagaaacagaccaggcagcttcaatgggatagatggagacttgacgtcattgataatctgatgccttgaaagtcgtgtgtaagaagctgactctgaattggagggaggccaggagatttgcacccagctctggcaatgggtttggggaagctataaaccacctttcaaagggaacacctggtcgggtgcagtggctcatgcctgtaatcccagtactttgggaggccaaggtgggtggatcacctgaagtcaggagttcgacaccagcctggccaacatggtgaaaccccgtctctactaaaaatacaaaaaaaaaaaaaaaaaaattagccgggcatggtggcgggtgcctgtagtcccagctactcgggaggctgagacaggagaatcacttgaacctgggaggcggaggttgcagtgagccaagattgcgccactgcactccagcctgggtgacagagcaagactttatctccaaacaaacaaaaaaccacaaagggaacatctattgctgactgaaaacagatgaggagggacgtagcaactgatttgcattgttctaggagcatccagatcaaacgtatattcaggggccagaggagaagtgtaactgaatttagaggagcggatggagtggagaataactcgaggaacagcgccatcggtgtgacactactcacactgcagccatgaagggatgggctctccggggagtgtggagaccagaggttcgggggtaggctacaacctggggctggaagagatgacaacaaaggagagagaagggggctcagggaggcagggcgagccagatgaatgaatgaaggccaaagacaaagggactcagtatttccgaggcaagaggtcagggaggaaggagtgcatttgttatctacagcgcataacaagttagcccatatcttagcggctgaaacaacacgtattgtctctctgtttccatgggtcaggaatctgtgagtggcttgctggggtcctcaggctcaggctctctcacagactgcaatcaaggtgtccggctgctgtcatctcaaggtttgatggggaaggatccacttccagcctcactcacatggttgttgttgacagaatctagttcctcacaggttggtggactgagggcttcaattcaatgctggctattggccagaggctgccctcagctccttgccacgtgggcctctccacaggacgctcccaagatggcagctggcctcaccagagaggaaggaggagagagcgagagagtgtgtggcaagcgaagagacgaactttcataaccaaatcttggaggcatttgcgctgttctctccgttaatagccagtcactagaaccagcccacactgaagtggaggggattacaaggatccagataccaggaagccattttagaagctgcccaccacaggagcaaaggcaagggggctggacccgacctaagactaccccaggcagcccagagcagactgtccgagagtgtgaggacagaatcccagcccgaatcccagctgtcccagcaccacagggagacatggacacactcagggcctcctgccggttcccagaagagcctggctcagtcatttgcctgggttcactcccaccacccccagcagtgccgggaataaaacaataatacacagcagcaaaatgcccctccagcagcccatgtacacagcctggctcaccttccccatcttaccagccggcactgccatcgggacacggaaacctcttcaggacgtgggaggaggggaagcaattccatagacatttctgggcccttctcagctgcccccaccagcagccagcagccccctggatccatctggggaaggagactcccctttccctgagggcctccccctctgagcctggccagcaccctgggcctgttctcctgtccccctgcagctgcagggccataggtccccttgtgggagggacagaaggacagagaggcaccaggaaggtgggcaccagggccttcccaccaggagccgacactccccagggaacatttccggggcatgctcaggaggcaggaagtgggatgcaggggaaatcctcaaaggctgaggctgcggctggacagagacttgagggaggaacagaggaggatggcaggtacaaatctcaacccacggcaggtaaaagacatgcacctttttagaagtcccctgatgtcagtttttagaagtcccctgatatttgtctctgcccaaatctcatgtcgaactgtaatcctttgcatgggaggtgcttggatcactgggctggatttcttgtgaatggtttaacgccatccccttggtgccgtccatgtgttagtaagttcttatgagatttggtcatttaaaagtgacacatagcatctctcacaaagtgtgggagcacactctcactctcttgttcctgcttttgctacctgcctgctcttcctttgccttccatcatgattggaaacttcctgaggcctccctggaagccaagcagatgccatcatcatgcttcctataaagcctgcagaactatgagcccatcaaaactcttttctttagaaatcacccagtctcaagtttttttgtgtgtttttttgtttgtttgtttttgagacggagtttcactccgtcacccaggctggagtgcaatggcgcgatctcggctcactgcaacctctgcctcctggct

SEQ ID NO: 363 - DNA, 1047 bp, Homo Sapiens
tgtgttacagtttcttacagtgttgagtagagttgcatgctgtacaggtttgtagccgaggagcaataggttctgtcatacagcctaggtctgcagtaggttgtcccatttaggtttgtgtaaggacactctttgatgtgtacacatgaagaaaattgcctaatgacacatttctccaaatgtgtgtctgtcattaagcaacagatgactgatgtgaaatgtcagaataggccaatccatagagagattgtctggggatggagtaggagatgggtaagcaggaatcaggaagactgctgtagcacagggtttctcccccacttcccaccacttttttcaatagagacagggtcttgctctgttgcccaggctgaagtgtagtggcatgatcatggctcactgcagcctctaactcctgggatcctcccacctcagcctcccaggtgagtgccaccacacccagctaatcaaaaaaatttttctagaggcagggtctcactatgttgcccaggcctgcagagagtttctttggggggcattgaaaatgttctaaaattagattgtggtgatgtaattcagtgtgtctttgaatgagtttaagtgtcatgtcaagtacaattgtcttattcagcttagatttttggaatgtttgaagacaaacattgccgtggagatcacctggtagctttctgagcaggaggctgtggactgaggggagccatccactctgccgagagcttgagaaaatgaagactgaaaacagagcactggaggtcgttcatacgcaaaaatgctttcccctcggaattgtctccagctccttcacctcttggttgtaggtacagacagcagagacaagaagagccttgaagaggcagccacacattgtggtgaggagcacacagcctcttgctaggataggaatatgctacctatgctttggttcccaatatccttgccaataaaacctttgtctctgatcctctgatgaacatcaaatggatccacggctctgcggaggacccaagacaacttgcttgaattgtt

SEQ ID NO: 364 - DNA, 2239 bp, Homo Sapiens
aagaatgaagtggggtttagaccctaaatgcttcagtgtgagctgtgaagccccacagcttggctggatcaatctggacttcgggcagatgcgcactaagggctgcttacctagaggagccacgtttctcctgggcagtcaagataactgccagaggagccacatgctgggtaaatcctgaacccaaagtggaattttgccctagtataatgggttcatattcgattggctgcacttagctataaatcctgaggaggagaagaagaaagacatcagaaagtaattggactagaagaaccttagtttggaagcaaaacacagaatccagaaactatgaagaaatttacatgcacacatatgtatacaagccatgagagggaaatgggaatgtacctgagagtgtcgtcaaagcgtacagtggctgcacagtgaaatattatgtttgtacaggagagaagctcctgcatgtcctctttgctgatggcaaagtcattctgattgagatctgcataaatagctctgatcttctcatgcacatttggacaaacttctttgactttctcaaatagctgaaacataaatatagatcaatatacaaaaaatagcaccatcattatcacattgttcttgtttataacaacctgcttaattatactcaaaaactggttttagttgtaataacattacttaaagaagacatctggctgggcatggtggcatatgcctgtaatctcagcactttgggaagccaaagcagggagatcacttgagcccaggagttcgacaccagcctgcgcaacatgggttctgtggactctttcactttggcctgtgaagacttctgactactggaaagcaagaagtaggagatggtttcagcatccacccttctcacgatggggttccttacatatgataatctgatgcctaccagaagaaactctgacccagacaggatcattgcataagaggttggttttagaagtagagttggctgaaattaaagtctcgagtgacatgaagacagtgttaaagataaatccaaactcttctttattgcttgacacttttccaatcagcattgacttcattcctggcaagctgatgtaacatgaatgagttatgaagccaaagatcgcaagaagagcacacttcttaacagccacttcagaggtgacagccagggaataagaaataaggaagaactttccagaggatggagccaccacaaataataatggaaaagaaggttcctcccagagattagatttagaggctatttaaggaatttccccactcccagtgtaggaagcttctcaatactcgctaatcaggatttccttatggttatattctagggactgctgcttgcctgcctgtcttctcttttttgaatagaaggtgtctttgtttgtttgattttattttttcttcaacttcgctgttctacaatgacaagagatagaacagagacattttctacctcaacattgggaggcagaaaattcacctttttatccaagaataccaaaccagaagctgaaatatctggatctgatagagaggatagtctattcccccttggactttggactggatgcaataatggtatgagaccctggggtaggaatgagtgtcttctatgtgtgggaaagagaggaaagcagatatttggcgacctaaaaagaaggccatggcagaacctcattagttgttcaacaatcctattttccttttctcctggacacacagctatgcattttccagccatccttgtggttagatgcccagtgacagttctgagaatggaatatggacagatgtgataggcacttctgggcctgggccacaaaaaccttccacatgatgtccagtgcctcttttaccccactgacagttttttattgtcatccagagagaccttggatggtttagaagccatgtgtagaagatggcaaccttcccttagcatggatccttgaatgactgtggagtgcaatgccttctaccaattacacctactgtgtttgagaatcaaatttcatttgtattaagctactgatttggggggtttatctccttcagcacccacattagtacaactcatgcagaatggagagttaatgtgaacacatatggcacagactggtgaaacctaggactttaagatgatagatgaatttctgattatactttcctttcccgcaaaaagtttttttcaaattaaatgttgtaatat

SEQ ID NO: 365 - DNA, 5764 bp, Homo Sapiens
agttgtggccgcgactgcccgggagtggcgcttgccgcggtccgggcttgcaccccgctgggcaaagtacccggggctgtcacacggcgagctgagccctgggccggcgggtgaggttccccaagcggcgatgcccctggctccctgttccgccattgcgagccgttagggccaagctggagggagggcggcgaggcgcggctgccgaacagcaagccattggagagtcctgagcagagaaaggactgacctgcctcatgttttaaatctggctgccgtattggaagtagattggaggaaaaaaaagtggaagccctgggacccaccatcatgaacaatcggggagaagacaagaggccagcaaaggaatgaacacagggacgcatgagacatttggtgccgaagacctgggtcagcgggactcctttgggagaccagtcccccatcctcaccctcactctgtgaagagatccacctacgaccttgggtcctcagaccaaccagcctaaggaacatctcacctattttaaatcgggtaagcggcctctttctactctcttctccaacctctctcactatccctcaacctcttttcctttcaatcttggcaccacccttcagtctctcccttctcttaatttcaattcctttcattttctggtagagacaaaggagacacattttatctgtggacccaaaactccggcacaggtcacagactcaggaacacagccttcccttggtgtttaatcattgtggggatgcctgcctgattattcacccacattccgttggtgtctgatctccgtggggatgcctaacttggtcattcacccacattcccttggtggcaagttaattgtagggacaattgctttggctgctcacccacattgcagcccagggctgctcatgtcaccccttctctccgtgtctctaccctctcttttctctccactttcctggggggcaagcaccccccaccccttctctctgtgtctctgccccttttccactttcctggggggcaagaacctcccaccccttctctccgtgtctctgccccttttccattttcctaggggggcaagtaccccccaccccttctctccatgtctctgccccttttccactttcctggggggcaagcacctcccaccccttttccactttcctggggggcaagcacctcccaccccatttccactttcctgcgggggcaagcaccttcttttcaagggcctgtttcccttgcctccataactgttgtgagtattgacagccaggcttctaaacctcttaaaactccccaactctggtgccaacttggacaacattctttaatgaactcctttttagttatcccacctgcccagctcgcttattagttcaaaacattgtaactaaattatctgcttccctgactattcctgggttaaagccacacctcactactgccttttgccccagttcaatgcctcctgcacatcctctccttgtatctccccaccttaatccacaagtgtaggacacctctactccctccttggcgatggatgatgcaccccttaccatcctattaaaatctaatcacccttaccctgctcagtgccaatatcccatcccacagcacgctttaaaaggattaaagcctgttatcacttgcctgttacagcatggccttttaaagcctataaactctccttacaattcccccattttacctgtccaaaaactggacaagtctcacaggttagttcaggatctgcgtttatcaaccaaattgtcttgcctatccaccccatggtgccaaagccatatactctcctatcctcagtacctccctccacaacccctccataacccattattctgttctggatctcaaacatgctttctttactattccttgcacccttcatcccagcctctctttgctttcacttggactgaccctgacacccatcaggctcagcaaattacctgggctgtactgccacaaggcttcacggacagcccccattacttcagtcaagcccaaatttcttcctcatccattacctatctcgacatagttcttcatgaaaacacacgtgctctccctgctgattgtgtctggctaatctcccaaaccccaaccccttctacaaaacaacaactcctttccttcctaggcatggttggatactttcacctttagatacctggttttgccatcctaataaaaccattatataaactcacaaaaccaaacctagctgaccccatagatcctaaatcctttcaccactcctctttctgttccttaaaaacagccctagaagctgcccccacactagctctccctaactcatcccaacccttttcattacacacagccaaagtacagggctgtgcagtcaaaattcttacacaagagctgggactgcaccctgtagcctttctgtccaaacaacttgaccttactctttttggctggcccccacccccatgactgtatctctctgatccacctgacattcactccatttccccgtatttccttctttcatgttcctcaccctgatcacacttggtttattgatggcagttccaccaggcctaaccgccactcaccagcaaaggcaggctatgctatagtatcttccatatctatcactgaggctaccactctgccctcctccactacctctcagcaagccaaattcattgccttaactcgaacactcactcttgcaaaggaattatgcatcaatatttatacagactgtaaatatgccttccatatcctgcaccaccatgctgttatatgggctgaaagaggtttcctcactatgcaagggtcctccatcattaatgcctctttaataaaaactcttctcaaggccgctttacttcccaagaaagctggagtcatacactgcaagggccactaaaagacatcagatcccattgctcagggcaacgcttatgctgataaggtagctaaagaagcacctagtgttccaacttctgtccctcatggccagtttttctccttctaattggtcactcctatttactctcctactgaagtttccacctatcaatctcttcccgcacaaggcaaattgttcttggaccaaggaaaatatctccttccagcctcacatgcccattctattctgttgtcatttcataacctcttccacggtaggttacaagccgttagtctgcctcttcaaacctctcatttcctttccatcgtgaatatctatccccagtcctccactcttgactccctcttggagtggatagatgatctttgctgacaggacacattccaacactttcaccctgatgaagtcctattctttacttttatactcactcttattcttgttcccattcttattgccaccctctacctctccccagctatctccaccacactatcaatttcactcactctctcctagctatttctaatccttctttaacaaacaattgctggctttgcatttctctttcctccaaaatcaccaaggcctcaatttactcactgctgaaaagggaggactctgtatatttttaaatgaagagtgttgtttttaccttaatcaatctggcctggtatatgacaacataaaaaaactcaaggatagagccccaaaactcgtcaactaagaatataattatgctgaacccccttgggcactctctaattggatgtcctgggttctcccaattcttagtcctttaatacttgtttttctccttctcttattcagaagttgtgtctgtcatttagtttctcaattcatacaaaaccacattcaggccatcaccaataattctatatgacaaatgctccttctaacaactccacaatatcaccccttaccccaaaatatttcttcagtttaatctctcccactctaggttctcacaccaccccaatcccacttggagcagccctgagaaacattgcccattatctctccataccaccccaaaaatttttgccacaccaacacttcaccactattttgttttgtttttcttattaatacatgaagacaggaatgtcaggcctctgaacccaagctaagccatcatatcccctgtgacctgcatttatacatccagatggcctgaagcaaatgaagatccacaaaagaagtaaaaatagccttaactgatgacattccaccattgtcatctgccctaccctaactgagaagatatattctcccccgcccttaagaaggtactttgtatgcctatcccaaacctataagaactaatgataatcccagcgccctttgatgactcttttttctgactcagcccacctgtacccaggtgaaataaacagccttgttgctcacacaaagcctgtttggtggtctcttcgcaaggacgcatgagacagcatttactatgctattgagattgcctgttgaacctttctgcctcctccaacagagaataagtttattgaaggcagagaatatttatccttcacgcagaacttgaaaaaacagttataattttttattttttgagacagagtcttgctctgttgcccaggctggagtgcaatggcaccacctcagctcactgcaacctctgcctcccggattcaagcaattttcctgcctcagcctcccaaatatcttggattacaggcacctgccttcatgcccggctgatttttgtatttttgtagagacaagatttcaccgtgttggccaggctggtcttgaagtcctgacctcaggtgattcacctgcctcagcctcctaaagtgttgggattacaggcgtgagccaacacgctcagccagtatttttgaatgaatgagaaaatacattttgggacatgcttgggacatgttgaattgaggtatttatgggacacagaaggcagaagcatctggtaagagcagtggtgtgctggtaaatgtttatcaactggctctcagtggaaaaagttccgatttgcagcatttgttgaattccacaacatcaacactcccaccgttggtattcaagctgccaatgtggcattgctaaatatagagttgagaagagatgtgcactgttggctctcacaagttggtgtgagcaggctccagcacaccactgcctgtgggtaggtggatttaagggtatgaggttcaggagtgcaatgtgggctggagagatggatttggtggtcatcttcgaagtgatggtcattggagctaggggaacagcaagataacccaaggagttggttcagggtcaaaaggagagaacaggaatcgaatttgatgcaaggccaacattttaggtagcatgtggaagaggagcatctttgaaggagaaagacgtgaatgaaaaaatcattcaggagaacaattcaggagaaaacctgaatgattttctcattcagacaggaagacctgaatgagaaaatcaggagagccaggtcagaacagtgtcaaggaagtcagagaataggaattttcaagaagattcttcccatcgtaaaaattatgcagagagatgcagtaatgcaaggtctggaaaatatctattaagtttcaaagttagcaggttattattacttaaccagaatagtaaggagagtggccagagtatagagaggaaagtgagaagagagtgtatatggtcagggatggtggcattttgggtgttgtattagttacctattgctgcatatcaaattactttaaaacttagtagcttaagccgggcccagtggctcacacctgtaa

SEQ ID NO: 366 - DNA, 11304 bp, Homo Sapiens
gccctgagcctctctgagcacactttcttgcctttctgccttctgccatgggatgatgcagcagaaagggccctgctggatgtgagacccttgaccctgaacttcccagcctccagaacagtgttacaaacggacttccgtcaaagggatacgtgggtatgaattggaagaatctgagtggaaatgcaacactgatattttggatctccagaatttgcctataagaagagtcatttattcaggaggtcctgaatttgcttataagaagagtcattctctgcagagaatgcaaaagatgagtcaagggatgattctgcaatataattggaggatgtaaagcaattgcaaaaataattctgtctcatggaatactgaatgtctctaggaaataccaaccaatattggagttctgaaaaagtgataatgagcagtatactgtagggaactaggaaagactacttgacaaagatagtatttgagatcatagataagtgctttgggccaaaagaattgttactttctcagtttagttgaaagcaaataatgatactgtgctcatttttatagacaacaatagcacacatgtatgtggatgaaaatgagcgatacagactaattatgagtgaaagaaatccttgcagaactaacaatccagtgttgtccaaaacaaaccaatggacaaagtatttgaaaatgctagtaccatcctaacatcccaattgttttgagcaaattcttattgatagagatctctgggcctgcttatcaaccagtgagtaactccaatagtcaataaacaaatgctgcctccctcattagggatggatatagatggaaatagaatttcagaagagttgacagacaagccaaatattgtcaactttcaaatttgtcatgttgcccctagttcgagcctcactgtccaaatcccagagaaagagatggtgggatgtgaggaatggagataatctgtgtctctttgggatgttttggggtctacttaaggccagcatgacaaacatgtatagtgacaaccctaatcaattgttcatggctgtctgaaagggttggtgaggctacagtgagcaataaaaaattgccatcagtaattggccataattaccttgaacaagtggcaacttgtgataggcaacagtttctatacagtggtaaaacatgtcttatactgttccagagggtatatgatttaatcaacagtacaattgaagctgtattgtattggggcacttaatattagaattttgctaaaatatttgatttctatttagacacacagatctctaaaagatagttttctgtcttgattacatgttcttcacttcattctgaatcagattggaaataataagttgtgctttatatgcttggtagctcattcattcattcacaaattcagccagtcagccactgtcctagttatctattgctgggtaacacatgacttcaaaatttggtggattgaaacaacaacaattatgtcattatctcttccagtttctgtgggtcaggaatcttggaaggactcagctaggtggctcagctcaggttccctttgtggtttcaagtcatatggtggctgggagagtgtggggctgaagcagctgggggctggatgggcagcttactgtcttcatgtagttcctgggcctctgcacatgggttaatctggactccaaaggtaagatgtaccaccttttatgacctagcttttgaagttacgcaatacacgttgagcatccctaatttgaaaatctgaaatccaacatgctcccaagtctgaattttttgactgctgacatgaagccacaagtggagaatttcacacttgaccccatgtgacaggctgcaagtcacagtgcaggagcataacaagcagtttattctgtgcttccaagggaacaaagacccttggagccctcctcagctgtgatgtacatttgttgcacatgttcagattctcccatgcaagcaaccagactgtccacataggtggttgctagtgacatatttaccttctgatggctcagtgtatacaatcttagtttcatgcaaaaaaatatttaaaatatgatatgaaataccttcaggctatgtatataaactgtatataaaccataaatgaattttatgtttaggcttgtgtcccatctccaagatatctcattatgtatatgaaaatattccacactccaaaaaaaacactaaaaatccaaaacacttctgtcccaagaatttcagaatagggatacttagcctgtatcacttctactacacactactgattataagctagttataagactacccacccaggttggagaagaagggaagtagtctgcacctctttatggggatgtgactagggttttagaaaacatatgggataggagatgatgttgctatcttggaaaaatatgatcagctgattagccagagtcacaaacatttgttgggagccttttatgtgctaggctgcacatactctgggaatacagtgaagaggagggacaatgtccttgctcctgagtggcatatattctactgaggatgagtgaggagataaacaagaggtaaatacacaggaaagacaagattgaattgtggtaagtgctatgaagaatgttaaacaaaacagaataactggggtttggagagcttctttagataaggtggtcaggacaggtctctctctctctcttttttttttttgcttcagtgtctattttatttatttatttatttatttatttatttatttatttatttattatactttaagttctggggtacatgtgcagaacatgcaggtttgttatataggtatacatgtgctatgttggtttgctgcacccatcaactcgtcatttacattaggtatttctcctaatgctatccctcttcaaggcccccaccccatgatggccctggtatgtgatgttaccttccctgtgtccatgtgttctcattgttcaactcccacttatgagaacacgtggtgtttgattttgttcatgtgttactttgctgagaatgatggtttccagtttcatccatgtccctgcaaaggacatgaactcatccgtttttatggctgcatagtagtccatggtgtatatgtgcaacattttctttatctagtctatcattgataggcatttggcttggttccaagtctttgctcttgtgaacagtgctgcaataaacatacatgtgcatgcgtctttatagaatgatttataattctttgggtatatacctagtaatgggattgctgggtcaaatggtatttctagttctagatccctgaggagttgccacactgtcttccacaatgattgaactaatttacacttctaccaacagtgtaaaattgttcctatttctccacatcctctccagcatctgttgtttcctgactttttgatgatcgccattctaactggtgtgagatggtatctcattgtggttttgatttgcatttctctaatggataggtcacttttaattaaagaacttaatgagaagaaaacagtcagggaaacaagagttccaggtggatggaagagcaaaaatacagcatgtgagctccagtgcccagaagcctgtctaacaaacacctggcattcacttgagctctgctgaatagagaatgactgaatgaacaccagaccttaagttgccacctgctcatatcccactgcaagctctacatgaactcaaactgtggcaaagacgcaaagccaggagaaattgtctcgacaaccaaaacaatctgtaaacttggatcaagaggacccatcaatgacaagaatacacacgaaaatcttttggccactcttgaaacagatcattctaatcaacaggcaataacagtggggacacctgggccacaataaaccctttcacaactgtgccctttaccttgggccctcatagcccctctgctgggatttgcaagtcctcttcaacaaggagttcccaaaccaagggccaagacacatctggagactgtctcttgggtttgacagttgtacttttaagcattcctgcccttctggtttcttgatcctttggctcatttatgagaagcactgtgtaatcatctgaccctgagccaagaacagaggcctacagaggccctggctaatgtgggaactaagctttcagctttgtgggctgagtctgctgagctaagcagcttcctaggactgtcagaggattggtgctacttaagtgcagttgttctattacactcttttctatgagttggatgagcctttgcggattaaacagttgtttgcacttccccagttccacgctgacttttataacatatcaccaaaaggtgtttcacattgaatggagtgttataaggttccatatggtgaggtatggtttcctcctgcctggagttctgaatcattctgcaatttgtgtgaatctgctttgctatcaggttcttgaagatggggcaaggtactgtcccaacatcagaggaaggatgtccatatccttctggttcctgtgctattcttgatccttactggcctccaagtagaaggcccttgctccaagggtccctcaccatcccattctggcatatggtgaggtatgcctggccctgccagatctttgggatgtggtgctggctgtcactgctgaagtccatggcccctctgccaccttcctctgataccactaaactcagcaaagaagactggagatgtatgttacacatgtgactattgtaatgaattcagatatgcttttcttctgatacagaaaatattttataattaaaagaagatggttccttatatatgtgccttttcaatggccatcaacaattcatagctacagattctgctatgtctgcatagcaacagactcagtctgcttataccttatgaattataaatttactcatggacgagtgtgtgttgttctctcaaaggtttgattatttagattcattaagtgttgtactcgaaagaaataagactggtaactgtattttaataaagtatttaaatacctaaacatgttaatattttaacagatataagagtgtattgtgctgtaggtacaggtatttattattgttgttattgtttttaaatagagtaggacttcgaaaggaaaccacaaggaactttaagtcctgcttttaatcaccgtcaccttattttacaaagaaaaatatatttcattcatgtaagttgctattcatatttagttatatatttctacattatgaagaaagtattcaccctgaggcggggaaaacagaatccccagttagctcctattgaatgcctccatcctggaatactgtacaaccgacacatgcattggaattattcatgctgcttgtataccttgggagatgaacaccttgaagacaaactcagaatttcaacaaacccctcagggtctattcatggaagcctggttgggtctcttcttttggagaactaataaattagtccacacaactgaacttgctgaaggtaaatttggagttggccaacttttgctgtataacaagcagtgtttgtgtacagtgtctgttaggcattttactatccactggctaatatgttcagggcaggaacatccctttctaccccatggctctcccttttctctacatgcaaggaagtatgtaactgggcacagtgctgctttgatctggttttcattatgtgataattgtggactttctaaattgtaaatgtctgtgactttttccccagcagtcagacaatctatgctctgggaaaattaaagggaaaaatctcaggtaacaagaggagcaacatgaagcaatactttgctataatcatcctcttactagctgaggtccaaaatgctgtattgagtgaaataacatgattagagttaaataaataatgacagctaagagagaaatcagctagaaagaagttatttcagcctattaagaaaggagatgagatgttgctcaaaggaaaaaggcccgtatatgaagagtgtcaaaataaaggaatgaaaaaagaaataaatgaagtctgaagagcatgctagaaaaggcagatggataattttaagcaaaatgtgttgcacagtgggattggagctgaatgggaggaggtttgattgtgtaagcagttccaggtttcttgctttataacagggatctgcaacctttttctctaaagggctagatagtaaatattttaggttttgtaggtcagaatatctctcactctactactcaatgctgtcattgtaacatgaaggcaggcatagacaccacctaacaaatgggtgtctctatgttccaataaaactttataaaatctgatggtaagctggatatagcccacaggctgtagttctgtagttctgactcctggtttagatgatcaaagtggtggcagttcctttctccattgaatgggactcatattagtttggtgcaaaagtcattaattttgcaattaccttaattaaaggtgccattacctttaagggaaaagaccacaatgacttttgcaccaaagtttggtgtttgtgaggattaaataacaagtgtgaaaagtcctaacacagtgcttagcacaaggtccacactcaaatgttatctcacccaccgtctttcaagtcagtgatcatactccacagggaagcattcatggcttcagttaatcgtgcatataaattgaagacagaaaaacaggtagaaaagaaagacatgataaatgaaaggtcattattgattttggtttggtttttcaatacatacaactcaggacaaatcattaaaatgcatcttcttgcaaactgaagaaacagagcaaagtacaactacaaaaacaaattatctcaggttgatataattttcattttcatgacaataggctcattttcctcatctttcattgagcttgttaaactttaagaaaatccctacttttaagaaatgattttttttaacagtagaggcagaaatatactgatataggtgaattgtacttaaccaaaattgtaaaatcgtctatttaacattgttaatttcagttaaatggcatctcaattttgactggaagtagaatcactctggttttggtttttcatagactctgagtagcaccactgcaggttctttgaagcatttctaaatgaggtaattttattttacaaggggtttcttgtaaaaactattgtctttctgtacatctaattaaaataaagatgtaataaagaatttactgttttaattagggcatagatcttaaagcaattatcctgtcattaataattccttaacagactttcttgcacaagatgaataaaaagatttttaagctgtgaaaaatcaatacacattactcatttacattaacaaagctacacaaagtaatctgagccttcattaaattatttctcctgtaaaccagagaagtttggagagttattagctatttataacctagtggaacttcacttacaagagagaaatcttacccatgactgggcagttgtatcaatgtcatttaaatgaacagccaaataggattaatatattagtgagtggaaatagattgatatggtccataaggatgactaaatgatgaaagctatcatcatggtgttataatatgaatgattcagcactccatctgaaaattacatgtcttaacagttttttttcagtgttgtaattaaagtccctcccctccatacccccaccatctgccatatacacatttggctgtcttttaggcaatgtagcatctaggagacactaagatcactgagcttaaaatacaatcatgaaggtatctcaagtagtattgccagactttggtattttctataatttcatctaatattataggataatctgggaagggcaaaaccaaaccaaacaaaaactcaaaatgatttttttttgttagaaaaggaaaggctatgttgttatgagaagccattaagaagaagaaaaaatattttgcaatctaaattttagttacattgtccctaattgataatttggaggcagatggaaacccttacatgtgaaagcaaaaggtccaagaccacatattgtccagtttccctgcggaagaattgtctaagaaattaaatgaatcaatccgtaactgcaacagggactttgggtccttgttcctgtctgtgttgtttcctgagcccatcaaggtgacggttaatgggaagaggtattaacacaagttcttgttgggtcatttggtaaagccctcaattagcatggccagattttaatgaatattaagtaatgatgatgaaattaaaagcatccggaaagacagcagtaatcaaaccggtctgtgaacgtatggctgaaaaagctgttctggggtccttgtgagaaatttgctccaggacccttataagaatttagagaggattgctcaccaatttttcattatatatatatgcctgtttcaatatatataaaacaggcttaatggacctcacagttccacatggctgggaggcctcacaatcatggcagaaggtaaaaggcacttcttacatggcagcaggcaacacagaatgagagccaagtgaaagaggaaacccttataaaatcatcagatctcatgaggcttattcactaccacaagaacattataggagaaaccatccccatgattcaattatctcccactgtgttcctcccacaatatgtgggaattatgggagctacagttctaagacgagatttgggtggggacatagccaaaccatatctaccctggcccctcccaaatctcatgtcctcacatttcaaaaccattcatgttgtcccaacagtaccccaaagtcttaactcatttcagcattaactcaaaggtccacagtacaaaatctcatctgagacaaggcaagtcccttccacctatgagcctgtaaaatcaaaagcaagttagttacttcttagatacaatgggggtacaggcattgggtaaatacagccattccaaataagagaaattggccaaaacaaaggggctacaggcccgatgcaaatctgaaatccagtggggcagtcaaatcttaaagctccaatttgatctcctttgactccaggtctcacatccaggtcacgctcatgcaagaggtggacccacagctttgggtatctctgccctgtagctttgcacggtatagccctgctcctggctgctttcatgggctggcgttgagtgtctgtggcttttccaggtgcaaggtgcaagctctcagtggatctaccattctgggttctagaggatggtgggtggccgtcttctcatagctccactaggcagtacctcagtgtggggactctgtgtggggtttcacaccccaaaattcccttctgcactgccctagcagaggctgttcatgagggtcctgcccctgcagcacacctctgtctggacatccaggcatttccatacatcctctgaaatctaggtggaagttcccaaaccccaattcttgacttatttgcacccacaggcccaacaccacatgtaagcctccaaggctcggggctcgaaccctctgaagcaatggcctgaggtctacgttggtctgttgtagccacagctgggatgcagagcaccaagtcccaagactgcacaaagtagcaaggccctgggcctggccaggaagccattttttcctcctaggcctctgggtctgtgatgggaggggctgccatgaagacctctgacatgccctggagacattttccccactgtcttggtgattaacacttggctcctcattacttatgcaaatttctccagccagcttgaatttctcctcagaaaatgggttttccttttctatctcatggttaggttgcaaattttctgcacttttatgctctgcttgctctttaaacctaagttccaattccaaaccatacctttgtgaatgaataaaactgaatgcttttaatagtagccaagtcacatcttgaatgcattgctgattaggaatttctttcaccagatgtcctaaatcatctctctcaagttcaaagttccacagatctctagggcaggggcaaaatgccaccactccttttgctaaaacataacaagagtcacctttgctccagttcccaacaagtttctcatctccatctgagaccacctcaacctggactttattgtccatatcactataagcattttggtgaaaggcattcaacaaatctctaggaagttccaaagtttcctacattttcctgtcttcttctgagccctccaaactgttccaacctctgcctgttatccagttccaaagtcgcgtccacattttcagttatctttacaggagcaccacactcccagtaccaacttactgtattagtctgttttaacactgctgataaagacatacctcagactgggtaatttataaagaaaaagaggtttaatggactcaaagttccacatggctttggaggcctcacaatcatggaggaaggtgaaaggcatgtcttacatggtggcaggcaagagagaatgagagccaagtgaaaagggaaaccccttataaaaatcatcagctcttgtgagacttattcactaccatgagaaaattatgggagaaaccgccccccatgattcaattgtctccaactgggttcctcccacaacatgtgggagttatgggagctaccactcaagatgagatttgggtggggacacagccaaaccataccactccacccctgcccactcccaaatctcatgttttcacatttcaaaaccattacaatcaattattgtgatgcaatcttgaatctatagccaaatttcccacttctcaagatttattggaaaaaattatccctagtgtccctcagaactgtttggttttctttttttaacatttagacctttttcatccatctccaatgaacagcattggagttgtttatctagtagagtatgtatataatttatgacaaagttaatttcaatgatcctcaagtaagcgttttttcagtaccccccatgactattatagtcaactttcttgttctcagaaacacatgaattaatatttcacagatgaagcacaaataatcaataaacttatgaaactgcttagtaacaatatttattaaattagtcaacattaaaaaaaacctcagctgacatgggtatggtgacagataatctctttacccagtgatgtgactgtgaattactttctggaaagcaatttgcctatatgttacaagagcct

SEQ ID NO: 367 - DNA, 2944 bp, Homo Sapiens
ggtgcacgcctgtaatctcagctactcgggaggctgaggcatgagaatcagttgaacccaggaggtggaggttgcagtgagctgagatcgcaccactgcactccagcctgggcaacagagtgagaccctgtctcaaaaaagggagggaggaagggagggagggagggagggaaacaaggctggaattcaatgatagaggaagaaaacgatgcaaaatgaagttgtaaagcaactagttgacagatcagtaggtcctgataggtcaaggcaaggaattagatgatgatgatgatgatggtgatgatgatgatgatgatgatgatgattatcattattattttgtagatggagtctcgctgtgtctcccaggctggagtgcagtggcgcaatctcagctcactgcaactcaagtgatctcctgacctcaagtgatcctcctgcctctgcctcccaaagtgctaggattacaggcgtgaggcactgcgcctggccttaggtattattttaagcgcaatgaggggctaggggagcactttaagagaagggtggcatgatttgtcttacattttaaataaatcagtcaggctgttgtgtggagaataggttttagggtggcaagaaaggaagcagaaaattaggaagctattataggactgcaggcaagaaatgacaagtgacttcatctggggtagtaggcgatggacagatctgggatgtgtcttagatatagcatcggcaagacttacactttaacctgagcgcagtggctcacacctgtaatctcagcactttgagaggcagaggcaggaggatggcttgagtccaggagtctagagacctgcctgagcaacacagtgagactctgcatttcttaaaaataaaaaaaaaaaaattagctgaacgtggtggcatgcacctgtggtcccagttactcaggaggctgaggcaggaggctcacttgagcccaagtcaaggctgaagtgagccatgatcacaccactgcactctagcctggacaacagtgaaaccctcaaaataaataaacaaacaaataacttctgtctttcaagtttgttgggaggataaacaagctataggataagtgaaaaacacttagccccagcacctgacacatatcataggcaaaagggtaacagccggcttctcttccctttcacagtcctatggggattttaaaaaaatagcatctcttggtatactgtcagtgtttgtggtgatggactaccacctgtgtagacctctcagcatgtattaataaatacattcctcaaaaacggacatttgggagccgggcatggtggctcacgcctgtaatcccagcactttaggaggccgaggtgagcagatcacctgaggtcaggagttcaagaccagcctggccaacatggtgaaaccttgtctctactaaaatacaaaaaattagtctggtgtggtggcgggcgcctgtaactccagctacgcaggaggctgagacaggagaatcacttgaacctgggaggcacagtttgcagtgagctgagattgtgccaccacacttcagcctggctgacagagtgaatgagactccgtatctcacacacacacacacacacacacacacacacacacacacacacacatgcatttgataagcacttgccaattaaccttatacatccagaaataacatcaccaaattaactaccattattctaaacataaacaattttgggtcttttaactgatacttcaaaatccctacttacttttctcatattccttccaataatttgttaggaggtggacctgtcaataggaaggacaaaaaattattatcaccaatactctcaaagtaatcgtcactttgggtagaaaccccagtacactcggggaattttcagaattcaatcaagcccatccaactgtctccaagttttgacactgcctaaaggactcctcacagttggtttagcccaacccagtaagaaacatttaacaaataattaaaagtgctgtgccagggtggttgtgttgccgagatacggttgttggtagctggggagtggcaggcagatccagccaagaattgtgccctaagccaggagctctgatgatgaaatcacaggatgtttgagtttggggcttgatggtcatcccaggtggtttcctatcgtggaaaacatttgatgtataagagtaaggctcagccaggcgcggtggctcatgcctgtaatcccagcactttgagaggccgtggaaggcggatcacctgaggttgggagttcaaggccagcctgaccaacacggagaaaccccgtctctactataataatggcagttgccctgccagcccggtcacctgtcactccctcctccgacttctcccgcaccgcggccgcaatccagcccggacactctgagggctctctctgagctgggcacggtcctcgctgctcggccgagtgcagccccctcacctcagtgcgactgagacaaagcaagggtcccaccggcccctgtcccctccctaaggcgcgccctcagggcgggagacccacctcagccagccccccagctcagtggtccagaggctcgggtcccgcgctgacgcccagcgcctccctcctccacagccgtcactgaccgctcgctcgcctctagcctggaccccgctgtccagcagtcccggctggcccgcgccgcgctcctcccgctctggcagtcctggcactggtaggacgcccgcagccttccaccctagagggcgccgggcgggcacgcgctgggggcgacgggggtggggcgggggaggcggggcgacgcagcgcggggcggccggcggttggtgctcgcagcccgcgcgcccgccttcccggccacgtgacctttgggccccgcccagatcgggagttccgcgcggactcttggtgcgaccccgtcccac

SEQ ID NO: 368 - DNA, 1732 bp, Homo Sapiens
cgctggcgacgggacagggtttttgctgcccggggcctagtctacctcggcacgcttttctctgaaggagacacgcacttgcacgacgtgggcctctgtgcagctctactttgtccttaactcctctgactcaacgttatcgcagtttgactctggagccactcaggtttttcctaagctcaactctagccagctaggttcctggtgctttgggggtaagttgtgtgcagggagggtgttttacaggaggctgtgtggtgtagtggaaaaagctgaattaagtacattaatcctgaaaacggtttgacaagggcagatgacgtccaagttctccaacagctgtttttactcctccattcagaataggagctgtgctaatggtttggagaccgtcaattggcctagcacttggccatcctgcccccaaattcttgtcccagttccgtgccagctgcatgatgccttttgatagtatccttctttcctgtacctcaagcatagtagggtttcagaccacaagttttctgaagcttttcggaattcatgcagcttgatgcgttattagtaggggctgctcgtgggaaaacgcttgtaattacacttcctcaagaagttaatgaaaatgtgtgagaagagagatttccaacaggtgatgaatatgccagccagttattcccttcttccttcaaatatccagcctagactgatttctggataggtattgtagaaataaaaatttcagacaaaacaaacttagattttgaatcggacaacagtcagaaccaaaagaggctcagacacccctgctctagctgcccaggcatcaaactttataggctgaacacgaaagtaaagaaatttgattggctacagctaagcgtttgccttatttgggtatggtcacatgggaggtccctaattatataaccacttggctggttgtctgtttgtgattggttgaaactccattcaaaatcaggtacaaggggccgggcgcggtggctcacacctgtaatcccagcactttgggaggctgaggcaggcggatcccctgaggttaggagttcgagaccagcctagccaacatggcgaagcaccgtctccactaaaaatacaaaaattagccggacgtggtggtaagtgcctgtaatcccagctactcgggaggctgaggcacgagaatgacttgaacccgggaagtggagattgcagtgagcagagatctcgccactgcactccagcctggatgagagaacgagactccatctcaaaaaaacaaaacaaacaaaaggtgcaaggaatacctctaaattttgggttgctttctgggtacaaaaacaactccaaactaatggcctgctacttattttgcattaacagtatcaagtatcaagactccagcaaaagtggcagacagcatgggaatgctaaagagcatacaatatcaatacaggatagtactccagaaaatacgttaccctgcatgtggcgttccctcaatagatgtctcccctccccccaattttttttagctctgtgctttagtggatacaaaaattacttgctttcccaaagcctccttttgaagatagagctagcattaggttgattgctaaattttcagggattttatgagccaggtcataagcacaaccattattagaaatcaaattatataagctacaattaaattatcttaaaaataaaagtaataggccaggcatgttgagtc

SEQ ID NO: 369 - DNA, 4606 bp, Homo Sapiens
aactttatatctggaagttctaacacagatagcttaacaagaaatacctcttattttaatgtcagatgtcatgatttttttaaggcttctctgataaaatatcttcttccagtattctaaattcccagcctttttcattctcctctttcttccatcagaggccaccacttccacagaagggactggtacttctggaactggattcaaaactggtgagaagaaacagcccatgatttggcatcataagtattaggtctctcaagcttttctagagagagtttgtgtttgtgttatttagggacattgcaagtgattcaaaatagatttgctagtggaggtacgttttgttttgaaaatccactaattctaaagtggatcattactgcttcatttctgaggatacgatgcacttctccatttatgttccaactctcgctagcagtttaggtggaattcagaaagtttcagtgcatgtgtgtgaaacagaagagctctgtggaaccaggacacatacatttaacgtgtacatttgaacaaaaatgctggctcagtattttctcctacatgtgaagttcaatacattcaaactctttttcctcctctttctatctcacagcaggcatcactgcagcaccagggaagcaagcagctgagcattgggaaaatgcatctagtttctctcttatcaaattttcagttgtgcttgtacttggaaacattgtatctccttttgttatgaattgctgaaagcagacaaatacatcaaattttccacttgcctcgtgctcagagaaagaggattctgttatggcaaataaatacagaaatatagcatataccttttagattcgggtcctcatttgacttactcgttcactgtgatcacctcagtttctttgtgtttcaggcacctcagaggtagctcctgccacaacggttgccccaggaagtttcagcacagcagccacaacttctcctggagcaagtggaatgactggggttacaacaactacaaagaccacaacttccctaggaggaagtggcaccactggagcaaaaataaaattaggtaaagactttggagtatttgtatttattgttgttctttgatcgatttcttagagaaaaatttttaatgagctttttatttgaaaataaatttaaattacagaaaattatcatagataatgcagagaatctttttaatgtggaatgtgggtttaaatttcctttgaggctgtaatatttcaagaaaacagagtttgttcttggatttggacttgtaaactcttgagaccaaaatttctaaagtctttcccttctgagagactaacctcagggttctaggtctctggagaggagacttgcaataatagctctggttttgaaaaggttttccctttgaaaagggcatagtctgtatgccattagtgtactgatttctacaatgtagaaatcaccaagatgtcatattttagtttagagataaaaattcaaaattgtctttcttccttcttgttctttcttgttttctcctcttctttcttctccctttctcttttgattttcagtaggaaccaccactacagcaccagaaagtaggacaggtaaacttggggaaagcctttcatatgaccttcaactttgaacaaatcttggtaataatattcggggcaggaatattagccactgcgttacccttggctttgcaaaagcacacaataaaccggaagcctgttagtcctcatgtcagttataatttcaggaagtgtgctttcttgcttcaaagtcacaaatagacatactgttggccacatttttccaagggtcatgaaagagttcccatatccatctttctcttttcttttctaccttggcacagctggagtgccctctggtacaagagtcacccctgggagctccaactcaggtaaagcaccaggctgggaggaaccactgcttggaaagtgctcctcagtgaggtgtctgcctgggtgaccctaccgtactcttctcagattcttctaatctttgccctcactgccattctttttccctgttttgcagaggccacaacttctgtagaagaaagcagaataacaagagccgaagtaatcacagaggccacaactttctcaggaggcagcggggccacctgagcaggattacccagaggtaccactggagaattttctggaacgaactttatatctggaagttctaacacaggtagcttaacaagaagtaaatttttatttaatgtcagctgtcatatttcttttatggcttctatggtaaagtaatatcccaatatcttcttccagtattctaaattcccagcctttttcattctcctctttcttccatcagaggccaccacttccacagaagggacaggtacttctggaactggattcaaaattggtgagaagaagcaacccatgatgtggcatcataattattaggtctctcaagcttttcttgagagagtttgtgtttattttatttagggacaatgcaagtgattcaaaatagatttgctggtggagatacttttttttaaatctactaattttaaaatggagcattactgttccatttccgaggatgggatggaatttctccatttgtgttacaactattgctagcagtttaggtggaattcagaaagttttcagtgtgtgtatgtgaaacagaaaagagccccatggacccaggacacatgcatttataagtgtatatgtgaacaaaaatgccggctcagtattttctttcttatgtctcaagttttaatacatttaaacccttttttccctcttctttctacctcacagcaggcatcacttctgccccagggaaacaagcaggcacctctggggtatctcttgccacaacagttgcccctggaagcttcagcacagccacaacttcttctggagcaagtggaataactagggctggccccaactcagagaccacaacttccctaggaggaagtggtaccactggagcagaaataaaatcagctgcagtgccctctggtacaacagttgcccctgggagctccaactcagaagccacaacttctgtaggagaaaatggaaaaacaagaggtgaaataatcacagatactactgagggcacctctggcaaagttctggaacctggaagtgcccacacaggtcaggaattctgaacatggccccttaagcaatatcagctttgggaaacccagaatgtcctgtccagtctttatacctccaattcctccctctctcagaggccacaactttcccaggaggcagtgggactacccgagcaggaccaccaggaggtgagcttgtcaggctgaggcctggggctctcatcatctctctatctgggtggctgcagtgaacagtaatgaacagtaatgcagtgaaagtcttttgagggagggtcctgcattttctctgtggccacagtgtgtcatatcaacctggtcagttattctgcttgtgaattcatgacctcagatgtctcagccaggctgccttcagtgtcctggcttatggaaacgatttttttctgatatgaagtatgagcgtatattgcatatattccaactttccaggacttccaactctccttacccagttttcctttccacccacagtttgagacattttctatcatttttctcctttacttacacatgatatttctcccctcctacaaaacttagtgaaaacaactgattattaaaatcctccaagttgtatcaaagagtcctacttataaatatagaagtgtgctttgtttctcccgtaggcacctctgtcacaccagggggctatgctcctggaagggaaataggtcagggtgatttaagccttattcgtcccttccctcatagagaaagggaaacccagtagcaacacacacggcccaggttggcctggaaaatcaagtacttggagactgttcattttccattctctacagggatacagtgtcctcaggaaagggcttccagtactttagggccacacatggatgcttccaagcttaactggggagataatgatctattgctccatttcccttttttggcattttaggtaccactggagaattgtctagaatgaccattatacctggaagttctaacacaggtagcttaacaggaagggaatgcatcttatttaatgtcagatgtcatgatatctcttttagggatgctattataaagtaataccccaatatcctctgtagtattccaattcccagatgtcactattctcctactttttttcctcagaggccacaacttccacaaaagggactggtacttctggaactggcttcaaaactggcacctcttgggtggcgcctggcacaacagtttcccctggaagtttcagcacagccacaatttcccctggagcaagtagaacgactggggctgcacctgccgcagaaaccacaacttccctagaaggaggtggcaccactggagcagaaataaaatcaggagccacctccggagtaccgggaagtaagacaggtaaacttggggaaagcctttcaaatgaccttcaacattggcaaaaaaaaaaaaaaaaaa

SEQ ID NO: 370 - DNA, 4587 bp, Homo Sapiens
aactttatatctggaagttctaacacagatagcttaacaagaaatacctcttattttaatgtcagatgtcatgatttttttaaggcttctctgataaaatatcttcttccagtattctaaattcccagcctttttcattctcctctttcttccatcagaggccaccacttccacagaagggactggtacttctggaactggattcaaaactggtgagaagaaacagcccatgatttggcatcataagtattaggtctctcaagcttttctagagagagtttgtgtttgtgttatttagggacattgcaagtgattcaaaatagatttgctagtggaggtacgttttgttttgaaaatccactaattctaaagtggatcattactgcttcatttctgaggatacgatgcacttctccatttatgttccaactctcgctagcagtttaggtggaattcagaaagtttcagtgcatgtgtgtgaaacagaagagctctgtggaaccaggacacatacatttaacgtgtacatttgaacaaaaatgctggctcagtattttctcctacatgtgaagttcaatacattcaaactctttttcctcctctttctatctcacagcaggcatcactgcagcaccagggaagcaagcagctgagcattgggaaaatgcatctagtttctctcttatcaaattttcagttgtgcttgtacttggaaacattgtatctccttttgttatgaattgctgaaagcagacaaatacatcaaattttccacttgcctcgtgctcagagaaagaggattctgttatggcaaataaatacagaaatatagcatataccttttagattcgggtcctcatttgacttactcgttcactgtgatcacctcagtttctttgtgtttcaggcacctcagaggtagctcctgccacaacggttgccccaggaagtttcagcacagcagccacaacttctcctggagcaagtggaatgactggggttacaacaactacaaagaccacaacttccctaggaggaagtggcaccactggagcaaaaataaaattaggtaaagactttggagtatttgtatttattgttgttctttgatcgatttcttagagaaaaatttttaatgagctttttatttgaaaataaatttaaattacagaaaattatcatagataatgcagagaatctttttaatgtggaatgtgggtttaaatttcctttgaggctgtaatatttcaagaaaacagagtttgttcttggatttggacttgtaaactcttgagaccaaaatttctaaagtctttcccttctgagagactaacctcagggttctaggtctctggagaggagacttgcaataatagctctggttttgaaaaggttttccctttgaaaagggcatagtctgtatgccattagtgtactgatttctacaatgtagaaatcaccaagatgtcatattttagtttagagataaaaattcaaaattgtctttcttccttcttgttctttcttgttttctcctcttctttcttctccctttctcttttgattttcagtaggaaccaccactacagcaccagaaagtaggacaggtaaacttggggaaagcctttcatatgaccttcaactttgaacaaatcttggtaataatattcggggcaggaatattagccactgcgttacccttggctttgcaaaagcacacaataaaccggaagcctgttagtcctcatgtcagttataatttcaggaagtgtgctttcttgcttcaaagtcacaaatagacatactgttggccacatttttccaagggtcatgaaagagttcccatatccatctttctcttttcttttctaccttggcacagctggagtgccctctggtacaagagtcacccctgggagctccaactcaggtaaagcaccaggctgggaggaaccactgcttggaaagtgctcctcagtgaggtgtctgcctgggtgaccctaccgtactcttctcagattcttctaatctttgccctcactgccattctttttccctgttttgcagaggccacaacttctgtagaagaaagcagaataacaagagccgaagtaatcacagaggccacaactttctcaggaggcagcggggccacctgagcaggattacccagaggtaccactggagaattttctggaacgaactttatatctggaagttctaacacaggtagcttaacaagaagtaaatttttatttaatgtcagctgtcatatttcttttatggcttctatggtaaagtaatatcccaatatcttcttccagtattctaaattcccagcctttttcattctcctctttcttccatcagaggccaccacttccacagaagggacaggtacttctggaactggattcaaaattggtgagaagaagcaacccatgatgtggcatcataattattaggtctctcaagcttttcttgagagagtttgtgtttattttatttagggacaatgcaagtgattcaaaatagatttgctggtggagatacttttttttaaatctactaattttaaaatggagcattactgttccatttccgaggatgggatggaatttctccatttgtgttacaactattgctagcagtttaggtggaattcagaaagttttcagtgtgtgtatgtgaaacagaaaagagccccatggacccaggacacatgcatttataagtgtatatgtgaacaaaaatgccggctcagtattttctttcttatgtctcaagttttaatacatttaaacccttttttccctcttctttctacctcacagcaggcatcacttctgccccagggaaacaagcaggcacctctggggtatctcttgccacaacagttgcccctggaagcttcagcacagccacaacttcttctggagcaagtggaataactagggctggccccaactcagagaccacaacttccctaggaggaagtggtaccactggagcagaaataaaatcagctgcagtgccctctggtacaacagttgcccctgggagctccaactcagaagccacaacttctgtaggagaaaatggaaaaacaagaggtgaaataatcacagatactactgagggcacctctggcaaagttctggaacctggaagtgcccacacaggtcaggaattctgaacatggccccttaagcaatatcagctttgggaaacccagaatgtcctgtccagtctttatacctccaattcctccctctctcagaggccacaactttcccaggaggcagtgggactacccgagcaggaccaccaggaggtgagcttgtcaggctgaggcctggggctctcatcatctctctatctgggtggctgcagtgaacagtaatgaacagtaatgcagtgaaagtcttttgagggagggtcctgcattttctctgtggccacagtgtgtcatatcaacctggtcagttattctgcttgtgaattcatgacctcagatgtctcagccaggctgccttcagtgtcctggcttatggaaacgatttttttctgatatgaagtatgagcgtatattgcatatattccaactttccaggacttccaactctccttacccagttttcctttccacccacagtttgagacattttctatcatttttctcctttacttacacatgatatttctcccctcctacaaaacttagtgaaaacaactgattattaaaatcctccaagttgtatcaaagagtcctacttataaatatagaagtgtgctttgtttctcccgtaggcacctctgtcacaccagggggctatgctcctggaagggaaataggtcagggtgatttaagccttattcgtcccttccctcatagagaaagggaaacccagtagcaacacacacggcccaggttggcctggaaaatcaagtacttggagactgttcattttccattctctacagggatacagtgtcctcaggaaagggcttccagtactttagggccacacatggatgcttccaagcttaactggggagataatgatctattgctccatttcccttttttggcattttaggtaccactggagaattgtctagaatgaccattatacctggaagttctaacacaggtagcttaacaggaagggaatgcatcttatttaatgtcagatgtcatgatatctcttttagggatgctattataaagtaataccccaatatcctctgtagtattccaattcccagatgtcactattctcctactttttttcctcagaggccacaacttccacaaaagggactggtacttctggaactggcttcaaaactggcacctcttgggtggcgcctggcacaacagtttcccctggaagtttcagcacagccacaatttcccctggagcaagtagaacgactggggctgcacctgccgcagaaaccacaacttccctagaaggaggtggcaccactggagcagaaataaaatcaggagccacctccggagtaccgggaagtaagacaggtaaacttggggaaagcctttcaaatgaccttcaacattgg

SEQ ID NO: 371 - DNA, 3428 bp, Homo Sapiens
agtgtttaatggcaggttgagtggtgtaaactggcagaaaatgagctgtgatatttctactttaagatgagaatgagaaacaacttatcttgataaaagcgtagaaattggtttcttcaggaagccttccctgcttctctagtttgaggtaagtagtcctttcatgtgttcattatgtcttgtgcttcctcttcctatcagtttatgataatataggaaattattagcctgcttaattctatcagaccaggtgccctgtaaattcacttgttgcattctcgggtacctgcatgggatctggtaagttgtgtgtactgcaagttcttgataaatgaataatgtcattcattgtttctaaataagcaggaatagtaaagacttcaagctattggccacttgactcatttagtcatgcttataaacctaagaattccacaaaaacttatggtttgaatgatttatagtttatttcctgaggatacagacatcattgtgcaagactgggacaatttgattcattgaatcttttacaaaagtttatataaattattcctggatgaattagtcatattattagtcagccatacaaaacaattgttttgaattctttaaggactgtatccaaattcattaagttttcatggtagaagcacattaatcaccaataccatcattttctgcactttctttaacttacttttatttctcacgtctccatgtcatattgttgttgcatttgtaataaactttgcagtaaagacaaccaccatacatttgtatctaatggctaatcttatattaggtgaacttgaaaatccttaaggaaaagttttttcttagtgtttgttagaaataaatatttaatggttttaaaggagtcttcctataaagaactctttgaggaactgtatatgtgtgtatatacctttacttaagttttaagttaatgaggcagtgtttttcctgaagagctagggatatggtatagaaagagtgtggctttttcttttcctgggggaagaaggcttgtagtaatattgtcatgatgttgctggtattgagttattgctgaataaagaataggtgtaaagcaagcatggacctgaatgcttgtcttttattaatgaaacagtaaattctttcattttgttgatgctacctgggcatataacccagacataaataatcacaaagcctaattttgagggtctaaacagaattgcatatcccatttgctttggtgcatcgattacaaagccagatgttaagaacagatgtcaatgagctatttttcatatgccatggttcacatttatgaactctccatttatcacctcagatggaaacggttaatttgacagtgagtgttttggttgttagccaatttcaacatgagtctttggtttttgaaatctgatgtacagagatgtgataaaacaattacaatagaagcactgttaacttgattttgtgccttagaatttaccaacatatataaagtaatggaaatgaatgttcccttttatggtgaatcaacataaatctaatgttggctaagaaataatgtaaatgttatgactgaaatacagagtggttaatccaattgtaaattccatataactgtaagtcagatccttgtagtgatgtatggtgtgatggcgtagtgggttttgcttatttcttctatttgattgtaacaatgatactcatcaaaaatatttcaggcaatgtttgtgctaaatatgtttttagaattggcttcaaaattttgctgtactatgggaaaattttcatattggtgaatactgtatttccaattgtctattagctatgttgatataatacatatttaaaagcagccatctactatattctactaggaaacttaaataacggaaaaaaggaaaaataatatttttatttttaaatgtgtggacagttatctggaatattaaactctttagtatatactatatttttatattttttcagcaactttgtgagatatatcactatttttattttattgttcccaagtctggaaagggatagaagtgggacttaaaggttattttttctctctgttttctattctagttttctttctactacatttcattccctctctttgaattcagaactcaaaaaataatagttactttaatccaaagtttaaagaatggattaaattctaacctaggagatctgattatgttgcaaacaatataagctcttttcatatctttaaataaactgatgactttgataagtataacagaagttggcttaaatggtttatgcttaatcaacttctgtattaatggaagccctccattttctctgtaaacaggctgattataaaacatagcaccttgaaacctttgcatctctgctcctaccactttaattgtatgctgaaagtgagtcagtagggtaatttcaaaaccctacacaaattatatctgtgatattaatgaaatttaattgaatattgcatgtatcagtgaaagatgaaagtgaatgagaaaataattatatctatgaaaactgagtgacatagtttgaaagatacagataaaggttaattgaaataatattaactgaaaatgtacaagattgttggaagaggattatgaagtgctaaaaaccttctgcatttaaattgccttgcaattatttttataattcccagtttctctctaaagaaatccaaactgtcaataatagattgtacacattgctcatagacgatgtaagaaaaatgataaaaaatgcaaagagtagctccattcttcaagaaacagccttactcctacaatggaaaatgagcaagaatttctatattttaagttaaaattaaatgtttgtcatggttatatcactttttaaaataatttccagatttgacatccttttacgatgatcttaaccaatgactgatttcaaatgtgtcagatatgagggattctgttgtttttaaataactaatatctgttgcctaatccagtgtccaagtcacagtgaaggttgttcatagggccaatcaaaggctagagatccatcatgtgaaatctgccaactctggaatctgaattgctcatggtgggcaaggaagaggcaggaatataagtgtgatgggaagagacataatagcacctcacagcacatagaaatggtgagtttttcagggatctgaagtagtatcctggttcagagaagttctttctgtgcattgaagtttgagctgtttgttacaggagtggaagaagcaggtaatgcagggacattttagtatgagattccatcctcagaccttaaagggaagtggatggatgtggtgtgcagaaggatgaatggcctcaaagtaattatgccagtggggattccagtttcactcttacaaatgtgtgtgtgtgtgtgtgtgtgtg

SEQ ID NO: 372 - DNA, 2464 bp, Homo Sapiens
atttatttcaaatcgtagtcataatatttggctgttgtaaatagacactgattttgtgtgtttgctttttttaaggactaatgttgctggacaggcaggtattagagacagggtggatctgctggacaggcaggtagtatagacagggtggatctgctggccagccaggtagtatagatagcgtggatctactggccaggcaggtagtgtagacagggtggatctgctgggcaggcaggtagtgtagacagggtggacctgctggacaagcaggcagtgtagacagagtggatctgccggccaggcaggtagtgtagatagcatggatctactggccaggcaggtagtgtagacagggtggatctgttgggtaggcaggtagtgtagacaggatggatctgctggacaggcaggtagtatagacagagtggatctgctggacaggccggtagtatagacagggcggatgtgctggccaggcaggtagtatagaaagggcgggtctgctggacaggcaggtagtgtagacagggtggatctgctgggcaggcaggtagtgtagacaaggtggacctgcaggataggcaggtagtatagacagggtgcatctgctcgacagttaggtagtatagacagggtggatctgctggacaggcaggtagtgtagatagtgtggatctactggccaggtaggtagtgtagacagggtggacctgcttgacaggcaggtagtatagacagagtggatctgctggccatacaggtagagtagatagcgtgaatctactggccaggcaggtagtatggacagggtggatctgctgggcaggcaggtagtgtagacagggtggatctgctggccaggcaggtagtacagacagggcggatctgctgggcaggcaggtagtgtagatagggtggacctgctgggcaagcaggtagtgtagacagggtggatctgctcgccaggcaggtagtgtagatagcgtggatctgctggccaggcagttagtatagacagggtggatctgctgagcaggcaggtagtgtagacagggtagatctgctggataggcaggtagtatagacagggtggatctgctggacaggcaggtagtgtagatagggtggacatgctggacaggcagctagtgtagacagggtggatctgctggacaagcaggtagtgtagacatggcgcatcttctgggcaggcaggtagtgtagacagggtggatctgctggccagtcaggtagtatagacagggtggatctgctggccaggcaggtagtatagacagggtggatctgctggccagggaggtagtatagacagggtgggtctactggacagggaggtagtatagacagcgtggatctgctagccaggcaggtagtgtagatagcgtgcattactggcaaggaaggtagtgtagacagggtggatcttctggccaggcaggtagtgtagacagggtggatctactcggcagggaggtagtgtagacagggtggacctgctggatgggcaggtagtatagacagggtggatctgctagacaggcaggtagtatagacagggtggatctgctggataggcaggtagtgtagacagggtggatctgctggacagccaggtagtgtagacagagtggatttgctggacaggcaggtagtgtagacagggtggacctgctggacaagcaggtagagtagacagggtggatctgctcgctaggtaggtagtgaagacagggtggatctgctgggcaggtaggtagtgtagacagggtagatatgctggataggcaggtagtatagacagggtggatcttctggagaggcaggtagtgtagacagggtggacctgctggacaagcatgtagtgtagacagggtggatctggtaagtcaggtagtgtagatagcgtggatctgctggccaggcaggtagagtagagagggtcaatctgccggacaggaaggtagtaaagagagggtggatcagttggataggcaggtagtggagatagcatggatctactggccaggcaggtagtgtagacagcttggatctgctggcaggcacgtagtgtagacagggtggacctgctggacaagcagttagtgtagactgggtgaatctgctggccagggaggtagtgtagataccgtggatctactggccaggcaggtagtgtagacagtgtggatcttctgggcaagcaggtagtgtagacagcgtggacctgctggataggcaggtagtatagacagggtggattggctcgaaaggcaggtagtatagacagggtggctctgctggacaggaagggaatgtagatagcgtggatctactggccaggcaagtagtatagacagggtggatctgctcgacagagggaggtgtcacaccccaggtggggctgagtgggacggcatgagacttcatcaagctactcaga

SEQ ID NO: 373 - DNA, 4900 bp, Homo Sapiens
cctcttttcctcctccagtgtcctctcctccactggacccacccatcagtctcaccaagccctctgccctcgccgtcttacctcattttccctctggccactaagggctgtcatcttcacaagcagaaagagcgatgcagagggagaggaaggccacaggtgagagctcctcctcgtggatcgtggctatcggcgccccagagacgccaggcacccccccgggcccagaggatttgctctgtccggaaaggggcgcagtggagaccggcgcagagttctcttccaagtcgggttccaattaactcaacgagtattggatctccggtggtccagggacttggcttcctccatttgcagaaagtccagtgacccagccttaacagtgtgcatccttcgatagctcagctggtagagcggaggactgtagactgcggaaacgtttgtggacatccttaggtcgctggttcaattccggctcgaaggaagcgcctgactcttttgcgcacaatgctgcctggctgcacctgttcctcgtcaaagaccttgcagccttccagtcataactacactttccccaggaaaacccagcaaaatcctgcctttcctgatcacaggcctgggagcctattcattcttcccgaatcctcatagtcttcagctcaaaacagtgccccttgccttgtgacccagccagaccccaattcgtgcccccaccatcctacgcctttccacttgtatttacaaactgcccacccatccccctgtcccagacccgtcaagcttcatctttcctgagctttcacaagtttttatgttgctacagccaagtttggctactgctggaaaagtaaggatatctaatactcagttcaaagtctgcaaaaacacctgcaccaagtgccctgcctacttgggagggtaagggaaagggaaagcgagtaccaaagaagtgcagacttcaaaacagcttcagtgatcctggagagttaggggctattgggtccatggcagggagcagacgtaaagcttgagtgacagctgcctttatacagaggcacgtggatttgcctccttagacaggccactgcctcgtgggtctaagcagttcggagcgtttgctctgggacctagaggcacagttgggttctcctactcccaagaaaaatgtgctgaggcccagtcagagagaatggagtcagaaatggactgggctttatcaatcaagtgaagcttcaactctggggagttggagtgggtttggtggatatgtggcagagaagaaagccaatgagcatcctttggtctcatcacataatcttggaaaaagcttcccgatgtttgatgtaaagatgcaacctatcagagagtactccaaactgaatggcccaggaaagcatggccttctgaagcctgcttaggactggcttgccccatctactacctgctgggtccacatgaactgtttaattgtgcctctcaaactggatactgcacatattactgcacatatctttttcacatggaaagcagctcctggtatcccgccaccgcctattctcccccacgtcaccccgactgtgtcaacctttcttctttggtgtcaccagtgctctgggatgcttctatggctctggaggcacagagagaccccagctccaatgacaccaaaggcaaagaccagctaacaaagagggaccaaaggtagcacctcaggccttcattggatatattcctgatggggcgtggagtcaccagagcccttggaacctttgctcagtgctttggggaaaaaccagagaaacccacagaactttgccctacttcagaaatcagcagcttctgattggaattctcagcctgtttgcagaagagggtatctcacatgtgcctctgcaagcctgggagagatttcctcacctcacttcccagtgcacctcaatgcaccaaaatgtgagcatagactactatgaggagaagggcggggcacctggggaggagggccctgtgtgtgtggtaggggagggagtagagaggccagactattatggaagcgcccattagagacctgcaccagactctgaggttgggttggagttgtcagctgcctatccagcgcccattagggttctcctcttttcctcctccagcgttctctccccgactagacccacccaaccacctcgccaatccctgtgccctcgctgactcaccttctcattttctctcaggccactgggggctgtcatcctcacctgtagaaaggtggatgctcagggagaggaaggctgtcacagatgagagctcctcctcgtggatggtggctatcagagcccgagagacaccaggcatcctcgcccagaggatttgctccgccctgaaaggggtgtggtgtcaagcggcgcagggttctcttccaaggtgggtgccaaccaacccaacgcgtattggacctcaagcattccagggatgtggctccctctgtttgcagaaagtccaatgaaccagctttgatagcatgcatccttcgatagctcagctggtagagcggaggactgtagattgtatagacatttgcggacatccttaggtcgctggttcgattccagctcgaaggaagtgcgtgatgcttttggttaaaagccctgcagcttccaagtagtaaccacactctcccgggcaaaacacccacgaagtctttcctgatcacctagcttcccacgccttgcttctactttgtgaccccactaatccctctattcatgctgaccactacttccccaccctgtgctccttcgcttttcttcacagactgctctcgagcttgagcatctccactggctgtgacaaaaccgctgtgctcacctttgacagagctctcctgaccaggtgggcaaagcctggaaggtcaagttccctggagaacgtcaagcttacttgacaagggtgtaaagtggggataaccgtggtatcttccgtgaaaactcaccctctcactctcatccatctcaggctctttatcactgcattgagatctgacagtctcatgtttgtctctgtctcattctctttctctctttcaccgtttctctgtctctgtatatttctctttgtctctgtgtctctgcctccctatctctcttccctgagccctcagcctgcccctctcattctccttggctggaaatgtatagacctatacaggcgtaaagaaaatgttcattcccactttgctgtgtctactttggggagacagctgtcaccctgagaatttcctaatcctaagaacttccattagcaaggtcaggttgccctttaggttgaggacaaggtgagtctatcccctatccccatagcttttcccaaatccctcaagcctcactttttctgagccttcacaacttttcatgctgctacagcggagtttggcccctgctagaaaagaaaggacctaatattcagttcaaagccagcaaaaacacctgtgttgagtgccctgctacttgagagggtaagggagatggaaggggagtacaaaagtgcaggctggaaaagagcttcagtgatcctggagagttagaggctgttgggtccatggcagggagcagaagtaaagcttgagtgacagctgtcattatacagaggcacacgaattcgctgccttaggccactgcctggtgggtctgagcagtttggagctttgggactagaggcacagttggactctaccctcaccccaaaggaaaaagtgctgaggcctaatcagagagaatgaagtaggaaatggacttaggttttctccaacgaacaggggttacacctccagggagatggagtgggttctgtgggtatggggcagagaagaaagccaacaagcgttccttggtctcatctcaccatctcagaaaaaatctccagagatttgatgcgcacatgcaacctatcacagagagcactccaagccaaatggcccatgggaacgtggccctctgaaaccctctggggactgggacacctgcctccactacctgctgtggccacaagagctgtttcattgcaggtctcaaactgaagactacacaggtctttcttgggaagcagctcctgatctccctccacctccctatttcccccaatgttcccctggctttgtcagcctttcctgcttctcattgctaacagaaggaggccaagctgtggcatcgccagtgcccaggatgattctatggctttggagccacagagagatccctgcctccaatgacaccaaaggcagaggctagcgaacacagacgaaatgtagtacctttgtcccttattggataagttcatgatgggatatagagacccccaggttcttcggaacctctgtttagtgttttggtgggaaaatcagaggtgagccagtgaatgggctttggtggccagcacaagcaaggttgaaacctgggtaccaactcttcctgtttgagccatgacagagtagctgggttctgtgagcatctgacccttgccctcagagatccagacccacttgccataagacagggagtggacttaaactcaatggtggccaggttccttggatgtggcttgctgcacctccagtaggtgttcagctggggggtgggtgtcccagtggtcttggggtagtggtgttgcgggaagtcagggaccccaaacagagggaccggctgaagccatgagagaagaatgtggattgtgaagattttatggacatttattagttccccaaattaatacttttgtaatttcttgtgccttggacacttatcacttccccaatcaatacccttgtgatttcctatgcctctctttactttaatctcttaatcctgtcagttgaggaggatgtatattgtctcaggaccctgtaataatt

SEQ ID NO: 374 - DNA, 15844 bp, Homo Sapiens
agcttctgcccgcgcggagataaacaagcaccgcgaccgccgagcagcgccgaacccagcgcgcccagtcagaccccagggcctgtgtaccgagcatgcgcagttcccgcccaagccaggagcagcgtcaacctgagactcccgagacattaagaattcggaagggatgagatggtagaggggctagagctacctccaagctttatcctgaggcggggagtgaaggagagatgcccaaggcccaagaggggccgcgagggcctttgtccgatgccacccagtctgtcagcactcctagagctttggttttatcttgtattagcatgtgaagctttaaggggggggcacctacaggcttctgactgaagttgtgtaaacgcaacaaaatgaagctttggagcgttaggacattgatgggagggtgacgcccccctctagcagcgcgccagaggggcgagtcagaggcggccacacaccacggaagtcgggtccaagcccgctgacgtcgccggggtcccgcccaccaaccctctggacccgcccacatttcttctagacccgcccctttcggtgccgaactgaagtcgagctcttcccacgccctgtcagccacgggtgagttgaaaacctggagagcggaatcccgaacggcagccggaaggccctggactcctcatagcaacagccagctaggggcatctagtgggaagctgggattcattctagccaaccacatcacgtctctgtaccacaaggtaccattcacgaccaataagagagcgcccccataccacgtgcctttactccttcaaccaatcgagaaaaacgctagtcgtaggatccgcaagcccacctcccagtgccttgccaggcggggctcttcgcgcacgctctgccaaccaatcgtaggtgagctggcgagtgacggaagcttcggccaagccaaccagagctcgcgagccccttgccaccgaggccggcgggatggagacagggaccggctgctggggtttgggaggggcagagattgaggagccagttgctgtgccctgttctggcaaaagaacaagatgcgttgcaagccagaatgatgaattccacttttcacgtcgcctccgtggcattctgcctaaatgatgggcatggaaatggtgctgagggatgtgggctgaatcgagaacacagggacttttgtcttcagggtgagaaatgttccggtccttaaggaaacatcgtgcagcagttgcatgggtcttccaggcgttcctcccaaaacattattttttttctttcactattgagttttaaaacttagcgttctgtcgctagcattgcatcttagttacacatcctctcccacccataacgtcaaatttaggagacgatacatccccaagctttcctgcattattttttgcagtaactggttattcagtttactttctttaaactatgtccttctcaaactagtctcacctgttcgttactgtcgcacatttcctgcgaataacacgtttctgtagttctgttgttagagcctggcatacctctccccgttcctctttcccacaaggtcatcatgcagaggggattttggtctgagttaaaagccaggtattctttcaccatcttttctgtcgatagtcaaactactacaaagactactcaaatttagtagtttcttatttccctatagcttcgttatattagaatggataacttatatttgcattaccttgctgtaatgaacacacaccaagttttcatttaaaattatcaaggacaaatgtcctctgaatttaaaaatgtgtatgtagtaaaatataactcagcatttcttgattacatatcattaaaatatgaatggtactatctgagccaccagaatcagcagtgaaggtattatattaataaaaaggactaagaatcaggactgttttaagggaactggaaccgaagaggatctactatttcatcctaggctagttaacatgaaatagtgaattaaaattgaaagagcttacatggatgcttcatatctgagctactttggcagggatgtttcaagaggatgtaggtccctagatgttgagaagctctggattgaagctgtcacaaaaatagtgagtgggctccgtagtcactccatttagcataatacagagtaggacagctttgtgacatttctcaggctatttcccctgacctctcatcaatgctgacgtttttgataagaaggggtatagagactgcagcccttggggtggttacagttcatttatttacaggccttatattgacaggcctcagatttcatgctcagtaccataaaggttgatttttaaccaccaagaggcaaaagaaacatgacaggtcggagcatattttctcacctattctggcttaaatgatggtacttacctgatttgtggttgtaggtgaaatgttgggtgaaagattagctgctataaaaaggatgtcaggacgtgtagagaatttagaggacttgggtgggagatggatgtctattttctaaccccttagtcatgttcattccgatgccagcataaactctattttgagatgattatagaaataacttatatcttcatttgtttgtgggaaataaaaaataaaaatgatataaaagaaatttgaattattcccaagagctgtaaatctgtaagatagtgaaaacttaacgcagtaactgacactgcaggatccctttagtttccaaagtgcattgccaggagaataaaaagaaagaaaatcttcatttctcctctctccactaaatctgaaagggagttatctcacctatagccagataccttcaattatcgcacttgtgttaccgtggaaacccaagtccatcctttctttctgtaaaaggtgttggaaaaggtggtatgaagtgggaaaggtactgtattctgggacttcctgacaccagcaagaagcaaatatgcagataatttaatagaaacaaattagtagaggatgtttgtaatgcgaggggtacttttcgactgtaaaaccctgattcctaatgcttcttattaaagcctgcatgcctctgattaaacataaaggggaagggcatgtcaagtacatttagcacctgtgaaacgctgctggcaagtataaggagagcagacgatggtttcttgacctgtgaggctcctaatacagttgagaatctgcagtatatatgtggagtggaaaggaaggggcaaaataaactttgttcttcctttaaaaaatgtgatatgtctcagtgcttttgaaaagaaaaggaattagaatgcagaaattaagagtatggaaacaactcaataaaagaaacgtatgggtggagagagtagatgtttcaaaaggccattttaatcagaaaaaaaatctgaaagaaaagacgtaatgattaaaatgtaggcagaaaaaagaaaaagcctgaagaatcttaagagctagaggattctgcggaaaacagagcttcagtgtggttcatttaacaaagcagaagagcaggcacagtgttgcttgcgtacccagcagtttccctttatttttgccaaagaagctgggatgaatcaggattggactttaatagcattgctttccctctgcccacggttagtccaaaagtaggcacgtgactcagttcttgtcattggaatggggagaaggctgctagggctggagggatttctaggatattgacaagagtgaggaaatatccccgttttctgatgtcgctctctttgcttcctgctttacacattgaaatatgagaatgtggcctccatttgggggctatgatgcattatgacattatggtgcaatactgtagaaagccagcaacttcggatggccagggaggaggatgggaagaacctaggtcctgcatgacaacattggacagtcaaaccaacattagaactgcccacatttggacttatggctaagtaaacagctggtgtctttcaatttaagtgtgtgttggtaaggttttctgcatcttacagcaaaatacatcccacctgttaacaaaaagtatgagggattccagccaaaatcgggctttaaaaaatcagcaagcatttgtgagcactttcatttcactaatatctgaacgatagttcaaagatactataatattaattgagtaattactgtgtatattttttaggctctggggataaaacaataagcaattagccaaaagagcttgtattctagcaggagagacagatattaagcaaccaattacatgtttatattataaaataatggttatgcttaaaactaataaggaaaaatcaggaattagaaagggtatatagtaattatataaataataaaatattacaaaatatataactaaataactgaatgaaattacaaaaacaaacactttccaagtaaatgagaatgaaatgtatagtttttactgacattcccagaggtcgagagaaacagtaaattggagtaggttagtccaggagagttgtctgaagcaaattaatattgtatcaggttttgaaggaagtggcgaaaggacaggctagatggggcagaagagagcactctagatgtaaggaaccagaagagcaaaggaagaaagcaggaatgaagtaagagtgaatgagggaaataccagaatcacttgattttttaaattccctgtagcaacagcattctaggggcatctctcagagaaaaagacagaaagatgccagaagtctcaaagcaagattatttaaaggtataaaaataatataggagaaaaatacagaagacaaagtaggagtacaagagtgcatttgaaattaaggcgtcattcaaaataatgaataatttataatgtgggcgtcaaaagagttgtcataagaagtaattatggatttaagggcatcaagaaggagggattcaaactttcacaaatagaaatagaaggaaacatgaggagtggcaaaaaatgaagacaggtagaaaaacagtttttgcttgttatttttccatgatagctgttattgacatgcattatgtagaaatgaatggaatttgtttgaaaagaaaaatttcaatagagcagtaatacataaaggtaggctttttggtaaatagtgtaatttaaaatgttttcactagaatgcctttttgtaccttcctgtaggaaaatcttttcaacaaaaaaagctgtaagtcataataagttacagattagcaaagcatttttgaaataaaaaaaaacccatagatgtgccaaatgtaatagtagagcaacaataataaatatttgtaataaaaatcagaacttgttaggcattatgtggtttctggtcaaatatggttgtactaatttttctaatgctattttctgtacaaatataagaattttttaaattaagctatggtaggtatatgaacacatcttgatattactggaggtaggatttaccactcactttttgtgaccccaagtgtaaccctgaacagacttctgtcttaacaccaataacacatgattgcactgtcttctccagtgactggggaaagggacagtgctttgttcatttttgctttaccagcattcagcacatcgcctaaaaacaattgtgggaattcataaaatgtttgtaaataaatgagcaattgagtggactataatgttgcttctaaaaaccctgggttttgaacacagagaagatgagaataaaaggaaaggaataaggattttccccaaatcaaggtgaggttgatgtaaatgtcctccaaagttggtctaatctccaaagaagcttgtatctcaaaaacagtaagtctccaacaggcaaagtcaatggcagtttgtagacctggaatttaggagtgccaggaaagatctgaaaaatcatgtcttctatcaactgactgttgtctgaaattctgcacttaggttttagtcttttgatgtaaaagttatttttttccaattaaaatgtaagtaggagatatacagttaaattgtaccatcagtctgtcaacttcggggcatgcaactatgcttacctggatgaaaaagaaaatgaagaaagtaaaatagaagaacgtagtttaaattgggggataagtcatggcatgagtatgtgcccagagcgagtataagaaggccatggaaatccactgtatttttgtcatacacttattaatttgtttcaataaggttaatcactccacatggtgtaacaagaaaaataacagcctttacaattactagattcttaaacttatttcaaatactttttaatttttatgagattataagaattttttaaactttgaagctgcatgccttgtctgattccttccatttctcttctgcttctcacattattgtgttcagcaatggtttggaggcatcttggggaagacagagcagagttatggtgtaaggaccatccaactcttctcagcagccatccagttatcttgtcaagggaagttactcatcctgctctctagaattatctcctcaaaaatcggtttcctgcttttcacagaacagtacaccatcttttactattatcctaattaatgcttctcacacagccttacaaaatattagtcacttaattattaaccacattcattgggctgcactagttgaaaaagatgtcttgtttacttagtcaaagcgctgtctctgtgcaatggcattgatggtgaaattgatcagagtctacgtttgaatgagagaagctgagggagacatttcagaaatagtaagcctttttatttccttggtgtaccaggtagtcaaggaaagttaaagtatttttttatactttgtcttgattacattcttttggggactggtctctggtgttaggtttttaataaagattttggccattttccatgcaaactaatgtttccaatgaaaagatacaacattgcatgtaaattacctaagaaatattaatctgtcaatgtaattaaattatataagcaacaattagtttcaaagctggaatggattaagtcagttctatactgcacactgacaaagtgaaaggaactaaaatggacaaattgtggtgctgtaaggttatgattcttaagatttttatattaaagttgcagagtttcaaagtgctcagtgctgctctttacattagggctgtagactctcttaagcccgaggattctatctggatatgtgattgatagggtggaggctgggctgaggcttagtaagacatttaaccatgctttgtataatactccttaaatgttggctctcacaaacatagaaatagcgaacattaactagctctctgtttcaatgtctaccatctacctgtcaacttaaaatcatgaaatctataaatttggagaggagagctttatttcttaccaagagttgcagccagcagggtggccatcctaactggctgggaagtgtaacctcaggcagagaccaaaagcaagttattcaagggaggatgagataggaatttatgctgaatggattggccaagtatatttatttaacagattgtaggaggagctatacatatccatgaagagggggcatgtgcatgaatagtaagcaaacatggatgttacatgcatcccttgttcactttggggtgcagacttcacatttaaatgcattccaattaagccctatatgtcaaaaggtgaagcagggacaggaaggcactcagtgctcagcctctgtaaaccagacagaaccagaagatggtcagtggtctcttatcaggagaaagttactgaaatcagtcttttatccaatcaaagctgtagctgtggcttgtggaacagaggggtcagttagtcagcatctggtgctcagtgagctacgattgtttcaatactgcttatcttgaggccagtgcttgtttagctgctagagaataagaaaaacctgtggcaattagagcatagtttattctataagggtaggggtacgtgacttcagctttttctggcatggccttaggtctcatttattatttggtactttattgccacaaggagtctgttccattagtcttatgatctctattttaacatatctattttgtttttttcctccacttgattccagaaggactaaagtacatttcataaatacatacaagataaataaaaataagaaaaccttcaataaaaatgatctatattaatacatttccagttttagggtcaaatagattgtttcaagaaaccttaacattatctattcaaaataagttttttcagaaactgtgttgcacattggtgtacatctctttaaatagatttcaccttggcattcacactttgtctggctctgtgtgtgttagggttggggtagggggagcattgttaatgcccaaatccttcccaagtctcatcagtgaatagtctgggggaaggagggttgggaatgtgtatattgaacaaaatcctctaaatgattctgacttgcctctgggttgaaaatcaatttaacaatactatgtgttttctgaagtaaaagtcacacttaaagtaactggtgatcttggaaatttttaccaaggatactgactaatgagatggcctaccccaaatccagaatttaacttaaattccacctccccctgttttccttaaactaatctctcaccatattttccaaaaatgttatacttttcttctcatatgtactgcaatttgtcttgcattgtatttatctttgtgatttcagctagtatatggactcatggatgtctgatggggaggagggtggagaatctataagttttttcatctttctaatctttattatgctttagtcaatagtatatattcaataaatgctgaatgaattggattaaatataaaacattaaatgttatgaaaagtatgcttaattttcaaattatcaaatgattctctctattgaagggaaatcaatggtgtttttcaactttgaactgaaactctaaactatatgaaatcataacaatgtgaaattttaaacagtattattcttcataaaacagtaatataggctttaattcacaagaactgcaatggggtctcatcctttaagcagtcatttttaatgttctaaccaaatccttatactaaaacagaaacaactgctgaatgtgataaagtaatggaaaatatagaaaaactcccattttctctatctcattgtgtgtgaaatcattcttaaaaagaatcacttccacttctatttgaatcaaaaatagccaatagggcaattctaactggttaaaaaaaaaaaaaaaaccaacgagaataaaacaaatcaccaaggcaaacgagttttaaaagatatgagtcatcaaggttaaaaaaaattagaaaaatatataaaaacttacacatgtccttgatatagttttgtcttgtgtccccttaaaatttcagtagcttttcttgttgcttagaaatcaaggacatctgattggcaggactttgacaagctgcctaaaggaaactatgatgttttcagtccccatattaaagacccccttttacattccagctgagggctggtataggcaggataggaaagcttacagatggtgggaggcacagaaccttcataggggctgaggcaagaatatccagaagacaggagagagaatgaaagatgccagccgcctcattgtgagttcacagtggctgccttggtcgggagcttttggcatggttctcatgaattacacaatctaatctacttctgtacagaagattttagaggcacagttgagtgtgctaaaatggcattactacctactcagaacatgatgcttctgtgtgcccatatgcccaacttattttcaaatgtatttgagaaaaatagaaaataggcattcttagtactagagacatacaataaaaatgcgcatgactctatccatttgtaggtttcttgggagttttatcaggctccaggggacccatgtttgtagcacatgagttctctggtcgtagatcgttgatgtggtcattggcacacggtgcctagctcatgagccagtaagatttgtttcctcctaggaatttagaactggagtccagagggtggggctgggcatttgaactaggaagtaaggaaagccacactgggaaagcctttgatgggctgtgtgtacaactcagcggaaatgccaatatacagagaaatgtcaaagaataaagtcgattcttagagaagtagtgatggctcacttagttcctgagagctttcctactcatgaggagatccaattgcattttctaccattggcattgagatccccgcctctaccccaacattacactaaattttcctttaagttagtatcagtggttttctggttttctattacaaccagaaggttcctgaaaaagacaaaattatcctgttagatcatgttctcttatatctctgttagaagtacattggaaatgaacagcattctattgtcagtttgtcagcattaattataaagtatggcccaataatttttcagaacctaattgcatatagctgatgacagtggcttctggagctgttttatgatagtgttagttagagagtcctgccagattccctggaggagatagtttgtcctttctgtaatgttggaaataatgtctctcgtgcaggtttaataacaagatgcagtgcaaaagctccaggcactagccaggtcatgtgacatgaggcttgggatcagcttatctcacaaacccagacatagaaccccgtgccagccccacaacaagtggacaatccaggaggatttgagtatttcctcagctattcaacaaatacagagaggtggtttgcttcaataacaataaatagttatttattgttgtccttatgcaacaacaattctccagttgtcatctggagaaactgaaaagtaatatgaaatcatctagttcctctttaagacagtacttgggatcctgtgaatgcaaggatttccttattgtcctacctgcagggaggggcattcagggcttctggatcatagcctcggtcacattttaaaacttgacataatgtctaaaatagctgtatttatattttaaattaacttgaaaatgaaactgctagaccatataatttacctactaaatttggacacttttgagagtaaaacgggatgctattaataataaaatgaaagcaggccttggaactgacccaggcaaactggatgatagtattaccctattcttaggttttgcattcttggtttgtgagtaactcacatattgggaagcccaacaatttttggcacggtttttgaccaaatcaaattttagccgccattttggagtatggcccacgatcccaccacgagtcactagctatagaaatgagcttctctagggcttcagcttcttcacctttacaattgaatgggtaactccaaatccctttcagcactgaatagtccgtaatcaatgacacatctatgaaagagttttactttttggagaaatttgtattattttgattcatattcaatataagatacagaatatgaatatccataaaagaatattatgaataaggtttgtacacattataaaatcatactgggcagcatggcgtagcaacaaacacctggactggaatctagccacttatttcctctgtgaatttgccgaggtttccaaaccatcctggatgcctaaactggaatactttcaactgtaaaatgggcgtaagaataacaactttttagtaatgttatgagaattaagtgatatgtagtgtgtgaaggtatcaaatatataccacataaatagatgtatatgatcattaaatactagttcctcttcctattagaaggttagtgtcattattgaatatttaggtcataaatgtgcactgcaccttcttataactaaagtaagaatattgccaatgagtttctctattcccaatattggcttttattgacacagagagcaattacgtcggatggaagcacatccatgattacaggcatcatcaaagtcaaacacacctggacccaaaagccctctttcttcttttagatatatgacattgggaggttacttaggcttacagagtctctcttcccttatctgcaacaatgaatgagataatgtgtatagatcacgtggcacaggtcctagtgtatattcaataatatgcattattgttactcattattgttaatatgggagaagagaaattaaaagtctccatttaaaggtgagagagatgtttccataagaagagcttatagtgcatgtggacttcagaagtgactataagtgaagaataatagttgagaaagcaaacccatgagcatgtcgtgggtttagcattatgctaaacagcagcattgtgctattcccactgagaataatgtctttcatggacattgtggaacgattatggactggtcatgatactatgactcctgagaattctaacaccttcagattcacagtagggctgcagatgtgttttacccatccagggctcctgacagtgaaatcaaaggcttggattgataaactctgcgaacaatgtgtattagtccgttttcacactggtgataaagacatacccaaaactgggcaatttacaaaggagagaagtttaatggacccactgttccacttggctggggaggcctcacaattatggtggaaggtgaaaggcacgtctcacaggtggcagatgagaaaagtgagagccaagtaaaaggggtttcctcttataaaaccattaggtctcatgagacttattcactaccacgagaacagtatgggggaaaccacccccatgattcaattatctctcactgtgtccctcccacaacatgagggaattgtgggaactataattcgagatgagatttgggcggggacacagccaaatcatatcacaatgttaagttgctcttaatcgttttattgatgaagtacaacaggttgattagtaatacaacagttttatctgagcctcacttatctgttttgtaaatgttattttggagaaagccactcctacaatttgtttataagaagtctagcatggagtattggtgatcacatttagagaattataactgtgatattaatgaagactgacaatgtggatgatgacgatccaattcatgtgcatcagaaaaaaaaaaatcacaacttgatttttctacctgctttgtttcaattaatcctaatttttagaaaacagacaaatgcaagacccagacaagggtctttgcttagtaaagatttggaattttctcatgccaagagatccttttctgaggccttttccaattgaatccaaagtttgccatccaattcttccagaggagaggggtctagatttagtagagtattattattattattattttgccaacttctagtctctccttcatgtatttgacagctccttaaagtttctggctatagcccagccctccagctccctgactgagatgggacctatcggaagcatgttggtgttaaaatcccaacttgcctccattcctcaagccctggacttaaattggggtcctctggccctgtggatagccttaacctcactacctaatttccactccaggtttgaatttcttctctgtttctgtatctagtgagttcccattctatcttccaatcccggctttaatgtaattatatttgctatatgttgttcaataattacaagtgtttggaatggggccaagggccctttctcagcagtttagtctccagattttggtataagtgaagattagacttctcctgatcttcacatctttcagaatgccatttctaatttttttcatgaacagaattaacagaggaaaccagagccagtatctaaaatctcaaagtccatcactatatagcagcgccaggatctaaaaatctcagagtccattatatattgtgatatagtccatcacaatattttgggaaaacaaaataaaacagtctcctaccctaaaatacttagtatcttgaattaaaaccaccaaccttaaaccctgatggcagtgaaactgcgaattttaaactttgccaaggagctggggttatttgttttactgggaataatcacaacgggtcaggtagtatttgtggagggttcacttttgagtaggagtacgggggtcaccacaagaagttctgtccacatcaactcaacccttgaaggacatggagcatgcatcaggatgcagatgtatgcttgcctttatggtgtgcaagttcctatcagtgagccacactgttctcagatcctcagtgtccacagtgttttagcacgttttttatttggtaccctgaactataggactgggtaccttcacggtagcttcagtcaagatgtgattggtgtagaggcattcactgacctgtgtagggttttcctggatttgttttcctttgcagttttggatggctggttctcttgggatcagtgatgacaccaggcagtcagagtaaggctgtgctctggcagggactgatgaggcctggaggagcagggatgtgcacgactcacaatatcttttttctttttcctttttggcatttaaaaagcatcagattacattgtgaataaatccatattggaaggttatttaagtcattaagcaccagtctgccaaccacataagctgtatagtagcctctagcaggctgcttaaaggaaagcggcctgaagattgatccaggatgccaggacttgcatcctaaaagtcaggctctttgtattcttctgcctttactactgagggaaaggagtaggggaaaccaaggtagagtttcacgaacctccactttccccctcacatcagctctcagcaccaaagaggcaagttaggaaacaacacaagtgtccatcaacagactaaatggatgaacagaatgtactatatccacatagccgagtttcagccctagagaggaaggcaattctgacacatgctacaacatggatgaaccttgaggacattatgctatggtgaaataaactcatcacaaacaaacaaatactgtatgattccacttatataaaatatctagaacaggcaaattcataaatatagaaagtagaagacaccaggggctagggggagaagggaatgcggaattgttgttgaatgggtataaggattctgcttgagttgatgaaaaagatcaggagagggatgatggtgatggttgcacagcattgtgaatgtatttaatgctgctgaacttaaagccacttaaagtggcttctgtctgtaaaaccacagttcttaaaaaggcaagttgaggggattaccacttctggaaagatggagtggattcacttttctctatttctcactgagcacagctaaaacccctggacatgcatgatatgtagaacaaacagaagagtctaaaaggtggagaaaagaaaacaaagcctccagggaccttgagatccaataaatgacacaaatgtgagtttcctcggttttctttttgcttcatataacccagactgcgtgctgcagaagtctcccgcttggaaacacaccaataattgcaggcaaaaaaaaaaaaaaggccctgagtaaaaggcttgacattgaaggtgctggtttcttatttgttgagggaggggaggaggtggagctacaatagggtgactcgatctctaggcctagggagtagcccccagatcactgtggatgcaaacttgctggaaggatctcaaagacacccattgactcccctaaatttttcctttattcagattatgtaaaacttttgttttactctattcaggttaaat

SEQ ID NO: 375 - DNA, 630 bp, Homo Sapiens
ggctttggtcacagtgaccgccaccgttgcccggggatgggtccctgagacttggcgaagtaggagccctgtgtgatcgtgcgtcagagtcggggctgagaccagtcctggccagggcagttaccaggacggtctccggaggccgggatgcgcggaggctccaccagcaggaagaaacgccaggaggaagaaacctgagacagatcgccggggacgcagcgcgggatcccagcctcaggcttgcgcggacggtgtgcggtgaaaatacaatgagaaggcagctgtctgcaagccaggaagaacccttaccaagaattgaatctgctggcacctttaacttggacttgccagcctgcagaactgtgaaaaacaaatgtcttttgtgatcaagtgccaagatgacttactagaagcagctagtatgctccactctcgtgaaaaggaaatagactggccagtaaacactagcacttcaactggatcttccaagaggacatgttgggattcagcaaggaagcaacagaagccatggagaacaaaaacagcaagacacaacagccacccacccaggattgggtggagtcaggggaggatccttaccacaaagaaatagtgactgagagagagccc

SEQ ID NO: 376 - DNA, 1513 bp, Homo Sapiens
tgaaagaattaaaagtaaaaataaaacttgttagccttacagtcagaacatgtgggtaaataaatatgaaaagagcgaatagttaagctggcttaagaaagagatttaattgatagaaaaattaaacttttataggagagtctgggtaaatttaaccagtaagtaaaaacttaaagtccaatctcaacatatataaaggaatctgtataaactatatttgaaacctggatgtatgtgctcttcaaaaagttattagataagttttagatatcataaatattatcagaccagaaatggtgtatggaactcacagatatctaagaagacaagaggtgggatctcaaaaatcatgctctgatttccctaaaggatcagaagatctcagaatttatggagcagtatctcctcaaatcagaaagtaaaggatgcacacaaagaggaatctggaaaacctcccctttatcactggatggctatataaacgttcttaccaaaaatctgagaagacattcagggagatcagcttcgtctacttcaagcattattaggtggtcttcaaagtcttaggtgcattgaagaaatattttttaacgtattattgaaatggtatttgaatggaatattttgtaaaaataaagcacaaaaaaagcagatagataggagaaatatagaagaagtccaaaattgatttggaagttgatcatatagggtcagatgtctaaatcagaaaatggattggtggcagatttcttggaatagtgtgtaattttgacaaagccacctttcaatgtaatctcctgctaaagttgtcacctttatctctcagtctcttttcttcacattgatcgtaaagcttttgcacatttcttcttttagaagctcgtcttcctgatttatgcatgaattcctcgtttttgtcatttattcacaaataaagattacctcgtgtagaagctgtttcctttccacttgctagaagttattttgccaatcacatatgattattttatcattttttaattaccatcagtgcatgaaattatctttattattcacttgtttttattataatcttataatttcaaataaaatgtaaatctactgtcccttgctttacctccgtgtcttcagtgcctagaacaggactgtcatacacagtgactcaatacacatttacttatgggtgattccctgcctgactgttacaggaagaaggaccaggaatatcagaatctgaagtgtcctctaaagtcataaagactagaaggcattgaataatgtttcttaactatgcaaggacttcagaattagatctcacatagatatatacaactgtgtgtagattcgaaaaacagaattaaatgggtaaaacttttaggaaaatgtacatttttgagttaataaatgtatataaaataattattaatgacttaaaaatatgatcacagtgttaaatgtgtcttttgtaaattatacaaatatgagttttatttattaaagcatttcaaatgtt

SEQ ID NO: 377 - DNA, 1062 bp, Homo Sapiens
catcaagaaataaccataaaaatgggcaaccagcagctctcagggctgctctgtctatggagttgccattctcttattcctttactttcctaataagcttgctttcgctttatggacacaccctgagttctttcttgtgcaatatccaagaatcctcacttggcatctggattgggacccctttcctgtagcaaattccctcttctgtctgggttgaggcacaggtggttgggtcacagcttggatttatacattttagggagacatgagacatcaatcattatgtgatgtccataagttgggtccagaaaggcgggacaacttgaggcagggaaggggtttccaggtcataggtaaataagttgcattcctttgagtctctgatgaaccttttactgaatacacaatttacctgtgagaggagggtagaggaatagtcacttatgccttagtctgggttagtgaaaaaatagggcagaggaagcaatcagatgtgcatttgtctcaggtgagcagagggatgagtttgagttctgtctgtcttttgtccaaacgcaatttccttgtgagcaaattgtagcttttttatcgttgtagctatcttatttagcaataaaatggaggcaggtatgcttgactcagttcactgtttgacttccttttgccttagtgattttgggggcccaagatttcttttccttttgcaaagtgtagaatgaaatcccgaaatatttttttcttggtgacctttctctcctcaggagtggagatctggtctactgtaaacaaagggtatcgaaacaatggaacaaacgttaatttcaggaaacaaaagaccagaagttcaaacgttgaagaatgatttcactacgtgaccactgaacaatcacagatatacattaattccagaattttctaggttttttcataccagagcatcaatacccctaaaaaccttttcttgctggccttgaccacccttcgtactaggatgtagtgttgatgttttactctgcctcccaagtagctgggattacaggcatgcaacatcacacttggcta

SEQ ID NO: 378 - DNA, 2364 bp, Homo Sapiens
agaatgctggctgtgcgagtctcccaaggtgcgagctttctttctctctgaattaggaggtgaaaccatttggaagagccattgtaaaggggagggctttgggctgtgcatactcctcatatccaggtgagttcatttttcttgtgaacttttcacctaggccccaattagtatcctattaacctccttaaatatggaattgctaagatcttagaatactccagaatggactattagccagcccatttcctggctccatcagatgaaaatgccaaagtaggtcatacaacagaattatcttgattaatttcagctctcttgcatgggccatgatgtcatgcaagttaaaggagattcaaatttaatgcatcatttcaatgactgattaaacatgggattttctgaaaaacatttacaattccaggtttataaggattctccttctttaatatgacaaacatttcaaatgtgctaaattgatcaattatacaaatgataaattcccttgaatatactttttcatgttcatgttctccagggcctaatatggaaaaaggtttattatccccagtaactactatgttagatgaaaagctctcagcattgtgcccctttcctatccatggatgcaggctattaaaaaacaaaacaaaacaaaaaaacactatgaagatgccacatctactccagaagcctactcagaatggcatttccaaatataaatggctttgctaaggctaaaaaaagcatcaaactttacatcctttatcatacattcctaaaggactcccttgaaaaaagcacttaaaaacattgtatcttggaacatctcatatattggtgcaatttatttacaagagtcagatttaatttgttttcatgtataaagcagctttagggacttattagcaatttcaaatgttacaggaaaatatgctgaatctaaagttcattatcacaagtaagcttatttaagtgagattatttgtttcttaaaatgtacaagatagctagttctttaaaaggcttctgttgcatcatttcacttagaaataaagcttttggatgcagctgttatgctctaaagtcagggttgtgtctgttttgtgtttataagtaacatggacacagcctgctactataaacactgaacccggcttaacatgttcctgtcttttccagatgaaaatgcaacttactttcgtgatttaggttatgaaactttaaaaccatgtcacattttaatatgcaggggttccttcctgtaataacctgcaatgtatattcatgtttgcaatttctagcaagaagtaaaataactgatagcttttatgaagcatctttgaactttgcaagttccacttgtctgaatcagagcttcacagacacccacttagcacagactgggttgtgccagggctagagtaactgcctgccaaagggatcctggccacccctcctcttctttctgatcagtccactgatcactaagaaaccagtggtgagctgcttaccttttagaatatgaataaataaagagcttgccatgatcaaagagactgaaagcttcagatggatgtttatgctactgagccaaatgtaatgttcacaaaaattagggagcttcaggaccccgtatctctactctctgaaattcaacttttctcagatttaaaacagagggattcagcttttctagaatctatgtgtcaaagtggacttatctgtcatcagagaaattccatcctcatattctaacatcagattattccaatacatgttctattcatcggtcgccttagttagaaaattaggcaaaattctaaggcatctttatgcggtgacataaaaaaaaatgtattttggtagtagttgctagaaaaatatcatacttcaggactttagtcacttttttctccatctgagaatttatgagagtccctttaactcacttatgtatgtttgaagtatctttatttatttatacactttccaagcaatgtaacttatgtgttgtatgattaaaatgtagaaatgaaaactcaggctgggcacggtggctcacgcctgtaattgcagcactctgggaggcagaggtaggtggatcacctgaggtcaggagttcgagaccagcctggccaacatggcgaaaccccatctctactaaaaacacaaaaaatagtcgggcatgttggtgagcgcctgtaatcccagctactccagaggctgaggcaggagtattacttgaacttgggaggcggaggttgcagtgagccgagattggccactgcacttcagcctgcgtgacagagggagacattgtctcaaaaaaaaaaagaaaaagaaaaagaaaaaaagaaagaa

SEQ ID NO: 379 - DNA, 2766 bp, Homo Sapiens
agcaattggctggggtgtttttccgctctgtgggagatttgttctttcgctttttgggtccacgctgcgtttgtgagctgtaacaccgtgaaggtctgcagcttcactcctgaagtcaggcgagaagactacgaacccacctggaggaacgaacaactccagactcgccgcattaagagcggtaacaccgcgaaggtctgcagcttcactcctgagccagcgagatcacgaacccaccggaaggctgtaacatatctgaacatcagaaggaacaaactccggacaggccgccttcaggaactgtaacactcaccgcgagggtccgtagcttcattcttgaagtcagtgagaccaagagcccaccaattccggacacaacaggacacactgcggcttctcctggctttttcaaagttcagcccaagaggaagagagacctaattaatacccaggagatggtggtgtttattttttccagctgggacaactaaggccccgagaggagaaagggactatccggggtacagaggccactgagtcagagctaggaccaacatatcaccagctctccctcttcagcgcagaccccaactcaccagcggtggcttcctgaagagctgggttaaggaggattctgaggtgcagcagagctcgctaagaggctgacgggtaaggggtgctgcgctgtgagcacaggagccaggtgggtgttgcctgccatcccctctacctctccctcttctctctgccacctcggtttttctccatcctttcactcacccccgacccgccattgtttcacctgcccttcgttgagagtaaggatagggcctctgctgtgcccaggccacgtttctgggcctcttttttcctctcccaggtctgaaggggcctcagtttggggttcttaagggcccagagacctgtgaacagttgctccctcccctacttagtggcccacgtggaactcaagagtatcccgctccgtggctgttcagaaatgcagcagcacagcccccaggcagcaatcgttcaggagcgctgggaagcccacagccagcctgagccctccgagatgcctctagactctgggcccgggatcaatacttgggagggggagagcagatgtgaatgcgatgcgggcacacgcacagcgtgctgctggaggcccagctcagaggagctgggccagcctcccccgccctctcctttctccttgccttgcgggggccaagagggctgtggagggctctgctggagtctgccatctgctgctgaaaacatctgcgcttgctgccttccacgcagacgagctgtccgtccttcctcctccccctcttccgccaaggctattcagacgggcgtgcaggctgcgggcagaggtcaggaagctccccggcctgtccaggcacgagacagcaggcactgcctctttggtacctaggcagctgtgtctgcgagtccctggctctctcccaggtgccctgctttaagaaaatccaataggaacaaagtcctgtttgcaaagtggacacctgcgggcaatgtatgtctctgtctgcattgcacagagatcatcctgagcgattcaatgattttttctctctgtgggttctaagttcttaaccagaaaaggagatgttaattgaatcacctgggaggtttttcaacatgcacccggccagtccccatgtttcccactctcagacaaaacaggtttggggagaagagtttgttgaaagaggtccctagcacccagtgttgctgacagatcccctccccacctctccctgctctgctacccttgcgcatttcagcttttatttaaaagtcagtaactacctacagtggaggagggggctttaaagctgaactgttctatctcactatgaattaaagatcagttagaaatgaaatttcaacacccaagaaaagaataggtacatttattagaaaatgggagtgctgtatatttaaatttttaaaatgtatacagattaggtccataattcattgtttctataaaatcatatctgtggcaagcccctgcctccacagaaacaattttatttcatagagcaatctatttgtaagcatggaaggaccattatagatcctaacagtgtcctttaagaatgaggacacagagttgacccacttctcctagtatatgttggaattccaaattctatcggtttatttactcatttattgagacggaatgttgctctgtcgccaagcctggagtgcagtggcgcaatctctgctcactgcaacctttacctcccaagttcaagcgattcttccacctcagcctcccgagtagctgggactacaagtgcgtacgtcatcgtgcccagccaatttcttttgtatttttagtagagacaggttttcaccatgttggccaggctggtctcgaactcctgacctcaagtgatccacccgcctcagcctcccaaagtgctgggattacaggcgtgagccaccgcacccggtctctatcaagtttatttgtttgtatccacatggaaaaggtaagcccccttctgctcacaggtactatgtctgctttgctcactgctatatccccagtgcccagaatggtgtttgttgaatgaatgaatgagcacatagacaggtctactggtggctgttgcattgcagggatctgtgagaatgcactgatgcgtacatctgtgtcattttaatatgtccacttctgtgcatgtctgcattactaatgcatgtttttatggatcgagc

SEQ ID NO: 380 - DNA, 2362 bp, Homo Sapiens
atcctttaaattctttcactatgaggaatcagaatgttatgctgcatctattcctattaagttaaattgcaagaacactcacttaaaaatgagaaagtagcatcttactatttccctgtgcttttctcctttgaaatgtttttggaacactcttgggacagtagacacatttttcattttgctgtggacttccattacctcatctacacaaaaaagaaggtgtaaaatacattcatatgtttaaaagtggcaccaaactaacactctagttagtactgttttataaacaaaaatatagggaacaaaacaaaatattagaaatataagaacacactgaagcagccaagatggccgaataggaacattctaacataccacttttaatttggatagtgaaattaattctacacatgagcacattacataaatcaaattattaaagaaattattagtatcttcacagggaagatttttaccagcatataaatgttgcaataattctcaaattaaaaagaaaagatgtggaacagagattggaaatccaattaatattctcattttctatttctcctttgtgcaatcaatgctacatttatcatattttaattcatgggaaaggcaaaccttataaatgagcacgtactcacgagattgagcacagaaaaaatatatactatgtcttattcctactttatgtagtaaataaattctttgtcctttgagagcaacttattcaaaatttgtatgctacagctcctcttccactaataatgtaaggctgctagagtcttttcctctttattgacttgaaagtgtgcatatgtaagaagcagttatttggcctaggatataaaaagctaaaataaatttcctattttctcaattttttcctgatgaaaaatatttaaatgctagctgcattataaccttcaaaaacactcaataccagcccttgaagtgttattaaatgactgaattcaagtaaatgctaaaggactttaggttaaaagccaaacaaaatggcatctatttatttactttctgacaacagaagcatttaaaccctgctcttctgaaatccaaaatatacaaatttacaaatcttagccccataattgatgagaaacatgctaacaaatctctaatgctgagccattagttaatagtcatttttctcaacattctgaatcagataggctattaagatatttactttaaaaattttatttgtgggggaatgggcaaaggagagagagggctggttacagctgtctaaaattttatttatacatataaataaaatttatatataaatttatatgtaaatttttagtgtgtgtatatatatatatatatatagatagatagatagatagatagatagatagagagagagagagagagagagagaactacataaatatcccaggaatgaagggccttcaagaaggtaaaacatttcataaggcatctgcccttaattgtacttaaaatataaaagtaacataatttctttgtaactagcatcttctatcaaaaaaattaggattacatacaaatgtgttgcgtgtattaaaatattaaatactttaagtaaatttttataaatatttaaacattcctagggatagatattacagaacagaacttcaatttgtcctgatggttattcacaactgcctccaagaaaaactatttttacctagtctgttctctgtgtaaacatagcatatatgcttagatttattccccgaatacgttttccaatatttgtaaattgatattagcgtcaaacataacattaaactttttggacaattttctgaatttagccaaaatagtttaaaggtataacgcagtaaaatatgattagatatttgaatgaattcacattttggatgactcagacactttctaagtatcaactcaagttttccactaaaataaattcagcttcttcgtaaattaattattttagaatcctattctttttacatctttacatcagtcatcacttgtgctagcttaatgtatctatatctttttaagatataattatccaaaaactgaactgtaactggcatataatcaaattataaaaatattttctagatcaaatgagtattaacatttctacatcttttaaataacagtttggatatgtgactcatggtaagtttttcaacattagttgttcccaggcagttctacaattgagtcattcaagatgacttgcaaatgtccctggtaaacctcatacactgtgacttgtctaggaattttggatggtattactgttttcttacttataacatatactgtagttttatataaaaataaaatgaaaagttttttcattaat

SEQ ID NO: 381 - DNA, 1782 bp, Homo Sapiens
gagaggtgttaactgagttgagcgttaaagaatgggtggcagttttgcaggagtgaaagcagaagctcagagaacctggtgtgtttgagaggaaggtgaaaggatttttaatgcacctgtgagccaatttttggtttctgaagaggaggaaggatgcagagtaaaaggaaatgtaaaagtgttgtacaccagctctcagtaaccttagaagatttatatgatgctgcaacaagaaaacaggctctgcaaaataatgtgctttgtgacaggtgtgaagacagaggtggggaaaaaaaaaaggaacagtacagtgctgtcataattgccaaggtattggaatgcaaataagaattcatcagatagaacccggaatagctcagcaaattcaagctgtgtgcatggagacccagggccatggggaacagatcagtcctcaagatagatgtaaaagctgcaacagaaagaagatagttttgggagaagacgattctagaaattcatattgacaaaagcatgaaagatggccagaaaataacatctcatgatgaaagagaccaaaaaccaggactggagccaggagatattatcattgcattagatcagaaggaccatgctgtttttacttgacaaagaaaagaccttttcatatgtatggatatacagctggttgtagtattgcatggcttctgaaaaccaatatccactcttgacaactgaaccatagtcatcatctctcatccaggtcaaactgtcaagcatggagccatcaagcatgtgttaaatgaaggcaggccaatttattgtagaccacatgaagagtcacttaatcattgaatttaaggtaaactttcttgataatggctttcccttttttgacaaactccttgctggaaaaactcctacaaaagagtaaagaagtagaagagactgatgagatgaatcaagtagaatttgtggactttgattcaaatcaggaaagatgatgctgatgccactacagtgcagaagcaaatgtgggaccattacaatggaaaagcatgaggatgataaacatcatttcagaggtgttcagtgtcaaacatcttaatgggaccagtgataatactcgctgctggcattttatgggcagtagtgaatgagcaaaggactgtaatcctaatatgctcactacttgctattgttttggttttactattcaactagagtagtgttttaaaaattaaaggaagaataaatacaatttttttaaaagttgacaaggatgagcatggccaacaaacctctctccactttggcaacaaatagttttaaatttggtttccagagtaagttaatagaaggtataacacagagaaccagaaatacaaagtgctctattagtgagatatcagaagtgattattgctgattattatctgatattttataaaacaatctcttttgagatattaaatatatactgagattcataaaacggtagatacctaaattatctcatttagtaaatcagtggggctatttaatccagataatttaaaccctaagaataattttattttccagtagattgacttttacttattttatttattttcttttacataaactcagagggaattacactttttaagaccatgtcatttaatatttccagttttaaagagaaatagagtatttggcataatgaatgcctattttactatttgtctttatgtcatatgtaatttttcctcttaaattttattttaaatgtgtttcaaagtccaataaagggaacactaat

SEQ ID NO: 382 - DNA, 1746 bp, Homo Sapiens
atacttcatttactcccatgtggcttgtgcctgattccaactagatttagtcatctctacatacgttttgaaatctttggattctaactttttctagtttcactaaggatatatttggttctttttttctctgaagtcacagggcgggagagtaaaggagtagaattttcaacctaagtttatatgattctaaaattttccactaccatgctgctaaaagagattactcaactagttcttcctgttcaggtaagtcagttcagactttgctaattctgaataaagaggacagaagttatgatgctgtaactatttgacatagactgtgttagattagagatgagaggcaaaaacttgaccctagtatatttgctttcattgattccaatgtcatctttaggtttttgtatatttctttctgattttaacatatgatcctttattttcttcttactttcctcccttcatcctttctctgtcaaattgttttcctcttcctcctcttttaaaaattctcaaaatttgactataaattgctttttcttctttgctccttttcacaactctttcattgccacaaggcattcaggtagaaaaaaaggccaaggtagtctgcagtgtgctagctatttacccaattgacccaccatatcttttatataaacaaataaattaacaagttatgtaaataatttatattcaaatattcagaagtgtcttagacatgtttaatatgctacaggtaaactccttttaggaggagaccacatgcagctttagaatagaaaatagaagaaaggaaaaaaataaacaaatgaaggtttttctctgcagtctttatgcaagcaacgacttatttcttaaactctcccctttgtggctatcactcaaagaaaataaagaagaaaagctactggctttctagtttaaatcacagtctcattattctgtaggtgaatggggagggggattggaatcgtaggtccgagtgggcagtaacttgaagtcaatggagatatatacaaaacagaagcacaatcacgatccagcagttctggagctgctaactttttctgcctttttctaaatgtccaataataaggttctaacggagactgaagatccatcacctgctccacatctccagggggcccatgtgtgcatcgcagtgcaggtcatacatgcttctttcccctcccatggcaaggggaataccgaatgatgacaactcacatgtgtaacccaagggctttgctacagtttactgaggactagtgcacgatacattctttgagtgttataataacattaagtcaatgcacgaattataatccctatttcacaagtacaaaaacacattcaaagaaattaaattccttgctcaccaaacagttattgacaaaaaatacaacatttatgtttcttttgaaaaatattataaagattctcaaattgtctaaccaatcatattatccgtagttgtctcttctcaagctgctaataaagacatacccaagactgggacatttataaaggaaaaaggtttaattgactcacagttcggcatggctgtggaggcctcaggaaacttacaatcatggcagaaggggaagcaaatatgtccttcacatggcggcagcaaagagaggtgggaaaaaggagggaaaagccccttataaaaccatcagatctcatgaaaactcacttactatcaggagaacagcgtggaggtaactgttcccatga

SEQ ID NO: 383 - DNA, 2170 bp, Homo Sapiens
acgaaatgtgtttaagagttcaactcacaaatttagtttatttctctgcctataaatagagatttgtagattcttataggtagagaaataaaccaaattccaactgctccttatgatcattcctctaggtgttaagagtgagagagggaaggcttgacaaatttactgaaagaggtatgggagtgtgaaagctttagacaaggtacaaagatccactctcagaaagagaaaatctgaaaaaagctccaaaacattgatcataggtttggagtttgatagttcacagctctatgtatggagaagagcttaaaggtaagcagtaccagaattggtagctttaaattataagcattgcctcataagggaaacatgaagacttggagacatgtcagtgaagacttggaaacatggcagtgaagaagaagaaagaagaaaaaattcttcaggaaaagaaaaaaactgaacttagagaagagggtgttcttgaagtaggagctctgcctatgaaatgaacagaaatagaaaagagcaggccacatccatacagaactgtaagaaaaaacaaacaggaaatgtgaatcagcatttcaactgatgaaaatctacccccatcaaaaaaagcaggaaaaaattgacacaatgctccaagtgaaattaaacatcctcaaaccaatgtttggagatttgaaaaataaaattaagaaatattctgaaacaaatacaaagaacaaaaagcattaagaaatgaacacaaagtagattaaacagaaaaatagaagataaaatcataaccaataatgaagttttaacattcccacatttcaaattcaaatttaataaaaagtcttgaagaaaagcaggaaaacaggataattgagatgagatttttgttttgaaaattgaccaagttgaaatgggagatggatccaaagtctactgtatataattggtgtccttcaagaagagaaaatatttaaaactataatccaagaaaactttctggaagtgaaaagagatctgaatctataccacagaagttcataccagaaggcacactcaaagatatttcctagtaaagctgtatgactgtaaagatgcaaagaattctcagggtctccaggcaaagacgtgacatagaggcaagagaattagaccagtgtcagatttctcaaaagcaacataacaaagcaagacagtggagcagcatgaggaaagtgactgctagccaaggattttatatccagctaactgttgtccaggtattagggctgcagaacaacagtttgaacatgcaggaactcagggaatactgtactcgtttacccctcctgaggacactcgaaaaggatgactttcatctaaaagatatttgggacatttcctacaaaaagactgtgacaataagtatttcagatatctttttgaactaagattaaaaccaatagtagggacctagagaatagtacataaacattatacattctgacaaagcagaaagaatgcaactaaaatataatgggatggaaaataaaaggaaaaactaaggccatgtgtggtggctcacacctgtaatcccagcactttgggaggcttaggtgggtggattacttgagcccaggacttctagaccagcctgggcaacatagtgagacccagtctctacaaaaaaaaaaaaaaaagtgtttaattagccaggcatggtggctcatgcctgtagtcccaactactcaggaggctgaagtaggaggatcatttgagcccaggaggtcaaggctgcagagagctgtgtttgcctaactgcactccagcctgggcaacagaatgagaccctgtctagaactgttctttttcagaactagaataagaataattactgtaattgaagtaatatgagggagtcagaggctaccatctaaaactgaaagaccaaatagaaaagattaggtaagaaaaaaaatacagtgtactgtaaaagctattaatataaaggtaagcgtgacgaagactttccaaaatactgagagaaatttttaaagggacaaagaaaaccatgatggaacagaaaaaaaagtatacagtacataatgcataccctaatgataaaatatgtggagaattgagagcaaacataaaggccaggacaaatatgtaccaggcaaatagaaacccc

SEQ ID NO: 384 - DNA, 2172 bp, Homo Sapiens
acgaaatgtgtttaagagttcaactcacaaatttagtttatttctctgcctataaatagagatttgtagattcttataggtagagaaataaaccaaattccaactgctccttatgatcattcctctaggtgttaagagtgagagagggaaggcttgacaaatttactgaaagaggtatgggagtgtgaaagctttagacaaggtacaaagatccactctcagaaagagaaaatctgaaaaaagctccaaaacattgatcataggtttggagtttgatagttcacagctctatgtatggagaagagcttaaaggtaagcagtaccagaattggtagctttaaattataagcattgcctcataagggaaacatgaagacttggagacatgtcagtgaagacttggaaacatggcagtgaagaagaagaaagaagaaaaaattcttcaggaaaagaaaaaaactgaacttagagaagagggtgttcttgaagtaggagctctgcctatgaaatgaacagaaatagaaaagagcaggccacatccatacagaactgtaagaaaaaacaaacaggaaatgtgaatcagcatttcaactgatgaaaatctacccccatcaaaaaaagcaggaaaaaattgacacaatgctccaagtgaaattaaacatcctcaaaccaatgtttggagatttgaaaaataaaattaagaaatattctgaaacaaatacaaagaacaaaaagcattaagaaatgaacacaaagtagattaaacagaaaaatagaagataaaatcataaccaataatgaagttttaacattcccacatttcaaattcaaatttaataaaaagtcttgaagaaaagcaggaaaacaggataattgagatgagatttttgttttgaaaattgaccaagttgaaatgggagatggatccaaagtctactgtatataattggtgtccttcaagaagagaaaatatttaaaactataatccaagaaaactttctggaagtgaaaagagatctgaatctataccacagaagttcataccagaaggcacactcaaagatatttcctagtaaagctgtatgactgtaaagatgcaaagaattctcagggtctccaggcaaagacgtgacatagaggcaagagaattagaccagtgtcagatttctcaaaagcaacataacaaagcaagacagtggagcagcatgaggaaagtgactgctagccaaggattttatatccagctaactgttgtccaggtattagggctgcagaacaacagtttgaacatgcaggaactcagggaatactgtactcgtttacccctcctgaggacactcgaaaaggatgactttcatctaaaagatatttgggacatttcctacaaaaagactgtgacaataagtatttcagatatctttttgaactaagattaaaaccaatagtagggacctagagaatagtacataaacattatacattctgacaaagcagaaagaatgcaactaaaatataatgggatggaaaataaaaggaaaaactaaggccatgtgtggtggctcacacctgtaatcccagcactttgggaggcttaggtgggtggattacttgagcccaggacttctagaccagcctgggcaacatagtgagacccagtctctacaaaaaaaaaaaaaaaagtgtttaattagccaggcatggtggctcatgcctgtagtcccaactactcaggaggctgaagtaggaggatcatttgagcccaggaggtcaaggctgcagagagctgtgtttgcctaactgcactccagcctgggcaacagaatgagaccctgtctagaactgttctttttcagaactagaataagaataattactgtaattgaagtaatatgagggagtcagaggctaccatctaaaactgaaagaccaaatagaaaagattaggtaagaaaaaaaatacagtgtactgtaaaagctattaatataaaggtaagcgtgacgaagactttccaaaatactgagagaaatttttaaagggacaaagaaaaccatgatggaacagaaaaaaaagtatacagtacataatgcataccctaatgataaaatatgtggagaattgagagcaaacataaaggccaggacaaatatgtaccaggcaaatagaaaccccaa

SEQ ID NO: 385 - DNA, 4969 bp, Homo Sapiens
ctgcctggtgggaggaaaaggaaagagagctggcaggcagaggcctggaactctcaacccctctccgggaaatgcctcagacatatttcagcctctggtgtctgggcagtcggggatttatgggccagccatctcccacgatgatctcggtggtgctgaactgtgtgtcacccccagctggcactgtggctgccctcccagtggggaggcctcctgcagcctgggccacatctggagcctcgcccagtgtggagaaactgaggcccacagagacatggggccatgccagctagtggaggcatagccaatggagctgggctctccagggctgtgctaacagagccacagctctcccaccccagcttgcatgtggagcccactaaggcccgaaggggctggcctgcccaagttcacggctctgccgcaagcttgctgcagatcaccatctcctccattcctggccccaactccccttgcatatggagcaaggaaagatcttttgaatgctgaacgggcctgagacaccttcctgaaggaaagctgtccttggatccaggcattgtgaccttgttacttcatttggccttcatgaccacctgtctagggccttcatcaacctcttttacagatgagccctcttggatgataagtaaatggcagcatttggatgtgaccctggtctctctgagcttagctctggactcccctccctcgtgcccctctcaaacaagcaagaagaaggcaggagagtaagttctaatcctggctgtgccactgactccctatgtggtcacaatgaagtcttttccctctcagcacctctgttgctatacctgcacaacgaggagctttgcttggccaggaagagggcacaataggtacagagtgcaggtatttctgggcccatagacaaggaagggtgggaggaggggagcaatggtggaccctcttggttgacaaatctaaacaataatatggagcctgagaaagccaaataccagctccccagcttcctctgcagccaggcatggccatctgactgagttcaaactgatgggacattttgtaaaagtcttatgagaggttctagagatgcttttgctttcttgataaagagccatttgcagctggcacttcccctgtcccctccagtcttgaacatggatgcgatgcctggagctatggcagccatcttgcagctgtgaggctcagagagtcccagagataacatttggaacagtgttgagcccctggaccaatacagcagctgcctagctccaggcttcctgttgagtgaggaaaaacaagcaccatgttttcaatgagtagttctgaatgatacaagcagggctggtagacatccccacagttataccaatttttttgccataaacaatattaccatattttgtctatttcccctggatacaggggaccaataacaacacaagaggggccaggggcccagggggaaggaaccagatggggaggggtgaggactcacgaagttagaagctggggaaggaggctctgcaatagtggaaacaagcgggagccgtaccgtccagtcttaggggtcccgagagtgggcaagggtgtagccaatggagaaggagctggagaagaccattcatggggggggcaggacaaactggtgggatggaggaaggagactgcaaagactgaggctgcaaagcctccccttcgccctcagtggacccactcccacagcccagctgacctccgatgtaggccacagagaagcccctgcgggtggtgctgcggtctgtgtgcagcagaagcagaagctggttgtggcttgaggtcacgggtggtggcaggtggtgtccacaccaattccccagcaggggtgcctcctcgctggccccatcgaaggccgccagatggtcaaagtcacaggtcttggtcaggctgttgggctcctccaggtccaggtccaggaagaacaccttgacctggtagcccgggggcaggcggatggtccagtggcagcggatgttgttggggtaggagctggggtactgtgggctggagaagttgccccgcatggccatgtatacctcctggcattctcctggatgggggatggggaggtggaaggagcaacagtgaggggagaggagaagtcactctctgcagttacagcttaggcagcaggtgccacagtggtccaaaaaccaccagcaggttgtgggcaccatggctagcacaccagacaattgatcccaactatctgaaagttgggatgcttgatcccaaagcttgttttaaactgcaactagctgaaagctgggacttgcattccagttgacagtccccttcacaggtgtaggccctgttaggaattcaataataatacacaatacctgtcctcagagttacctctgaactccctggcttgacagatgatgtggttcatgcctggcctttccccttttctcactgccccatttggtatgtactatgagcataccaaacactctctgccctccaggcctttgcacatgctgttcctcctgcttggaatgcccttcccttctgcttccgtctaactccttcagggtactgctcaattctcttctccacgaagtcatccatgattcttactgatggatagcacagatcataatggcttgcgctgtctgtttccttataatctctctaactagactgtaaagttcccacgacttcatccattcatttgtacgaaaattgagtacctactatgtgccaggtacaaagataagcccataagggactcagtcagacaggggagattgacatgcaaaccacacacagaagtgacaaatgttagatcatagtgtaaaaaacttatataaggagttgaaaaaaggattaattctggtaaaacagtaagtcttcgcagaggtgacatgcttatgtcttggcataggccaagggtatgctagagcattccaggcagagagagtgcagaaagctcaaggctgcggggggcagaaaggtgtgacccctgcaagtgtaatggggagacaggagcccagtaggcacaggaggattcagggtggagcgccagcccctcctacctgagaagtagtaggccttgaagccacggcctccgatgttgaagtcggacttgaagaccacctgcagttcgtggcccagagacacgagggtggggggcctggtgctgccacagtagtggtgcccacgggtggggccaggccccccaagcacagccacgtagtcataggtgcactcttcattgccctccacctggaagtccacgaacaccagcttgacgtgggcagggccagcggcccggatcacccagtggcactccatgctgttcgggtagttgttgggatactcaggactggtgaggacccctgacaggccagtcaggacgccgccacacacatctgcaagggagcccacttgagctgacctttctttctccttgtggctcccagtttcctcccttgggaacaagacactccaacatgctgcccccacaggtatctcattagggcctcattaccatccagcaagcacctgctacccaagtagcaagtgtagcacgtgctcaggcccagcatttggcacctatgctgcctgttcaaatcctcagagtagccgcacaaggactgtgctgcagtttctctgattttataattaagaaaagggaggcaaagacaagttcagtagcttacttgagtttgagttcacccaggcagaccttgagataaggatttgagtgcaaggagtttacttgggagatccaggggcccccaggtggggagggagggagaggacagagaaggggaggtgtgttcaagtcagctgctgaccttggggggaactctggggacggggtaaagcacatacttcagagttctgtcaatctaggagcaagggagctgcggcatttacatgccaactccccagagtgcaggcagagggctgctgtgggctgggagtgccctactgagacttcagaaaaaagccctccagcatagaactgtggaggttggcagaagcacatcgacgtggcagggcccagggaatgtggtcagggccctgagagcaggtcacccgactggtaactgggaaagtgggatttgaacccaggaagactaactatggatcctgtgcacttgacccttgtgaccttcactgtccactcctacgaggccagtggggcacagaggctgaggtgcctgagctcaggaatgtgatcaaacctccctaatggatgaggaaaccaagacttagagagaggacctgatgaagtagagcttggtttgacatctgaagacaagtagtctcccatctctgccttttattagctgtgtgactctagggaagtaacccagcctctctgagcctcattggaacattagaaatcataagactgaaccagcttgatccactgggctcagacttgagcacagtctgaaaatatgctgctggaaactctcaggaagccagcttggccagtacaactacacggcaagtgtgggtgaatgctgcgacttgctggaggtcaccagcagggaggacatacgtgggatgtgtttcctgagactccagcatctcgccctatggcacggctgtgtgaccagggctctggatggggcatctaaggacttggcgtcttttcccagtgctggcccagccatgtaactttaggaaggccctctcagggactcagattttgtgaaatgagagggcaggtttagatagcctgtgagatcccttccaacactaacaaccttcgcggagacttcccaactgtgccctggggctccccagcagccccctggagcacctgctggcacctggtgcaaatttcattcttatgctgtatttcaagctctcttttaatgtaatgaaaagatagcacccacagactttaatatctttaacaagatattaaaatttaaatattctacatttaaaaatttaa

SEQ ID NO: 386 - DNA, 5204 bp, Homo Sapiens
agtagctcccgagcacgccggaggcctggcctgtggatgagattgttccttatttccccagcttcagcaccacagaagagaccagagtctaccttgccagctcctctagcaccgaccacgtgccaattcatgtcctgaatgctcacttcacttcttcaccttgcttcacttcacttactgcacgggaacagaaaagcctagagaggatggattacctgtgcggttgcctccctctgcagagtgggcgtgtctcaggagcttctcttcttctccagcccagtgcggcctcgtgtcatccataggacccaccggcagagggcagggcctgcgagtggggccagcctcctggtgactctcgcctcctcttttccagcggacgctaccagaggacgaaggtctgactctggccaacggcccagaatttctggcccagttttgcctgaggaagccaactgtgcaggaggtcaggatcccggtagggtgagagtgggaaagttaacattcccaagagactccaagcaacaggatttcctgacctgggactattacctttctcacattacatggccagatttacttcctgctattattaaaagtacgaaaaagatgaagatatgtgtttaatggaaacaagggcaagagtttgcctgactggactttgaggaggctgtaggatcatggcgctaacggcatttggagggctgggaagggactctagccctggctttacctgcctttgtcatcagctggagcaagcaactccgcaacctcggagcctcagtttccttttctgtaaaaggcggggagggtgggtggtaagtgcaatgctgaatcagaactcatagagctgctgggtggacatgtgaagtaaaagaggagacagcttttgctcctgaaggatgccatttgcgttttcctcatcagtttgatctcctccaatcatccagcacctccatctgaccttctcagctgagaggtcctcagtgtttctgtggcctccaggagaaaggtccccctccccggctgaggccaggctgatggcaggctgcacggccagccttccacagtcacctgaaggatacagaaaaggaagagctggaggcttctagcaagctgccgaactgtgtcctccagctgcgcccagccccctggagcttctgcctccccagcagagagggaccttcccagagaagatgtcttgcgcctcacctgatcttgttctgagagtaggagactggaagagaagcgttcaactccccaaacacagctgggtttgtttcgtttaatctcccagcctgtttttctgctgtcctcctgaagaatgtttaatctcacagttaaaaccaccaaaagcgacttttttccccctcaactgctcagtaacacatgaccgtgcaaattcgtttggccccagcgccacaagtcataaaaggcatctagtgggcggcatgagtcaatcaggcctttggacggtgacgtaaccacagcttgtcagtttccccatccaggcagccccaatcccccagtgcagacatctggagccagggattgacaagtggattccaggattgggccctgcctcccgccctgttcagttccagcccagccacggccgccgccaacgaggacacgcactgtctttctgcacattcccacgtacacacacccccgcagccccctctccactcattcctgcatttccggcaatgtgaattctgacagctcgggcagtgtcagcctctccggtgcattcctcaccacaccacctcactgctcccgagcctgctgacagcactccccgccatacctaccaagccgaaggtgcaaggaacctcttgatccccactgtgtctttgtcccagggccacagcaaaatagcacccccctcccccacacaccctctagcctaatttattagacttttaaacacatttatttactgtgatatctacaccacaccaaacatctggagggaaaccgggagacaatccaccaggaatttaaatgtttgttctgcaatgtaactttgaaaaccgaaccaggaaaacttgacatctttagccaattgcttggtggtgagtagacttaagccaatatataatctgtaaaggttgtccctctttgccctctctctatccatgaaacgcattcaccaaacagcccagaaatatttctttcttctcctctcagaggtatgtgaaaccaacctgaatcaacaacatagttgttcaaccagcctcactgagaacgaaggcatttcagagctggaaagacgctagggtctggggtcttatcttccacatttatctgccttattataatccatccagtcatcctctttgcccttgccagatctcatcgcttacactaccactaccgaaggagcataacgtctgtgacttttctttttttttttttttttttttgagatggagtcttgctcggtaaccgggctgaagtgcagtggcaggatcttggcttactgcaacctctgcttcctgggttcaagtgattctcctgcctcagccttctgagtagctgggactccaggcatgcgccaccacgcccagttaatttttgtatttttagtagagatggggtttcactatgttggccaggttggtctcgaactcctgacctcgtgatccatctgcctcggcctcccaaagtgctgggatgacaggtgtgagccaccgcacccggccacgtctgtgacttttctaaagctttaagatgatgtcacccataggcagaaaggcccactcatttcgtgcatctgcagtcactcttctgacgaggtgcggctctcttttgttctatcaaagagaaagccagtctaaattaatgggaaactagagaattaggtcatttttcaagatgaaattgctggtagcttaaggaatcagctacttgaatcccatgctaaaaaagtgtaactcctgaggagtgagctcttctttcttccttccataatgtcaggcactaagggaggttcagaaacacagagcagcatctactcctttctcaacgagcgtggggtccagtgcagttggccctcatttaacaaataattacacccatgcgtgaaaggtccagtggggaaacagtgcggggagcctcaggcagagctgattcaggcctggggaggcacgggagccacatgttcagggtccacaggcccagcggagtgatacggaagtttccaagatggtaagcctctctcctggcccatgctcaccaacgggaccccattcctaaccaggctttccctctctctcttttaagtgttccaggaatgttcctacccctgcgtctttgctgaagcccctcttgcctgggatgccctctgtcctctctttctgcccacacacatcctgccagtccttcagacagggccagcctcacgggcataggacctgagcagtttcacagggccctatgcacagaaggatcccaagctcggttgattgctccgatcttgccatcttgaaactctttgataattttatcttttatcttgtgttttgggagtgaaatccaatgggatattggggcctgcaaaggagaagaggagatccgcacaaacccgttcctggctgctgcattcacctccagcgtttgtgatgccccagagcacagaactccagggagcccacgatgcaggagagttcagcgacattcactgagtacaagagaagtgagttactcctgcagctgagcacggggggcgctggcaactgcgaaaggtctcgctttccattccaaccagaacttgctcctagcgcagacagaaggccgtggcattctgagaaacacacatgatgaaggagccctgtcatatcctctcttccttgcatcgcttccccgtgtgagcaaccacttgtgctggaaatgatgacaaggaaggaccgggaaagacagggccacccgcagttccttttccttgacgtctttccttcctcatcagcgagctgaggtggagagcgttggtagaatgtgtgcataataagaagtgaaataaaaacagtcgagttagtattctactgtttccactgttctggtgagaacaaaacacatatgctgtatatgctttgaaatacaaagtgtgtaattttagtgattctgcataggagttaaatgtttttatatttgcatttaaaactgccattgtatactataaagataaagagtaaaatgtattctaatagtttaactttactaataatttagtttttacttttatttacctagagtaacattaaatagcaaacaaacaaaacaaacatcacaagttgagagagaaaccacaaaagaaagaaaaaagctttatatgttagtaccttgagaggcactttttcctgctttttgagtagggattcatgttttcccgttgcactgggcctcacaaataatgtagccagccctgccttcaaagtgcattcaagtgactcccccttcataatcacttaagcctggagccacggccttgcccctgaacacgtagaacagtcatggccgtaccaaccgtgagccattcttgcctctctctcttttgtcttattctcttgtcatctgtccacctcgcaggactgttgggaggcaccaatggactttgcaactggagatctcccaactggaccatgtcactgttatgtttaatttgcactgtgcacagtaggtacccagtcaacgtttgtcgaattccatggactgggccttatacctccgaggatttttcacagcagtagcatgtgcacatgcacagaacgagaacacaaccaatgcttgtttgctggtgaagacctggtctcagtattttgcccaggaaaccctttcttcatggacagcatgaggcaagctatggcccttgctgtggtctcagtggttcagcacggaagatgaagatgacgggcagtctcagaatattagctttagaagggactttggatccttttgattttggtaggtgaaatactttttaaaaataaagaaaacggactttggacaaatgctctcattttgtaaatgaaaaagtagagacaggaagagtaactgatttgtccaaaatcaaacaaagtaaattgtgttgcatcctctccatccgtaaccaccttcgccttccctaactgctccatgtggcctgggaaagtccacttcacctcgtcttagaggtgggcttctgattctagctaagccaaccccca

SEQ ID NO: 387 - DNA, 6037 bp, Homo Sapiens
gcctcttcccccagcacaaggtgctctcggggcacatagtctggcacgcgagggccccggcggggctgttagaggctcgtggtcatcctgaccatgtggtccagggcgccccggtcctctgggccccgcatggagcgcggcgtcagcgcggacagctcgcagtccctgagcctctgcaggcagttcttggagccctcgggcttttgcggcctctcggggagcggcggcagctcaagctggtactttttccccaacagctcccggcaggggcgctccaggagcctctgcatgaggcggacgtataagtggccactcctctggcgacatcccacggcgggggccctcgcgtggacacccgcccctgctagctcagggctccgatgcgatccgttcgaccctgcatggcggctttcaacccgaacgcgtccctccttcaagatcaagaccctgaacgtagttcaacaagtagttggtgatgatagcgtgccctgactgggccaggatagcctctttagtaaaacagccacgaaagtcatgaaacagatgctcagctcctttcttcattttcactttaattcggtgatgcctctgtgtctgtctgacgacatctctcctggggtctgtgattctgctgatggtcttcagtgcctactgagaagggttcctggacatcatcaggtatgaaaacctcaaagctctcggtcctcaacgtgagaaccctgggccagcggcatcagcctcaccaggaaacctgttcttctgctcattcttgggccccaccccaggcctattcaaagaaagactccaggggcagggcctggcagcctgtgtttccaccagatctgtgttaaagctcaaatgaaccagcccacgtgatgctgaccaggaagcacaaggctgagagccagtgtccaaggcaacggtgcccatggggccagaggcagctcctgcctgtgcagctgtatttagggctgcgttcccctccctgtcctgccagttgacgtcagtgtggggttactcagctaaggccaccacggtatatccacaaagccgtggtagcaggcgacattaaggctggtccagccattgtggtcagtctcctgcgccttctcaacgctcacccctcgccgcaccagcgtccgcagcagccccatgcctcctggacgccctcctccgggacgctctccaagccctcgacgccgtgctcctcctcgtcctggaaagggtacagagtcgtcccaggctatgctgcaggtgtggggccctggaactctttgtagtcagcgcggtcctcctcgacctgtgcgcctaggagtggggacggcggtggcggggtcatgcagcgctcccagccaccctgcggccgggtcccagccagcagcaccatgccagcggccggaggcgtgggctgggggccggggcaccgtcccggaaaaccgggcgcgccccaaggtccctgcttctcgcttccgcgtccccagagaagccgtagctcccgcccccagcccggcagaaacctcctttctttacattattaagtttgttttcattttaattttcttaggacattgataaaatcactttcggatttttgagattaaaaattaaataattttcatctttaccctttttaaatttttcacactttattttaatgcttttattcttttgtaaattttaattattgtaatttatatcttcaattattatggaagaattttagaaaagtcttttcacataataaagactaattaatgaactattatttattctctcctctatctcaaatacggactttaaacttttagaacactttttgttttgagactcttgttacttatgtgacattttaactattcactcttctagtgaatttttaatgtcattcaaagggtacatctttctacactgagaattaaacaaagttctcaaaaatattctcagataatttagaatttcaccttccactggcatgttaagtatgttctccttcccttctaatgcatattttcctcacacgtcctcatgttatactccttattcaccctccatgcaagaggtgattttatttatttatttatttattgagacagagtctcagtctgtcaccgaggctagagtgcagtggcatgatctcggttcactgctatctttgcctccttggttcaagtgattatcctgcctcagcctccatagtagctgggattgcaggtgtgcaccaccatgccccgctaatttttgtattttaggtaaagacaaagttttaccatgttgaacaggccagtcttgaactcttgacctaaagtgatccacctgccttggcctccaaaaatgctgagattacaaaaacagcaactaaacgctggaatgatgactgggaacttgtctagagtctccagtgattatcctccttataacaaggcagaaagccttcctcagaattatctggactgacatcactcattgtccagacctgttaacagcaacaagtgctgtgagtctcaaatgtgctccttcaataatgcagtagaaggcctgagtttccacataatagtatccttgaatgcctggagacttaaggcacaagaatgtattgatcctatgaactttatgttttgtaaaatttcagattatgtgaggtgtttggacaaattaagtttcagggtgatatccactattgagacagaaaattagtttaaagaattaagacctcaaagtccagaatgagaaaaaattgtttttcttagagcctccttataactgtcttatttgttttatagatgtaagtactagaggacaagctctacctgatatagctggcctagacatatgcagatttattaattgtagaagaaataattatacctttcaggtaaaatggctatgcaaaataattagttgctgtttttgagacaagttctcactctgtcacccaggctggagtgcaatagcacaatcagaactcactgcagtctcaaactcccagctggtctcaagcaatcctcccaactcagcctcctgagtagctgggacaacaggtgcacaccaccactcaaggctaattttctttttatttttggtagagataaggtcttactatgttgcccaggctgatctcaaactcctggcctcaagtgatttttctgccttggcctcccaaagcactgggattataagtatggccactgttaccagccttagatcattttttttaatacagatagcttcccaactaaaaatattttattagaattctctgaattcagcaaagcaatgttattactgacccagtcttcacttattttcagctgacatggaagaacaaaattacctttatttttaaatttattttattttatattttcaaggtgcaaagtatgttgttttgagacacatatacataatgaaatgattactataatgaagaaaattaacaaatctatcatatcacttagctgtgcttcttttttatgataagaacaccaaaaatctagtccctcagaatatttcccaaaaacaatacattatcaaatatgcctacaggttgtacatcagattcacttattctactacgcctttacaacttttgcccttcatttacctatttccttcccaccaatgtaaccaccttttttaatgtattgaacttttaaaaatagatttcaaatatgagtggaaccatgaaggatttttctctgtgtgtctgtcttatttcacttaggaaacgtgccatttacatgcctcctaaatttagtacagaaatagagtgctagtcaagaatgtgtctcagtgttgttatattaattttttccaagttatcctctttatcaatttttactttttgtactatagaaaagtcaaaattattgtattaaaaaatctgtaacaaggctattgataaataacttcttttagggatagaaaactcaggaagttcaagatttctggattaatgattgacaatgttcttagtggtccctctttgatttatttcaattgtaagtaattcttggtgatattctaacataaattctgacaggtgaagagaataaataaattaagtatctctaggagaatcaatagaataagattatcttggttaaatagctaagaaagtatgctaaatagacacaaaaactttttcatcttccaaaatcagagttaaatagtaaataatcgtaaagtagctaattctgtctttctgcaaaagtgaatctgagctaaattagaagaatgtcaggaataaatttttccttgaaaactaggaacaaataatgtaattaaattatgaggcactgactgttgcatacagttttatgttgcatagagttttagcatcaacagaaaagcttacaaaacataggtgaaaatcaaaaaggagtgctgggttggagccctaaggtgaataattttatcatctcagatcacttggaaaaaggcagcgagtccaaaagaagctggtgataagctttctctctgctaacccctaatgttctgcatgaaatatgtggaggcagaagagagacagtttattatagagtctacgtggtatagagcgaaggaataagaacatttctgataagtattttcaaaatttgaagaatcattcctatataaatcattcatttaagagactaaaatacaagtaagatgtttcttgccacataaccctcagcttagccaggctctaaaaaggacaacactggacaccttgacagtggtaaaaagcagggtttactcactcttgaatactaagatctggtgctaaccttaggcagcaacttgtctatttggttgaggttcagctcaaatctcttgggttattttcagttgtgccagtcatttaatttattttctgaatcaaataataagaatggatatggttttgagtgtaaacagcattcccagatatatcttacaacttggtgtgccatctgcctaattttgaacctataggacgggaataactgcattgtgaaaaataccaggtgatttccttaaagccaaatactcttgtccctcctacttttcttttggctttcctgctgcatgggacgtggcaataaatggcagttttctgcacacagagataaaattcacttgttgaggatgtcaatcttcttgacaactcctatattggtacaaacatgtgagagcaatgcaccttctgaatcatttcaaatttgtggtctttgttagagcaggtaagccggtgccctaggagacatagctattaacgttctattatagaattttccattctgtatcatctggattcttatttaaaatgtagactaattttgttctttctactgcataagaaggtttataccactttatgcttagtaaataattaaatttatatgtcagtttaaataaggacagtctccattgttttaagtccttttcctgttccccatcatcttatataggaaacttcctctttcaatggtttatattaaaaaacctaagacaattgaaatcaaccctataaaaattatgctacaattattttaaaccctaacataatagtattatctttgatatgaatctgaaaatcaatttatttcttatcttttgatagatattcattagtatgttctatcctattttgttacttatattttggaaaagtttcttaacgttagaataatatttatacgtattaactcctctacttatccatttattcatcttatttattgtgtaatctattctaaaaatttcactggataatggtaatatcttagcaaagaagacaaatactgccattgcttccttggaattttcaatctggtagtaataagtataagagttttctgaatattataatctgatataatatactcagagaagatgttatagcagagcaacccagcactgaaaaactgttgtatgagctgaaatgtgattaataactaagatgttgagaaataataaagtctgtgaggtcaacttaacttggtcagacttaaaaagaaaataagcactcttctttattctttataagataaggtatccactacttcatttttct

SEQ ID NO: 388 - DNA, 2459 bp, Homo Sapiens
gtggagagtcgggttgtgcctcccgggccttatcgggccaccaagctgtggaatgaagttaccacatcttttcgagcaggaatgcctctaagaaaacacagacaacactttaaaaaatatggcaattgtttcacagcaggagaagcaggggattggctttatgacctattaagaaataatagcaattttggtcctgaagttacaaggcaacaactgttgaggaaatttcttaagaatcgtataattgaagatatcaaagggaggtggggatcagaaaatgttgatgataacaaccagctcttcagatttcctgcaacgttgccacttaaaactctaccacgaaggcatccagaattgagaaaaaacagcatagagaacttttccaaagataaagatagtatttttaaattacaaaacttatctcgtagaactgctgaaaagcatggattacatttatctcaggaaaatgccgagaaaataaaacatgaaataataaatgaagatcaagaaaatgcagttgatgatagagaactaagccaggaagacgttgaagaagtttggagatattttattctgatctacctgcaaactattttaggtgtgccatccctagaagaagtcataaatccaaaacaagtaattccccaatatataatggggccaatacaagtaaacatggagtagttatactacaaaacaaatcagatgacctccctcactgggtattatctgccatgaagtgcctagcaaattggccaagaagcaatgatatgaataatccaacttatgttggatttgaatgacatgtattcagaacaatcacagattattttctagatctccctgaacctctacttacttttgaatattacgaattacttgtgaacattttggttgcatcttcatttttgtttcatttcgtggtagttgtttgtggctacataacagtttcagatagatccagtgggatacataaaatccaagatgatccccagtcttcaaaattccttcacttaaacaatttgagttccttcaaatcaactgagtgccgccttctcagtctgcttcgtagagaaaaaaaaataaagaagaatcagattctactgagagactacagataagcaatccaggatttcaagaaagatgtgctaagaaaatgcagctagttaatttaagaaacagaagagtgagtgctaatgacataatgggaggaagttgtcataatttaatagggttaagtagtatgcgtgatctatcctctaacagcaaaccaaggtgctattctttggaaggaattgtagatgtgtcagggaattcaagtaaagaggcatccagtgtcttccatcaatcttttccgaacatagaaggacaaaataataaactgtttttagagtctaagcccaaacaggaattcctgttgaatcttcattcagaggaaaatattcaaaagccattcagtgctggttttaagagaacctctactttgattgttcaagaccaagaggagttgtgtaatgggaaatgcaagtcagaacagctttgaaggtctcagagtttgcttttaacaagtagtacaagaaggaatagttattatcaatacaccagtggctgaaattaccatgaaaccaaatgttggacaaggcagcacaagtgtgcaaacagctatggaaagtgaacttggagagtctagtgccacaatcaataaaagactctgcaaaagtacaatagaactttcagaagactctttacttccagcttcttctgtgttgactggcacacaaagtttgctgcaacctcatttagagagggttgccatcgatgctctacagttatgttgtttgttatttcccccaccaaatcatagaaagcttcaacttttaatgcgtatgatttcccgaatgagtcaaaatgttgatatgcccaaacttcatgatgcaatgggtgcgagatcactgttgatacataccgtttctcaatgtgtgttatgctgtgctgaagaagtggaccttgatgagcttcttgctggaagattagtttctttcttaatggatcatgatcaggaaattcttcaagtaccctcttacttgcagactgcagtggaaaaacatcttgactacttaaaaaggggacatattgaaagtcctggagatggactatttgctcctttgccaacttactcatacggtaagcagattagtgctcaggagtttgatgagcaaaaaatttctacctctcaagctgcaattgcagaacttttagaaaatattgttaaaaacaggactttacctctaaaggagaaaagaaaaaaactaaaatagtttcagaaggaatatcctttgatatatcagaaaagatttccaaccatggagagtgaagcagcactttttggtgacaaacctacaatcaagcaaccaatgctgattttaagaaaaccaaagttctgtagtctaagatactag

SEQ ID NO: 389 - DNA, 3826 bp, Homo Sapiens
ctaattgaatacctttggcaaatcatgtagctcttcagtgcctcaagtgcttcattctgcactttcatttgcagaatgaagatgatacttgctatttacctgctgatctaccttacaaagccattgtgaggaagttgaattggtgtttatgtactggagtttataactgtgctatttttcctagtgatacttgaaggtattggatggggaaatgatcatcccagaaatgggtccagtttcttattattacagaaaagtttacaagtacttaaagcaaaaacgcttttggactaattcatcaaaagtcctgtgaaagtagtgttgttttatttagtctttgggtttactttggaataatttcttaagtataatgtttctcatcaggttttgtcatgaaattaagatgctgttgttgaaacagaagcagaaaaggaaaagaaattagccaattacttttataactaacttttataatgccctaagataaattggtaggaacgtgtaaggtaatgttaccactttcctttagtattaaattttttatggttataataattgaagtgtatacgtgcatacacttcacaaccggtatagattcctttatgactttcaagttatatttaaaatatttggttgtttcagtgattcagaatattcaactttaagcagaatttgtcttacagaatgttatatacaatcatataaaaatgttattttgttggataaatttgagttcagaaggcaatgacttgaccctggaagactcagtttattgctggggaaccaagttaatatttgtcaagccaccctgtgtaaaaaactgtaatgggtagaagttttctcttttgagaagcttattgaaatataatgacatctactgcaaaataggactactaaatacatatactttacatgcaaagtacatttcttaaagaattatttctggtaatttttgatgactttattacttgataataagtattagtttaaaattttccaaattattctttaaatagttgttaggtaagaatattcagtaagccagtaattcagaataactattgtagaaaataataataatctattaatttaatgaatcacctctaaattactaattaacttcttttacaacataaataacttgttatcaatagagcatttttgtaaaaaacaaaagaaagaataagtttaattattaaaatttgctctcttaccaaatgaatacaagggcttttgaataatctcattgcataagaggccctcatttcacagaaatggtaagaactaaatcaaaagattcaagggttttccctttataaagaatagatcagaaaatttgacaatccagacattcaaaaaaacattctgccagttgatttttttggactactatttgattagatgatcagttctgaaatttaagctgcatgtatgcccaaattaaattagcataggaaagtcaatgtgtgtggttttttaaaagtatattttagcatattaatggagcaatttaatttacattcagttacaaacctcattcttattaataggtttagggaatgttcttgctggtgtgctgattaccatattagagaaaaaataaactctccatattataattcacctgtttagtaaggtgagtttcttacttgtgatttgagtggattatgcctaaaaattacaagtatatttgcactaagcgacaaaatatgtccctgaaaaatcttagcgtacttgaatcatcaaatgtaatggattgtattgaattctaaatgttaagaagtaagtggatttagggttttgtctttcttttcttatgtcctctctcattcctttatacctttcttcctttctgaggcctatgtttatagcatgacttttaatgtgctgaaagattttccttctgttttgtgtacagagttgtttttgatgagtggtacgctcagaaggaactagttctgactacaaatcccactacttgaaatagcaatattgtacctaaagtagtcaaacagattttgctagacaactaagcaacatctgaatacaaatgtaaagtatgctggctcagtgtatcttttaggtcactaaagaggacacatcagtaaataaattgttttcagtgtaatatttttacataaaaatagatttcccccccaaaatttaagatttatttagattcttgagacatctttttatgaaaaggaattaataacatacatcatcaaaacttttcttaggagcgttgaaacaatataagaaggttacagaaggccttctaaaatatgaattcccatctgtatgaggtacttctttccaactcagtgactttttgcccagagacttggaagactgggcaatgttttctttcccctttcccaactcctggagacaaggccctaggagcaatttcctccagtagggcaggccgtagtcctgctctgtcttacttcccactgcagcaggaacatgtcctcgcctctgattccttctgtaccaagccattggtccattgaggtcaattgaggactcactgtaaattttaaatctgttaataaagcaaggatattggcatgttcctcttctcatcaatatcctaaaagacatttattttttacacactccttgggaaaaattaactttttttcactgaaaatatttccttttttggttatcttgatctcagattattttgtgaaagaattttactgtacttagttcaaaagagtagaaagaatgatttactattgcagacatatgtagggtaaaatcataatttatttaaactgactgtacaacaccatttagagttgatattgacataaatgttattagcctactaatttggaactgcatttctcaacaatgctggcaagcatcttccgtacttagcataccaagttgtaggggagagactgtgtatatattttttaaaagcaatccaatggatttgtttttgttcatattttgaaaacaactcgaaggatttttcttattttagaaggtagaaaatatgtggacctgtgttttaaattaatatgtatttataaattataacattgaatgatacaacagagctctaatattgatgttctcactttctgatatttaatttttataaatgtttttgtaagtaactaattgtagtattgcttttaaatagttttaaaatctatctcaaataagttctgcccagacctatttccttaggacagtattctaaagttcagtagtccagtgtgagcttgaaatactcctagatcccgtcagtgatttttatatataccaatacacaagcaaattattaatataccaaaaacctaatttctgcattgcattaataaaatacttgttattttgcctttatccaattcagttgattaggtgaaatagaaaattaatcttttcaaatgtgcatatgatcataatttttcaaaatgttactgtggtcatttttggtgcatgatgccaagtttatctttagttagccattgccacctgatatgtaatgacaaatgttttactatctgatcattgggttgtagattaaactattttttttctctgtagattctcactacattttcaaatatgtacttggaaaaagctgcaaagtgctacctataagcaaattagtaactttggccttatctatgcatagtgttcgctcagtttggttttgataaattgattgacttgcagttcctttgtagtattttaacttattgtgatgtaatgaattttttgaaatgtttatttgattagctgttaaaatataggaaagaatgtagctttgcatgaaataaattacatttctacaagttaa

SEQ ID NO: 390 - DNA, 4233 bp, Homo Sapiens
ggggctccagggacctgttgatcgcaggtgtcactggcctgactggtccctgggtattggggcgtatgcgcatgctccgctcacagggtcgggctctgggcggcggagaccagccgcctgtgctccagttcccggtgagcctcggtactgtggcagcagtcagtgtgtctggcgggtgtcggcgtgaagcggggctgggccagcgggaggtagctctgtgggagtggaaggcctgtatttctctacctggaccgcacgctcctcgcgcaaggagggtagagctcaagatgcttgggatttgctttacattctaagtggatttggagaagagacaataaagaataagcagtcaattctataatatatttagaaggagaaaagtgccaaggaggaatgaaaaagtagaacaaggtaagaggaatttggaaagcgtggtagagattgtgatggtttgcaattttaaataagtgtaggcctcatttaagtgacttttttggcaaagcaattatgaagggagggagggcaaagccatgtgggcgttatggggggaatgtattccaggcaggggaatggccagtgcaaacaatatagagaacagaagtttgtatagtgtgcaggaatgagaaggaggctgatgtggctggaatgggaaagccaaaggtcaagtagttagatgaggggctgggcagatagtgacattatgatttaattttagaaagatctctgtctgctctccagaatagacttatatgttactgtgtaaagggtagaagccaggagacaagctgctatttttttaatccacacaagatgtgatgatggccaagactagaattgttgaagtggaggtggtgaaaagtggtcagatcctgaaatatgacagaaaaaggagtcaaagatgacatcaagatatttgttctcagcaactggaaagataaagttgccattggctgagatggggaggaaggtatagataaagtaagagttcagtctggggctttgtcaaggcaaataaatgttaggttattgctggcttgacataattttcttctggagatcatgtcttaaaagtagactgctgtaagccattttctttaatgaccatgtcctatattctggatacatgtgtatgcttgtcttttgctagttagttactagtggaaactagtgaataggtaaaagcaacatgaaatatagcacggttttttgttagacacaaagaaatagagcaaaaaagtggaaacattgaaaattacttaaaacttactgtttttttgttggcagtattatagtcttttttcttattaattttattttctgtgttttataaattttctactgtagtcttctctaattcctccatttctagagtgacaatggttttacacatcaaagaatatttattcttcaattataccttccttactataatcctttagctttataaacacagttacttctgtaatgaaagatatattttttcttttttctgacactatctacttgaagatgaagagtttttttgtattacttcaacttggtataactcttctgtttgctatctagttatctaaaataaaatcttaaatacttctagtaagatgagcagttgtagcatatcatcagaaagtcctcagtgtatctttgaggtgctatattgttagtgaaaagatgttaatatgaagttttactttacagtttgatggctaggactgtgtactattaagaacatatttgcagtgattctgtgctaatatggaattatggatatttctaattttctttatgtagtatttctgtggtatttcagaaatctaatgaacaagtactgtttgataatcaaaaaaatccatacacataaaagaacaaagagtctcatggctttatcaactattatattagtttcctagggctgttgtaacaaagaaccacaaactgggtggcttaaatgacagaaatttattctctcacagttctggaactagaagtccaaaatccaggtgtcagcaggattggttccaactgagggctctgaatagaatctttccttgccccttcctaacttctggcagtggctgttcatctttggtgttccttgacttgcagcttcatccttccagcctctgcctctgtcatcattctctctctttctcttcttataatgactgctaccagtcacattggattagggtccaccccagtgacctcatcttaatctgataacattttcaaataccctgttgccaaatacattgacattcataggtctgggacttggacatatgtttttgggagacacaattcaacccataataggtataatgaatcaggtttaagatgccattatcatttacccagaccattctagtagcctgataaagttattggatgttagaatttgaacaaattccatatagtgtcatccccttttgggggaaaacacctgttaaataatttatatagcatggtgaagattacctaactaattatgtattgggcttaagttttggaaggagaaaagatagtttgatagtcttgtctagggtaatgaaggagagtggccctggaatcttgccttttaggataaaattattgctggtaaagcactgactcataagaaaacagcagtgacttatttcctttcttttcttttctttctgtctctctctctttctcaaaacttctggttcattttaaagttcaaatttaagttttttattttaaaatattttattggaaagtattaataactgatattaagcacttaataaagttaaacattttgttttttcttatttaagccttacagaaattttaataacagtaaatgttgtaattatccttattttacaggcaaatgtggatatatgtttataactgcacaaatgaattctgaagggacgcataagacattggtattggttgcctatggggaatataattgatatgggggagacttggttttccttgtatgctcttctatatggtttaaaaaattatttatgaaaattaaatatatactaaaaaagagggaaattgctgagtttttccttttagctgcactattaactcttttaggaaaaagcagtgatctatcaaattgtattgagatattcagtagatctgctactgaagtacttatttacattggagttaaaaacacaaatgcagtttgacaaatataaattcttagaaaaagtaagttctactcttttatttggggatataatattttacttatttcatatttgcagtgttgtagggtaatgcagttgcttttaacaagccataagtgaacttctgagaatttcattcaaagtaaacagttaggagaatataagatcctttgaagtgattctgccagttttctaatttttttctttaagaatttcttaagcattgtgaaatatatttatgtatttaaacttttagaaatttatgctgttaaggaaaaaattattcatgacaattgttaaagatggtaaggaagacacttgttacagataggtacagggagcactgcaatggagtcttgcagttggggagagagattgggctctactctatatactacaagtaaaagcgggaatttatagacaaggatgtgggtgtggttggtggatggaaaattactagggggcaacattaggaataagagaggattctggccaaactgacctaacaggattcttgttgaaggcaggccagggtgatcagacatcacctggaggatggtgaaggatgaggaacctaatcagatatgaggatgatcagataaggagaatggctgacttgacttagtaggactcttgctaaaattggacaacgtagagacaaacaaggaagtccaaaagttgaggaatagttgaaaaagaacatggaatagctcgagtggagtttgatcaatgagagaatctttgtcaatattttctgacacctgtatctgaaaatatcaaatagttacttatattaggcccatttagaaaatcaaaactgttgtattacattagaattagtattagtggcaggggcacagtggctcatacctgtaatatcagcactttgagaggctgaggcaggaggatcgcttgagcccaggaggtcaaggttgcagtgagtcatgatcaggccactacactccagcctgggtgacagagtgagaccccagctcaaaaaaaaaaattagtactagtattgaattagaaaatttaatataagaaaaaaatttaaaaa

SEQ ID NO: 391 - DNA, 1263 bp, Homo Sapiens
gaagccagagggcctgcgttcgaaccctcaccctgctgcttattagctgtatattattggaaaatgcactcaatctttcggtgcctccgtttcccaatctgtaaaataacaagagttcttatctcataggggtaaggaggaaatgagtaaatatgtatgagtgaagcactaggaacagcgcgtggccctgcggataacagaatattgaagaactgataccacacaggttacagccagctaacaaagttaacaaccagtgctgcagctgcagcccagcccacccagcaccattagcactctggcagaaaccacatctactctgtcctcaccactgccaccccgcttcccagcacaatgcctgacacttcgtgggaggccaaaaactatttgttgaaagagcaaataaatgaaggaatcaagtgtaaccctcttagagcctggccatttcgcctcctccttgaagtcaacctcagcatgagtcacattcacagaaacattcatctcatacccagagatcatcaaaagaccagctgaaggcttttctgcagtccttgagagaatgccaaaaggtggggttgcattcaccgctcaggaaacagctcaaaatccttccactctcgctcttgcctgctccagcctctcgggaaaagggccagtctgctactccaagagaacacgcggactgaagtgctgtccacgcggtgttcagatggggctctggaggccatgccatgtgatccctcggtgaggaaaggattccctggccagccatggggaatatgaactcctgaagatgaacaagagctctcagccccctcccccaggcccacccagctgtcctgaggtccccttggaagagaccaaaagagaagaagcaacagggggccagagacccccaggcccccaaccaccatataccacataaaccaactgatgaggaaagaaggtcctaatacaggcacttcccctttcattcttgataaactcagagtccaaacagccctcacagaatgactgcaatgtcagggaactgaaaaagaagagcttactctctcccttcaataagtttcttcccttctctgagcctcagttttctccatctgtaaaagggctgctaaacttccttccagctggaaaccaagatggcggtcttggcaaacctggcacagcaagaaaaattggcctagggcataggcaggaggagttagagagacagccaagtcttcctttgagtcagtcagaaagacaagaaggctttttttt

SEQ ID NO: 392 - DNA, 6454 bp, Homo Sapiens
agtgaagaaggccaggaagagcagaggatggtgccaggaggatgatgtcgggggacacaggcagctcatgcctggatcaggcagtgactggtgtgtgtgtgtgtgttatgaagagagagggatggaaattgtgaccagagagttggagttgggacccctgtcttgatcacttgagcatcagcagctccagggaagaacacattctgaaggaggaactctccagctaggatttcatcctgtcctagaggacacgaagaggtggagaccacccccacaactaaacttgaggattactaaggcaatggggactgcctaggaatatttttgagggggtaaaagcaccccataattgtgctaagtaacaaaagacagaacaagcagccttaaaacattctacatgatacactggtattagaataataagatcttaaagaccatccacttgaaaactggatttgcccctggtcatatgggcagacccatggcagacaaagaactagaagttcctcctaactcccaactcaatgtcctttccttaaagaataactgttctttattataaataggccaagcttttattatttagtatagaactcaggctgatatttttattgatggattaaaatttgaattatttctgtagcatagtatttaaaagttttcttctacatatttgttatcattttctagcaaatatcctcaaaattgaaaactgcaacgtcaatgaaatcagtgagcacactaccatccttctaatgggaggtctaatttatcattcatgcatagtaaaaaaaaaaagcataatatttaaatgtgtactctgtgattgtttataaaactatttaagtataaatattccaaacaaagcacttagcttataaatgaacttaaatcctcaaagttaggatttaagtcactcgtttggaatttgttacatatttttcctttgtaatagttggtgaccatattcttaaggcagcccacaaaagtctagtaaattccctactgtggctccagtgtttacatttgtaatggaaacgtgttgaaaatgaatactaatgtagtgctagtcatggaaagtatttaaaacacaaagtaaaaggattggacacatgagttttcaagtcgctaggaagggagaaggtaatgggttaatattaggtcatagagttctatgtctggatgctaggtggcgctattgaaccagaacagctcggttatttgccaagtcaagggtttatagagggatgctcatatgactgttcctattacacatattcacatgttccttgtctttcatgtgcttatttattttggcccttaccaccactgagattttagctcctaaaaattatgactagaaaaatactgatggctcacagcatgtctttaagagttaaggagaaaaagtgttcagaaatacattaatattcactgctcagaaatatgtgagtcttgccccttacttacacatttttgtggatgactatggatcattctctcaacttctctgggctggcttcagtttctcatttttacttttattttatttttgaaacaaggtcttgctctgtcacctaggctagagtgcaatgggtgcgatcatcatagctcactgcagcctcgacctccccaaggctcaggtgatcctcccacttcagcctgcccagtagctgggaccacaggcacatgccatcaggcctgttttttttttttttttttttagatggagtctcacactgtcacctaggctggagtgcagtggtgcaatctctgctcactgcaacctctgcctcccaggttcaagcaattctcctgtctcagcctccagagtagctgggattacaggcacctgccaccatgcccagttgattttttgtatttttagtagagatggggtttcactatgttggccaggctggtcttgaactcctgacctcgtgatccacccaccttggcctcccaaagtgctgggattacaggtgtgagccaccacgcctggacttttttttttgtatttttagtagagacgagcttttgctatgttgctcaggctagtctcaaactcctagcctcaagtgatctgtctgccttggcttcccaaaatggtaggattacaggtgcaagtcactatacctggcctcagtttctcatttttaaaaggtgataagtaataaacaaacataataaggattaatcaataaaaaataattatgtataagatgacatatgtgatcatatgtaataattatgtatatgttcaaccagtgaggttgcttctaccgagtaaacctgctggggccttggtgctccctaattcaaactcatggtcaggattgagcagtgttttctgaatgcccactccacagtacttgtcctaatatcagcagctgcgcaccggctggaagaaataccaagcatattctcttggttatccatcttgctaaaactctaatttttatttcatctcaagtacttactatcctaagcttctgagatactctattctgtctccataaaatgcaaatattaacataaaatgactgtttaaaaaaagttctaaaggctaagtttctccaatatttttggtaggagacaaatttacttgatgtcagcatatatttctacaagaaaggaacagaagaaaagacagttacgctgttattgagaaaggttattaacctgtctaaatggtgagttattgggacaggtagtattgatttgaaagaatcaatgaatatcatttcaatctgaaataagtgacaacccatatgactaacagacattacgatttttactagctctccaaagagtcattgctattagtgttttttcttctgtaatgagactggtatacatatttttagtattgctagagaggagttaccagaagtcagcaaactcctatttttttttttgtttttgtttttcaataacaggacaaacaccaaagaaaaatggccagtggtgtttttgcatcttaattcagctcttcagatggttagttaatctacaatgagttaagggtcactagatcccttaaatcagtatcttagattttagcttttcttctctctgttctctaatctactcagttatcaaactcttcaataaagggaaagagtaatgattttagtatgccctaagacatgaacttagactaaaaatacaaagatgagatggtgaagtaactagaaacttgcagctattctttctttaacctacttgacaccaactcagttgtggtgatgagaaaacaatatgggtgctaagtcttccctgaggctaaaatatattgagaaactggccaggagtgtgtgttgatctcttgtcctctgcctcaggggacacggaaacttgttgggatagaggaactgtggactagcttggtcttcaatgttaccatagaaacatatcacaagaagatgcccaagagaacacaaaacacagtagaagttactgaagcaacaactcaaaggttcattttattgggcatataatgtgtggcagctgagagagttatgctagggtgatatttaaagtatttgacaaccagctccactcaagaactgaactcagaacagtcactgagtgtgacactggcccggggtcctgaagatccctcttgtgccatgaattagtccttccgttacatcactgttggaaaaggcgggggtaacaaggacgggcagccaggctggcaggtgcaccctgaaggccgtatagaagtgtttcactgttttaaccgctagtccagctggaccacgtggactggccaagtggcctggcttatggaaacctttcatcccactacacaggaaaaccagatgtcctttattctctttgagatatttactatgccaaactctgagggaaaaataatctttaatttataggtggaaagatcatggctgaaggtaaaagagttaatagtaacttggttttcagaaatcttttctccttgaattaacgaactttcagatcacggaataaaggcccataatttctgagaagacacatatttaaatggagaaaataggaagtcaatatgatataccacgacaagagccactaagtgggtcctctgggctaagctttttataggtggtttatctgtattcaaaagcatgaagataaaaataccctcatctaggttctcaggtccacaacccctgtgctgggttttgcatcctgtgaatggtgtgtgttccagacctcaggatggatggtgatgtaactggaagaggactctcacgttggctcctcctcccaaatgctgggacaagagagtgctcattaaaataaacaatattaataaaataaaaacacatacatttatttcgtacactggctctgagggtcagaaattcaggggtagcttagttgggtggtcctggcttgggatctctcatgagacagccattaacatgttggttggggctgcagttatctgaaggcttgactggggtcatagtagctgctcccaagatggctcacacacgtggctcttggtctgaggtctcagttcctcactatgtgaacctctcttcatccatagcagctgatctctctcagagcaaatgactgagcagacagtaacaaagttggaagccataatatcttttatggagagtgttcatcttatgtgtcaccaggatttagtttgccctttatctcagactgtgtattagacacacacacaccacacaccacaccacaccacacacacacacacacacacacacacacacacacacacacacacacaccatagaacaagataaagccaaaaggagaaaatgattaacataaacctttcttcttcaaaggagtctaatttaggataagacctctccttgcacaaagaacggagtttatgttgtcttctagaaataaaaatcagtcacatcaaactctttacattaaaattctataaactctttaaatggcttgttgttgaaaagacaaaggaaatcctagtttcacaaccccactcaggtaaatgggatttgaactctaatgagagctgggaggctaaggcagcctccaccaactatccaccttccttcagcaagtccctgatggtggtagggccaccttgaccttgtgcaacgggatccagggctctctgggcaaagaccagtttccctgggccttgggacctaccagtgatgcaggtggggttcgggaaccctgtggaatgtgaggcagcagactgcatttggggagctttcatctgctgcttccttctttctttctttcttttttttgagatgaagtttcgctcttgtcgcctaggctggagtgcagtggcgcgatcttggctcactgcaacctccacctcccaggttcaagcgattctcctgcctcagcctcccgagtagctggaattacaggctcccaccaacacacctggctaattgttgtatttttagtagagacagggtttctccgtgttggccaggctggtctcgaactcctgacgtcaggtgatccacctgcctcggcctcccaaaatgctgggattataggcatgagccaccgcaccgggcctatctgctgcttatttctacagggcagaatgccttcttccatctcaggacaacaaaacagaacaataaacagatcactgaatgtgtattcaaggcttgttgtcacagcagtagattaaggagaataggaaaaaacaaacaacgttgtttgtctttctctttggataaaatgacaatgaaaaaataaatgatggatttctgaaagtaattatacttacgatgataccacaggcagcccttgtaattgctttgccacattctatttcttgctgctatttggggaccactcggtttgttaggataaaatcataattgtattttcaatttgctgctctatctattccactgtcaggatttgatacactagagtgcttttatcaaatggaagttgggccagagagaattcatcacaaggatggctctttcatactcacgcatgtttccatcaatggagtccaggtgcacacacacggattcatttgtacccaccccaacaacatgctcaagacaaggctgatggaaaatgttgccagtttcagtttccagcaacatgctcaagacaaggctgatggagaatgttgccaatttcagtttccatagggagaaatggagccattaagcctttggaacatggtgcttttatgtctgaacatgaagctcaagattttggcatctgcagctcctggttctaactttcctttgcaagcccagggaactaactgccctttgtcatcagaagagatcatttcactcctttatttcctgaggccttttcaaggtgagtagccctggacacagacctctcatggagaagagcttgcttacaaatgaagttacctgggtctttgtagatactgagcacgcccttgaagtaatgaggtaaaaatctttccagtaacagc

SEQ ID NO: 393 - DNA, 23792 bp, Homo Sapiens
ccggctattcacagacatcctcttgatataattctgtcccggagtggagttgaggaggctataaaatgtgtgggaaaacctcagaaatctttagctgcattcttttactgcactgacagtgcacgtattatgatagttgaatgtagggtgctctcctaataacaggatatgccgtctcgagcttcccagacttagcgtgctgctgctgggccttagagaatttagttaaataaaaagtgtcaccgcctattcctgtttctgccctgtcaatgaaattttagtctttataacctttccaagtaggctggagtttaacatcccaacaattcaggagactgattttctccattgtaaattctgtggaagttctggagaataatttcatcactaccacccagcagtatgcaatctagaaatttcagctttccctatacttaaaagagatgtgtgtgcaacatttttctccgtcctcttagccccccacttcctgttcccctcaccctgagtgatattacagctcctaatcagaactctcctctaagaaaaactgcaagacgtcaagccactaagcctgtttacatttgctaatgggtatgcatgtctttttatattaatatttttcctaagtattttcagattgttgctttcagatttattgcttcctccttaaaatatagctgccctgaaagcagctgtattgtatctattttttgtgtttccccacagatctgaataatccagggcttttctcacagatgacactcagtgtggactaattgataatgtataattttatagcaactattttctgagttttaaaaaattgttattttatttctgttagtctttcagacactggaaaacatttctattttattggcatttttcttttcaataaagcattggtttttttaaatcatttatttttattaaactgctaaacatactatgttaggttccatacatgattaaaccaccaaaagataaaggtcttgccaatctaatgtatttacatgcttattttctttgattagattataagctttctgaggtcagagacattaaatcttgataattctattttttcctgttataaacagcaagtaaagcaccttgcatgtatagtactttagtaatgattttatattatcttattgcagcagtgtctactgttgcctcttatcttttatccagatgagcaaatgacagttttggtcataatgtagttaccccagatgtatttgtgctacagcttttattttttaaatgctcttttgttagagtagtagtttataagacttatttggggatgggggtcagttgcttcagactcaggtggctttccaacttgtaaatacaattttcaggctggatgattagcatgcatcaagcatcccttcctatgaactctaaataaagcagatttattgcatattctgtggccctctgttttagcacattggaaaccttagactcaaatagcagtgaaaggatagttattgctgagctcagaagtcttccctgccaaaggtagaatgtaatgtgttctgtggtaataggattattttgtttgaccaggtgacactgtttatttcttatgaaaaattttgatatactgctttaaaatttagtaagatggatgcataatttatgcagtgaaatttgaaaggtttttcaaaatgataaggccaaacctaagctaaatgagggggtaggcattctttataataaagctgttatactctgcccagctaggccagttatccctagatgctacagattaatggggcaatctgtgttatgtaacatttgttctatattattctgcctctaatgaggtgaatcaaagacgatgtcagttttaattctggatgcccttgcttcagtatagtataatacataggtacagccttttttagtagttttcagatggcttctttatgtttttatattgaagaaccactaacttcccattggcctataaggttagcaattgattatttatagcaaatggcttgaaatgttagatcatcagtatttgtcaataagcctgtaataacttgtttccctagcccttaacttagtgttgaagaaaaaaattgtggtattcattgataggacttagaaagcacagaaattacttattatttaagatttgttctaccaattgatatttaaagtaaaacatttttagttactgaacaccattctgtaaatgacagtattttatcctgagtatatggtctgaaatgacttagggacaactttttaaagcaaataactaattacaaaattgggtcttccaatttatttcaaattagatgcttttgtacaaatattcttggttagaaatagtcatataaatacactgttggacttgttctcattgatctccacacctcagttccttctacatgagtcatgggcttgaggttacccagaaatggactgtgaacctataaaccccagcatgcatgtggtattgcgtcgagcatgttctgtgattcccttctactcttgttacagctttattcattggatcaatgtgcattatttgctgtgtgtgctcaggtaatatttttgtttcttttttttagtttgaatatcagtttgggcttagttactttttaaaataaggctgtttcagatagtctctgccacactttgcctagcctggttaattgtgggtggacccatgctacatgttttggcattgcctttttcttatctgtaccatattacaaacttcctagtaatttgacattcactgctgtctttgctttagctttccaacaggtttggtgaaacagtccattgctgttcaatatcagcttgcatcagaattacttggagggcttattgattaaaacacagattgctgggccctgcaaaaaaagtttctgattcagtaggtctggggtggaacataagaatgtgcttttccccccacagttcccaagtactgctgatgctgctcctctaggcccatgctttcagaatcacagagctcatcttacattcttttcctgctagatattatgcccaattaatacatgaagtaaaacagaaaaatccttaacttaaaaacatgtattaatccagaagtttgattataaaaaggtttgttgaaaatgtgagaccattttttctcccagagaaaaagtatattaattgtctagctgggaggggcctatttgaatgtgttttcagagaaaagcagaagaaaaaaatacggttgtaatagaagtagttaaaacagaaaagcagtatggttgtagagtggggtggcggggaggtatatgtgtatttaatcttgagaaccaatgcttttggaaaacagcccgaagggacaagagactaggtagagactggcgaggttcctgaaagtcctgggttacctgtgaaatgccaaagatttttaaagtttgctggcagtggttattatatgtagttttacttccaaatttgaagatttcctcttctttgatgcaagtgtgttggtaggaccactgataatagttagtggagatatttgtgggaatatatttttaatcagaaagaatgcaaaaagagggggagacatttctttgagacaccttaatgacactgggaacagtagaaggtggaaagagatcagagtgtgggaaagatgtgcctgagatgaaattatctgaattctgaatgtgggggagaagatgaggagagggttgagggggaggagagatgactaagctcctcacagtgtttcattaactgtcttttacctaaaggaggaatcttcttaatgaagattggttgatgcatcatactggtcatcaagtaagttcttataaatgcaagtttgattgttttgaagggaaggatataggaaggctggataatcagctacatttagatatggaacactacaggatgtcggcatttattgttgtaaattcctttggtgaaaaacgttatcacttgtttgtgactagcctgggcaatatagtgagaccttgtctctaaaaaaaattttattaataagaaaaattagccgggcatagtagcgtgcctgtagtgccccccactgccctggacacgcccccacttccaaaaaaacaaacacccaactcacttctgccttttccttggattctacactttctctcaggatatctttccgattgagtcttgcctcatttatgtgaatgctgtgcctgttctttttttcaacagagtcttacgtaaagaaccgtacaaacttagtaaagagtttaagtcctgctttaaaccaagtttcagttcatgtaaacatcctacactcagctgtaatacatggattggctgggaggtggatgtttacttcagctgacttggaatgtcaaccaattaacattgataaaagatttggcaagaatagtatacagaggcttgaatttttaatgtaattaatgtaattaaaggtttgttggaaatgtgagaccattttgttctcccagagaaaaagtgtgttaattgtctagctggcagggatctacttgaatatgtttgcagagaaaagcagaagaaagcatggttgcagtaggagtagttaaaacagaaaaacagtatgcttatagaggaaaaattactctaaatttattaaaattcctttaaatttgttactcaatttaaatttttattgtatcttttcaattttgctatagcactaacatgacataaggctctgggtattgggacaaaagaatgcccttgtttggtagttggggtcgggtttgtagtattgcagtgtgctttaacaagcatgggctttgacatcagacatttgttgccatctggactccacaagtgaatttgctacgggatttggaggagggaaaggcactgtttccatacctcagtggttttctcatctgtaaaataagtatgtgattgcatggattgacttacatgatgaatataaagttgttcattagtacagtacctgtcatattaagtactcaataaatgctagttattattaatgctgtgttgtaggtgttcagtaaatagttgccataatgcttaaagcagacataacttgtttttatttttgcaataaagatgatgccaactttttggtttaatggaaatgctttgaatctttgatattgttgtaatatagtggcaaagaattttgaatcccagcttctggagctcatatcttgattctgcgagttacttcgctatgttactttgggggaagttattaatctctctgtgcctcagtttcctcagtcgactaaattgaaattataatagcacctacctgataggattgttgagactaaatgaggtaacaatttaaaaataagctaatacctgataattagttctatatatgtactgattggtctaaacgttatttccattttcatgtctttacttaaaatactgaaaattaattttttatagctttgtttttcagttccatgaaatcagcctgccttttctttttttggtgatacatccacattctgtataggtgaaaagcaaaacaaacaagtataaaacgaaaattatgtaagaagtacacacatcctagcagcttggcaagtgtctgtatgctcttgcctgtgcctaaatccagaattagaattcatgcttggtgctcctgtggaagatgtctaaatgttatgagaaatacatgattaaataaaaatgtgaaatgaaagcatggagacttgttgaaggtgagtgctgtttttctaattatatattttatttgtttaatgaataatttgttaattttctttgtcattacgagagagctgttttattctgtacttaggtgcatagcatactatgttttagtgagctccacatgttaatttgaaacttgccaaatttttacattattttataatttatagtactttgagaaacatattgcaatgcattacaaagcatataatgtaaaggtagttttatgaagtgtttttctcccaaattaagcatatttgggaattgcccatcaatttgtttttgaacctcagtgcataaaatatagaatttttctttcatatgctagatgtgaaaaatactcagcatatgcatgtggtttaggctacaaaatagcctgtaggttaaattcctaattctagtgtttaattcattgccttttttcttcttgtttaatggccatatgtttatatctttatattacatacattcctgattatgtaataaggtctttgatcatgtgggctatcagatttgcctcactttgtctcttagaagaagctatacatgaaactatgttgtacttaagtgaaaatttgagtatttttcttgtttgaattaatgcagtgaaacattctacttacagttagctgtctcccacccttacaggaaggtacatgccttcattttttaaaacactgtatatttattagaattgttacagaattttagtaaatatattctaatcacatattttctgattaatgtgtgcttatcagttttaaatgttatgaaatctggatatatgttaaaatgtctcagttttcccctcttgtttaccatattgccatttggtattaatagataacataatgtaaaattggatgtctttgataattttgggatatgttctgaaattaaacttgaacttttttctgtgaattttgaagatttggtatcttataattatttggtgagcatttggcatgaattatttagcttctcccctgtttatgatttatttctcttgtcatcgatttccaataggaaaatgttatggttctaaatgtctcctgtagacttcagtaattgaaaaatgtcagtcaagatggggggaatctgtaatatataatagagtttatcttttagttatgttcatttccactttttttaatgtgttttttttttagtaaatgtcaaaagtgttactcagtgcaacatattatgcaatattataatcaactaacctcttcattgataatgacttcatattgagaggttttttaaatctagaaatattcttgttttaaattccaggttaaaatgtaaaggtatttttatttttttaattttaattcttctcaaagctactagtacattataaaacaacaatttcacatttagaatttttatatgtatataaattaggattattttttaatattagccttaactttctttaacttttatgaaaaacaactagtcccaagggtatttttactatttaatatacattattcctgtgattcaaaatcttagcagtagaacctgttgagctacttaactttctgtcttgggactatccaggtgcagttataactggtttcaaagttgtgaccttttccttgcttgtttcaaaatcattccttaaaaaatgttcagtatttttcttttgtcaaaaaataaaaacaggatttgtgggttgttctgttttttaaaattagtttgagaaacttcctttgccacttgttttctgtgcaaatgttgtaagagctcaaattccctgggggtagggaggacttttataaggtttttttggttgaagggtataaaaggcacttaaaaggtatacagttacttttatttcgatatcccagtcattttgacattatgataagctttccccactttataggttatctgaaaatttggtggggggcgggtattttatttatacttaatataacaaaattattttcctatgtgtagtcaatagcacatacaaaaaattatctcctgtttgtagtcagtagcacagtcagtattcaccaaaatactgagttatttttcaagtaaaggtataagtatgaatgagaaacagtttgtgggttgggtattgtcagtccttctttttcagataactttctaaatggtcattcaatctgtaatcttaaacttttttaatgttataaattcttcaaatcagtatttgtattaaatgcagtgaccagactatgtcactgatacaatgtcatgattagatgtgcagaagactatgttacatggatgataaatgaacttttaacatatagaaattaatatcagattaaactaaaacattaagcaaagttaatacatgcttgcatacatatatatatttatttattaatgatatgtggagaatctttgtgcttcatagtcactagacctaaagtagaagcagttgtcaagaatgtccaactgctattcatctttgtggccaaagtaaatttcagattttttttttgtaatggttttctttagtctctttattaacccatcatcatgacaagtctgtcaagtgacacatgtgaaaagcagatgtcctttcttattcctggtgcttcctaaggaggcagtgcaatgcaggagaaggaacattattagagataaaggaaaaaaccagaagtgctttctcctctcacattccactcaacacttctctcaccaaatgtgtgtggggatttctctccaccaacaaccagcagttctttactgcagattctccagtggataccagccaggtgtcctctaattcagttcaattctgacattatctactgggagatagtgtcagatcccgcaagtggagggctcagtcctacaagactaccccttacttcagatgtcagtcacaagcagttagcggtttgtgattctgaccaactggctagaggtccccctcctcaagtgtgattaatttgctagagcagctcacagaattcagggaaacactttatttacatttacccatttattataaaggatattatgaaggatacacatgaactgccagaaagacaaggagcataggcaagatactgagaagggtcacggagcttctgtgccttctccaggtgcaccaccctctgggaatagtcagttcatgtgttcagctgtctcgaagctcattcgaaccctgtccttctgagtttctgtggaggcttcattacgttaaggttcagaaatcaataccccaaaatatggggctttgacatgctgaattaaagaagcagcctcaaggcctcttggccttctccagctctcctcacccaaatcctgtctctcccaaagcacaagatgaggctgttcaccaaagttcccttatttacctagaaactggaccttaaagaggaacacagttgcctgcgattccatccctgtaattttattaaccagagattaaaacttatatcacagaggaagagactaaaaattaaacaccacacctggagcccagatgacctgtcccaatctattatctgttctccagtcccatttagttcccaaagggaatcatttacaaaccattgtctgatcttccggcccatttatttacagctccccctctttccccaatgaaaatgatacttaagtgtcagccatctatcggctctttgagttttcacattttgtatgactcctgtgcacacacatgcatgtaataactgttatacttgttaactttttttcattataggggtatccaccatgattatatatgatggggaggaaagggattactccatttctgcccctgcagtctgtaggcatgattgattacatcattggtcgccggtgattaactcagtctccaagccctgtcgtgtccctggaggttggagggtggcactgaaagctccaaccatctcatcatgctttgatctttccgatgaccagaccccaccctgaagctatctacgggtccccagcaacattcatttcgttatcatacaaatgacattcttacaatttcagagattccaagggctttaggaaatggagatgaagagcaaatatatatttcacaatatcacaaacatacccttgggaattagacctctgatctaatctaggctccctcacttgccatttttgtgaccttgaacaagttgttcatcttttctggatagttctctgttaaaaaaattaaaataaaaaaatggtggctatcaggttgttaggaggactagataagagaactatgtgaaggaccctgcacagtgctagcaacaaagttgtttagtaagtgctatttcaatttattttgcttccaagctcatgtgagctccctcagtgtgtaccaccaaatcacatgatgtgtatcccagtcaaatcttaaaggtcatccaccttgaatctttaagttaattaacgtgtgtttttaaaactgcattataagaacgttagggtttttgttttgatcctatggaagttaaattttttacacaagcattcaactgtttagcttcaaactgaacagataaatagtctgtattatttcattatgtattaaaaaatgattaagcctgcctcaggcagttcaggcaaagcaggtaaaagattatcaaggagtaacattagaaaacactaatcagagtgcctaaaaagctttatgcggtccaggttgtacagggatgttggaacagtaaaacaaacaaaacattacaaggtatgaagcgttcgagataggtagaatagagcaggttatattagagaagtctcttctaaaattgtgttggctagcctgggatttgaacttataccgtgtatgtatgtccatgtgtaacaggttgaacatgcaagaagcagtgttcataaaaggtggcaaacttgttttacttgtttctcagtcttttcagatcagtacttataaaacactgatatttacagtaaatatcttatattaaatattagctaaccctattaaattgtgtgtccttgtgctgcagtcatttaatgacctcattctttggtaagttggcatgtgatttgagatagctctaagtgctaatggattgtttgaaggagttaaaggcaaaaccaggaagagaaaactatttttaggaaaaagcgatcatacaacaggccttaaatagaagaaatgagatatctctatctttactatgtaacctttaattccttacacattttgacttcatattttttgtatgtaaatgagaatgttatagtcttgtaaattccttttcctctgtgactacattcagttatttattttattgtgtgtttgtgcatgtcggtagagcacagtatttagtagaatgagttattggttaaaccacctggattcatttgtaaaatggggccacctgtctcttaaattgtaatgaggatttgattagataatctagataaatcacttagcacaagagtctccagcccccggactcttgactggtactggtctgtggcctgttaggcactgggctgcacagcaggaggtgagcagggagcaagctagcactagggcccaagctccgcctcctgtcggatcagtggcagcattagatactcataggagcacagaccctgttgtgaactgtgcgtgtgagggatctaggtttcgtgctccttacaagaatctaattaatgcccgatgagttgaggtggaacagtttcttcccaaaaccgtctcaggaaacctgtccctggtgccaaaatttgggggacctctgacgtagcacactatctggcacataccaagcactcagaaaatatcccatttctcaaaactcagttccagtgtcaagtcttaatagtatattgatcttggaactccaaggtagttggtcctctctttgtgccataaatgtgccttgtactcagtagtgctaaattgctatcaactagtgctaaatgtactactaattcatctgtgtgtccacttcccttcttagattgtgagccccttgaggacagagatgggtttactcatatttataaattcattggcatgataaatatttgctgaaagaataaaattgtattcttatgttttaagcagggtcccctccacctctgagtggaagatggtctgggagcaaaggtgacaggtcttctaaaaaatctggccacattctcaacccaccacacccccgcttttttaaacagctatttaattgccattgtaatcctaaggattggatcaatttttcacttccctttttcacacttttttccttttactaagaaaataaagtaataaagtgactgccaaatggagaaaactgtccactaaatatgaattaataagtgctattatcagaaattgtgtaaaagcaacataatggcactataaaaaggtattatcttagaatcaaaaaccttgggtttatattatagccctgctactttctagtcatatgacagtgatcaagctatattacctctttggcttgacaaaataggggtcatctctatttctggcttgttatgattgatgtgaaatattcatacaaactaccactgtgcctggtaagtagaagacactcaaatatgtcttggagttacagttaatactgtatcgtttaaatttgagaaaaaccaactttaaaaaatcacatagatacagttgtttactgctagaaattttatttaaattagttgatactcttggttaggtaatgaaaaacaatggttttatctccattatgctgtgatagggaagagtaacacagttcaaatggcaaaggcatacctgacaattaaaatgcatagttaaaggctaatacttcctgaacacaagaagacaagtctctacttgatactactctccacagttaaatcattgatactttgtgccatacagtgaaaacagaaccatctaggtgttcacggattgtatttttccttatgaaaggtagaaggttagagaaaattattcccaatacaattaatacaaataaaattggttattaggtgccttttaattaggcagtaagggcatatgaagcttcattacctatgagaattttgtcaaaattatttcccagttaccatgttttaaaacagcctctcagaattccccacttctaatttctcctttctattctaccaattttactccatacctttttgctaaataaacattttcttccaactctgagtttggtgtttttttcatttgatctgctcttcaaagtgtatcagctagtgattgaattaggctatggtgtaacagagaactctaagacagtagcttaaacaagattttttttttaacccctgagtcttgctgcctttttcacaaagacaaagctttttcagaaactcccagcttatgtctcatttgccacaactgcgtaacatggctatcttttagctgtaagagatgctgagaaacatagtttttttgctgggcatattgtcactgagcaaaatcaaagttttatttggattattgtacttacaattcaccttttatggcaatttaagtagtcatttgtcatagattggaggatttcctggaagggtgaagaacttctatataggttacttattctgactaacataaattatcctaccaccacaatcccataactctaaacttacagagatgtcatagaaaacaacaaatatacacacagctaaccacaaaagaaaaaggaaatcccagctgccagaagtgaagaaaaaacagccagaatagtgaactcagcagctgaaggtacactgacctaggtggatgatagtgttggctgtgggtctcaccaatggaccctgagactttaacagcaagagatatggcctgactatacagggaagctgggactgagacctacacaaagccaagaccttagaaggtgctccagcctcaggaaggaggatgagcaaacttctacacaataacccagggaagctacaaagttgtctgaacccaagactttagggtggagaaagaggaaggtgtctgtgagaaagagttgaagtttacatttcagttttgctttcagaatatccatgcttagcttaaaaatgtgaggcacattaagttactggctttaataaaggaatgaatgaaatgtacagaagtatgtgttctcggggcctcttttaaagtcattaggggaaagaattggcatatattcagacgcatttgaagaaattatatatttttggagatggagtcttgctctatcgcatggcatgatcatggcttactgcagcctcaatttcctgggctcaagtgatcctcccatgtaagcctcccgagtaggtgggaccacaggcatgtaccaccttgcctggctagtttttaaaatttttgtagagatggagtctcactgtgttgcccgagctggtctcgaactcctgggctcaagtgatcctcccaccttggcctcccaaagtgttacgattacagtcatgagccaccatgcctggcctgaaggaaaattttaaaacagaaggaataagctagaatgcagcacagaagaggtagaaaattgaaagtaattcatggaagatccaatatacatatatattttaggagtttaaggagaaaacagaaggtgtgaggcagttgtgaactaacagaatgtgtagtatacaactcttggtagagaaatggtacgcactgaagtttttgaggcgtgggggacaggtagcttccttctctcatgcatactcctgctgccaaattaccccctaacggctacgttataatgaaaacagtttcatgccagcttctgttatattaaccgagcaagaaaactgatcttagcatgttctgcaggctaaaggaaattgctcttggcccatttaggtgctctaaccaccatcttgcctgaaaggttcctttaagaagcagaattctattactttaacaaaaggtgtgttcatggctggacaagagccttttagggggttagactaggacatcatcccaaaatataagggctacaggccatgctggattcttatggcctcttcttgcaatggtggtatgtgttactctgctattagtcagtctgaaaacctttaatctcaccatcggaggcccatttaaaaaattactttagcaggtcactaataaaaatttctaccatttagtatgaaaattaagacattgtatgttgatcaagatgcagtcaacaatacctagaatagcttccactagagtatgcattctctgattagaacactagttcatcttcctagtgaactgttctatcaggatggtagcaagacttaagcgatgactttacataagttatgtgtaccacactgtgtatactggagtatttccatgtaaattacagacaacagctatactggaagcaataaatggccaagaaatttccagagttgaccaaagacatcaggaatgatacttgcttccagaaaaagaaccaatgtaacattggcttaaactgttgtgcttttgcttttctttcagatgtaggctgtccaggtgtccggtactataactccacaagatcagtagggccccaggctttttctgttctttatgatccactctctaccatgtagcatttgtcttcaagatcaaaaaatggtggctgtagtgctcacattccagataaggaagaatgggcaagaaacaaaagatccactccaaatgtgatggcaaaattaagacttttgagtgaaaaatggaaatttgtcttcagtacatacacactgaaagaaatgttgaagagagttcttcaggcagaagcaaaatcattccaagggaaatcctggaatgcaggaataaatgaagagcaatggaaatggtaaatatgtgggtaaatttgaaggaatattggctgtattctgtggtttaaaatatctgtggaattaaaatgcacctacaataacgagacaggagaagtttgtactggagtttgtcctcaggttctagcattaggtaggtaaatggtaagattactttttttagactatgaagacaagggtgcatgttgtaatctcttaagcactaaaaggctaatagaatgtatacctaacaatttaatggagacaaaagcatttaaaagaaggcaagaatagaaaagggacataaaacaaatgggtcaaatttaaagttgcaaaatagaaacccaaatactttaaatgagtcattagttgaattaagtttaaaaatttatcaggctgaaaattccctactacatgttgcttacaagaggcatactttaaatacaaggccacacaaaaaggttgaatgtaaatggcatagggaaaaaaaaacacagcaaaccaaataaaaacagtttgaatgtggtattgtcaggcaatgagatttaaggcaaaaagcattaccagagataaagagggacattttataatgatgaaggaattaattcacccaaaacacataaagatcctaaatctgtatgtgttgaaaacagatttgaaatacataaagcacgaatgacatataagaagagaaataggtaagtgtctaaccatagctggaggcttatgcagctttttccatagctgatagactatccggaccctacccccaaaaaatcagatgcagaggatctgaactttacatatatgaatacttgatttaaaaaacataattcacattttcttcaagtaaatttatcaaaatttaccctattttgagtcataaagcaaaccaataatctcaaaagatcaaaagcattcatcttacattctctaacacagtggaattaaactagaaaacagtaaaaaagatgattagagaaacccgcaactactctgaaattatgtaatagatttcttgatagtccctgggtcaaagaataaaacaaatttaaaaatattttcaagtgaataatatgacataccaaaaagtgtgttgcagctgaagcagtgcgtggaggaaaatttatagatttacatgcatacattagaaaagaagcaaggctgaaagtcaattacctaaactattttcaagtagctggaaaaagaagagcaacgaaataataaaagacaaaaagtcagtgaaataacacacaatagagaaagccaaaatgttggttctttgaagtctaaaaacaataataacctctactgtttaacatatttgagatattagccaataacgtaaggcctgaagtaaaaagatagaacgtttagaaagaagaaaataataccatttatagacaactggttgtgtgcatagaaatttgaaaagactcaacaaacaaaataacttatcaaggtcactgaatacaaactatacagaaattgtatttctatatatcagaaacaaatagaaattgataaaatgataccatttacactagtgtaaaataaatacaagaaattttccaatcatttaagcattttttttttaattctaaatatatggatataccatgttcatgacttggaagtcaattttgtaaattaatctgtaacttcaatatatgatattatcaaaatcccaacagtatgttggagaaattaacaaactgaagaaatgcaaaggaccgagaatatccaagataaacttgagcaataaaactgaaaaatgttcaccaacagacataagacctgtgattataaaagtgtagttgtaattaacactgttgttggctggcataaggatagacaaatagaccaaagtaacagactagagcaaagtagactagaacaaaatagaacaaagtaacagaattctgtatacgtggtgatccacacatttaggtcatctgtgatttatgagaaagagaaactattgtaatggtacagtcaattagatagctgtattggggaaaaaagtagaccccttccttgataccatatatatagaaaaatcaattccatgtggaatatggtttaaatgcgaaaggaaataatgaaacaggagagtgtcttcatgttttggggtaggcaactatttaaaggacataaagcataaaggaacattttaaactaatttgtggtgatagaatcagggtagaggttatcactcgcctggcaaaattaatcaataagaaaagataacttagccagacacagtggctcatgcctgtaatcctagcactgggaggctgaggcatgaggatagcttaagaccaggagttcaagactagcctgggcaacatagtgagaccttgtctctacaaaaattttaaaaattaactgggtgcagtggcatgcacttgtagtcccagttacttggcaggctggggcaggaggatcatctgagcccaggagtttgagcctgcagtgaactataattgtgtcactacactccagcctgggcaacagagcaagaccctgcctgtctaaaattaaaaaaaaaaaaaaaaagcttgatatcaggaaagaaataaggcatgaaaacggataaaattaaaattatttgatttagaaagtgattgtgaatttatgtgaataaatttgaaattttagatattttttgattagtgttgccaaatatgtattagtaaataagtctcaatctgttttttaaaatctactctgaataatgcacaagctctggatgatttattaaaatacattcattgtgaccaagtaaggattatttccatatgggagaatgatttaacactgtaaaatcttttcacatagtatataccatgttaataggttaaagagaaaaggcatgttactatctcagtgaatgcagggagttggagggggagaaccagcaaaatgcaagttatattcacttaggattttaaaaataaaacatcctcttaatagatgaataaacgtattagtacgataaatgatagcttaccaaaacccatagttattgttacaagttaatggtacaactttagagatgttccttaatgtcagcaatagtacaggaatgggatattgtattaatacatctgttccatgttgcactggagatcttggccagtgcagtgagactagaagaataaataataggcataaagactggaaagagagaatcaattattgttaatgggcaagatcattgtttatttgaaagtccaaggaaaactacaaagtagcaaaactaatgtgagtgttgagagattttggatataagagcaatctgcaagaattagtagtgttcttttccacttcagtgtgtttgaaagtgtattatttgaaagaatttcattcacaattaaaactctaaggggacctaataatacatccaataaaaatatgcaagattttgtagaagtagactaaaatgaatggagcagtattctatgttagagaatgggaaaaatcagtgcattaaagtaccagttctctccaaatctataaattcactgaagttccaatcaaattctcaacaaaactttttatggaatttaatcaacctaacctgaatgtggaaagacaaagctgagattttttttttttaaacaggaaaaataggggagtacctatcataaaagacagtagggcttataaaactatagtgataacacagcccttgtgatgccaggatagacatgtaaatctatggtacagaaacagatacatgagaacttgatacgtgacacagtggagaaattagtaacttttcaataaatggcactaggacaattgcatgtctgtatgtgaaaaaattatatacccttctcacaccatatttttaaaaactggtagattaaagacctaaatgtggcggaggggggagggggcgggaataccattttaaatattttagaaggtaatacaggaaaatttgaaccaatgtaaggaaggagttgttggatgtgactcaaagtgggaaccatgaagaaaaagagtcacacatctgactatattaaaactagaaacttaagtatgacaaaagacactgaatattagagggccagccacagacgtggaaggtacttaccttgcaattatctaccaggaactgacaaaggaagtgtccaaattacataaaggactacttaaggggggaataaatgagtgatatatgagagagaaccaaaaggtcaattaacagaaaaatgttttagctcactaggagtcaaggaaatgccagtcagcacagttagataccatttcacatccagtcagataatatcagggattggcaaacatgttgagaaaataattcatactttagtaaagttgaaattacatattgcttataacagcagttcaacatctgtctttttataagactaaagttttgcatcatatttaggtacagaaattgtcagaacacttaaagcttgtaggcatttgttgctgggagaagactgaattgcttttttcaaaaactggaaatcacattgatgtgttgtaaaagagaaccttagatttagagagggaaaaaaaactacagtattttgttaaatttatctacatttaaagatactaataaatgcagtttatgaactaccagtctcctatattggtcatattttgacaagtaaagctttttttttcataacgtcaatattcacacagaggttacagttcagattaggagaacatatgtatgataaaacaattagactaaaaaggtcctttctttttatatgaaatggcagaaaagcaacagcagtttattgcttatgacagaatacatatgatactcgaatatttcttgagatctttgcttaaatctagtatctatacaaaatttttatgttcgctagattgtaaattcagttttcttactaagaaagactgaaatttattaataattttggggttctagtgattagcattagagactgatttgcttttaaagagaatcgcatattttatatatttccaattttacatacttctgaaagaacataactttgtcattaatatatggcatatgtatacaatgaaaaatgtacaaggatgtttcttacagcagttattgaaatagcaggaagaaaaaggtaacttaaaagacacttagcactagagtctccagtcacatctactccctggcccatgaactaagaacgtttttaacgtgtgtatgaaaggagtgacttaatagatctggcgtgttgaaacctgcacctttcaaagaaaggtctagccctcaacttgctcctgggagatcacagcgctaagcccctggaatatcctgcctgatgcaaggcctttgtttacctggggccttggatcacaccagatagtttatgctacagatttatggtgagggcattgcaccttgcagtatcaatttaatcgccgggggaggtggaaactgaataacatctgccatttctgttctccatgcctatgtgactaacacccaataaaaaccttggacaccaagtctcagcttccctggttgataatatttcataaatgacccacactcattcagagaggattaagtgctgtgcatgcatctcctgtcagatgggacaactggaagcctgtcctgctctcttctgaactctttcctatctgccttttaaaactgtactgattttaaactgtacttttgctctaataaactaattgtcaacgtaacttttctgagttctgtgagtcattgaactggacagtggtcttggggaccctgccataactgtttaaagaactgttttttaaaaataatatttgatagagactgtatgttctgcaaatcctaaaatatttgctatttggtcacttacagcaacagtccccaacctttttggcaccaggaaccggttttgtggaagacagtttttccatggacaggggtaaggggggaggtgtcgggatgaaactgttccacctcagatcatcaggcgttagattctcataaggagtgtgcaacctagatcccttgcatgtgcagttcacagagaccactgctgatctgacaggagatggagctcaggcggtaatgctcacttggccatcagtcacctgctgtgctgcttgattcctaacgggcatggaccgatactggtcctcggcccaggggatggggacccttgacttacggaatacttttgccaaccccagcagaaatataatgaaaaaataagtttgtttcatacattgaaaacagctaaaatggatgaaatctcaaacttttaactggagaaaaaagtaacagaaggttgatatagtgtattatttatgtgacttaaaaacaaaacaattactaaagatgtatatgcattaagaaaatcacaaaggtttttattttcaacatatgttgaaaataaatgtgtgtgtgtgtatatatatatatatttacatatttgctcataacaatagtttgaggatgtccgcaaacttaaagcttggggtagggggtggaaatggaatggatgataaaacttacttgtctcatttttgtttcttaaaaagagatgcagggtgtattagtccattttcatgctactgataaagacatacccgagactgggtaatttataaagaaaaagaggtttaatggactcatagttccacgtggctggggaggcctcataatcatggcagaaggcaaaaggcacatcttgcatggcagcagacaagagaatgaaaatcaagcaaagggggtttcccttataaaactatcagatcttgtgatacttattcactaccatgagaacagtatgagggaaatcacccccatgattccgttatctgccaccgggttcatatctcagggaaaaaacagaccttgtaaaacaaataaggtagttattttaattaatattttcatgtatttccttaaatcaacttagcttagaactatggaaagtcagaaacaggccttggtaggtaaattgcccaagtcgtggtgaattcttaaagacagcattctataggaaatattttagtgctggcagatttagttattttgaatggtggaaacttgaaatttgatctttgaaatataaaggaataaagatataaggactgtactgtacattttagagacatcaagttctcttaattttgtgactctacgttgagaagaacattgagagattacatgagtaacaagaaagagaaactttctgagaatgcacagctacctcttttacaaataacaaagcattgcctttgcaggggttagttttctttaggcttggggcaagacattaaatccacccctggtttataatggaggcaatatacagttgacctttgaacaccattggagttggagtaccaatcctaaccccaccctgccaccccctgaaaatctgagtgtaacttttgactgctctcaaacttaactactgctattgactggaagccttactgataacaaatagtctattaacacatacttggtatgctatatgtattatatactctattctttaagctagggaaaagaatgttaataagaaaattgcaaggtagagaaaatatatttacacttcattaagtgaaagtggatcatcataaaggtcttcatcctcctcacgttcacgttgagtaggctgaggagggggaggaagaggggggttgatctagctgtctcagatgtagtagaggcagaagaggtagaaaaggaggcaggagaagcaaggcacggttggtgtaacttttattttccaaaatccacatataagtagacctgtgcatttcaaacccgtggtgttcaagcatgcactgtaaccaattggtattttcttaaaaataaaaaaatcttggttatttgtagctgccacaaaacacagatcacaccaagtttagtgtccactgatatctggaagactttaagggtattacattttaagtgctattaggatcttgagtaatcatcaaataagaaaatgggtattaaaatgctttgtaaactgtaagttaagataaaagtggtattcctgatgttaaccactctcaactgagcttagatttctagtatataccagcttgggtgacatagtgagacctggtctctacaaaaaaaaattaaaaaattaagcatggtggcacatctcagtagtccgagttactctggaggctgaggtgggaagattgcttgagcacaggagattgagactgcagtgagccacagtcatgcgactgcactctagcctgggcaacagagcaagaccctgtctcaaaaataagtaaataataagaagatttctagtatataaagtttaatgataccttcccta

SEQ ID NO: 394 - DNA, 6661 bp, Homo Sapiens
gcaatcaggctgcagctggagaggacaagggcggcttccgggtgttggcgggggcatttgtctcctgccgcagctggggctgcagatctagtcttcagttcacagagaactgccccccaactgctcccccgtactctgctcctacaggcccagctgctgtggctgtgcgacctgcagggactggcagacccgtagctaagacgccaggatttcctggaagcagagaaatggccgatttcactactagatctcaagtgactcttgaagaaaggcaagttggatcttgctgtgttctcatttcacccaagacctttggctagatcagaacataaaaaattcatttcaaaaagtgatactgagaagatatgagaaatctagacatgagaatttacaaataagaaaaggctgtaaaagtttgaatgcatctaagttgcaggaaggaggttataatggacttaaccaatgtttgtcggttactcagagcaaaatacttcaatgtaatacatgtgtgaaagtctttaggaaattttcaaattcaaatagacttaggagaagacatactggagagaaacctttcaaatgtaaagaatgtggccaattctttcacaggttctcacacctaagacaacatgagataattcatactgaagagaaaccctaccaacatgaagaatgtggcaaagattttaagcagtcttcaggtcttactatacatgagagaattcatactaaagagagaccctacaagtgtgaagaatgtgacaaagcctttaaacaatcttcaaaactgaataaacataagaaaatttatactggagatacaacctacaaatgtgaagaatgtggcaaagccttttcctattcctcaaccgttactcaacataacatagttcatactgaagacaaaccctacaaatgtgaagactgtggcaaagctttgaagtagtcttcaaacctgactatgcgtaagattattcatatgggagagaaaccctacaaatgtgatgaatgtggcaaagcctttagaatatcctcaaaactgaaagaacataaaagaattcatacttgagagaaaccctataaatatgaagaatgtggcaaagctttttactgttcctcaggccttactcaacataacatagttcatactggagacaaaccctacaaatataaagattgtggcaaaatttttaagtggttttcagaccttactatacatcagagaattcatagtggagagaaaccctagaaatgtgaagaatgtggcaaagcctttaaacaatcctcaaaactgaatgaacatatgagaactcatactggagagaaatcctacaaatgcgaagaatgtagcaaagcttttaagcaaccttcaggccttactctacataagagaattcatactggagagaacccttacaaattcgaagaatgtggtaaagccttttattggttgttaagctttactaaacataattgataggggagagaaaccctacaaatgtcaagaatgtggcaaagcttttaagtggtcttcaaaccttactatacacaagagaattcatacgggagagaaaccctgcaaatgtgaagaatgtggcaaagcttgtaagcagtctttgggccttactatacaaaagagaattcataatgaagagaaaccctacaaatgtgaagaatgtgataaagccttttactggtccttaagctttactaaacgtaagatagttcatactggagagaagcactacaaatgtcaagaatacgtcaaagcttttaagcgtcttcaaaccttactatacataagagaattcatactggagagaaaccctacaattgtgaaaaatgtggcaaagccttttactgttcctcacaccttattcaacataacatagttcatactgaagagaaacactacaaatgtcaagaatgtggcaaagcttttaagaagtctttagaccttaatgtacataagataattcatagtggagagaaaccctacagatatgaagaatgtggcagtctttaaacaatcctcaaacctgaatgaacgtaagataactcatagtggagaggaatcctacaaatgtgaagaatgtggcaaaggctttaaacaatcctcaaacctgaatgaacataagataactcatagtggagaggaatcttacaaatgtgaagaatgtggcaaaggcttttactgttcctcaagccttactaagcataagatagttcatactgaagagaaaccatacaaatgtgaagaatgtggcaaagcttttaagtggtcctctgaacttactatacatcagagaattcatactgaagagaaaccctgtaaatgtgaagaatgtatcagagtctttaaacactcctcaaaaccgaatgaacataagagaaatcatactggagagaaaccctacaaatgtgaagcatgcggcaaagctttttaagcagtcttcaggccttactatacataagagaattcatactggagaggaatccagaaatgtgaagaatgttgcaaaaccttttactggtctttaagctttactaaacataagagagttcatattggagagataccctacaaatgtcaagaatgtggcaaaactttttcttgttcctcaagtttactcaacataagagagttcatactgaagagaaatcccacaaatgtaaagaatgtgggaaagcctttaaccagtccttaagccttactaaacttatgagaattcatactggaaaaaaatcatacaaattggaagactgtggcaaaatcttttaagtattgctcaaatatatccagccataattcatactaaagattatgcctatgaacctaaggaagtttggcaaagcttatgaatacacctcaaactttcctaagccttggagaaatatcagtgagaaacctcagaaaactgaacaatgtggcaagccctttaaatggttgtcacatcttactgtaggtaaaataattgatagtggagaaaatctctacaaacaaagaatgtgtcaaaacttctaacatgctcatactttatggcacataaaagcgtttatacttgaaaaattatacagagtgtggaaaagccatttctatctgctcacatcatagtcaacatcaggaagttcatacttaataaaattattataaatgtaattactgttcaaagaccttggaaaatataaacccttaaaataaaaaagagtattctggagacaaacattacaaatataaagagggttgtaatacctttacttgccctatataatgtacagattttacactagaagaaaactctaaaggaattactcaaacttgtttggcatcagagaatttatgttgaaggaaaccgtacaaatgtaataagtgtggaaaaacatttgttcagaaactacagcttacaaaacaccacacagtttataataaaaaatatttttgcagatggaatacatatgtaaaaatatttagtcaaaattaagtctttgtaaactttagaaaattcacggtagggagaactaaggcactggcacttaagacgttacactaaatcagaatgttctgtaaagaaagtaatccaaagctaaaactgttggataatttatttgtatataagtttaagaggagtggaaggttattttttggagagttaaaattacattcaaggtatacgtttttccttgaaaaaagtgtaagttttttgaaaagcaagtaggtaattcaactgtaaaattgcttcatgctgttccttttttcctgttgtttgtgtaaaagcatgtcatcaatttctgttgcatcagaaatctgagagattcctttcttattaggtaggcatcattcattaatttttccatggaagagtaaggatattaaaatgtaagatgataatgaaaatctgattggagaggctctttatggctgacttttaacattgttcatgtgatgcatgagttatgtgtttagagtaatattctgcattatagtgagaggaaaactttgagttttagtagtaaattgttttaccaattgtacttttatgtaataaaatgtagggaattttaaaattcttttataagactgtgataacttaacttttaaattaaacgaaatggttttaaactttttaagacgtgcatttagtaaagtgttatgtcaccaactttaacgtatcccactgtattaaagatgtagataaaagatggtaacatagtagaatgacctctctagcaatctcttttgcctgtggcattaaactgaaaagtttaacagtattgtttcaatgggtaaaatgtacatttgtttaactttttaaatttttgtaggaacataatattgtttacctatttatggcatatatagaatattttcatacaggcatacaatttgtaatcacatcagagtaaatgaggtattcattacctaatgcattttttttgtattacagacaatccatttaaacatttttagttatctaaaaatgtacaagtaaattattacttgctacagaggttttttatcgtcttgataataattacatagtagtataataaatctcacatttctaagtcctgaatgaatatttttaaaaatttgtcatatatattttgaacaagtggactctctgcctgtaaactcatgcagactgttagtttttacttacatgatgctaaatatacaaatatattactcttaagataaacattaggtgtaagaaaattgtggggcaagtaattgtgtgtgagagtacctattttcagaagacaagcaatattggaacaaaatatcactttaataaagtggacaaatcatttactagaaaaccagaaacctcagtgattttgaataatatctgtattctctgcattttatttaattaattactgtgaagtcttatggactgtgtttccgaatctttccatgcaaattctttctttcatttgcctggtactcatggtagactgattttttttttcatattttttgtgtttataatttattaagtattcattatgtgagttgctcagatattctaagaatttttataaaatttagtaatgcatgcaaaataatttttcaatgttatttcacaatgagtgtattaacttatatttcttttgttgctttcttttttcttttttttttttttgagatggtgtcttgctctgtcacccaggctagagtgcaatggtgggatctcagctcactacaccctccacctgctgggttcaagcaattctctagcctcagcctcctaagtagctgggactacaggcatgtgccaccatgcccagctaatgtttttgtatttttagtagagactgtgtttcactatactggccagagtggccttgaactcctgacctcgtggtccacacacctcatcctcccaaggtgctgggattacaggcgtgagccactgcatctgaccaacttatatttcatttagttagaacatcccattttgttattttaattggagaaacctgtgtaagctaagtttccttattgttccttttactctttataattgacataggtgaatttattcattcagccaatttgtttaagtaaatactggggaggcttcataagtcacaaagatattttgatatgtaaatgtagcaaacacaatgcttgctgtaatagaggcaccattattggccataaatatttctgctggagttagtttgtagctccaagtaaagataaagaaatatgcgtggtgaagaaataaaatcgattctgtatgtggagaggacgttgttcttatgctgcaaaactgactctttctgaatttaaagagacattcttcttattttctgattatctttagttttgtttttgtgtctacttatgtttatcccaactgtgtatgcatcacagcccttctttttcttctttgtgttatggctacatttttattgctgtttgttttgtgccatgtcatttcacacagtactttgtaggttctgatgagaagtttgtcaatgtaactttcagatccgttaattgagataaaaggcatccggtgttcacaggtgagaggaataaatcagtcagaatttcttgtctttgtaaaaccaaacttttattaaattttaacacagtctgtgtgtggtggctcacgcctgtaatcccagcactttgggaggctgaggtgggagaatcactaagtcaagagattgagaccttcctggccaatatggtgaaaccccatctctactaaaaatacaaaaattagctgggcatggtggcatgcacctgttgacctagccattcaggaggctgaggcaggagaatcgcttgaacccaggaggcagaggttgcagtgagctgagatcgcaccactgcattccagcctgatgacagagcgagacttcatctcaaaaaaaaacaaaattaacacaatgtgtggaaaatataaaattagttagaagatatgtcttagaaattaaacttttagaagagttaatggtaagtggagaatgttaaattttttattacatacttacagctcaacttaagttttcattcagaatcttttattttggtgtgaatgttaaatattcaaaaataatagaatgacacctgtggatttcacatgtgaagtaatctttttcatattaacattaaaatcttgaggaatttctcacacttgta

SEQ ID NO: 395 - DNA, 1597 bp, Homo Sapiens
ccgcctgcctccgggcctcaccaaggagcagctggaggagcagctgcgcccgctgccagcacacgactacttcgagttcttcgccgccgacctgagtctttatcctcatctctactcaagagcatacattaattttaggaatcctgatgacatccttctttttagagatcgttttgatggatatatcttccttgacagcaaagatccagaatataagaagtttttagaaacctactgtgtggaggaagagaagaccagtgccaaccctgagactctgctgggggagatggaggcgaagacaagagagctcattgctagaagaaccacacctcttttggaatatattaaaaatagaaaattagaaaagcagagaattcgagaagagaagcgagaagaacggaggagagagttagaaaataaacgtttgcgggaagaggaaaaaagaagaaaagaagaaagatgcaaaaaaaaaaaaaaagagagagagagacagataaacagaagaaaattgcagagaaagaagtaaggattaagcttcttaagaaaccagaaaagggagaggaaccaaccacagagaaaccaaaagaaagaggagaggagattgatactggaggtggcaagcaggaatcctgtgctcccggtgcagtcgtaaaagccaggcccgtggaaggctcgctgaaggagccccaggagacgtcacacagcggcagtgataaagagcacagggatgtggagagatctcaagaacaagaatctgaatcacaaagacaccatgtggatgacggcaggaggcacagagctcaccacgagcctgaccggctttccagaaggagtgaggatgagcagagatgggggaaaggacctggccaagacagagggaagaaggggagccaggacagcggggctccgggggaggccatggagagactgggaagagcgcagaggtgtgacgacagtccagcacccagaaaagagcgactggcaaacaaggaccggccagccttgcagctgtatgatccaggagctcacttccgagcgcgagagtgtggcggaaacaggaggatctgcaaggcagaaggttcggggactggtcctgagaagagggaagaggcagagtgagtcactgcacgcacctggcctccatggacgagcgagggcatcccagaaacgtgtaaatgaccccgagtgtgactgggaaggagaacttattccttaccaggaaactggaagctaaaaatacagagggtgacatagaaacacgcagaaaccattctaaagaaagtagtgatcttgtattaaattgagcagaattctcacagattttaccattcctgttataaactagtatttgttgtttagccaaaacagaaaatgatttccactggacagtagaaaaatatgtgtaaaatagggaagaaagttagtattggatcagtgtgagtcctgaagcactttcagtgctgtgagaacgacatccactttgggtttcattcgtttgtaagcagaggagctgtcagtcactcgtgcttctcggtggcctctgagccatggtgtcgagtgaagagtagttcttgtttgttacaacctttgtgagtca

SEQ ID NO: 396 - DNA, 2693 bp, Homo Sapiens
ctggtctcgaactcccgacctctggtgatctgcccgcctcggcctcccaaagtgctgggattaaaggcgtgagccaccgtgcccagcctaattcttcaattcttaataaacaatttatactgaagagaaaccctacaaacgtgaagaatgttgcaaagcttttaacgtcctcaaaccttactgaacataagataattcataatggaaactagccctacaaatatgaagaatgtggcaaacactgtaaccatttctcacatcttaccacacattaagataattcatactgaagagaaacccgacaaatgtgaagaatgtaacaaagtctttaactggtcttcaactcatactaaatataagagaattcatacagaagataaattttataaatatgaagaatgtgacaaaagctttaaaaacatttcaacccttattacacataagataatttatgttgtagagaaattctacaaatgtgaagaatgtggcaaagttttttttttttttttgaaatggagtctcactctgtcgcccaaattggagtgcaatggtgcaatctcagttcattgcaacctccgcctcctgggttcaagcgattctctggcctcaacctcccaagcagctgggattgcaggcgcctgccaccacgcccagctaatttttgtatttttagtagagacggggtttcaccattttgaccaggctggttttgaactcctgacctcaagtgatccacccgccttggcctcccaaagtgccccaaagtgctgggattacaagcatgagccattgagcccggtcgaatgtggcaaagtttttaataagttatcaaatcatactggagagaagctctacaaacctaaaagacatgacagtgctcttgagaacaccttaaacttttctaaacataaaagaaatcatagtgtcaagaagccctagatgtgagtcatgtcacaaagcctttaaatggttgtcacacttgagtataagctaatttatcctagagaaaactatgaagaatgtggcaaaatatttaaccaatactcacaccttatcgcataggaaagcatttatacttgaaaaaaaatgtacacctatgaagaatgtggaaaagccattaatatctgctcacatcttaacatcacagagtttatacttaaaacaaatattaaaaatgcaattactgtgagaatatcttttagaaaatataaaccttagaatggtgaagagtatttcttttgatgacaaacattacaaatataaagacggttgtagtactatatttgtatcacagatcttattgtgcatattttgtgctagagaaaaaccctaaagttgctcaaactttgttcaatatcagggaatgtataatagagaaaaaaacctgcaaatgtaataaatttggaaaaaagtttataaactacagcttagaaaacagagtaagttttttttgtagatgcagtaaatatgaaaaatattcaatccaaaattaactctgtaaatgtcagagaattcacagtagaaatgataaggcactggcacttcagactacactaaatcagagtgttgagtaaaaaaaataatttcaatctaaaatttagataagttatttgcatataacttaaaaaagaggaggtgattttttggagaattataattacatttgaagtatactttttgtatacttcaaatatcaaaaaaattaacatcacaatattgaaaaaaattacagactctgaaaagcaaataaggatgtaattcaactctcaagttacttcatgctcttcattcctactttatttacatgtgaaagcatgcgatcaattgttgctgcatcagagatatgaaagattcttttttattagatgggcattatttatgacctttttcataaaagagaaaggatattaaaatataaaatgcatgataaaaatctaaatggagaggctttttgtggttaacttaaaatattgagtgatgtatgaggtaggtgttctgaggaatatatttttgtgcattatagtgagaaaaacattttaaaattttagttaaaattaaaattaaattagtgatgtattatattagttgtgcttttatgtaatgtagtacattcataaatttttagattatatgtaaacttaattttttaaacattttttgacatgttaagtctgttgtacattcaatgaagtgttattatgccactcgctttaacctatcccaccttactcaagggtgtaggtaagagatggcaacagtttactatttggtaagagtggaataacatctctagtaatctctttttttcagtggctttaacctgcaaataaattaaagaatattgttctcgtaggttacatttttatacttttaatcttatttaaacttctttttttttttgccttgacaaatttaaacttatttttcttaacttttatgggtacatagtgtgtagatatatttctgccatatatagcatattttgataccagcataaaatatgtaataatcacgtcagggtaaatgagggattcttcaccttcaacatttattccttgaattacaagcaatccaaatctacacttttagtcactttgaaatataaaactaaattgttatctttattatagcgtcatttttgtggtcataataaaaatcatataggaatgtaaataaaatctatacatatctgg

SEQ ID NO: 397 - DNA, 5259 bp, Homo Sapiens
gattcctcaaggatctagaactagaaatactgtttgacccagccatcccattactgggtatattcccaatggattataaatcatgctactataaagacacatgctcaagtatgtttattgcagcactattcactatagcaaagacttggaagcaacccaaatgtccatcaatcatagactggtttaagaaaatgtggcacatatacaccatggaatactatgcagccatataaaaggatgagttcgtgtcctttgtagggacctctatgaagctggaaaccatcattctgagcagactatcacaaggacagaaaaccaaacaccgcatattctcactcataggtgggtattggaaaataagaacacttggagacaggttggggaacatcacacaacagggcctgtcgggtggggttggggggagtgatagcatttggataaatacctaatgtaaatgactagttaatgagtgcagcaaaccaacatggcacatgtatacctatgtaacaaacctgcacattgtgcacacgtaccctaaaatttaaagtataataaaaataaaataaaaaaaaagaaagtgggcttgataagattttgacttggtagaattttaactaccggctatacaattcttgacttaggaaattaaagccttaagtcttctgaaaagccctttaattcagttatttcattaattttgatagttttgcaccatcatctgctgagaaacctatcctagattgtaagaagtttgagagtgaagactgccttatacatctttttttttttttactttagcacatcttgcacaaagtattcattcattcaagaaatattaatcagctctatgcctggccctgggaatacagtggtaaatatgagacagctacagcttatggcttcatgggtgatatatttagtagacaacaggacaatattaaataagaaaaataacttaggctacaagaattccagagagatgtgagggcatctactttagtctgggagtcagccgtactctcctgtggagagaaggttagtggaaatttgaagcaattggtctggggaaatggttgcagaagactcacttcaggcagaaagaatgtgtgtgcttaggaacacatgagcaagagcctggagactgggaaaaactgaaaggatctcataatgtacaatgcaggaaagagaatggccaaaaatattctataagtttcctctaaactaacaagtattttaccctatcagtcatgaaacacttcttggatgcagctcatggcataagcagccctgtctgttctctccaagtccaggacagcttaggtctaacccagctgtgctggccacatacatctcagaccccctacttcatggaggacagatgttattgatcaccggccataacttcgaagccacctactgcatatttgcactgaagccattcttcccagtggctcttagccagtgactgggcacagcacagacactcagacagactcattcctgggatatgagagctcttctaatgagcagctttagctgaaagatccctcttcggccttgcagaagagcacagtagtctagactcttcctacacagccttccttcctttcccctcttctcacagggtgagacctgcgggcagttccatgattccttctgcctcctccagctcctccccatttttcttcacaggcatttcccccagtaaaatgctcacacatctaatcctgtcacagcatctgcttctcagaggacccaaactaacaattccagacaaccacgtatcttatcctgtagggggagatggcacagttacagatattttttttctgttagttaggcatagacatggaatcccaaagagtatttaatgaagttttttcttaaagtagaagaaataatcatgggctgagtggtagaggatttgtaatcaaagaaatagcaagagagaaagagagagaaaagaagaaataggtgaaggtgaaaggggggaaatgagagggaggctgtggttggggaggcaaacttcaaagaatgttgctggaagagggggaaggaaaaatataatgtgctcactaattctgttggaataacaatctcttattcttggaagacccagtcttctctttaagaaccaggttccatcactctaatggaagggtactcatataatcacaagtctaagacagacagagaaacttttagcaaaattacttatagaagacaggctatatatatcatacagatttgtaaattccaagagtctaactttgggagttcaaaatatctgattttttttttttgcaggtatttctttggaggccaagtcacatgggaacctctttgtccaccttccctctcagggcccaaatatccctctccaaagattcagaagcaaaatgggaggaagttgacaatgatgacaatctatgcctgacttcagccccaaggaaggtttgacctagagaggtgtgaagatgtcaaacctacactgtccaatatggtagccagtagcacatgtgactctttacattgacttttaaatggactacaattaaataaaatttaaaaatccatttcacgggcataccagccacatttcaagtatgtcgtagctgcatgtaactaatggctactataccggaaagcacacacagaaaatgtttcatcatcacataaaattctgttgaacaaatctgtgttgaataacaacacacttaggactgtgttcaatcctaagttgaacacaatccttaggatcttgctgaatggacagagctgcagtgggaaaggagaagagtgaggctctaggaaaatcctgccctctaaaaaatgaagggctcgttctatggttggcctccatgccatgaccaaagatcatggacaggttaaatcgattaggaaagcacttctcacatatctaacctgccctgccatgggttcaatttacgtagtacactggacaatgtagcttgaatcctaaattcaaatgtgttaaatattcttagtattccgtctgtatactaacaaagaaaaaaatgttaagtgactgtgccacgctctccttccagagcagtgtttcttaatttcagcactactgacattttgggccagataagtctttgctgtgggggcttgtcccacgcactgcaggatgtttggcagcacccctggcctccaccctctagatgctgggagcactctccacctccacccccattgtaacaactaaaaatgttgccagacgttacccagtgtacgctggagggaaaaatcactccagggtgagggccactgatctagaatatgatacatggcatctgtgatatgagaaaatgaccttgggcctggtcgtaaaagaatgtgccacctcctcacctgaaacacaaccaagcagtggcccgtgactgacttggcaaaataacactttgttcagaggaagctcataaaacagttttggccgggaggatgagctaacctcataataggtacttgagagaagccaccccgctaatgcatgctgtgtaccatgattaggattgacttaactagggtgaagaaatcatataatttgctgtgtctacagatatgtaagtaatccaaatgtgtgtttcttttttaagtatcaaaggataattctagaataaaattcatagtcacagtcatattaaaaaacgtccacattttcaaaagtctaactacatttttcactctcctctaaaaatggagacacaacactgtgttctaacctgaagatttgcatactcaattctaactcaaaactttatctgctgacatccgtgcttcataaataattcccatgtgataattatgtatcttgagcagaattaccaatgcatttgtcttgaatgcttaatatatttaatgggaaatgtctcgggaattttcagttctgtcactgccaagaggaggaagtattaaccattcagaataagatactcacattagattttgtgcattaagaaagtcacaactgaggctgtaggacttaaatagatgtttctccagagaaacaatagtcactactacactccctttcctcccttaaaaggctgtccattcctaaagggtagggactatatgttcttccagtacctctactagtgttctgtgcatattaggcatttaatacaatttttgtgcatgaacagacagactcagaacaaagcctctgagtatattgccatccagcttggatgaggatataagtctcttaatccccaacttatcttgttttctaacacaagcaatatatggggaattatgcttaagaggctgtgccactttgtatttaaaaacccaactctgttttttagactccttgttccttaagttggttatgtgttaggtgaccttgctagttccctaatttttccaagtttccattttctcaccaataaatcgagactaattaataatgacacattaatttgaggtctaaatgagaaaatctacacaaggcttttagcacactgcctgacacatagaaagtgttttctaaatgctagctattatttttatggcataattctgtcatagatccaaaaagacttttttatttttaaaaaatcatagtcgcatttttttaattattacttttcttctctttgaagtcaatcctctcaacacagcttgagaattgcaatgaatttggggatctgagaaacaatcttttctaaatatttgtatgttatttggaaacaattacagtggcaaaagagaacaagaggctaccttttagtatcaatctatctgtacacttaaaaaaaaaaaaaaaaagaaaaaagcagcccatgacaagtacatgctgatttttaagaagaggtgaggtaaaagtggtacagctttattaagtacaagaacttaacaatcccttttattaaacagaacttgaatttgtattacactgaatttatagatcaatttgaggaggattgatatgggtatgatatggagtcttgttatttaataatgtggtttctcacttaggattgtcttatatctttcaataattttagaattcttttttaaaagttcttgcatatcatttctcaggtttgctttaaacggctgtacagatttttgaatggggtattattaattgttcgaattggttaaagcaagaatgctattgtttttgtatattgatcctctatccaaaaaatgtactgaattctctaactactgctagtttgcagattttcctggatttgcaaagttaaaaatcatatgcaaata

SEQ ID NO: 398 - DNA, 2433 bp, Homo Sapiens
aaagagtaaccagccacccgggcttgtaactcccgttctcgcactccagataaggcggagaccacttgaagtggctcttgtccccgccgagcccgtccttgcgccgccagctgtggcccaggccccggggcccctgattggggccgcggcggtgtaagtggggcctccacttgcgccggaggccgtggaaccactcggtctccagagtggcgttggccaggtggggtgcggaggaggacaggtcttggagcaggatgcggctctcctcgcgcgtggcctggaggaagacctgtggggccggtgcggacagcgaatcggtgctgaaggtgatggccgcccgggagatgctgggctcgccctccagaaggctccacaccagcgcctggtaccaatccaggtcgtcctgcaagttctgctcccgcgacttattgctctgcagcatcacgttgaggaagttggtggcgtgtgtcagtgtgtccagcgcccggtgcaaggaggggtgcgcgctggccagggctggccacttccccggcaggcccgccaactcgtagcggccggagcagttggctcgcttcagctggtgggagtccccggtgtagagcactattcctaggcctccaaggtgtctcctcaaagactggctgacccactttccagatggagccaacatcatcctctgtctcatccataaatcatgaacagaaggcccaggaaatgagaagcggagtccccactgggagagtagcagagcttccagcatgaggcccacaacgagatcacagaagcacagcagaattctccagaaagccagttgtgatcaatggcagcacagcctggtcccacaggaaatgttcctggattttaaaacacaaataaacagtaatgcagaaattagagaagatgtatcatttaccaaatttaatctggcacatttaataatacattatgataattatggcacctgaaagctagatataaatactcattcatttgcaattcattggcaataatagttatttctgagattccctcagaccaatgatggtaaagagaaaagataaagttaatgagcttctcctctgagagaaggaggtcacaggccactcttccggtcgtcattccctataaaggattaaaggtatgagctcagggaaggatgacttcccccagtactttcttgaagttcttttggaagaagaaatagttagataccctagagagtctgattttggtgttcatttagaagtcaaaggcatgaggtcagaccttggtctcataatagattagcagcaagagaaattattactgtgggttttgtttttgtatttatttatttatttagacatcaagaaactgtgaaactgagcagcccttcagtaggagctggtaggaaaggcagcttgatatgtaagcaatctagaaaaacagctgtactttcagtaattaataaaatttagtccaagtatttgcctaagacttttgctttttagtactcatactttttactactcattccaagtaaattaagaattgaagtcggaagggccagatcacagaatgtctcttaaatataggcaaatgattctagattttatacagtaattccttgatcactaataagtttgtctctaatattgacccaaaggtgaggaaaagagtagttctcagacaaaaaaatgcccaggaataggtgtcaacatagccgaatgacttgtgaattagtgaattcctacaagccaggacagagcttttgaaaattataataaagttattttcctctccagttttttggcattgtattacaatgtctaggaaggaagctaggtttccccaccctcacatatactcccttctatgaagaaggcagatataggacaaggaccaggacagtactggaccatagcactaaggggtaggcttttaggcattaagagtgcggaagataaaatttaaaaatcaatccatcttaatcaataaaacatcttacctctgcatagtatacctacctgaattccttttttggaatctttttccttatttaaacttgtcatttgagcagctgaagtaaaaatatgggccaggaccctcttcttagtgagaaaatcacttcctaccttcaccccaacaacatcgtcactaaaacaaatcaataaaaacagcctccaatcaaaggtcaaaggaaaccagagggagctaagggaaaatgcaccattaagtgggcagttcagcctggtcattctagctcttccttctaagagctttagttttaattcataaattatctcttcctggtttggtttggcttttgtgttttttttcttgccataaaagtgataaggcatgaaattccaagtttagggtgtgagcctgggggaaaaattgccaagaaaactatttggttgccttcaggctaggcttctaagtcttaggggc

SEQ ID NO: 399 - DNA, 1125 bp, Homo Sapiens
ctcaagcgctcttgttgtcttcctgggcaggtggtgccaataggatgtactgacagatcagaagtggtcgtgagagaaggagcaagtagccagaagagtgaagtgtgcactggctgagatgtgggagcaggtgttgttggtttccccggagtaagttaccttgagtgagttaaggttaagatatcccaggggtgaggttgagcaggcagttgtgtatgtgaccctggggaaagtctagctgaagatacaaagatgggatgagatcaccaaggagtaagtgtctttagcaaagagaagagaccaaggactgaatctggatacctcaacatttggagtcagagcctgaaaaggatccctcaaaagtgcccaagaagcagcagaatgaggaaagacagcccagggagtgtggcacagctgctcctcaccacttcaggctcccctggagtccaatgcactggggcctcattcctgggtattataattgcctcctaagtggcctctggcttatgtctcctaccccagttgatgttcatcacatcagccagagtggctctgttaacacccaagccagttcctgcccatctgctgagaatcttcaagggctttcacctcactctgagtcgaagccaatatcttcacaatggcctggccctttgccaactgctgtggtttaaatgtttgtacccttcaaaacttaggttgaaatttgcttggcaacatggtggtggcaggaggtggaacctttgggatgtgatagggccaagggctctgccctcaggggtaggattaatgctgttacaaaagagcaagtttgactttcttttgcctctttgcccttctaccttccttcctgggaggatgcagcaagaaggccctcgccagatatcaaggccttaagcttggacttcccagcctccagaactgtgagtcaataaatttgtttattaaaaatcacccagtctcaagcagcacaggtggactaagacaccacctctctgaatttacctccagctactctggtgtttactgagtccagcaatacaaaacatgatcctccctcagggcattcacaaatgctgttctccctgcatggaatgctcatcccccaaaacatttgcacagctt

SEQ ID NO: 400 - DNA, 3609 bp, Homo Sapiens
ggcaacgctgatgaaaggcaaattcctgagagaaaaatcacccagatttttcagtgccttctctagctttctagaagttgttatgagtggacctgactacctagagagagtaatacagaagctccgtgccgatcacagctacctcattaccatgttcctccaagatggccgcccctgaggagaatcatcaactgggctttacggaagagagaaatccaaacgaccatcagcaacaaatgaaagactgaagttgaaaggaaatccataatttttgaatgctggccgaggtctgtgacctctgactgaatggtttccaagctccgaattcctagttagcattttggtgtggatacagaagacgagattaacacagatcaagtaacatggaaataaaaaaggagacaatgctggatgatacaggggcagccaacaagaggagaaaacccaagcattggcaaatgcctcattatccaaagaacactgaggtgtggagcaaaactgtgttgaatgaactgtagatggaaattctctccttcccaccgaggagccgctgcaggttgcagactcccagaatgccacactgagaagaggagggctaaaattctagagcagaatccctggggcagcccctgctgaagaagggtgcatctgttgagaatctcatcaccgcccccaccccgcccagccttcaatttagaggaatttctagttcacgcagaatgaagacaagatcacataagtgaggacgacgccccatttacaagtgtgatttggaagactgaagtggaaaccttgggaaggggcctcagagtatgtcagctggggtcagacgggaacaggagtctggctcaacacacatttattgcactcctgtttcatgccaagaaatgtaccaaaatctgggactgtgtaacacagcaaaggaaaagactcatctccaggaagcccccttgtctaggaagagaaattgaatatcagcataaggtggtgaaaagctgtgaaggagatgagtgccaggagtccatggaggaaggattctagcctggacaggtgaggaatggctttctggaagaagcagatgccccagctgaactttaaaatgcccatgtgaaatgaactgtctgtatcttcaatcagcaaatggagtaggtggccactgtttaattctggaatggggaagtgtaaaggtgtggtgtgtgtgtttacccctacttagggattcaaaacagacagtaaagaacaaaagtctagccctttgagcattctccatgggacatttgaggtctagctggccccagagaaagagagacagaagcaaggtcatatccatttgagaaaatcaaagtgtctgctccaattgagtctggtgtccttattcctggaatagccatccctactgctctggtgctgatttacctccggcagttcagtgcttcctggaaggtaggctgggctttttaacaaagtgactccttacttgacatgttttacccaaacacagaggccactgcactatgtgcaagaaacaacaaaaaattaaatgagactcaatgccttccttagggatctaaaaccccagtaacacagataaacaggtaaacaaataatgtgatggtgtgattctatagcaacaggaatagagcactgcagggccaccgaaggaaaaggtgatgacctggcttggattcagtgataaaaaggggcttacctcctttctctgtttctgctaaaagccagtgattaccccctgcttttcccatgttgggcatagctgtaagtactttagacatagcggcacatttaatcatcatgcaacaataagaggaagctgaggcagacagaagtgcccaaagtcacatacttgaagccaggacttgaacctgggctatctggctcctgaatccatggctttcactaataatgacttaccctccaatgaggaacaagctccattctggcctttctttagcgaaggcaactgcctgagctcatggtctgatctggcttctgggaaagagaaagcaggggaaacgtctagagatggcatactgggagaagaaatttcttgctgtggaatcctgcccccatctccctccccaccatacacaatcccacgtgcatttacacctacacgccgtgtacacacgaacattttttctgctactcccatgggccccaactctgccttttcatcaaaatcacccagagttttaaataaaatgcagatgttgaggcttgttcctaaattataatcttgggcatctaaattttttgattaaaaaaaattgacatgcatgcttaaagtaaaaatttagacaatacagcaaagaatgtgtttgtacccctcccacctagcccttagttcttccgaaaggcaaatacttaaccgttccttgttatccttccagaaaacaatatatgcatatattcatcttttttttcttcttcctctgtaggtgattgtggtgaatagtcatgagaatctgggaactggctcctgctctgtctatcttggagatgcatcttttgtgagaagccagggcaagaatagggaggcttaggcaatgggaagtttctgagtagataaagcagatggcagagcaaagggacagagcctggcgagaggctactccctgtagcaacctgcctaagagtgagaggaaagcaaggcatggctatgagcacgtgtagtctcagctacttgggaagctgaggctgggggatcacttgagcccaggagttcaagaccagcctaggcaacatagtgagaccatgtctctttaaaaaaaaaaaaaaaaagaaaaagggagagagagaaaaaaaggtgacaattcccccaacacacataaagtacataagagttaacaaggacacagtggcagaaaatagtcagaactgagcaagcatcagtgaggaaatgttttcctgaggagacttgagaagtctcaaaaatgaaaagaaagagtatttggtgtagaaagaatggcatgagatgtgaaagctcattcatccatttattccaggtatatctttttcttcagtactttgggaggcaataggtgtaatagcaagaacattcaggttagtgggttagtgtgagtctgccatatgtatgagggttgaatacacattaggtgtggtgactgtcatatgggaggcactgcaaggtgaaggagacatgtcctcacatttggtctttgggaagcgaagcaggcagaaacccaagtgcaaagtggccatttgttttcctaatgctagataagtacctgatgtgttggaagggtggagtagaactagaaactcctggaagttcttttaagaacgaatgcaggacctcatcagcccgagtctttaaataagtcacacatttttggtcaccacattctggaagggggacaaaaagatctgtcacagacaaaatttggagatatttaaggctttgttgactttggcaaatgcttgattatagttctgtggtctgtttgttttctagagtctccatgaattgcaagggaaaacaagtggtacactggtatttctatttgataacctgttctctttggaattccggttagaaatcaaaggcttacttgagttttaatgctttcg

SEQ ID NO: 401 - DNA, 3294 bp, Homo Sapiens
cgaaccgtgtctcgggagcgttagagatggagactaacgtcttccaagggagattgcgtctccactttcaccctggtactgagaggttgagcacaaaattgattggcctggggtacatcatctaaagatcctaggattgctgcaggtcagcagtctccactggaaaaaaagatcttgaatctaggtggtgtgcatacaacagcagcaagacagttgataatgcagaaatatcaggaggagtgtgaaatactctgtagggagcaagctgtttctcttgactactggcttgccaaagcagagtcttattataataaaataatagtggaaatgatgaaagaagagacaggcaatgaaatctagaaaaaaatggaggagaaaacaacccagagcgtagaaggactaaaacagtactgtttggtacctgagagagagatgaaacacatagaaaggcacatacatcaaacaggaaaggctggagaatttaagaacaaaccatttagacaagtactacaaccccccaatgaaacaaaattaccaaaaattatgccagaagggcatggcatccagaacgcacagagaagaaagcaggtaaatgagagggaacagatgcagactaaggatcaccaggaacgcatgattcgagggagagaacttgcagaacaaagactcaaggagagaatcttgagaagaagccagagccagctacttacatatgagaagcatgagagagtaaaagagataaaggagtttgaaagagttattgcgtatcttcttttccaaccatgcagtagaagtcggattaaagtgagtattcttatggataagtctcagaatggagagaaggtgaatacaattgtgaaaccatatcaaagaaaattcttggcaatgccaccctttttaagaagtcaaataggaaaaataagagattaaagtttcaatgctgttatgataaaatcatatctcttaagtgaacccttttttttttcaaatgctcgttctctccagggttcagtgaatattcccatttgtatcagatacagatagatagttctgcacttgaaaattagcttaacttttttagttgacttgcatttgttcaagttgcatatcctttctagtgttcagtgtcctcatctttaaaatggcaataatatttgatggcatttatggaaggactgttttttttgtgaagtgtaggtatgtattagttgtttcataaatgttagtttccccacttggaaagaccggggttgggcaatggtggtgaataaagaattgttctaatcttcttctcttattctccctgttcccagccctccaaggttattttgatgagattgctatagtttagtatatggtctttaatatcataccttcatcagataactactagccagcccctaaaagtgtaacttgctctgtacaatttatttgaatgagaaacttaattttgagagcctcctacatgctaggcattatgttagttactgaaggtgaataaagagaagtctctgcccttgaataattttcaactaatggcatagatcactctataaacagataatgtagtaaataaaggttacaatagaaaggtacagggtgctttacaaaggacggattctaacctggcccaggtgagcagggtgaaaaggaggaaggttagggaagggagtattatagtctgtcatgtttcttccagctttttttgtcacttcctatcacccacttaagcaagaccttcctaatgcttggatccactcagggataatcaaactcagcctttctcaaactcatgtttttggcgctcattgataaatcagaaagcaaatttataaatttagtgagaattacagttgtcaagcagaatgaaatttgtgttttctagtcagtttattttcttcccagataccagaaagttgggaaagcaggggttcagagttggtaagcagagaagcaaataaatggaaatagatgccctcaggaatattatgcttaagttgtgataattctgatgcccaccttgctttactagcagaacaccctttaccctggatactgctaggtcagccactgatacaaatgttctgtgtctgtgctcctcagtacagtagcccttgctacacgtggctgttgaggcatttaaaatgtggctggtgcagctgtggaatggaatgtttaattgaatttcatttaaatttaaattgccacatgtggcaagtgactaccctgttgcacagtgtagcactggataaacataacttctgtgttctagattccagtcccaccattagctttctgtttttgacagtgtttgctggtatgataggtcactgttcattttacattactatcagtttagtttcctttgcatttcagaggctccctaatcccttaaagagatttaaaaatcaatgtagaccacttctgtgtgaaaataagatgactgaatttgctttgattggaattaggaactgacctctctttgctagttctggaatttggccaggatgcacatcaaaatctcattcctaccctcctgatttgcctcatggaaacttcgttgctgtgtctgttctctggtcctctattgctatgtctcagctttagattctatgttttgcatagaaatggatcatcagaatgcaacaggcagaagacttagaagtgcaaatcagtagggtaatgacaagccctttgagctgagtgggactgaaaagtaacctaacatataacctattagtaattgtttaccatgaaggttttcagtgctggacacataaattgctgagttcaactgccctctttcccctccaaatctagcataaaagcaactggtgctctcagggcaatttcacacctaatacggctaagaataaaagtctatgtttcaggaactcagtttgtccaaacctgcatccatcatctacctcaaattatatccaccttttcatttctttgcactgtgtctgcttaaatcttgagtcacacttaatgttttttttttggtcttttttctttttaatgtgaaatagaatatacaatacacaaatgaaaatgtatatttagaagaacaataataaatgtccaggtgcccgttgctcagactgagaaatggaacattactacatcccaggagcctcgtatgctctcattcatatctctctcccctgcagccagaggcaaccactatcctgaattttgtataactgtcacctagcttttatagattttactgtctgtgtatccctaacagttgcttatttatagcctttatataaatagaattatactgta

SEQ ID NO: 402 - DNA, 3272 bp, Homo Sapiens
agagatggagactaacgtcttccaagggagattgcgtctccactttcaccctggtactgagaggttgagcacaaaattgattggcctggggtacatcatctaaagatcctaggattgctgcaggtcagcagtctccactggaaaaaaagatcttgaatctaggtggtgtgcatacaacagcagcaagacagttgataatgcagaaatatcaggaggagtgtgaaatactctgtagggagcaagctgtttctcttgactactggcttgccaaagcagagtcttattataataaaataatagtggaaatgatgaaagaagagacaggcaatgaaatctagaaaaaaatggaggagaaaacaacccagagcgtagaaggactaaaacagtactgtttggtacctgagagagagatgaaacacatagaaaggcacatacatcaaacaggaaaggctggagaatttaagaacaaaccatttagacaagtactacaaccccccaatgaaacaaaattaccaaaaattatgccagaagggcatggcatccagaacgcacagagaagaaagcaggtaaatgagagggaacagatgcagactaaggatcaccaggaacgcatgattcgagggagagaacttgcagaacaaagactcaaggagagaatcttgagaagaagccagagccagctacttacatatgagaagcatgagagagtaaaagagataaaggagtttgaaagagttattgcgtatcttcttttccaaccatgcagtagaagtcggattaaagtgagtattcttatggataagtctcagaatggagagaaggtgaatacaattgtgaaaccatatcaaagaaaattcttggcaatgccaccctttttaagaagtcaaataggaaaaataagagattaaagtttcaatgctgttatgataaaatcatatctcttaagtgaacccttttttttttcaaatgctcgttctctccagggttcagtgaatattcccatttgtatcagatacagatagatagttctgcacttgaaaattagcttaacttttttagttgacttgcatttgttcaagttgcatatcctttctagtgttcagtgtcctcatctttaaaatggcaataatatttgatggcatttatggaaggactgttttttttgtgaagtgtaggtatgtattagttgtttcataaatgttagtttccccacttggaaagaccggggttgggcaatggtggtgaataaagaattgttctaatcttcttctcttattctccctgttcccagccctccaaggttattttgatgagattgctatagtttagtatatggtctttaatatcataccttcatcagataactactagccagcccctaaaagtgtaacttgctctgtacaatttatttgaatgagaaacttaattttgagagcctcctacatgctaggcattatgttagttactgaaggtgaataaagagaagtctctgcccttgaataattttcaactaatggcatagatcactctataaacagataatgtagtaaataaaggttacaatagaaaggtacagggtgctttacaaaggacggattctaacctggcccaggtgagcagggtgaaaaggaggaaggttagggaagggagtattatagtctgtcatgtttcttccagctttttttgtcacttcctatcacccacttaagcaagaccttcctaatgcttggatccactcagggataatcaaactcagcctttctcaaactcatgtttttggcgctcattgataaatcagaaagcaaatttataaatttagtgagaattacagttgtcaagcagaatgaaatttgtgttttctagtcagtttattttcttcccagataccagaaagttgggaaagcaggggttcagagttggtaagcagagaagcaaataaatggaaatagatgccctcaggaatattatgcttaagttgtgataattctgatgcccaccttgctttactagcagaacaccctttaccctggatactgctaggtcagccactgatacaaatgttctgtgtctgtgctcctcagtacagtagcccttgctacacgtggctgttgaggcatttaaaatgtggctggtgcagctgtggaatggaatgtttaattgaatttcatttaaatttaaattgccacatgtggcaagtgactaccctgttgcacagtgtagcactggataaacataacttctgtgttctagattccagtcccaccattagctttctgtttttgacagtgtttgctggtatgataggtcactgttcattttacattactatcagtttagtttcctttgcatttcagaggctccctaatcccttaaagagatttaaaaatcaatgtagaccacttctgtgtgaaaataagatgactgaatttgctttgattggaattaggaactgacctctctttgctagttctggaatttggccaggatgcacatcaaaatctcattcctaccctcctgatttgcctcatggaaacttcgttgctgtgtctgttctctggtcctctattgctatgtctcagctttagattctatgttttgcatagaaatggatcatcagaatgcaacaggcagaagacttagaagtgcaaatcagtagggtaatgacaagccctttgagctgagtgggactgaaaagtaacctaacatataacctattagtaattgtttaccatgaaggttttcagtgctggacacataaattgctgagttcaactgccctctttcccctccaaatctagcataaaagcaactggtgctctcagggcaatttcacacctaatacggctaagaataaaagtctatgtttcaggaactcagtttgtccaaacctgcatccatcatctacctcaaattatatccaccttttcatttctttgcactgtgtctgcttaaatcttgagtcacacttaatgttttttttttggtcttttttctttttaatgtgaaatagaatatacaatacacaaatgaaaatgtatatttagaagaacaataataaatgtccaggtgcccgttgctcagactgagaaatggaacattactacatcccaggagcctcgtatgctctcattcatatctctctcccctgcagccagaggcaaccactatcctgaattttgtataactgtcacctagcttttatagattttactgtctgtgtatccctaacagttgcttatttatagcctttatataaatagaattatactgta

SEQ ID NO: 403 - DNA, 2081 bp, Homo Sapiens
agtccccaggagaggctggtgcaggaaggctcagacactgtgttctctgacataatttatgtaagttataatagggggagaggctcagtctgggttgttctggagtctcagcatcttgcactttattatgagaaattttgcaagcttattactttgtagtaataactatgttctggcagagaatggaaggggagatgtgataaacaaatgtatgaaatatatgctacagaattagggagagagaagggccaggatagaaggtaaaacaggaagagggaagaagactagaggtgaggatggggtggggagacctgatttagatacagaggttagggcatctgacttatagctagaggtctgattggagggagtgaatatgagtatttaggcagtagagccaggcgtggtggtgcacacctgcaatttcagtgcttttaggaggctgaggatcgctgggggccaggaggtcaaggctgcagtgagctgtgaatgaaccactgcactccatcctgggtgacagagcaataccttatctcttaaaaaaaaaaaaaaagcatgtttaggcagcaggtgcgaaggccctgaggtcagcatgctcttggtgtatttgcaggccgtgaggaaccttgaccacaaagcatggtgaggaatggggtggtgctggcacatgaggtgggaggagagggcaggggccatgtccagtaggatctgggtgcttgtggtgaggagtgtgatgtgaggtccttggcaaggttgggcagcagcagaagataatctaacactctgtcttttgcgtgtaaaataacatacagatacacatggaagggaaagatgggtcaggagctaccgtgatgtgtccaggtgagaggtgatggtggcctggaccaggtgtggaggtgggggtggagagacatggttggattctggatgttgacttgctgatacgtgggacctgggataccaaagagagagaaggaagagttgagaatgactgcaagacttttggcccgaataactggatggaggagaaataacagatgaggaagactgtgggaagagcagatttgggggctatgggcattttggggggcagcgggggactgaattggggaatttagagacaaggaaatgtggtcctgggacatcatcactgacagttgggtattgcagagggagaaagagtgactcagatatgtccctggatgtcagttacagacttgtatcagtttcctgttggtgctgtaacaagtcaccacaatcttagtggcttaaaacaatatagatttgttatctcacaactctggagaggcaggcatccaaaatgggactcactgggctaaagttaagctgttggcagggttgggctccttctgaaggctccagggagggtctgtggcctcagcttttctggcttctagacgctgcctgaattccttggctctccttccatctccaaggccagcaatgcaggtggagtgcttctcactcagacttggaccatcttgcctcccctctccattgtaaagatctcgtgatcacagtgggcccacctggatagtccaggattctctccccatctcaggatctttatcttaaccacatctacaaagtctctttgccacgtaaggtgacacattcagggggtctggggatcaggaagtgaacatctttggggacattattctgtctaccacacagataaacctgtttcttcatgctgctccctaggatgaggtaggagtgcagctgtgcggtctcctattcatctcagacctctaaagcaccttagggaggaagatctcactgcagtaggctgataacccagtgtaacaaaaacctgtttaattacagaataacactgtctttagtagagaacaaaagggacattattgaaaaatcccttgactaacctgtaccttttggagctacacatcatgaggctttttacaaaatgcctcataaaattacctatgaattaaattgagatctatctgggagaaggctgtaaatttccctcaaacaagcagctatctctttcagctgaaacttgtctttctaggttgccccagtccccaccactc

SEQ ID NO: 404 - DNA, 5436 bp, Homo Sapiens
caggagacaaacctcggaagggctgcccctcagagacatcaagtggaatatgaatactgatttctaaccccacttccaactcctgagtgctttacgctgggctacaaggttctcaatgtctcagtgcctcagcgttctgatttatcttatggaagcctgcctcatctattcatatattgcattcttaaacacagaataacaacaacagcaatgacaacaatgctaatagcgctccaacagagcttgctgtgtgcccagccctgttcgaagtgctccccaactttggcccctaggatgctcaggacggccctctgagcaggcactgatgtcgtccccctcacatgcagagaaaccaagacatgagcgtggtcaggtcgttcgtgcagagccaccgggctggggatgggcagagctggagtgtgtgggcacaggatcggggtttgtcaccactgtgctgcactgcctctgcaccccaactaggcctcacgctgatggagacatcgcagtgcatgggagaacattcactgcgtggtgctgaggacgcagcaggcactcggtacaacctgttccttgcgtggcccgctagctttgggtcccaaaataatctgcctcctgaatctgcaactttctccccacctgctgggcattctcttaattcaaccgaagcctctccctgtccccattaggacggccactcccaacaggagttcccggcctgtgaaggccaaccggtcggggctcagcaccccattatcattctgccactttccaaaggaaattataagcactttgtgtcaaccctcatctgtcccggcagccgcaccgcaggaaagcgattgaggtcagagaaggcagacagcctacccatcacacccgccgcggccattcctcatgtagtgacatgcaatctcccgccaagggtcacctctggggaagcgattccttcaagcctagaacaagtgccgaattgcagctttgccgaatgatcatgtggaacacattgaaaatagccgcctcagtaataaatgcttaaccaaagcagccccttcctccggcataaccaggagcatatttactgtaaatatgttaaccaattcatgctgcagcacatggccgaggagtcagcttcccaggcagcaaagagcaaacccccgctgggctgagaaggagcaagccgcaaaggagaggattgtgtccgccaggaaaaggaagaggcaggaaaaggcacctgggacagaggagcctcctgcaggccccacagccccacccgacagaggagtggcgagaaggggacttggcattctgcatcttgccgtcacctctgtgccccacggaatctgtgagttaagactggctccaagagaagtggcgtttgtgtttctccttcatttcctgctcacatggtgaagtccgtagtgtgacagctctgaactccacaggatgaatcagggtcaggggagaggacaggaggaaagaaggagcgagagaaaggggagagagagagaggagacgggagagtgatggcgagagacagaaatatgaatgagaaacgggaaaaaaatcgagaagatgatgagaagcctgaaagacagagaaagcaatctaagatgagaaaaagagcactgagaaagaaaacattctggaggagagagaaggaggggcagagaggggaacaaggagggggtggagagagggagattgagagggcatgagttgtctctggaaggctgggttttgtttccactgggaagaaaaaatgttctttgttatcaaaagccttgagtgacaccagcagctcctccccacccctctctaacacactagcacctaggctggtgtacacatacacatgcatactcaagtgtgcacacacacacactaacatgcacatatttgtacacacacaaacatatgcatgcacacacatatgcacattcatgtgcacgcatgcatactcgtgcacatacacactaacatgcacacatactcaaggtacacatatattcacatgcaccacacatacacacatgcatgtgcatgcacatacaagcacacacacgcatatgcgcacacctactcaaggcacacacatacacgcacacattcacacattcatacatgcacactcatgtgtacacacacatgcataggcacacacacatacattcacacacacgtatgtgcacacacatactcacatgcacacattcacatgcacacactcgtgcacatacactcacgtgccctcatacatgcacatatatgcacacatgcatgcacacatacatcacatccaggcacacagccatctagaggcacacatacactcttacagcacacagtcaattccctccccctacccctgaacctaattcagtcccagaacagagagagcaatacaaggtctgagccaaaggaaacagaccaaagccagactgggtctgggtgtgggggaggaggaggaaaggggtcgggaggaggcagcccaggtcaggggcccagagtggaccagcaatgcaattggaatgggaaagaaccgtagagccccctgagaggctgcagcccctcaggcctggccctcaggcctgggcctcccttcatcccagtttcaggctgcattcttaatcgggccacggccccggctacctagagagacagtcacacactggcttcaagaccagagaaaccccagcaaagggcagccagcttctgggcaaagagtgaagccaccggctccctccggcttgcagcttctcctttctgaagtgggtgggcagtttccggccaaccttttgcctccttctctccagccgcccctgctaactcccagtaatttgccaaaattaacagatttatggcagcatgttggtttggatcaacttttcgtatgtactttgcaagagaaaaacattttcttctcccccgacttactgtttgcccattaatacgctccacattcactggtgcttaatgactgttcaaattttctctgttcatagagaatgttgttgttgtgattaagggtgccagggtgcttgcaagtacaaacacaccaaagccatgaaaagggcaattaattctttaaaaaaatgcaagagagtgggagagattggatgctctgtttacagaaaagcaagaaagaaaacagatatttctaagaagtgtccttccaggacagcaacgtctcctgtaaaaatgtctcctggaaaaaatgttgaaatacaaatgttcatggaaactgctgtccagcagacatttggttattcaacaaccatgtgtcaactactcattatgggcctggttctggggtaattcataaaggaagccacagggtgtgggcgaagtggacatctgggccaggactgaaatcccagctcaagataagtcatcccttgcctctgagcctcagtttacccatctgaaaattaggaggtggaaatcccaagggtggctatcaaaattcaagaggacatgtgtatcaagggcttagcttgctgctagcacatagtaagtgtacaagaactgcctggttcattattcgttcactctcctgaacaaatcagtggccgttttaatggctttggtgtgtttggacttgcaagcaccctggcacccttaatcacagcaacagcactctctagcaccagagtacgttctctgggccatgggccatgccatggggctggattttgaagttacaacttcaagaaaggcaagtttctgcccatgtatggctgatgatccaacggtgggagacagaaactactaaacatctgcaatggcaacgtgtccaacagtgataaatgcctgaagggaaataaaacaaagtaagatacaaagcagggccaaagtagataaggccctgctgagctgtgttggatgatgtcatcaggggcctggggaggccagcaaggtgacttgtgcagacacccgagtcgggtgtcgatatcttcctccataccttttatctttcctaaaaatatggttgggaagccctggtccatctgcaaaggacaggggcaagttggcctatgcgctagcaattgctacatattgtgagagctcttaaaccaaaggtcaggacacacccagtgaatgtttcccttccagataagaaaaatattctgagcacctgctatgcgccaagcgttgtgctatgtagtgggggcacaactgcagggaaaccagacatggtccctccctgcctcctggcatttagagccaagacagagggtcagattataaatgaacacaggcaccatgattatttcatctcaaactctggttggtgctatgggaaaggagcagtgatctttgagacctgagagggggtcctgatggagcagacaccagcagaaggatccttccgggaagtgacgttgaagctaagcttgaaaagaaagaagccagtggacatcttctggtgagacccagagcaccccacctgcaaggggcctgatctcccttgaaccaagagccctgccactcgccccagctgcctaaaggctgacaggagaagagggagtcagaatggtgctccaaacagagctcactggaatctcagctcagccatttacttgctctgtcaacttgggctctcgctgcaggtacctgagactgttttctcgcctgtaaaattggaaggtgttatgggttgaattgcttcccccaaaaatatgttgaggtcttaaccccttgaaatgtgacctgagttggaaatgggatctttgcagatgtcattagtgaagacgaagtcacactggagtaggctgggccctaaatcaaatggctgttagttttataagaagagggaaatttggacacagacacacacaaagaggaacaaccagcgtgtgaagacagaggcagagattggaatgaggcagccacaagccaatgaaccgctgcagctcccagaggccagaagaggcaagggaatatcctcccctagaggctgcagagggagcacagccctgccagtgccttgattcgagacttcgagacttccagcctccagaactgggaaagaataaatatctgctgttttaagcactttggtttgtggtgctttgtcactggcagccctgggagtagtccagaattataacccctaccttccccgaggactgcttgtccagagggttccccagggtcccattcttaacagatcctccttgaatgccctgcagccaccgctgatgtgctggaagtcacttctgctggctttgatgaagggaaggaagcagatgagaaagagggtgtatatgagtgactcattgaacctattgtctatccatagagagaggggacgagagagtgccttgtccccaagacctgggcccacagtggccccttaagtaagttcaggccctctcacctgggcaggggtcagaagcctagagcaacagcaaccactgaaagccctcagcactccac

SEQ ID NO: 405 - DNA, 2720 bp, Homo Sapiens
gctgtggaagctttgtccttgcagtcttcacagtaaaccttgctaccactcactctttgggtctgtgccatctttaagagctgtaacactcactgcgaaggtccacagctttattcttgaagtcagcgagaccatgaacccaccggcaggaactgactctggacacaatggcggctcctgaccagaccctcagaacctgaggacgggtgatcatttctggtccagtgtcttgactggcaccaagtcaagcattgtcctccacgtcatcagctgcaggccagataatctaagatgatgccaaacagtcactgcagaagaatttgctgcacggagctgtctgggatgcctcagacctgccagcggtagagctgcctgccttgcttcctcttgcttactcacagctctaagtctgaacttggctgcagctgtcctgaacagcccaggaggagcctaggcaggaggaggcttctctcctatgcaatttggctgaattttagttactcaaaagagcaaaggaagcacttctgaatattcgtcaggaggagccaaccaccttagcttgctccctgatgggttttgttcagcccctgccttactgttgtcagcctggactgtcttctgggcttgggttcaccatgtgtctggaccacgggagtgtctctaggtgtctcccttcctgtgcatttctcctgggcatagacacccatcctgtggaacactgggaggagggtgcaagaccccactgcacccaggcttggttcctcttgggtgcagcagcctcatccccttgcaagccttcctcccactcctcccagaaggctctgcttcctccacttgctcctctcctaggtgtgagccagcagggtttggtcacccagatatgaagtattaatgttggactcctgtctggagtcgggagtctattaaggaagacgtgtgggagaggcctgtgttcaaggcccttagaaccattctgcctgagccatcagctccttaaaaagaaatcaccaaagatcccaaacaatggcagagtccccctcccaccctttgggctacttggtaaataggcccaccaattctatctccaaaatatctcccatcaggaccatgtgtatattgacatctttatcttccatcaggtcagggttgccacaaaagcctccatccaaatttcctgaaaaagcccagtttctctaaatgtgtgcatgaacacggtgctgggcatggccctctcctctcagtccttctgcaacgcccagtgccttcacagccaaggccagacttcctagtggaagagcaaagtccctcctgacacggcttctgcttgcatctgcagccccacttcccccacaccacgctgcaccctgagctcctcacggagagccaccgtgtttcacacctgccgtgctctgggccaggtcgctgggcttgctggtccttagacttggagcacctgatgctgtttgcccatctgtgtccttgtcagcctttgagaattggatctggcagcccctcctcaggaagcccatgagagcctccgccccatactcacacagaccctgagctaggtggcccctgcctgtgtccctcagctcccagcccagcttccatgcagctttagcacagtttaccagcaccatcaagacccctctgggaggacagagagctctgggaggacagagagctctgaaggacagaacacgcatgcctttctggttgttcctctgaagcctagcacaacactgacacgtgagaaatactggctgaataaaaggtggaagtgaaaaagaacaacactgacacgtgagaaatactggctgaataaaaggcactgtgcattccctgcccatgaggaaggaagcagcttattccattttcaccccagcagaacccctgcatgcaggtttaggtcaacactagctgccagcaggatggagacccagcagcatgcggcacacgggagtctcgccgcgggtccttgacagaagagtaacgagacttttcttgaaatagtgtcctgagttgagatctgagaagaacctgttatgcatcctagaacacagtgcatttgcaagtcataagatgttagcaccgattatggagcctcgtgtgttcttaggggctatttccgtgacctcgtcgggggttcaatgagcagcttcaacagaaaactggatttccttttcctccaaggctgtcttatttccagattactctggacctaattttaatcgtgcacacctaccatggcaggctgttttcctgtcctcccaatgatctccatacaatctcactgctgggtagcacctccattcccttgcttacctaagccatcaaaacctgcaacaactcacaaaaccacaaaaagcaacagaaaatatcagaagataatcaaatgaatcaagacctccagaaaactgtgcataattcagttttcatttcatttaatgataatgtccacagttaatcaggcattccttatcatttggatctacatgttgaataaacacaacatccctagacctttgagggttttctaaataatctgctgttgattttcttaggtactgaccagattactatgaatattcctgatagaatatgctgacaagaaacaaacaggacaagcctaaaatagaggttctggtaaacattcagggaaaagtttattactgacatgtgagagctcggttttcaaggttaataaaataaagttgaca

SEQ ID NO: 406 - DNA, 2791 bp, Homo Sapiens
aagcttctccgcgagtccagcgctgccactcggcggccgccgcgggcgcggggatcctgggtcgctccgccttgacccacgcgccccacgccccgggacttacacctggggtcgctccccgcacgcgcgggcctcgcgccggtgccgccgcagcgccccctgcaggccggagccgagctggcccaggcctgagtctggcccggggttccgtggccccagtgccggccccgcggctgctgctccggcccggccaggtgccttcgtgttgaggcgaaaggactgggcctcagtgggtgaagggaccgggtggcccgcttccacctagggcagaggctggatcggccgcggcgaggctgggcccagcattactgggaggggaacttgagagccgcgggttgatgttcggagctcaggcgacgactgaccacccacccttcctcgaagaggaacaatggcttgggtttggtttttaatttttgattcccccacctcccctttcttgattccaaaggaaatatagcattcaagcgccatgtctgttgggaatatataattccttggcaaagaaagaggaaacatttctctgataaacacaagaatctcagtaagaattgcattattgagaacttttcccactgataaagtagggaagaggaaggggaaaatagggtaagggaatgctggaagacaaactttaaactttatctccttttttttttttttttttgtcgattgttggtgcatcctgttggtgttccgagaagttgtggctcagcttgctttgtctacattagtggaatctttaagtctttctggtctgtctcagcatactcactggcaggccctagactacattacccaagtcattttgccgtcttggaatcctgagtatgtcatcactctgtattggagatgagattgctcagaaacactgaattcagaatgggatctagcaagatggtatttctggagcaataagtcatttactgaatgattatgcaaagcataaattgcattgtagtcctagaataatacaaagcttccctttagttgttgccgtaaattaataactggcattttaatgcactaaatgaattttagtagttagatttatatctttgacttctaggaatttcaactacattagagttcatatacacaaaaggggcaagcccttttccacagcatttccagcttctccacagaaacctagccccacatgagcaaaagatcacactctgtgcttcatcaaagagattacacaattacagattccagcatctcccaggagtcctttgaatttggattaaggtctataattacgtgggtaagggaataactaggtaattggctttctgcacctggaatgtattctcctgggtataagaggctccttttaatcagaagtatatgggatgaaagtgaaccctgtctcttaaggggagactccttaagaggaggattggggccctgtgttttaatagatcttctccacaatctttaatacctaagctccttccccttgtccactaatttgctgtagaatttttctagcatgtttatgatggtgttcagggcacactaccccaaaatataacaccttggcatattgaatgttttaagctgatggaatttgagaaatggcaggtgtgaggactctgaccttcccatgaagcaggtcataagaccctcatgtgagagatgccctctctatacctggagaaaagaagcagtcttatttgtgaagacagagagacgccaagaggaatctaaatgaataggccttggaaccccagacgcacgggccttgtgctgtcgctgccgtggcaccccttctagaagtgtcatccccaacttaggactctattctctataacagaagtgggagccttggacaactgaacgcctatctctagctcaagaaatgtcagctctttttttttttttgagactgtcacccagtcgggagtacagtggcgccatcttggctctctgtaacctccacctcctgggttcaagcgattctcctgcctcagcctcctgagtagctggggctacaggtatgcaccatcactcctggctaattgttgtatttttagtagataatggggtttcaccatgttggccagggtggtctcaaactcctgacctcaggtgatctgcctgcctcggcctcccaaagtgctgggattacagacgtgagccaccatgcccagccaagaaatgtcaattctttatcgtagcctggctttccatatttctcactagggtttttattctctagtttgtaaatcacatttggcgtttgtagatcactccttcccttttagtggcattctctattaggtgtccatctcccaatatgaagaaacagttttctgctttttcctcctttatctgatccatttacagatttattacatttataataggctaggtattggggatacaaaaatgaataagatatggtctgttttcaaaggtatgcagaaacttttctatatattcctactgacttgtatttgtatttcttgaattaaaaacaatcctggctgtgtttttttttttttttttttgctcttagtgaatctttgtttcttcttttcattatggcattccagttgagtttcaccacgcattatcatgagaataaataatttcactgactttaataatatttgatcacttatgttgatgtcatttaactctcatttacatttcagtggtctaaaacacaactaagatactaaaagaaaaataaaagatgagattattggcaaataattaccac

SEQ ID NO: 407 - DNA, 14713 bp, Homo Sapiens
ctcctggatctgcgggtcggtctcggcgggcggattactcctcgcccacaacctcgaggccccggggtcaaccgcgccctccgggccggcaacccagggtttagtcagattcctcctgacccaccgcttctgggaaagaggcgcctcccgtcaggaggatgctgagttcctcatgactggaccagtgagtgtccactccctggtccctggcgagagaggcgggacccccacgccctcctggcgctctttgcagagatgttcctcaggcccaatccgggatttgggatgtctgtgcgtgctgtggagcagagagtttgcaacatggtctcactttgtcacccaggctggaatgcattggcatgaacacgtctcactgcagcctcaacctcccaggctgaagtgaccctccaactctgctttcacagtagctgtgatatggtttggctgtgtccccacccacatctcatcttaaaacccagtgggaggtaattgaatcatgggggcaagtctttcctgtgctgttcttgtgatagtgaataagtctcatgagatctgatggtttttaaaagagttctggctgggcatggtggtgggcacctgtaatccaaactactagggaggctgaggcagagtgaattgcttgaacctgggagaaggaggttgcagtgagccgagattgcaccgctgcactccagcctgggcaaaattgaagactctgtctccaaaaaaaaaaaaaaggagttcctctgcataagctctctctctttgcctgctgccatccatgtaagatgtgacttgctcttccttgccctatgattgtgagtctttccccagccacgtggaactgtaagtccaaataaacctctttcttttgtaaattgcccagtcttgggtatgtctatcagcagcatggaaatggactaatacagtaaattggtaccagtagagtggggtgttgctgaaaagatacctgaaaatgtgaaagtgactttggaactgggtagcaggcaaacattggaacagtttggagggctcagaagaagacaggaaaatgtaggaaagtttggaacttcctagagacttgttgaatggcattgacaaaaatgctaatagtgatacgaacaataagatccagtctgaggtggtctcagatggagatgaggaacttgttgggaactggagcaaaggtgactcttgttatgttttagcaaagagactggtgacattttgcccctgcccgagagatttgtggaactttgaacttgagggagatgatttagggtatctggtggaagacatttctttttttttttttgtgacggagtcttgcattgtcgcctggggtggagtgcaatggtctgatctcagcttactgggttcaagcaattctgtctcagcctcccgagtagctgggattacaggcgtccgccaccacgcccttctaattttttgtatttttagtagagacggtttcactatgttggccagtggaagacatttctaagcagcaaagcattcaagaggtggcttgggtgttgttaaaggcattctgttttgactgggtgcggtggtgcacacctataatcccagcactttgggaggccgaggagggtggatcaagaggtcaggagttcaagaccagcctggccaatatggtgaaaccctgtctctactggaaatacaaaaattagcttggcatggtggtgtgcgcctgtagtcccagcttctcgggaggctgaggcaggagaatcgcctggacccgggaggtggaggttccattgagccaagatcatgccactgactccagcctgggcaacagactgagactctgtctcaaaaaaaaagaaaaaaaaaaaggcattcagttttataagggaagcagagcataaaagtttgggaaatttgcagcctgacaatgtgatagtaaagaaaatcccattttctgagaggaaattcaagctggctgcaaaaatttgcataagtaccaaggagccgaatgttaatatccaagacaatggggaaaatatctcccagacatgtcagaggtcttcatggcagcccctcccatcaacaggtccagaggcctaggaggaaaaagtggttttgtgggcagcacccagggtccccatgctatgtgcagcctagggacttggtgccgtgcgtctcagctcctccagtggtgactgaaaggggccaacatagagctcgggctgctgcttcatggggtggaagtcccaaatcttggcagcttccatgtggtgttgagcctgcgagtacatagaagtcaagaattggggtttgggaacctccatctagatttcagaagatatatggaaattcctggatgcccaggcagaagtttgctgtaggggtggggccttcatggagaacctctgctagagcagtgcagaagggaaatgtggggtcggagcccccacacagagtccccgctgcggccctgcctgatggagctgtgagaagtggaccaccgttctccagaccccagaatggtagatccaccgacagcttgcaccgtgtgcctggaaaagctgcagacactcaatgccagcctatgaaagcagcctggagggaggctttaccctgcaaagccacagaagtggagctgcccaagaccatgggaatccacctcttgcatcagtgtgacctggatgtgagacatggagtcaaaggatatcattttgaagctttaagatttgactgccctgctggatttcagacttgcatgggtcctgtagcccctttgttttggccaatttctcccatttggaatggctatatttacccaatgcttataccaccattctatctaggaagtaaataacttgcttttgattttacaggctcataggcagaagggatttgccttgtctcagatgagactttggactgcggacttttgagttaatgctgaaatgagttaagacttcggaggactattgggaaggcatgattggttttgaaatgtgaggacatgagatttgggaggggccaggggtggaaggatacggttgggttctgtgtccccacccaagtcttatcttgtagctcccataacccatgtgtcttgggagggacctggtaattcaatcatgtgggctggatgcggttgctcatgcctgtaatcccagcactttgggaggccaagggggagatcacttgcgatcaggagtttgagaccagcctggccaacatggtgaaaccccatctatactaaaaatacaaaaattagccaggcacggtggtgggcacctgtaatcccagctacttgggaggctgaggcatgagaatcacttgaacctggaggcggaggttgcagtgagccgagatcgcaccactgcactccagcctgggcgtcaaagtgaaacttagtcttaaaaaaaaaaaaaaaaagaagaatgggagtgggtctttcctgtgctgtcctcatgatagagaataagtcttacaagatctgatggttttaaaaatgagagttatttctctcttctcttgtctgccaccatgtgagtcatgcctttcaccttccaccatgattgtgaggcctccccagccacgtggaactgtaagtccaataaacctctttctttttttttttttttttttttttttttgagacggagtctcactctgttgcccaggctggagtgcagtggcgcgatctcggctcactgcaagctccgcctcccaggttcacgccattctcctgcctcagcctcccgtgtagcaggcattgtcacaggcgcctgccaccacacccacctaatttttttgtatttttagtagagacggggtttcaccgtgttagccagggtggtatcgatctcctgaccttgtgatccgcccaccttgggctcccaaagtgttgagattacaggcgtaagccactgcacccggcaataaacctctttcttttgtaaattgcccaggtatgtctttatcagcagcatgaaaatggactcatacaatgatccattacctagggtaaaattctcctgaatgtcaaacagagataaactacatttgggttttgggtaagtcccctgtaatgatgaatcaagaatcctcaagtctgtcttgccacccatttaatacgtatttttgttaaggctgaagtttagagttagaatcaggacattttggcctattgagaggttctgaattccaacagaagatgccatgtaaatcagtgaatttgattcttttaaaagcaacttacaaaatttacaagatgtattcaataaagcagtttagctttggtatatcaaaccttataatgaaccatttttcccacttcatcttatgcaatgtttaatattttctatttttgtcaaggatattaaacctacacctggaaacatattaaatgccaacttaaaatgtgagaagtttggcagaactcagacccattcttccaatttccaagctgtttaatcacactgattcagacactctggatagcagctgggattgtagttatctttatgctttgagctctctagttttgtctacacatcttataaaatatcccctcctcattctcctctagctggaacactaacccaatggatgttgtggtgaactttctttgaccaggcagagaagtgcagcattgggtggaccatgcacaaccagtttgagaagcactgctctaggggttgggggagcaacaatagaaagagtgtaggttctgaatacctgaagcatacattttagctctagactgcttatattgttgttacatgaaagagaacttttaatctggtttaaaccactggatctctttattccagcaagtgaatctatatccaactaatatttactcccagtctgttctttctcacccctctttcccttactataaaccttttctatatcaatttatatcattagttgctcagcccacaaaccagatgtcacttttgttttctcttttccttcccattcatagccaggccatcgttgtgacttattggctgtacctccaaaatatatcccagatctgatctcttcttataatttgtactgctacaaccttagtcaaagccactaatatctcttatctgaactccagtggtttactagttttctgcctctcttcttgacacaattcatctttctacatagcagccagagtaagataaaatcataaatcagatcatataacttctaccccctgtaccaatggctatcttttatactcagaataaaatccaaaacctttatttggcttccaagatcctacaagatagagaccttacttctcatcttgtacccatcatttgatcttcagtcccttgaaaatgccaagtctatttccatttcagggcctttgtgcttgttactattgtttcttttctcttggaaaactgcccagatctttccttagctgaattattcagatcccaactcaaatatcatctctttagaaaattctttcagaaccaggtgtggtggtgcacacctgtaatctcagctactcgagtggctgaggctgatggatttcttgagcccagaagtctgaggccagcctgggcaatatagcaagatcctgtcaaaaagaaaaaggtatctcaccatgattatattttaatttcccttcagcaattagaagtccctgaaattaatttaccttatttgttggcatttgttggcattgtgcaagtaatgcttgcacccaggaggcagagtttgcagtgagctgagatcacgccactgcactctagcttgggcaatagggcgagactgagtctcaaaataaataaataaatacataaaataattttagagacagagtcttgctctgttgcccaggctggagtgaagtggtgggatctcggcttactgcaacctctgcctcctgggttcaagcgattctcctgcctcagcctcctgagtagctgggattacaggcgtgcaccaccacgcctggctaaattttgtatttttagtagagatggggttttgccgtgttggtcaggctggtctcgaactcctgacctctgatctgcccacctcggccttccagagtgctgggattacaggcatgagccaccatgggcccacaaagctattttacttagcattttttttcccgaggctaaattgggaactactgacaatactattgacaatactaaatatatttttaaattattttacttatttttgagacagggtctcactgtgtcacccacgctgtagtgcagtgaaccatcaccactcactgcagtctcacccttcctgaactcaggtgatcctcccacctcagcctcctgagtagctgggactacaggcatgcaccaccatgcctggctaatttttaaaattttttgtagagatggagtttcgccatgttgcccaggctggtctcaaacttctgggttcaagtgatgcaagtgtctcagcctcctaaagtgctaggattacaggcgtaagccactatgcccagccttttattttattttattttatttatttattttttgagacagagtcttgttctgttgcccaggctagagtgcagtggtgcaatctcagctcactgcaacctctgcctcccaggttcaagcgattatcatgtctcagcctccctagtagctgggattacaagtgtgcaccacacgcggctaatttttgtattttttgtagaggcagagaggcagggttttattatgttggccaagctggtcttgaactcctggcctcaagtgatctgctcaccccggcctcccaaagtgctgagattacaggtgtgagccaccatgcccaccaacctattttttattttaaaaaattgacagcatactaaatgtttgtaatgcaaatgataaaattgctacaatgaaaacaagaagttgagaattagatgaagagttgattaagggaactatgagtcactgtgttagagcatgtatattatgaaaattatagcagaagtgataaagggtgacaattgttacctatcttcaatcaaaagctctttgaatatctttcttttttttaattttatgaattttttttacagagacagggtctcactatattgcccaggttggtctcgaactcctgggctcaagggatcctcttgccttggcctcacaaagtacctggattacaggcatgagccacagtgcctggccctctttgaatatctttaatgcttttagagattagcatcagagaattattaatactagagggcacaaggaattagccattgccagtggacacctacataggtgtgactatgtgactcagttttaaaaatgtgacacaatgaaaaaattccttggatgttatggaggacgaaaattttgtaagtcctatccattctttaatggagaaactaaaatttacaatattactttatttagcccaagattttcttaagctttgtattttctaattcagctttggcttacagaatcatgcttgaagtttgagactgccagctttcaacaggcagttactagtgaaactctttggaaagatgagaagatgttgacataagtgtaatgtgagacaaagcaaagtaaaatgtaatttttaagaaaatgttgccgggtgtgatggtggctcatgttgctgttggttgctatgggagtgaacgaagggggacgaatgcagaaatgaagacaaagacaaaaagagtatttttggaagaaggggtcaggggactccttgcttctagtgggcaagggccctgagcttctacagcccttcatatttattaggtagaaagagcagggagggagaggtaacagttggtcagctgcttgatttatcacaggtacacataattgcttcctttgtacaacaggtatacataattgctttctttgtacaacaggcttcagatgttcctatagataatcacaaggaacactgtgcttggggtgtgactgccctcagcaacccttctggcagcagacacagttgttagttttccaacatcctgctttcatgagaacagttttctatttgctcatatagcctccagtggtatactgagttggtcacgaccctcattctttcggcctgtaacaggctcatgcctgtaatgccagcacttttggaggccgaggcaagaggatagcttgagctcaggagttggagaccagcctgggcaacacggtgaaaccccatctctgcaaaaattagcctggtgtggtggggtgcgcctgtagtctcagctgcttgtggggctgaggcgggagaatagcttgagctccaggggtcgaggctgcagtgagccataatggtgctgctgcattccagcctgggtgacaaagtgagactatctcaaaaaaaaaaacggctgttagataaaaatgaagacaaacaacatttgcaaggatataaatcttaacccatttattgggggtataggctctggtgtcagatttccatctgtcctgtattttgtaaccacaaaattgtcctggctggattaattgtaaggaagtccctttaaacacatctagacttccaaagtttgtttacatactaattagttgtcatgaaaagctgcattcaacccagggtctgagatgccttttgtatatgaaaagtgcttctctttctgacactgactgaattacatacataacagattcatttatttaaaaacaatttaagaggctttttctataatgctgaacctgctgtgtggtatttatgtttaattctggtcaaattttcaaaactaataaacactgcaattcaaaaccattaattatcaagcatagaccaagtatctgaggttatgagcacatatttaagaggttagactctggcattccagacattgcaaataatacttttctcatttctaaatttcctagaaacaagtggagatttgtaaaaggaaataatactctttaaaacatttatttttgactcaggatctggctctgttgccctagctagagtgcagtggtgccatcatcacagctcacacaatagcctggaactactgggctcaaaccatcctcccacctcagcctcccaagtagctgggactgcagatgcaggccatcatgtcccgctaagttttattttatttttgtagagacagagtctatgttgctcaggctggtcctgaactcccggcatcaagtgatcctcccacctcccaataaaacatgtactgatggccaggcacttggctcacgcctgtaatcccagcactttgggaggccgaggcgggcagatcatgaggtcaagagatcaagaccattctggccaacatggtgaaaccctgtctctactaaaaatacaaaaattagccaggtgtggtggcacgcgccggtagtctcagctactccggaggccgaggcaggataattgcttgaaccccagaggcggaggttgcagtgagccgagatcgtgccactgcactccagcctggcgacagagcaagactctgtctcaaaaaaaaaaaaaaaaccaaaaaccaaaaaatcaaaaccaaaaccatgtattgatatcaaagtttttttatcctggcagggcacagtggctcacgcctgtaatcccagcactttgggaggctgaggcaggtggatcacgaggtcaggagttcaagaccagcctggccaagatggtgaagacccgtctctactaaaaatacaaaaattagccaggcgcagtggcaggcgcctgtaatcccagctactcgggaggctgaggcaggagaatcgtttgaaaccaggagggtagaggttgcagtgagccaagattgtgccactgtactccagcctgggtgacagagtgatactatgtctcaaaaaaaaaaaaaaaaaaaaaagaaaaagaaaaaagaaagaaagttgctttatctttaaaactatatatattgttttcacccctacatagtccttgcctcccagacatctcctcactaacgtcagtagacaatttggcatctgatggtttgaaatagtttctgtaatcaaatcctgaataaaatccattttaaagcctatagagagttaagaaacaagtataaaaatttgttgaagtgtttattgaacgaacataatacatttgtctgagaagagatacgcacactaaagtcccctacaagcaactaatgggaaaagatcacacaggtaactccaatttttaaaaatatgatcatgaaagataattgtagttggtgtttatggagcatcttttggaggggggggaacccccaacaactctacaaattgagatccagaacagagaaagtcatcaggtgaaatgccaagaccaaaaaacttattttatttgaattccattttctgagaagaaaactagtattgcagcagagtcatttaatgaaaacttaacagtttcactgaggattcagatatccgttgacatgtacatgacaatctttagattaaatcataaaaagttgactgtctccaagaaattgttatttcacaaatttatctattttaaatataacactgaagttattacataaacactgacgtcaaaatcatgccagagcagtgttactatttttacatgtatatgagtattcatgacctttaatgtctggacacattctaggtcacagaacagaagcaaattttcacttttgtgtgtttttggtacagtgacatgtctggttccttttgagctagatatatctgcttaaataattaacactattggatattagtccctcaaagtaaatgtctattttacctggtattctaggaagagagagagaaagaaaataaccaaagaaatgtgactgcaatctaatttccaagagagaaactctacttctgaatactggccccatactgcatattttatgaatatttttctcacaacttttcttaaaacttaagttctctcttaggaatgtctttagttaggtcttacaaagaaactgtttaatacacaatgttaacatctactaggcaaaagatgcttgcttctcttcccacaaaagccaaacagaaaacacaaagtgttactaacgttttctatttattcattaataaaaagtgcatagtacaagccctttatcccaatccaagtactcagaaaaagattaacaacagaccctggatggcacagacataatttgtttggcgtgatttaaacatataaaatcagtaattaacatttagcatatcacacgaccacttttgcttttaacaaactaatcttcacacatggtaacaaatacctatgatttttcatttagaaatattataagaagactaaacttactattgcaacaacaaaaatttaacccattaaactagaaactctcttcatttttccttcttcaaattactgttttgtgtcttaaactgagttggtcaaatttgagcacataattcatgtagagtgacagactttcatttagagtgatagacttccaaggttcctttgaaaatttaagatactggtaattccataaacactcccacaccacataccacaaaaacactaaaagtagccatagaatagctgtattcaataattattttggaaaatccacattatgaaatatgacttgctgaccatggaacagtgcttggatagataacatgaaaaaaatgaaaaacatctttttttttttttttttgagacggagtttcactcttgttgcccaggctggagtgcaatggcgtgatcttggctcactgcaacctccacctcccaggttcaagtgattctcctgcctcagcttcccaagtagctgggattacaggcatgtgccaccacaccaggctacttttgtatttttagtggagatggagtttttccatgttggccaggctggtctcgaactcctgacctcaggtgatccagctccctcggtctcccaaagtgttgggattacaggcatgagccaccgtgcccagcctgaaaaaaatcttttactagaaacagttccaatgttaacttttcccacatggaaagcaaaacaaaacaaaacaaaacaaacaaacaaatgcaacaaaacaacctcccactattattgtgcataaaaacacattaaatgactctaaaacaaaataaacttttttttttttggtagagacagggtcttgctatgttgcccaggctagtctcaaactcctgggctcaagcagttcttgcctcagcctcccaaattgctgggattacaggcatgagccaccatgactggcctaaaacaaaataaattcttaatggcatttgtggaatgtgtttaagagccaaaactgtgaaaatgtaagctttatctttcttttttcctagattatttaaagaggattgtagccacacttcagatgaatgtttacaagccaaataatgatttaagagtgtgctcaataaaaaggccataggtttaagaattaaatggaataatataaattactaggtcaacaagaatatttcatgtatagtacactgtctaaggaatgcagagaaattttacaagaaacccaagactaaatacttcattaagaacactggttactaagtaaatagatggctcatgtaggaaaaagctaatatatgtagatgtaatgtcaactaagtgcatgtgacagaaatgaagaactaggaataagaatccagattttctggccaggcacggtggctcacatctgtaatcctagcactttgggaggccatagtgggtggatcacctgaggtcaggagtttgagaccagcctggcctacatggcgaaaccccatctctactaaagatacaaaaattagctgggcgtggtggtgggcacttataatcccagctactcaggaggctgaggaaggagaatcgctcgaacctgggggtggatgttgcagtgagccaaggtcgcgccacttcactccagcttgggcgaaagagcaaaactccatctcaaaacaacaaccaaaaagaatccagatttttaggtgtctaatactagacattctgtatccaagtttcagccatttcatccaataaagccttctaaagccttttttttttgagacagggtctcactctgtcactcaagctggagtgcagtggcgtgatcttggcttactgcaacctgtctcccaggctcaagcgattctcctgcctcagcctcccgagtagctaagactacaggccgtgtcaccaaacccggctaattttttgtaggcacggggtttcaccgtcttggccaggctggtctcaacctcctgacctcaagtgatccacctgccccagcctcccaaagtgctgggattacaggcatgagtcactgcgcccagctcccaaagccaattttcaattatttgtgagccatagattcagtgactacatcaatatctcttgccagggattggcctaacagctcagagaacagattgttaggatatatgggcaagccttctaagttcaagaggcaagagcagaaaatggaatgctatagggatttagctccatcttaagccattctggccctttctgctctactttaccagctatagagttaggaaggcttccagtaggccacagcaagaggaaaaacctttattctgtggggctcatttatccaggatttaacttacctgtgtcatgttaccgatctattaacacaagtaatttagagttggttatattatttcaagaaattgagcacaaagccaggatgtacaaggaggaattcaaacaatcaatattggattatataatgaaaagatgcccttacaatgtttatgatctagaatgtaatcataataaaggggggaaaataccttatgagtatcacaattgtatcagagactattaaacagtacaatgatacagagaatttattcaattcatacaagtaatttaccagatctaaacagtgaatagactgacctaaggggaaaaaaatccttacattgatagcaaaatatcttctagcccccataaataatctgcaatcatttgctaggaaaaaaacttcataaccatatgggtcatgcagacatttttatttatttatttattttgagacagagtctcgctctgtcgccctgattggagtgcagtggcacgatctcagcttactgcaacctccgtctcccaggttcaagcaatttcctgcctcagcttccccagtagctgggattataggcacacaccaccatgcctggctaatttttgcatttttagtagagataaggtttcaccatgttggtcaggctggtctcgaactcctgacctcaggtgattcgcctgcctcggcctcccaaagtgctgggattacaggcgtgagccaccgtgcccagcccatgcagacatttttaagtgctattggtattcactttatttcaaactgagcaaaacaatacaaccttttacttttttatacattttaaaatttctctcatattaacattccttcctaccccaatccatcccatcaccaaacaggaatgagataaggagtgaaaaaaagatgtatgtttctcattttccttcttttcccttgaagtaaaccagtaatttattaaaatattttataggtcagaggataacaaaagactcaatgtagtaaataagtaaataggcattcaaatatcagtaacctaacaggccctaatacagctttaagattttcttctttttttttttttgagagggagtctcgctctattgcttaggctggaatgcagtggtgcgatcttggttcactgcaacctccacctcccgggttcaagcaat

SEQ ID NO: 408 - DNA, 1690 bp, Homo Sapiens
aacatttgtgaccagcctaggcgacatagtgagacctgtctctacaaaaaatatataattagctgggcgtggtggcgcgcgcctgtggtccaagcttctccggaggctgaggtcgggggatcgcctgagccctggaggtcgttgctgcattgagccgtgaacgcaccactgcattccagcctgggcaacagagcgaactctatctcaaaacaaaacaaaacaaaacaagaaaaagaaaaaaagaagaaaattaaaaaaaaaaagaaagaaaaagaacgtcccagggtaaggtctgaggattgcgtcattaggcgattttgttgctgtacgaacaccacagaatgtactttgacgacctagatggtggagcctggacacacctcggctctgtggtgtggcctgctgcttccaggctgcaaacctgacagcatggggctgtactgaataccgcagaccattgtaattcatggggaaagcgcgaatgcagtcccccactacaacaaattatgcagtcgagttttccacatttgggaatatcacaggggtcagcacatccggagtgcaatcgatgagccccacgctgggaaaaaccaccttcgtgatcatggtatcttccctgccagagagaaaccaatcagcttcattttcaacttcttctatgactccagaggattcactttgcatcttgtgacaaatgaatatattacctgaaaaaaaaatgacaggatagatattgaagaaataattttttataggactctggagtgaagggattaatattgaccagagccaatgaggtcatctcatccttgaggggagcaggtgtgagcttcaaatgcttagggcctctggaaggaagcttccctgttggagaaatcaccaaccggctcagcatggtctgaatgaggatgacaaaagtgaagaaaaatgacgtcattgccagagtcaagtgtttctcctatcttggagttcatagggctgcttgaagaatccaggaggcagacaagccctcgctgacagactcacagctttcctgcgtgtttatcatgaagactgaggattggttcaaaataagtgaaactataatgatatttctcagttatcaatgtgatttgcaaaatgaacctagcattttgtagtaagtcattctgagaattcgttttttgtaatgctgattatcatatggaaagtaaaacacatctattacatatgaaacagtgggtagccacacctggaatgcagcacatagttctagttgtcacatctcaaagaaagtataaggggcctagaaaatattcagataaaaattattcatatcagggaagacaatattagaatttctagtcaggaaatatgagggccaagagaatttgtgagcaccacttatgatgtagggaagaatattatgttaatatagtcgttattgctggaataatagaattatgagtaaccctttcaaaatctcaaataacatagtttgagataagacatatgaaaagaacttctgcttggaagcagaggaatttgaaaatttattgaaagatgacacaggttgagagtataaatgtgctctagagagggcaaataattccataaggaatagctgtagcacagatgattgagggagataagggaaatttgggggatagctacttgacttatgaagatggtgagaagagaaggcaacctc

SEQ ID NO: 409 - DNA, 1469 bp, Homo Sapiens
gttactagtgtgagtcctaatccaaaatgactggtctcctcataagacgagaagattagggaagcacgtagaagaaataagtgaagcagagccaggagatggttcctggggagatgtaaggccaccagagaaaagtgtccaggaaataatgaagaaggaagatgaaataccaaaacctaaatctgtggttgtgtcaccatgcactcctaaaagggaaaatgcagtgtacattgcacatgtagatgctggcaattcaaccactggaagacaaatactgtatttgactgaaatgggtgaaaacagggtatttgaaatgtatgaaacagaagttaaaaaagaaacagagaaacttagtacttgtcttgactcttagacacaaatcaggaaaattgagacaaggataaaataatagaagcgggttttgcctattttgaaactgaaaataaatattttacaattctagatgcctctggtcacaagagcttcatcccaaatacaattggtggtgtctctcaagctgatttggctgcgctggtaatctcagccaggagaagagagcttgaaattggatttgataaaaggacaaacaagagaacgtgcaatgttagcaaaggcagcaagtgtgaaacacttaattctatttattaataagatgaatgatccaagagcaaattggagcaatgagagatatgaagaatataaagagaaactagtgccattttgaaaaaagttggcttcactcccaaaaactgcattcactttatgcctgctcaggactaactggaggaaatttcaaagagcaattgaatttctgtacttagtacattggattactgtttattacatatctaggtaatttgtcagacttcaatagatcagttgctgtaccaatcaggctgccaattttgggtaagtacaaggatatgggcactgttgtcctgggaaagctggaatcaggcggtctgtttgtaaaggccagcagcttgtgatgatgccagaaaagcacaatgtggaaggtcttggaacacttgccaatgatgtagaagctgatactgtagccccagatgaaaagctcaaaatcagactgaaaggagttgaagaagaggaaattcttccaggattaatactttgtgatgttaataatcgtggtcattctggaggcacattcggtgcttagatagtgattacagagcatagatctgtcatctgcccagaatttaattcagtgctgcaaattcacacctgtatcgaggaagtcaaaataacagcctaaatctgcttggtagatagaaaataagactcaaccctgttttgtgaagcaagatcaagtatgcattgctcatttaaggagagcaggaaccatctgccttgagacctttaaagacttcctcaggtgcgtcattttaccttaacagatgagggcaagacttgcaaatggaaaagttctaaaactggttccagagaataac

SEQ ID NO: 410 - DNA, 1235 bp, Homo Sapiens
attcctgtctcgctgtttcaacagtcagacgtttgttcttcaggctgcttgctccagtatcctcgtcagacaaccgcagggagcctttgtgcatttatttatttatttgcttggacttgtaatatgaacaaaacatgcagtcacttcccaccaggatgtgtccttctggacatcagcatacgtgcaagatgacaatttcagggtgaatgcttcctgctcgttggctttgctgctggctggtatatgagtagcactggctgatgtaacaaacgtacaccaacgttccagtggcttcctacaagagttctattcttcctcatgaaaaatttcagactacattcctggttgtcaggaagctcccctccacatgatgactcagggactcattttgttcctcatggctctgccctgtcttgtgcatgttgttggtgaagttgataaaggaacttagaaagccattttctgtggaggcataatccaagtgatgcctatcataccagctcctattcccttggtaggaatttactcacacaaccacctctattttagagggaagcagggagacttagtgtaactgtatgcccagaaaagaaaggtcaactgaggatttcaagtatctaccagtcttaagtgaatatagagaattctaggtggagaaaactaaagaaaacagagacagaggaacaaagtaagtgaaggttgcagagtacggaatgaaggagctggaagtggcaacgacattctacactagaggagaggatggggtagtttctcaatgcatggaaaatctattctctcggaagacctggtggtgctggaggcttgaattctcttctgtcagtagctacagaaaatcaaagaaggaaatatcaaactgtgttttcagggccactgactctgtgacttccgctgtctggccttcatgaagccaggcggtcaaatgggacacacagaaactcgaatcagtgagtccttcctcctggcctgaggccccagcttgatcccacaacagggaaaattctggaggtttctgtgttgacctgggtggtagttatgcagcggtgttccctttgtgacaattcatcaaaccattcacataatgtgttgccttttctgtaggtatttttttcttcaatgaatagtttaataaacacaaaaaagaaaatatggtcatcttatctttggacagtctctcaaatgttttataattaattaaattctttaacttatgtatt

SEQ ID NO: 411 - DNA, 10658 bp, Homo Sapiens
agggcgggtccgcggccgccaggtgagcccgccccggtagccccgcgcgtggtccggtcggcagaggcttggcgagccgccatcccgcccctgccccaggcccaccttcccccaccgcccaggccccgctggcctccccggctcatctcgcacccggcgcagaccccatgccctcccgtctcggcagcgccccccgcttcgcctcccggtccggccccagctcgacgggcggaaccgggtgcgcacagcagccccgcgccctggcccagggccagcgggttaacgcttaactacgctccaggagctgtaggctccagccgcgcctcgagtccccaacctttggccccggaagccaaaaagaggagcggacggtgaaggagtcagggtgagttccagaggccgctcccagattttccctcccgagcctggccagactgggcgtatgtccgacatctccacctctgaccccgggcgctctgggctgagctgggggcgatggtggtgggcatcgacgccgtcttacctggacgcccacagtggacctgacctggccgaggggtgggggtggggttgggaactacggaggcgctcggggttcctgggtaagttcccgcggactgctcgctccttgccgggtgctacaataggcgtatccggtgtccctggagccaagctaggggacgggatcaacgtgggggcggggcagcgtgcccgaagggcattgctgcattccaggtgttggggaacgcagtgagcgaaggcgtggaggtgagggagaatgtggaaggcgtgcgcccggccggggaaccctgggctttgtcctgtgggcagctggagcggctgggcgttcccggctgcgacaacgcccacctggccccgcacctgggcctgctcgcaatccagcggcgcctctccgcatctgccttcacggatctcagccccagcagagcccttgtgccggaccctggggcgggattgcgagttcagagggagtcaagaggcgcccttgagtatggcgggagccccaccccaagcacctggtgggaactcacttgcctagggagagagcagggcagtgagcactccgggctggctcccaggaaagaccctccggcaggagcttggattgcaaggttggggaggagggaggccaggggagggacctgcagccaggtgatccgggtgcctgtatttcttcccaaggataatgtgagttgatgctggctgagatctgctccgatgagggtttgaaagagagagctccgggtgtcaaagtcagtggatggcaaaacatgcctggagggagcaaccaggcatccaaccacaggccctgggctggagggcgggggggggggggggtggaagcagaggaaggagagagaaggaaatttgggaggaagagtgggcacgaactggctgcccaattgtgtgggtgggtaggtggcagggagggactggttgttctgggtctgcccctccggccccaccacacctgcttccaggtgagcttaggaatttcccaggcttcctcccagctggagccagacgtgtccctcagaggccccagccctgcccatcctttcctgccctacccagggcttctctaccttcttggcttggcctgctccttgttcacaccttggtaaatgacccttcacaaaagtcattttctctatttgtgcttttctttcttttgccaggacgcttgactttctcgacagggagggggaggcaagcctggtgcccagtgctctgcctgcactggtcagtgcgcgtggctgtcacttggctgggaagctaggccaggagagcagctgcagctgtggaggtcggcagttgagaggtggagagacctgagcacacttgggccagtcgtcccgtggcatttgggagcccaggaccgagccggggggcaagtgtgggcaatgcttggagccacagagtgggggtagggaattggaggggtagagaggacaactcaaaccaagccaggaacccacagaggagaccaggaaaggaaaaccaagaaggagtgagtccccaatgcccccaaattgatccatatattgaatgatccccagtaaaagtagctccatgatgattccaaagcccttaggaaactaaaggtgccaggagaatgaatagacacgtctccatagaagacacacactggtcaacaagtacatgggaaatgtccagcatcctccaggaaatgcaaagcaaaaccacagtgagatcccacctcccacccgctgggactgggcagatgcagtcctggcaaaccagtcttggtgaggagcgggggtatcagagccctgctgcactgagatacacacacacaaaatggaatagtattcagtcttaaaaaggaaagaaattccagtactggctgcaacttggatggaccctgaggatcctatgctgagttaaataagccagtcacagaagaacacgtaccatacaatcccacttatgtgaggtccctagagtagtcactttcatagagatagtagctgacaggaggagcatggggagtgactgtttaatgaatacagacttgaaatttgggaagaggtaaaagttctggagatggatggtggtgatgggtggtgatgatggacattggagatgggcaatggacatggatggtggtgatggatggtataaatggatattggatgtggacagcggacgtggacagtggagatagagggtggtgatggctggtggacatggacagtgaagatagagagtagtgatggatggtggagatagagggcggtgatggacagtggagatagagggtggtgatggacagtggagatagagggtggtgatggacagtggacatggacagtggagatagagggtggtgatggacagtggagatagagggtggtgatggacagtggacatggatagtggagacagagggtagtgatggacagtggagatagagggtggtgatggacagtggacatggacagtggagataaagggtggtgatggacagtggagatagagggtggtgatggacagtggagatagagggtggtgatggacagtggagatagagggtggtgatgaacagtggagatagagggtagtgatggacagtggacatggacagtggagatagagggtggtgatggatggtggacatggacagtggagatagagggtggtgatagacggtggacatggacagtggacatggacggtggggacagagggtggtgatggacggtggacacagacggtggagatagagggtggtgatggacggtggacacggacagtggagatagagggtggtgatggacagtggagatagagggtggtgatggtcagtggagatagagggtggtgatggacggtggagatagagggtggtgatggacagtggacatggacagtggagacagagggggtgatggacaatggacatggacagtggagatacagggtggtgatggacggtggacatggacagtggagaccgggggtgatgaacagtggacatggacagtggagacagagggtggtgatggaccctggagatagagggtggtgatggacagtggagatagagggtggtgatgggcggtggacatggacagtggagatagagggtggtgatggacagtggacatggacagtggagatagagggtagtgatagacggtggacatggatagtggagatagagggtggtgatggagggtggagatggagggtggtgatggagggtggagatgcagggtggtgatggagggtggcgatggaggttggtgatggagggtggcgatggagggtggtgatggagggtggagatggagggtggtgatggagggtggagatgcagggtggaaatggagggtggagatgcagggtggaaatggagggtggtgatggacagcagagatgaatggttgtgatggatggtggagatggagggtggaaatggtgggtgatggagggtggagatggtgagtggtgatagaaggtggagatgaatggtggcgatggacggtggaaatggaagatggagatggagggtggatggagggtggagatggtgagtggtgatacagggtggagataaatggtggtaatggacatagagatggacggtggaaatggaggatggtgatggttgtacaacaatgtgaatgcacttgatgtcactcaactgttcacttaaaaatggcaaacatagtagtttttatgttacatatattttactacaataaaaaaagaatgaaaagcctataaaattctgaaaaataaaaaagggggctttagccctgccagagagtagaatccatcatagaacatcttgctatgggcagttgactggacacacacatcagagcaggtctgtgtgatcatttagcatatgattaatggggcatttaaaatccacgaggggccgggcgcagtggctcacgcccgtaatcccagcactttgggaggccgaggcgggtggatcacctgaggtcagcagttcgagaccagcctaactaacatggggaaaccctgtctctactaaaaatacaaaaaatagctgggcatggtggtgggtggctgtaatcccagctactgaggtggctgaggtgggagaatcacttgaacctggaagcggaggttgcagtgagccaagatcgtgccacttctctccagcctgagcaacaaagcgagactctgtctcaaaaaataaattaattaataaataaataaatccatgagggaaaggatgtcatttaaaaaagggtgtggccaggcacggtggctcatgcctataaccagcactttggaggccgaggcaggtggatcacctgaggtcaggagtttgagactggcctggccagcatggtgaaactctgtctctactaaaaaaaaaggacaaaattagctggatgtggtggcgcatgcctgtaatcccagctacttgggaggctgaggcaggagaatcgcttgaacctgggaggcagagattgcagtgagcctagattacgccattgtacttcagtctgggcaacgagcgaaactccatctcaaaaaaaataaaaataataataaaataataataaagggtggtggagcaactgggcggccttggtgtctggaaaaacatgacgttggatcctgatcccactcttcacacggaaataaattccttatggagcggaaatagaaatgcaaaaacccaaaaccacaaacataatttggaaaaaacacaggagactatttaatgatctcaggatccggaaggcttttctgagcacaacaaaaaagcagaagccacagggaacattgttgaaaaatttaattaaattacaaatggcaacattttgcctagaccacatatttaaaatcaaaggatgtgcaacaaactggggagaacccatgataactcagtggttaacaaagggccgattctcccaacaaagggctactatcagtcaacgaggaaagggccaggccgccggacacgctgcacaaaggaagccccaatggctgctgactgcaagatgctgaacctccgccgtaatcagggatgagcaaattggccctaccggaagatggtattttcacctgtcagacgttttcatgagagactgggatgggaggagcggggagacaggcacttcccacaactcccagcaggagtgtgaatttggggtgtcgggggaggggattttgtttccactatagcctggtactgcgatttggtccagggctctggtgaagatgtaggagttggcctgcgtcagcgcccgtccccgctttccacagcgagcaaagaccgtgggaaccctgatgcccctttgcatttgcgcttctgtacttagctgctagtctcaggcagtgaaagcttcaagccacccgcagagccctggaactggggcattggctctagtgggaaaaggaggcttcccactggcgacccaccatgacagaccacaaaagacatgcaggtccccacagtcaggccctgacacccactcttcctgccttcttctgcctaggcttgcacagctgggcaagtgagcgggagccacgggttagctgagatcacctgcggccaggaacagggccttcctggaggtgaggacaagctctgcttcctccaggagcaggtgctggagcagagcggctcccccgttctacaagtgtcctctgtgtggcggcccaggtctgtgcgggcctgtccagcccaggagaggacagaagtcatctgtagcctgggcccctgtggcccccagcgagaggccctggtgggactggtctttctcagcctgtgcacctggggctgaaacaggactcaaagagggaaagtggcccaggcaggccctcccctcaggcctcccctctccctggctgctctcccaggcttccctgctttcccttctgagaccccgactactggacccagccttactgccaagataattatccacaacagcaggagcgcccaggcccatgaagataatcgcctgcccagcactgtgtccacatccagttcatcccagctgagacccaagtgcagctgaggggtgggggacactcctcagctctcgaatgatgccaaccctccagggcctggctgggagcagctcagtgcttcctggctccggggctgtgttccctacgtcccattcggagcttctctcctgaagaaaacagtgtctgcctgcacccttcttagaaagcaccctgacacgtggctacaaagagcagagagcacagtacccttcccagacacacaccagcacccccacccactgcatttaagccaccactgtcccgccgcattcatccctcctctaccccctaaattcatctttcagtggaactctgcgttcatccctccactccccgctccattcatccctccactccctgctccattcacccctccactcccccctccattcacccttccactcccccctccattcatccttccactaccccctaaattcatccttccacagaaccctgcgttcatccctccactccccgctccattcacctccactctccctccattcacccctccaaacccccctccattcacccctccactctcccctcccttcaccctccactccctgctcctttcacccctccactcccccccattcacccttccactcccccctccattcatccttccactaccccctaaattcatccttccacagaaccctgcgttcatccctccactccccgctccattcacctccactctccctccattcacccctccaaacccccctccattcatccctccactcccccctccattcacccctccactcccccctacattcacccctccactcccccctccattcacccctccactcccacctccattcacccctccactcccccctccattcacccctccactcccccctccattcacccctccactcccccctccattcaccctccactcccccctcccttcaacctccagtcccctctccattcacctctccactccccccattcacccctccactccccactccatccctccattcccccctccattcatccctccactcccccctacattcatccctccactcgcccctacattcatccctcccctactccttacattcatccttccactccctcactccattcatacctccacttccccctccattcattcctccactgccccctccattcctccactgccccctccattcctccctccactgccccctccgttcatccctccactgccccctacattcatccctcccctatcccctccctgccccctccgttcatccctccactgccccctccgttcatccctccactgccccctacattcatccctcccctatcccctccattcatccctccactccctcactccattcatccctccactgccccctccattcctccctccactgctcctgactgccggctctggggcagtgctctgtgtcccatggtgcagagtaggacaatgatgaggaggcagaagagcaatcgagtggagtttcggagagtactgtcataaccctgcgctgagggcggatcccatctctgcccaggtcctggatctttaccacccagcacccacacaccccctaagctctgcaggacccatggtgaacaagatgaggaagaggactgaggtggtcatctcctttctacttcagcgggaatcctttctctgcggttcatcagggaaaatggaattttttttgctcacctacagatcagctctccagcatgacgggccctgcggaccacctgcctcaaagcctttcctccttgttctttccaacagaaccaggggctttcagccatctgtggtgatctcttgatctcggggaaggggccaggtccaggactgagcaagggcacataactaatttggggccaaggagatatgaggggaagtgtgctgttgcaggggacagtgtgtggggaagggcgcttctaggaatgccgtcctcctgttaaagagttgatgtgaggtaagacattctctgtctctactcaccgcctctgctgggtgaggacatgattcttgggactgcagagccatcttgagactaagagaagaccaggagcagagcagacaagctgaccaagatccctgccacagctgaactggacccagagccatagacttcttaatcttacgaagtggatcaagctaacaaacttaaacgatgttgtttaagctactttgggttggatgttctgttagttacagctgaatcacccatgtagcagaggatgtttttatttattttagagacaagctgttgctctgtcaccccggctgaagtgcaggtgcaatcatagctcactgcagcctcaaaatcctggctgcaagtgatcctcccacctcaccctcccaagtacctgggactacaggtgcactctgccacgccagctaattttttaaatttttgtaaatatggggcctcagtatgttgcccaggctgttattgaattcccggcctcaaacgatcctcctgcttcagtctcccaaagtgctgggattacaggtgtgaaccactgtacctcgccctgcacacgtgcttagatatgctttctccaagtactgttctttggaatactggtaataaatatttctatgagctgggcacggtggctcactcctgtaatcccagcattttgggaggctgaggcgggcggatcatctaaggtcaggagtgcaagaccagcctgaccaacatggataaaccccatctctactaaagatacaaaattagctgcgcgtggtggcgcatgcctgtagtcccagctactcgggaggctgaggcaggagaattgcttgaacccgggaggcagaggttgcggtgagctgagatcgcaccactgcactccagcctggacaacaagagtgaaactccatctcaaaaaaaaaatttttttttctatggaaaaaagtctattttgtgagatatacatatatttttttttaaataaaaatgtgttggtccaccccccccacacctccacccctgcagtcaaagccactgaccatggagccaggagccacccaatgaggtgtcttttctctaaggatggtgaagttagagaaggctcctttaaacctcctccaccatgtgccagaaacccagagaacactcacggcggccctgagctctcgagaatcgttgtgcaatgcccattccagcagccatgcacatctcatggccagggtgagcctaggaaggaagggcagaggatgacacattcgacgtgagtaggactttctgtgtgtccactctgtggggctcttctttggaacgtcactgtggacacaggagtcagaggtgaacgaaggcactgagaggggatggggcactggcattggaggagtgaggagcacccagccatccttattcgctttactgcttttggcagtttttctgtttgatgtgttaattcgtgtacacgctgcatgccagccgccactgatggccgccttaacggcggtgctgaccacggctgctttgtcagcacaggtgaagctgttgaaacgcctctcagaggggcctctggtggcactgcccatctcttccctcagcctctcctgagtgaggcctgctgcggggtttccgagagttccctcaggaagcggcagaagggagcagatgcccgaggtcaggtgcctgagagacggtagcatttggacagcccagtagcctttcccatggtcacgcaaattctcctgaaactcaggcagggtctgaagaaacacaagatggcacaaagccatccccagagccgtgggtcccacgtggttaaatgtggaaaacactcgctgagggtcatagtggaaaacagcggctggagatggggtcttcctgttggctgccgagacggtgacatctacaggtgttgagtggctaaaaaaatgtattccttgcaatgcctcacagacatggtaacgtatgcacatatgcgtagtggcctgccagggctggtaagataacatcccttctatattcagggagatgaaatctgatctttttttttttttttttttttttgagacagagtcttgctctgtcacccaggctggagtgcagtggcgtgatcttggctcactgcaaccttcgcctcccagg

SEQ ID NO: 412 - DNA, 2856 bp, Homo Sapiens
aagtctatgtggcccttaccatctgcaacccagagacgtgccagctgttcaccactgagctatgccgggctgggatcagatgggaagtggaacctcgtcatgaccagaaactgtttccctacgaagagcacttggagatggcaatgctgaacctcacactgtaggactcacatacgactccaacgggattgtgagaatcaagtcactctagtgggaagagtttttatatgggaaagcggataaaactttcattggactggaatgtttggagaatgttaatttccaaatcaggaaccacaaactgccctctaataagacatcagctatctaagcatgtgggtgctccctttctgccagcagttctggttcttaagaaaatcgccatcaatcagacatgaaatctctggctccaaaaatagcattttctttgtgcaaataaaaacgtgtgtatcaagtatgatgttcccccaatgtggacacactcggttccccacaaagccaagcccgctgcagctgccacatccctggacacattcggttcctcacaaagccaagcccgctgcagctgccacatccgtggacacactcggttcttcacaaagccaagcccactgcagctgccacatccctgggcttacagtgcagcaggtgcttttttcaagacaggaatcaaaatgttaggaacacggcggaaagatgacacctggagagcaaacgcaggatgaggagtactgcagaggtcacacggaagtcgcagaacagtaatccgctagcaggggcatggggcgtgaagaacagaagaagataggaagtgtttccgagcctccagaaaagaaatcagagccaagcacagcttcccgggtcacagaaccaattcatttaccaggcggcaccactgccgtcatttcaccttctggccactgggaggcgctgctcgaaagggtttgccctgagactccgagaagaagctgcgggaaggacagcaggggtcccggggttttagcctctggcccaggagttatgtgtccataaccaaatggagcacactctgcacccagctctcatcccatcggagctgctgcgattcccgcaggttcttccagaactggtttagcttgcccgcaggatcaggaaagtttgagaaaagcatctgcaaaaaaataaagagcagagcttaactcatttcctgtccccaccccatcccaggtcaccacctggctgaccccaggtccccgacccaacaacaaaccctcccaagttcctaactccctcacttggactcgagactcttcacgccccagcagcgctccgcctccaacttgacatcacgctttctgtcccactttcccacacttcgtgccctggagcacctcccggcctctacacgctgtatgttcccctgcgagcaccctcctcttggcctctggccaagtcccacccatctgtgggtaacaagggggtgttggtgttcttttcagccttgctaaactgtctgaatcaaggatcacaaactacagcctgcaggccaaatccagcccacagcctgtgtttgtaaataaagttttattggaacaaagccacaccccttaatcgaagatgatctgtggctactttcacaccacaacagagtaccatggttctgacagagactaggagacacagtctaaatgacttctgacctggacctttactgaaaatcctgccaatcattctgttggcaagaatgatgtattacttttagcaataagaaacaagtaacctttgcagaattccacccatctttcaaggctggtcccagaagttccctttgcccatgcacctacctgatcctgatcacttccgaaactgcagcccggcccacccggctccagcatcatttgtggagtgtcagctccataaatccagagggcaggtgggggtgtgtcctaactttcccgagcctactgtaccgaaacgggacagcagagtaggccagcctctgtgacttctgctctctccctagcttttccgccagaccccacatggtcccaccctggctgtgggaagcagggatcagggagcatggctcagtgccagtctccagaaccctctccaccctcgcgtggtggcagatgtggctacctgcagctgagctgccagttcctctgagtcctcaaagaccaggccattttcttcatgtttcaccagctcatgtaaactgcagagagaaccaagggagcctgagagctgcctggagaagacaccagacccctggggtgcccacctgggcttcagcctcccaccccatgctcaagccaggctgagagttggaacagggggtgtgttttccggggggtggttcttagatttggcatctgaagggtataaaggggggtacacatctaaatggccaaaccgatttgaagagggagccttaaggggggtttgtaccttctgtgctggatgctcttcaaggactgaagaattatttttgcatgtttttcttaactccatggccatggaacaagtaaagggaacacccgggggactggctcagcacataaaagatgacttttctagggcaccaggtttgatcccgacattccctgagctcagctcacaggaggggctcacatccctggatcccatccaggagccggctcctgagcaggggccaagggctcagcttgtgctggggctactgcttctagaatctcctctaacgccgcccttccaaacacacgtctgtgctgggtagagtggggccacagcatgacactcatttaactgattcaaacccaccacgtgagcttggccaaaagggacatggtgggagagaaagaaacaaagaaaaccatgtaagcctgcaggcaattc

SEQ ID NO: 413 - DNA, 2209 bp, Homo Sapiens
tacactctttcttgcctgctgccatgtaagacgtgtttgcttctcctttgctttccaccatgattgtgaggcctccccagccatgtggatctatgtgtcctgggtttcttctttctggtgggctcatggtctcgctgacttcaggagtgaagctgcaggccttaacgctagatggaaaagttctccaagtccctacccggcccagaagcccagctggcttcacctctcactggcactggctgcaggacttcgccgcacctagcccgggcactcccgcagcctagaggaagctcctcccagacaatcaagaggaaaagaggggaagcgagaaagagacggagagccgccagcgtggccaaagaccccactaagagggaagggcggtccacgcacgggacccagcctccgatcaagcccagcaggtgtcgagatcgcgcccacccggaccccacgccggccggccagcgctgcgcgcagccccagctcctgcccgcgcctctctcttcacacttcccggagagcagagggagccggctcaggcctcagccagccccagagaagggccctcacagcgcagcggggggctgaagggctcctggagcgcggccagagcagacatggagaacgaggaggcgcggagagcgagcgagggctgctagcacgttgtcacctgtcatgatgttgtaaaataagaaagagtaaatgttattttagaattccttcctggccaggcacggtggctcacgcctgtaatcccagcactttcagaggctgaggcgggcggatcgtgaggtcaggagatccagacaggagatagagaccatcctggctaacacggtgaaaccccgtctctactaaaactccaaaaaattagccaggcgtggtggcgggtgcctgtagtcccagctactccagaggcagaggcaggagaatggcgtgaacaccggacgcggagcttgcagtgagccaagatggcgccactgcactccagactgggcgacagagcgagactccgtctcaaaaaaaaaaaaaaaaaaaaaaaaagaaaagaaaagaattccttccttgtttcctgctgtagttatttgtcaaaagatacaaaaaatctgtaagagttaagcaaagctatatttattttgctgcaacactactatgcacagtgacatggtcaagttgctttttataatgatttctagtgatattaatttgcatcagtcgttttcatgaccccaaagccaactcaataataccagaaaatacttgtttgcttgcctacattttgtaataatccaatgtcctgaaataaaaatgaatattttcttcctggaaataaagtgagataattttcttcttccgagagactcatgaaacaagaacagaatgacattatactaaactatttcacaaatattggtcaacagtggaggcttttttgttcatttatgtaaatttcatttggctctattttcctaagttgcattttatgcttctttcacctgccttgccaaatgaaaagaaaaatcatttatttattaaaacatacactaacagaagaaaataatttcactcttcacaaactttggcattatgaagtcactggttactggagatttaatttctgtaacatatctgaagtggttatttttttctttccatgaaggaaaccttttggaattaagatatggtacattgaactaaacggggattgcatttgctgtttctgtgataacattttacatctgaaattccaataaatatttctcttcttgctttgaggtggtttagttaatcattcaggtggttggctttcataagaagtaaaggcgtgccagcatttatagtttcccagagttcgtttattgcctcaagcttgtatttattcttattacactcactagcttagataccaggtgaatacctgggagaaagaaacaattaatttcaaaagtaataaaaataaaagaacaaaaaaatacaaaactattcaacatgccagcaatcctgttctcttaagaaacctacctgtttttttcaatgtgtgtaagttttagcattttatagcaattagatgagtctgtatatcattagaacttctgtccttggaattaggacaaaactattttctgcaataaatatttggctctagaaatctattttgacctgtaccataatgcatagcagcagaattaaaatattgtgtgttatcatc

SEQ ID NO: 414 - DNA, 1112 bp, Homo Sapiens
atgttccttgtgaattgcttgcatccagcattaagggctggtttttatcttttatttttccaatcctctttccttctcaaggtgtccaagacacacagagccatggaatctcacagatgtctgagaattcctcctcctgggactctcagaggatccagaactgcagccggtcctcgctttgctctccctgtccctgtccatgtgtctggtcatggtgctgaggaacctgctcagcatcctggctgtcagctctgtctctcccctccacacccccgtgtacttcttcctctctaaactgtgctgggctgacatcggtttcaccttggccacggttcccaagatggttgtggacatgcagtcgcatagcagagtcatctctcatgcgggctgtctgacgcagatgtctttcttcatcctttttgcatgtatagaaggcatgctcctgacagtgatggcctatgactgctttgtagccatctgtcgccctctgcactacccagtcatcgtgaatcctcacctctgtgtctccttccttttggtgtcctttttccttagcatgttggattcccagctgcacagttgaattgtgttacaattcacaatcatcaagaatgtggaaatctctaattttgtctgtgacccctctcaacttctcaaacttgcctgttctgacagcgtcatcaatagcatattcatatatttcaatagtactatgtttggttttcttcccatttcagggatcctatggtcttactgtaaaatcgtcccctccattctaaggatttcatcatcagatgggaagtataaagccttctccacatgtggctctcacctagcagttgtttgctgattttatagaacaggcattggcatgtacctgacttcagctgtgtcaccaccccccaggaatggtgtggtggcgtcagcgatgttctctgtggtcacccccatgctgaaccttttcatctacagcctgagaaacagggacatacaaagtgccctgcggaggctgctcagcagaacagtcgaatcttatgatctgttccatcctttttcttgtgtgggtgagaaagggcaaccacattaaatctctacatctgcaaatcctgccc

SEQ ID NO: 415 - DNA, 5855 bp, Homo Sapiens
ctttcgagccgcgacaggatggggaggaaaaagtttgcggcggaggcggcgtcatgtgggacggggcgggcggagcgtcgcgggccggatgggaaaggccgggagcgccggcgggaggcgggacggccgcgggctctgcgcccgccctcggcgcggaccctgggccccgaccccgcggtcgccggggctccccttcctctgtcccagtgcgcccagccccgcgctccgcacccgggcacccccgcggggttctcctgagttcctggagctcccggggctggcgctcacgccgtgagaggggtgcgcccttaggggggcgggacggacggggggtttctacgggaggtaggaaacgggcggcttgcaaggcgcgggcttaggccggagcctggtggtgcgaggtccccagctcggatttctccctggtggagagtcccggagcagaacaaaccagcagaggctctggaaagggtcctcctgagcacgtggctcattcattcattcgacaaacgttacctgagcgcctgcccactcattgcccgagtgtgctgggagcgccgcaccaactgcctggtaggtgggagaagggacacgtcaggtaacaaacagcacaggtaagtgccggccactcaaatggggtggaaagaggtggcacagcgctgccgagggagtgcgttccagacaggtgacctcttgcttgggtgctgaatgagtggagttttccagagagaccaagaggaagcagccgcagaaacctcagcccagctgggcttgcagaagctaatgctagaatagttgtgggactcaggatctgctgaagtcgggggaagagagaagtagggaaaggaaagcccaggccacgcgtggggctcaggaacggcatcctcgcccgaggtgggagttcttctcaggccctggtgtttcccatgacagtaaaaggtgggggcttcagatttctccaagggaaaagttaaagcaacacacacctatttatttttactgtaatttcagaaaagagaggttaaaaccaagacatggacaaagcctccgaatgaaggcagccctttaaatggaataaatttggtttcatggcacattaatggggtgtcttctctccgaagacacagagacaactacagtaggtctgggggccgtcagggattggaggaacgaaggtaagaaaaggaagaaggtaagaaaaagaggtccctacctctgtgaggtagggacagtgctgaacagcagggctgggagagcccacagggaggtggccaggatggccacagggcctggggaggaccaggtggggcaccatcctgcggtagagaatgcccgtcacctgccctaggggccacccagaatgcagattaaataagtatttgggaatggcacaggagcttttccattttcgtgggttagaggaaagctgctgcgttcaagaggataacgtgggacctgagcattctggtaagtcaaccccacattcatggaaagccacgggctctgttttactgataaggaactgaagtcccacagaggaagtggccaggctcactcacacacagcatgcacttgaagctttctgtggaaatcagaaacctccggggctcaggcgctgtagtggtggcctggtgactctgaccccttgaaggagaagcatctgtgaaggtgctgtccaggacaagtagggtgctctacggtaaaggacatggtggcctgacctgctccagagcagggaggcctcccttgaggaaataagataaacccagactttaaggataagcagaaaccagctaggtgaactggagtgggaacagcacgtgaaaaggccctggtttaggaaggagcaccactccttcagagcacagaaaggccaggatggccgaagcatagggaacaacaggaaagtgacataaattgaggctgcagaggtagaagaagggccttattggtcgtgctaggaatttggaattctgcaaagaagcctgggaaacagattttggtgacactcgccttctctttaatgtgcagtttcagttctgttggtgtgattctgcattggagatggcgtgctgtaacgaatggccaggagcttaagagtcatgcagacttgggaggcctggccttgccacgcccagctgcatggccatcctcctcctgtttctggccgttctgtttctaaaccttggggttctgatattcctacatgtaaactaggggctgtaataggaatctcacaggtgagtcttaggattataagaggagacatgactgcatgtgtaagacatcataatgatgtgcttcctcatctgaccctacctccaggttctttgataacctcatggttcccattttctagaacagttgccacttgcactcagataaaggtgactcactgaatgcataaataagtgtagtgccggatttgcatacttttggtagactgtcatataataaatttataaatcagaattttaaaactccaggtggggccgggcacagtggcccatgcttgtaatcccagccagcattttgggaggctgaggcaggcagatcacttgaggtcaggagctcgaggtcagcctggccaaccagggttttagtagaaaccctgtctgtactaaaaatacaaaaattagctgggcgtgggtgcgcatacctgtagtcccagctactcaggaggctgaggcaggagaattgtttgaacccaggaggtggagattgcagtgaagcaagatcgcaccgctgcactcctgcctgggtgacagagtgagactccatctcaaaaacaaacaaaacaaaactccaggtggaccacgggccaggtggttgtagcttcagtcccttgattgcaacatgtgcccaagtttggctgagatgtacctgtagccacggtccttgaagccctgagaagatttgtcagcatccccacggtgctccagcagtgctctcatcttgtggctctaaatcgagtccatggccctctctcactgtcctatggttgcataagctcagaactggcttcgtctccaattccaggagccctggaggttgtggcctgttgacatttttacctcctgagtcaatgtggctgggccacaggtctcagttgccctcccaggcatcttgcaggacttggatctgtgccaagcttgtgggtgtgaacaagcccaagaatgctgaggctctcagttgctcagtgctgcccatcactgggatttcagagtagtgacccccctcctccaagatacaacagaatcttgctttggggccatgaagaacacaatcaatattacagttttaaatcttgaaaagtacagttttaatttttttaattccaaaaaatttcacacatgtgcactgcaaattcaggaggtaaattcagcaaaatcttgcctggtggaggtaccagaaggcacagtgagtcaatggggcatgtttctcagtcggtggggagagatgagaatggaacagggatgtggagattttatgcaggaaaaggggcctgaccacagattttttgccctttgaaaggagaggaacaaggcctatgcccactgcctcttggattcagtgggagatctgggcatcatactggatgaccaggcatgtagtcacaatgcacaatgccacccagcccaaaagtgtatattcaagactttagacccaacttcgtgcttacaggaaatagaggaggttgaggaacaagtgacaccataagaaatacagtgaaacaggccaggcaccgtggctcatgcctgtaactctgagcactttgggaggccgagatgggcagatcacctgaggtcaggagttcaagactagtctggccaacgtggtgaaaccccatctctactaaaaaaaaatatctgggcatggtggcaggcacctgtaatcccagctactcaagaggctgaggcatgagaagcactggaacccgggaggccgaggttgcagtgaacagagatcgtgccattgcactccagcctgggggaacaagagtgaaactccatctcaaaaaaaaaaaaaaaagacactgaaacaaagccagaaggtagaatattctttcaggtagtagtctggtctcttcaatagtcaatattatagagcaagaaggggccagtggagaagagctgttctagattttaaaagatgtaagaaatacaacatttggccgggcgcggtggctcacgcctgtcatcccagcacttaggtaggccgaggtgggcggatcatgaggtcaggagatcgagaccatcctggctaacatggtgaaaccccgtctctactaaaaatagaaaaaattagccgggcatggtggcatgcacctgtagtcccagctactcaggaggttgaggcaggagaatggcgtgaacccgggaggcggagcttgcagtgagccgagatcgcgccactgcactccagcctgggtgacagagcaagactccatctcaaaaaaagaaaagaaaagaaatacaacatttaaatgcactgtgttatccttaattggaaactgctttaattatccaacactaaaaaaatgtcaagggcaagaggtggtttgaactatggactggtgttagatgatgtattttttttattttgttaagtataataatagttgttatggttaggtgggaaaagatccttaaattttagagctgcatgctggagtatttagaagtgaaccgtcattgtatttgttatttaaaatactacaggaataaacaagatgaagcaaaattgctcagtctagatatgggtctatgagtgtttcatctttctacttttttctccatgtttgaaatccttggtaaaataaagtcaaagtggaggaaggaggagcttgagattgaaaaatcagtttgagaagcagccaccttgactggcttcactctaatagcctggacgctgcctccacactccaggtgcactgctcagcattctccaagaagatcattaaggcagaccctacgtgttaaatttcaatcagtttcattgagcaaatatgctgttaaatagagactgctgtgtgctgcgtcagtgtgccttatgggcaaatgtgatggtgactataaatgcagaccaagcagtccttcccacactgtgtacacaaagaaaggagctctggaactgggagccaggacatctgcaggaggagaattctgaagtgaaaggaggcctggatattggttgcaaggccttgtccctggagcctggatgctctcataccttctacatctgggcctctgggtccaggacagtgccagggagagttcatagaaacaaatgtgttgaagaccttagcggttgtctgactctgagacagttacctggccactcttaagtttcctcattttttttttaattttactttaagttgcgggatacatgtgcagaacgtgcaggtttgttacataggtatgcatgtgccatggtggtttgctgcacctgtcaacctttcatctaggttttaagcccctcatgcattagatatttgtcctaatgctctccttccccttggccccctgtcaggtcctggtgtgtgtgttgtctggcccccaccgtgtccatgtgttcctattgttcatctcccatttatgagtgagaatatgtggtgtttggctttctcttcctgtgttagtttgctgaggatgatggtttccagcttcatccatgtccctgcagaggacatgatctcatccttttcatggctgcatagtattccgtgttgtgtatataccacattttctttatccagtctttcattggtggacatttgggttggtttcatgtctttgctattgtaaatagtgctgcaataaacattatgtgtgcatgtgtctttatagtaa

SEQ ID NO: 416 - DNA, 2069 bp, Homo Sapiens
ctgttcggtttcgccttcctgctgtgcagtcttttgacgcttgctgtccaactttggagttttcttgcctttttttctctcagagttgagcccctgcccgggccctttagtccctcggtcacgaggaacggtagagtttagaacctgtgagtacgttagaaagttcgcagtcgaggaagaacagggttcgggcaagggcagctggtccggtaccaagggaaaacaggctgggatggtgaaggcgtcagtggctacaaggctggaagtttagcaccagaagggaatttggagatcaattcaaccgcctcatttcaggcatacttaaattgaaacccagaaagatgaggtaatttgcagaaggtcacccagcaacccctgagcaggcaggactgcaacacaaatgtctgacgtgggcttccactgtgtaatgctaagcagataggacgtaaattcctttgcagacttctcatttttccttaccccctgcctctcatattacacaccttccccatttagcttttcttcttttactttgcacttgcttttgtacatctaaaaggaattaattattcaacagcagtgggaacccttgaaacataatctggaaaaaaagattaataaagttttttttatgtcgcgtagtgaaaagagcatgtgctttagagacaaacctgggctccagctatttacttgtgagagctttaggtcaattggcttttattacagctttttaaccataataaaatggggatccctgcctagcagaagattgattaaatggatcataaattgtccaactagtgcctagcaaatagtacatactcagtattttcccctttttaatccccgttttacaggcgatggaactcaccagagaccagatagctagagaatggctgagctgggttttaaatctagtcaatcttgaccccagagctctccagcctaaaggtaatgtttagacttaacttccagtggtgtcattataagagtcaaaaacagactgaagaaataaaatagcagaataaagtagtggggcattaaagaatcatctagttaattcttggtgatgataacagaaatgttgggaaaagtgtcagaagccttaattttctccccattctttctgagtatctttagatcaaccaccacttcccaagtatttgcaaacaagcagcatagatattatagccctagaaagagttggaaacattatcacaacattagcaagagagtcaaggcatttttaaggaaacagaagcttccatttcatgaactaataaagcccaaggtgccaaagacactgatgtcatactggaaagtggtgtaaaataaaattataagcataatttcaacatcaaataaaacaaatgatgaaacatgccagttaatggcagagccagcgtccaacctcaatcccaatccagctcagaagctctaattctaccatggttatctggcaggacttgacacttcaattggattgtactcaaagctgtattttcttaaacaggcaaaatattctcacagaagcaatatttaaggcagagctctttttttttttttttaaggtttgacaagatcttcaaaagattaagaatagacaggaaaccaattaagaatgttaagagttacggccaagagtttgggcaaagaaagtttgccactcaactctcaatcatttgcccccagaaaagggattaggttgggctgttcaggctaattatatgaacattttataaaaagaaatcagacacagaaaatcaagccccacaaaagcagaagctggtactccaagctgtggctcagcccttcccttcccccacaggacagaactcagctgaacatctacttccttccctactaactcagcagttctcagaaaggaaatggcaaccatatgctttctcattaaccaaaacgaaaggcagccttgagaaacaagatggtctgggcaatacagaaactgttcagcccaggctagttggtttcagctacctctaaatcactcccaaagatgtggttaataaaaagaaaaaggagatgtcaaggagacaattattgctagg

SEQ ID NO: 417 - DNA, 1112 bp, Homo Sapiens
agtcctgctgagcctctcctaggcactcacaagccacagcacccgccacttagtacttctcacaaatgccctatgagtttggtatgatgtgcttgttttatagatgtggaagctgaagcttacggggctgaagtatcttgcctcacatcacaggctgctaagaagcagagctgggattggcatccaggttgatctccctctaaaagcctcccctttcactacaacccacatagactctcattccaaccccacttcaagcatttcttcccattatcagacctgtgggacaaggtttggttgggaaaacacgaggctcttcaggaagacagacaacagattgcccatcatttcatggacaagggaccgacatgaggcgcacccagatctctgtggctttttcttggtgccaaacaaatgcagaaggagtcacttctcaaagaacacagtgtttttcttcctcttctcacctctcctgggccggtgcctgtgataattgggaagcacagagtctggtttttccgggattggaaccaatgctgtgaagagtgttctgacaataaatgttgattgacagttgatggacaatgttcttgaatcagtttttcctgtgctgggtgttaagctgagaactgcactaaacaactgctcaacaacctgcttcctgttcagatagaatttactacactctctctctgtgggcctcagtcaggcagccaggcgagatggtatctcagacgccttccagctccatcactcaatgtctctatcaagaagagaacacagatctgaaaacatttttccccctaacactgagttggggttattattcacatacaaaaacacaggcaccaacagagataactggtcaggaaataaggagctttgattctggtctcatactctttgacctagtaattctacttctgtgaatttatcttaaagaaagaatccagaggacagagctgtgtgcacgaaaaggtttgctttcgcaatatttggagttactgtcaataaaatgatgtccaatgcaagaatgcgagagactcccttggtggcacatgaggccaccgcaagtgataatttcaaagacacagaaaaacatacttggcagt

SEQ ID NO: 418 - DNA, 1160 bp, Homo Sapiens
gccacgtgaaggatgtgtttgcttccccttccaccatgattgtaagtttcctgaggcctccccagccatgtggaactgtgaattaaacttctttcctggagtgtgaaaatgaactaataaactctgtgacctcagagactccctctctgtgaccctgttctcaaatgtatgaagatgggtgctcaaagatctctctctaaacatggaacagggcctgtctgaagacataagtgattaacttctaatctataactaaggtctgagtcctgaagaccttcctctggaggctgagtagttaatctagatgggtccaggtgctgcaggtaaaatacctcttttctgacaagactaggactcttacatagactaccatgaactaaaagaagcacaacattgccagagtaacctgtgatactgtcttcatgcgaacttggtatcctgtttccatcccagccttctataacccagtaacatcttttttgaaaccagtgggtgagaaagacacctggtcaggaacgcggaccacaggacaactcaggctcacccacggcatcagactaaaggcaaacaaggactctgtataaagtaccggtggcatgtgtattagtggagatgcagcctgtgctctgcagacagggagtcacacagacacttttctataatttcttaagtgctttgaatgttcaagtagaaagtctaacattaaatttgattgaacaattgtatattcatggaatattttggaacggaataccaaaaaatggcaatagtggttctttctggatggaagacaaacttttcttgtttaaaataaattttattttatatatttgaggttgaccacatgaccttaaggatacatatagacagtaaactggttactacagtgaagcaaattaacatatctaccatcgtacatagttacatttttttgtgtgacaggaacagctaaaatctacgtatttaacaaaaatcctaaagacaatacatttttattaactatagccctcatgatgtacattagatctctaacttgatcatcctatatgtctgctttgtattttcttaatgtacgtctccccatttgctattggtcatttcctatttggctcatttttcaactgggttgttttcctgttattaaaagagttctttactga

SEQ ID NO: 419 - DNA, 1793 bp, Homo Sapiens
tgaaaacatggtaaagacatacagtgcttttatgcacattgttaagctaaatcaaggtcatttataatcattttccttttttatttaagattttaagtaaacaaattttagaattttcagcatttcaaaaatgattttatttttcaagtcttaaattcaatattttacacctatgttttgaggctaaaaatatgaaattatataatgtatgatacagggttatcaaatatctaataatttttgaaattagctcttgtttttggtttttttgttgttgtttttacagatttcaggttacaaactgcaaagtttatgcataattaagtatggtatggttgccagaaaagcctaaaattactacttagaaaatttaagactgtttacccccattgtcttgtacttgcgagctaacttgtactattcttgtgaaagcactgtcatcttttagtagcaaattttgataatgtttctcgtggaaaaaaaaatcagtatctatctttagaacaatgtaattataatgtgggaagtgtgcatgaatgagagagagtgtgtgtgtatctgtgtgtgtgtgcgcgtgtgtgtgtgtcttttaatagtttatgccagcaatctttgcttgaatgtttaacgatgccttcagtgtgatgctggccaatagatgattgcagtttaaaatgtcattattgtgcaggcttggataactaacattccatgatgtagcttgtttctgatgagatgattgtaggtacatttttctcattatccaatcatctgtgggatacttagttttctaatgtgccattatctatttttattctgcagttatgttcaaaatacagtacatattttaaaatagaataaattgttaaacataaaattttaaaagtagtagatgtgcgtaagaaaactttgtaaaatagttatgagtcctacccagtagcaacttctggcattcaagcaggattccactatgtaaatatctgtaatgcatttataataagttgtgtagtttgtcctgcatccatactacactatttgctaaagtctcagtgccatctcctaatgagactgacattttaaaagtctgtatggaatatccttgataattcaaggaaatatccctcctgcctaagttccaaactgggaaacattcaaattatataaatgacatttcaggactttaagtatgaagataatgggaattttattgttttgctttttaaaatgagagcatttttatttgataattttttttaaatttttaatttttaactaatttcattattttaaagtaatcagtttttcaaatcatgattttgatatcattattctaaggagttatctcaaaggcacaaaatatgaattctgcaagaaggctattttttattgtagtttgaatgggttaggaaaagcctcaatttttcactcttaagtccttcagtacatttttctttcatcttattacttatgcaagttaaggttctttggtaacagaattcttgcaactgtaaaataaaactacatagatgtaagaagtcatgtaaacggttaacaagcttaccaaggttagcaaaactttcattgtaaatcagtctgtactgagcaaataaaaatcattattagttgtataaacacaaattccattttgactttcaggatgtcatactacttctgtacctagcattttcagtccttatatttgcaatgttacacaaactgtactattttcttttatgtgcagtttgcatgagtaaaccatcagagaataaattctatctttaaattatgttcat

SEQ ID NO: 420 - DNA, 1767 bp, Homo Sapiens
gcttggcggggccccatgctgggctgtagggcgcacagctctcctttctaggtgccaggtcgaacactgagcttactattgtacaagatctaacccaggagggtgagaaaggaggagatgaggcaggacagcaagagggactggggtcccacacagcagctcagccactgccgacctcggggtcaggaaacagacacccacaagagcgtccacgacccgtatgggaagatgtctgaaccccgagacggcgtgttctgtgctggagaacaacttccagggctttatccaggtgttctaaagccacagcaccaaaaagaattctcttcggcaaaggcagcaggactcaacaggaagcagacgtttgcgttccgttacttgaggaaaaccaaatgctgctgacatttctacccagagagagtttgcatctctcctgcttcgcagccatctttcctacggttttaccaggagaatgcctagctcttctccaacctgtgccaggcctgacactcagctcctctgggagtgcctccatttccctgtgcgtacaagcccacggtgccgtaggatcaccggtccactctgcgcggcagcaccgcaccccggagccgcagctcttcctcccgcttgcccgacagccctggtgccaagccctgtctgagccccaccaggaggaagcgcgtgctggctgctctccatctgctctgggactctggcctgctgcttcctctgcctgccactccccaaccccgtttcctcctctgaaaactggagctacacctgccccaacagggcagaattaccttaaatggcacaagacaattgtacagcagacccacctcttctccaaagttttcagggcccaaacccagacacctccttgcaggactcatggctaccgtgggctcgcaccaccagcctccccatgcgttttcctgcctctgcttttgctcaatctgctcaatgacagaaacgcgacaacagaggccactttctccaaacccagctctccctcgaggctcccatcctgctgctcacgctgaggccactctaccctgccctccgcagctcacaggcagacctggagcccagtgactacagggttggcctcctcatcttgccaccactcacaatgcccagcagtgttaaaatccggcaggatgcacccgcttgggaagcagtccccaaagcagaatcgtcaccacatctgaatagtttctgccatcccactgacaggccagcatctaaaagagatgtgcgctgagcgtccgttatgtggtggcgtcgctgtggtttcttaaccagaacgcaaaatcctgtgaccaggattatcaccggctcgtttcatacatgagacgggggaagccaaagtaaccactcaggccacagcagaaaaacgcgtgctggaatctgaaacaaagtctgttggattccaagggttcaacgtcttttgtgatgatgaagacgaagcctgcccaagagcagtcagagctgaaagaagaaaagcaggagggcctgtgaatgcccccaaccccctaaaacctgcagctccaggtccgacactcccaggtttgcgttttgaatttacactacctatggggtccaggccatcacctaagtgagaaatttcacacgctcacccggggtgctcaaagccatctctctaaatgaggtgcctgatgtgcagacaacccttatatgatctacatctcttcacctgtctggaaatcaagaccctctcacgatttttttgtttgtttttccccgaga

SEQ ID NO: 421 - DNA, 1501 bp, Homo Sapiens
cttaccctgtgcaacctcacagggccgggccttcaacgtcagcactatggctctctcttctgtcgctttctctccttcaccacgcagtctgtgaacagcactttctacactcctcgccggcaagcaggctcgtgtcgagggtagcagattccactggcgattccactggtgctgtgagccatctgctggctttgcacctcttagaatctggtgtttttttgttttttgttttgttttgtttttaatccttttccgggtaaccagaaagggaagctcaattcccttaaccccgagaccactaaaggggcaatacaaaaagaggaaataaatacatttttaagcatacaagagcttcacaatccagtagatcattttgtattctggattcattttgctttgtattcatatgctaatctcttcctttccacgaagggattatagggttccacaatggggtatctgtgtaattttctaaaagggcacaaagggtttaaatcattgtttctttgtagttggaggcaagggagagcaggaggaatgaaaatttacactgaaggtttttttttttttaattaaactctgcaggtgaggtcaactgtggaaccaaaataggttttagaatgagaagtttcaagagcaaaggaaggggagaaagagcacttaaaagttattaagtgggtttgttttttttttttttggcacttatggaaaaattgaaattaaaagaaatattctgtagcgttttgtagtgtagatttaacttatcctgcattaccacatcacagtatatgattttcaaaagcaaatgttagagccatgatagtggttactcaggaaggaagagggttgtgatggggagggacacaggttactctgataatatttcattttgggggctaggtggtgattacatatatttgcttagtaattatttgttaaactgaatatacagataaaatgcacttttcccaatgtatgttatagattgggggatttttttaattgtaaaatattcataatataaaatttaccatcttaatattaagtgtatggttcaggtgcattaggtacattcgtattgttgtagaaccatgaccatcatctatctccagaactttttcatcattccaaactgaaacttcatacccaataaaaataaatgtcctttccctcctccttccatcccttgataaccactgttctgttttctgtctctacgaacttgactattctaggtacctcatataagtgggattgtactgtatttgtctttttgtgactagcttttttgcataatgtcttcagagtagcatacatcagaatttccctcttttttaaggctgactaatattccattatatgtatataccacattttgttcattcactcagcaacggacatatggactgtttcctcaatgtatgttacgtttttgaatttttaaaatgtggcttgaattcctacaacaggacaacattaaaggaacaagaagcttgaaagc

SEQ ID NO: 422 - DNA, 4038 bp, Homo Sapiens
ctcctgctccttctgccatgattgtaacttttctgaagcctccccagtcatgcttcttgtacagtctgcagaacggtcttgcaacttggcttcaatctgcacagaagaatcagttttaaaaggtgatgagaagcgagaaggagagaagagctgcggcccttcggggagcccagaccttgttgctctctgagccatggctgtgacaccctctttggagctctgtggttcctggtgtctccaagcttccaggctccaccatcacattccctggtgcctggaagctgcttgtggtactcctggtccatctacaacctcacagggaacgagcgcctatgcgggcacctgaagctgcctgccctgccacagcgtgcctggttatgtgcagtggcgggaccccaggctcactcactcacacagccgtcactgctccacgcctcgctcgcccttggcaggcgtggaatccagaccggtagcgtaagccaagcgcagcctgccaggccaactgtgtgcaatgagcccagtgggcctcagcaaaactcgggcaaaggtgccaccagccacagagtttctggccagaaaagtgacactccaaggatcctgtgacagtttcacacctaacaagctggaaagtgtgtgcctataactgttcaaaacaggtccttcctcacctacaaaaagaagtatttcttcttcatacattgagcaccacatcaacagggtctcactccattgcctacactggagtgcagtggcacgatcttgggttactgcaccctctgcctcctgggctcaagtgatcctcccacttcagcctcctgagtagttggaactacaggatctctattgagctgggtagaacttccttccttgggatggcagtaagaaccaaagcaagaaatgaaagcaacgtgtttccacacatctaagaactcaaaacatttccaaaagccaccataattggtttgaccttatccttgtcctggaattttcagtgatgtctttcttgtagaacagattaagcagcatagcttcatttaatgtatttatgatgatttctgaccatattaccaaaaggcgtaacagtggtaccaagggagttaacaattgcaaaggtgcattattgttctcttattacttggttgggctactaatttttttttttttttttttttttgagatggagtctcactctgtcacccaggctggagtgcagtggtgcaatctcggctcactgcaagctcagcctccagggttcatgccattctcctgcctcagcctcccaagtagctggggctacaggcacccgccaccacgcccggctaattgtttgtatttttagtagagacggggtttcaccgtgttagccaggatggtctcaatctcctgacctcgtgatctgccctccttggcctcccaaagtgctgggattacaggcatgagccaccacgcctggcctgggctactgatttttaaaaattagaatgtattaaagtaaacacacaaaatgaaatgtagccatataaaatatagactttaagttttgaccaatgtatgcacctttctagtcatcaacatgatcaatgttgtgtttactgtacattcagtaagatatttccatcacaataaaagtttttctcatatctatttgccatcagttccccaacctcttgcctcaggaaaccagcagtctgctttttgtcaccattgattcgtttatcttgtactagaaatcaatgtagatgaaatcatacagtatgtattctctttcatctgccttcttttcctcacaacattttttagattgatccaggccattgtgggtatcagtagctcattactctttattgctcagtaatattttgtcctagggttataccaaaatgtgtttatccattcacttaacaatggacatttaacatgtttccagttaaaggttattatgaataaagctgttataaacatttgtggaaaaatttttgtgccaagttatgtctttatttttagggtataaatacctaaaaggggaattgttgaattgtgtggtaactatatttttaattttgaaaaaattttccaaactgttttcagagggaattatgtcattttatattagtatgacagtttccattgccccgtgtctttacaaacacttgattttgtctatctctctatttttaaccatcctgaatgttgtgtaatagtatcttattttggttttcatttgtttatgcctgattactagtgatgttgagcacagtttcatgttgtcttttcatgttgccatttctatgtacttttgtgaaatatctattcaaatattgattttttttaaaaaaaatgggttatttgtctttatattatagaattgtagaaattttctatataatttgaaaatcagtgctttggctgatatacatattgacaatatttttcctagtctgcagtttgacttctcattttctgaatgatgtcttttggagggaagaagttcttagttttgatgaagtacattatattattatttacattatagtttgtgtattttatttcctatgtaagatatccttacctacctaattttattaatactttcccttatattttcttctagaagatgtatacttttagtttgtgactgcaggtgtagaatttattttgagttatttctgtatgatgcaaagtgaaggtcaaaatttatttacttattttccaaaaaagattatcctgcttttctagccccattattttaaaagattatctttctcctcaataatacattggcttacttattgaaacaaactgaccttacacgtgtaggtttatttctggacactactgtctgttctgttctactgaggtatatacctatcatgatgcaaatttcatgcttatactaagactgaaatggggtagtgagaattcttcaattttgttcttctttttcacaatggttttggtcattgtcggttctttgtattttctaaattattttagaatcttcttgacaatttctgtaaaaattatgtgctttgattttgatcagccttgtattgaaaccatagatcaattttgaagaattgccaccttattgaggtttctaatccatgagtatgtcatatttttctacacaattagatattgtataatttgtcccagcagttttctgggataaacatttatgtacaaatcttcatgccaagttatgtctttatttctttggggtaaatacttaagagtggaatagttggattgtgtggtgtgtatatgtttaattttgtaagacatttccaaagtgttttcagagggaattgtgccattttatattaatatgaaagtttatattgctccatgtctttacaaacacttgattttgcccatctctttagggggattacacatcttttttgatacatttttaataaatatattaagctttttggcactgctagaaatattttttatttcattttattattgtgtatttcttgtattagatataaaattgatatttatatgttgaccttgtatcctgtgcccattgctaaattcacttattccatctaatagatttttgagagtccttggatttttatgcgtatgtgatctcatatacgaccacaaaatatcttgacattttaatctcttcctttccaatatgtgaatttcttacttattttaatctttgtcacactgttcaggagctccagtggaatatttaatataactgataacaaggagtatctatgctttcgtttctaatcttgagttgtagaaggtcacactgacttaacagcatttcataacagtgcaggtcttttgtaagcactgttttaacagattcagtaagtgttctttttttttttttctctttttaaaattttctgttttattaaaaacaatatattttcattatataactttagaaaatgcagaaaactgtgggtaagaattaaacgtgtgtgtgtatacttttttaaaaagttggtcgtaatgtatatattgttttctttgattttgtttaatgtataaccgtttccc

SEQ ID NO: 423 - DNA, 12939 bp, Homo Sapiens
cccggcctcctgtggcactggctagccagatctctgggaaccatcccagcgcaggtggctctgcaggaggccaactcattacccagcaatggccttgcctgatgtgggtaacaagctcattacctggtgatgaccttgtttgtctgttcctggtgtcagcagcctcagctctccctgcaaggaatgtctagcctggggtgggtctgaccagtctgtgccacaggcaccagcatcccagtctgcactgcatggggtgtcgggtctgacagcatctacctatatgtgccctgagggcccagactcagcccccagtgggaagactccgggctcctgatggacccctcccaattgcacaacctgagcaggtggtttgaagaagttggctgggaaggagatggaggactccagctccctggggaattcttcatgaatggcgtcgaaccatgggactctggctcccgtgaagttgaacttgtcaaagatgtcgacagcaagaactggggggacagttcatttaatcagacatcactcccagggctttcttgaacccttgctgttatcaaaatgaccacaactgtcacactgacactggctggacatatttattaattaatttattttttattattaatttttttgaaacggtgtctcacagtgtcgctcaggctggagtgcagtggtgcaatctctgctcactgcaacctctgcctcctgggttcaagcagttcccctgcctcagcctcccgagtagctgagattacaggcacacaccaccatgcccggctaattttttgtatttttggtagagaatgggtttcaccatgttggccaggctgttctcaaactcttgatctcaagtgatctgcctccctcggcctcccaaagtgctggaattacaggcatgagccaccgtgcccagcctacttatttatatgtattttttaagacagggtctcactctgtcacccaggctggagtacagtggtgcaatctcagctcactgtagcctcaacctcctgggctcaagcgatcctcccaccttagcctcctgagtagctgggaatacaggagcatgccaccacacctggctaatttttttttaaatagagatggggtctcactatggcacccaggctggtctcgaactcctgggctcaagcaatctgcccacctcagcctcccacaatgcagggattacaggtgtgaaccgccatatccagttgactaaccatctttagaacagaagcgacttccaacttcctgcatcccatgtgtacctacacctgtctgcagtgagcctgaagtgaggcaggatcctcgacactcactcttctagagtctcacacctgagggtctggaaggcctgccaaacccccaagatcacggcctaacatctcccaagcccaggacctgtcccctgggagccatgggtgtgtcattgcagactgtcttcccaaaggctccatttacagatgaggaaatggaggccttgctgctgaaccttttttttttttttttttttttttttgagatggaatttccctctatcgcccaggctggagtgcagtggcaccatctcagctcactgcaagctccgcctcccatgttcacgccattctcctgcctcagcctcccgagtagctgggactacaggcgcctgccaccacgcccagctaatttttgtatttttagtagagacggggtttcaccatgttagccaggatggtctcgatcacctgacctcgtaatctgcccctcctcggcctcccaaagtgctgggattacaggcatgagccaccgcacccggctttttttttttttttttgacagagtctccccgtcacccaggctggaatgcaatagtgcaatcttggcccactgcaacctctgcctcccaggttcaagtgattctcctgcctcagcctcccaagtagctgggattacaggcatgcaccatcacacctggctactttttgcatttttagtagagacagggtttcaccatgttgcccaggctggtctccaactcctgactgcatgtgatctgcctgtctcggcctccaaaagttctgggattataggcgtgagccactgcgcccagcctctgaatcatttttctaagagcatggccaagtgggggccgggagcccacctgctccacccatggggacccagctcctgggcgcacccctgagggttgcaggcctccacccccaacgcagccagtgccttactcatgttggtggtgacgatgacaaagggctgcaggtacgtccactgcacgttgcgtgccacattgctgaagtagccctcgaggcgccggagcagctgtgccgtgccaccctcgctccgctggatctgctcccacgctgccctggtggccggggccaggagggcactgcccgagtggatgatgttctggtcagacagacagcgctcagtgctcagcctgcggaggcctggctcgtgggaccgagggacatcagccctgaaaggctttgctcgcctagagagctcattcattcattccagccctacactttagattgtgctctttaatattagtctccaattttttttttttttttttttgagacagactttcgctcttgttgcccaggctagaatgcagtggcacaatctcggctcactgcaacctccacctcctgggagcaattctcccgcctcaacctccggagtagctgggattacaggcacacatgtgccaccactcccagctaatttttgtatttttaatagagacagggtttcaccatgttggccaggctggtcttgaactcctgtcctcaggtgttccacctgcctaggcctcccaaagtgctgggattacaggcatgacccactgaaactggcctagttttcaatttttttttttaagtttaagaggaatagaaaaatgttactaagctcacaaagtatattaaaatccagagaattaaacgtgcttcatatttttagcttaatttattagatttacaagcactgtttaaatgcttggaaggtctgtttgctagccaaacaactgatataggaaaataaaaatcaaatatatgacgtatattaattccatttaaaatacttaagggaatttcatggtttaagttaataaataggatcaaacattaatcagagttgaattcaaagagacaaggaagtcattttttagtacttgattttcataaatcccgaaccctaccacataaactagagagactgtgggtgattcaatgtcagaggccgggactctgtcagagtgagccctgccagaggtttttccacgtacacctcaagacgctaaggcagggaagacatgtggagacatccctgttatatcagaattcctcctgaaccccacatttaaagcagtgacggaatcaccacaccctgggctgagcagagaagccacactgaggctgccatggacatgcggacagctcctctgcgggtgaccctctgcctctgcgcaccccagggtctatgtgaatgactgggtggaggtgtgaggctgtgcttaagagtttggggaccacacccaagacagaaaccagggcagacacggtggctcacgcctgtaatcccaccactttgggaggctgaggcgggtggatcacctgaggtcaggagttcgagaccatcctggccaacatggtaaaaccccatctctactaaaaatacaaaaaattagctgggcgtggtggtgggcgcctgtaatcccagctacttgggaggctgcggcaggggaattgcttgaacccgggaggtggaggttgcagtgagtcaagatcacaccactgcactccggcctgggcaacagagcaagaccatgtctcggaaaaaaaaaaaaaaaaaaaaagacagaaaccaggagggaaagctgtttacagagtcacacgtggagaacaaatgccactggcccaactcgcaggctgggactcaaattccagcgaggggatccttcctggtctctgggggccctgtgcagaccagaaggtctcgtgggggccctgcatggactggaggtcctgtgggggccctgcgtggatgagacaaccaggtttagtgttgggagcaggacaccagcatgggctagcccagtcccaccacctgaacagaggggctgtgatcctccaagctacccagggaatgtgacacctgggtgcacagctcgtcccaatggccagaatgtatggaaatccaagcgtggtggctcatgcctgtaatcccagcactttgggaggctgaggtgggtggatcaggagtttgagaccagcctggccaacatggtgaaaccccgtctctactaaaaaatacaataattagccagtgggggcgggggggtggcacgggcctgtaatcccagctactcaggaggctgaggcaagacaatcagtcgaacccgggaggcagaggttgcagtgagcctagattgagacggtaacactgcactccagcctgggcgacagagcaagattctgtctcaaaaaataaaaaaaattaaataaataaagaatgtatggaaaacgttagcacaaatggagaaagttagcttaacccttgagagcaggcaggcagggaaaggcaggcctgggtgccctcctggcccaagtgggctcaagaggccctgcatactctggtggggggtgctctgaggggcagcaggggtcctggtggagagtgctggcaggaggactcccagagccatgcagcctggatgtgggatcggatcctcttgcattgcctgctctactggctcagaacccaaatccctcaaagtgaggagtcccactcactgggaagcagtttttggttcagacttcccatggaccctgggaaacttcctcagttgtcctgaaagctctgcagggtgagaccactccttccctcccacccctgagaagggcctgcacacagtaggtgctcagtccacgcacgagagcaggtgacgctggggcccctggggcttagcagccggaagcccaggagttctctgcctggtgcatgcgtggctcaccctgggagcagggctggggtgtgccggctgctctcccagctgtggacgctcacgcccaccctaggtacaggctggcaggggctgccaggctggggaggctgtgcctgggttttccctggggtaatttcaagtaaagggtgttcttttcctgtgcgccagtagacgctttggtctcattcatgaggtttgattttttttaaacatgcaatcctacactttgggaggccgaggaaggtggatcacttgaggccaggagttcttgatcagcctggccaacatggtgaaaccccgtctctagtaaaaatacaaaaacacagcagggtgtggtggcacacacctgtaatcccagctactccggggctgaggcaggagaattgcttggacccaggaggcagaggctctagtgagccaagatcgcgccactgcactccttcccggatgacagagtgagaccctgtctcaaaacaaacaaatacgcaattctttttttttttttttttgagttggagtctcactgtcacccaggctggagtgcagtggcgcgatctcggttcactgcaagctccgcctcctgggttcatgccattctcctgcctcagcctccctaagagctaggactacaggcgcccaccaccacgcccagctatttttttttcttttctcttttgtatttttagtagagacgggatttcaccgtgttagccaggatggtctcgatctcctgacctcatgatgcacctgcctcaacctcccaaagtgctgggattacaggcgtgagccaccccacccagacagtttgcttgttttttgagacaaagtcttgctctgtcacccaagctggagtgcaatggcacgatcttggctcactgtaacctccccctcccaagttcaagcaattctcctgcctcagcctcccgagtagctgggattacaggtatccggccacctcaaccagctaatttttgtatttttagtagagacagggtttcaccatgctagccaggctggcctcaaactcctgacctcagtgatccacccccttcagcctcacaaagtgctgggattacagttgtgagccaccacacccagtcccagtctttttcctatatgtgatttacattggttttcacaaaaaatttatagctattttttttttaatttttaaattttttgtagagatgggatctcactatgttgcccaggctggtcttcagctcctggtctcatgcagtcctcccacctcagcctcccaaagtgctgggattataggcctgagccactgtgccactgtgcctgaccctgcattttcacttattgttactttttcagcactcctcctttaattcctagtacctgctaagacttctgttgaagctcacctgcttaattcctctttgtgattacacaattttatattttggaaagcgtcattgccagggctaggcatagtggttcacacctgtaatcccagtattttggggagccaaggcaggaagatcgcctgagctcaggagttcaagaccagctgggcaacatagggagactccatatcttaaaaaaaaaaaaaaaaaaaaaggaatggtggcacatgcatgttgtcccagctagttgtgaggctgaggtgggaggattgcttgaggcctggaggtcaaggctgcagtgagccatgattgtgctactgcactacagcctggatgacacagcaagaccccgtctcaaaaaagaaaagaaaaaaaaaagaaataggaaaagagtcattgcctggggttcattttttactttttaaagagtgcagagtagtttttaatgtatttaaaacatttctgaaaatggaacaaactggataatgttattttttatttgttattttaattaggggcatttcttctttcctccgttaagcatcaaaacttggagaccagatggcagatttgcacctttacaaccagaagctcagggagaagttgaaggaggagaacacagtgggtatgttcagattgcttttgggtaccttgacccagccacattgtctaccctagattggtgctcatggtacttcttggtggcatttcaataataggttgagttgtataccatctccctttacactacattatgaaaatgacattattaaataagaattttgatggagctgataagctagtagaattggcacatgaccccttttatacccagccctcttgtctggtgtgcttgaggtaataataaccccttttatacccaaccctgctgtccagtgtgcttcaggtaggagtgtcctggcagatccatatattgactaattgctactgtatgtagtacatccttagaccacccatattctagcatgtgcagcccaggcttgtactgatgctctgctgaggtctggcatttaagagaaagacaaacagctccttcaggccaaggatctctgtcaacaggctgaagaggtgagggtgctgagcctcagtatgtgaccaagtttggcttccacatggtgatgtgctgtggcttcatcccacaggtgagtgcctgggtgagggtgttccctgatgctctaatgctggtcacccactcattttttttttttttttgagatggagccttgctctgttgcccaggctggagtgcagtggcgcgatcttagctctcctgggttcatgccattctcctgcctcagcctcctgagtagctgggactacaggcacccgccaccacgcccagctaattttttgtatttttagtagagatggggtttcaccgtgttagccaggacggtctcgatctcctgacctcgtgatcctcccacctcagcctcccaaagtgctgggattacaggtgtgagccaccgcacctggcggtcacccactctttatatgtgacagaatgccagtcccctaggcaccagcaagattgactacctgatttctgaaagcagaatacaagctgtgatacctggaatggggagagcagaagccgagagtcactgagctgagccaggcaggctcatgggacatgctggggcaggcagatcagcattctaagcagaggaagcctcaagtgcaaaggtgatgttgcacaaggctcctgatgagtatgaaggactggagacagttgggtgacaggtagtgtgccaagtcagggattaagtcctgattatcagctcctctcctgaggcctttacaaattattatttatttagatacaattgagatataattcacataagatccaccactttaaagggtagaattaattggttttagtacattcacaatggtgtgcaatcatcactgctgtttaattccagaacatttttattaccctaaagcagaacccattagcagtcactccccatttccctgttccctggcccctggcaacctctaatgtatcttccgtcgctttgaattgacctattctggatatttcatatgagtggaatcacattacatgtgaccttttgtgtctggcttctttcactcaggatcatgcttcaaggttcttccatgttgtagcacgtattagaatgttatttttttatggctgagtaatattccactgtatggctaggccacatttttgtttatgtattcctttatatggctgaataatactggggcctcttgaaccatcaccttttaaacctgtgaagttccaaagaaggctttggacaacccaactgccctgtgcttccctcaaagaagccattattggaccatattttggtttcgttagggacacagtgcccattatataagagctagtccagtttaaagctactgcttcccgaagagagcatactttcaaatctgtctcctcgtggaagcccgtcctgattagttgggtccctgcagacaatgaccaagctctccctggcgcagatggagggtgagttccccagctggaggtcactcagggcaagattctcatgaaacccaagcagatttacggttcccagccaacaggcagtcctcacactgggctcgctagaactgcacaaggagtttaccagatttaccaagacccccgagatctcaaccacagctggctcccctggagtcacacagctgtccggagccagtgagcagtaccatcctcatagtccaggtgaggacggctgggtgtaggttgtggtcctgtttttcaggtcaaggggtgcaagtggtggggtctacaggtcttggtcctgttgctgaggtcaaggggtacaagtgatggggtctacaggacttggctggcccagcagagtggtgtttcaaagaaatgaagtgaaatcttacccagaacccctgtgtgtgaagcagatgagaagcgggctggtctgtttggagcacaggtagcccctcaatgtcccttcagactccaggatcaaggaaccacctcggatcagctgcagcctggctaggaagggtgaggggccagggaggacacctgccctgcttcctgcgtgtcgtgcctcggacagcaccaggttccggaggcttcccactccttgggagggctgaatgagtcctgggggagtgtgtgctgcagccactcgggggcagtgctgaagagtgggctcctcagatgcctggggcactaaggcccactggagccaccagctaggtcggctgcagtgattgccccatgctctgtacactgccacataccaggcaccgttctaagtgcttcatcggactcaactcacccacttgccccagcaggtaaccaggcagatgtcactgatcggttttacagatgaggaaactgatgtgcagagtgacactcctgagaccgtgaagcttgtaaatggggcagctgggttttgaccctcagtctggctttagagcacaggccctgaccatgacacggccctgcccctctgtcaaggggaggcctgaccattgggaccagctgtgcacccaggtggcaccttccctgggtagcttggaggatcacagcccctctgttcaggtggtgggactgggctagcccatgctggtctcctgctcccaacactaaacctggctgtcttccagaaagaggacagagctcagacactgagagcttgggcaggcaaatgggaaatgacgggaggctgcacggtgcacctctgtgccgggggtctgacagccaggctgtggggaggggacctttccatcctgctcttgaggtgcacacagcaccagagggtgagcccaggggccgagtcaccacagcacccatgtgcagggagagtctcgatggtgagggccgctgaccaggacggtcctcctcaaaagagttttacaaaataaccctttgcataaaataagcattgtatttttctctgttgaggtgtaattgacataaattgcacccatttaaaacgtataatttggtaccttttgacatgtttgtacctgtgaacctctgaccacagttgaggtggttacccccaaaaggttccccgtgcccttccctgccccgggcaaccattcttctatattgtcactgtagattagtttacatcttgtggaatttaatctaaacagaaacatacagtatgtactcctttttgtctgacttctttcactcagcataatcattctgatatttatccatgtctaaaatcctttgatattcatccatgatacacatccacgttgcatgtgtcaaaagtcaattccactgtattgatatcacatagcctgtttatccattcacatgtggacagacttctgggtcatttccagtttttgcttatacgaataaagctgctataaacctttgtatacaaatctttgtctggacaaatgcttccacttatcttgggtaaatacctaggaggggaatgactgtcatatggtaggttcatatttaactctttaagaaactaccaaactattttccaaagtggttgcatcatgttatattcccaccaacagcgtatgagagttccagttcctccacatccttcctaacacttgatattttctgttttaaattacagccatcctagtgggtgtgaaatattatctcactgaggttctattttgcatttccataatgactaaagatgtggagcatctattcaggtgcctgtttgctgacaaaatgtcttctttggtgaaccatctgttcaattattttgcccaatttgtgaataggtttttttcttattattgagttttgagagttattatttgtatatttaggatataagtcttttaccagatatatgatttgcaaatagtttctcctgatttgttgtttgtgtattctcttgaaagtgtccttcagaggccaggcacggtggctcacgcttgtaatcccagcactctgggaggttgaggtgggtggatcacttggggtcaagagttcaagaccagcctggccaacatggtgaaaccccatctctactaaaaatacaaaaaaattagcttggtggtgggcacctgtaatcccagctactcaggaggctgaggcaggagaatcgcttgaacccaggaggcagggaggttgcaggggccagctgtggccacaggctggggacagaggccaggtctgaggctggtcctcagtgaggagtaaaggggatggaccgggagacagggtgcaggtttgacactgattttgcttttggggatgggtcgagggaagaggctgagactctgggcttggacattgggtacggaggatgtgacactagcagacaggctggatctggaggcctaaggtgtgcagtgtggggagctgtgtgtgcaggagagatgcagagcactagggagcctgaacccctgctccagtgcacaggcctggcacacggcagggaggaggcagtcaccattccctgacccgcccgggcctgggaggcagggcagagctggtgacgggccagcgtggggccttggaatgacatctggcatgtggcggtggaggggggacatgtaactggggactgtggactcccagctggaatccacctccaccttccacatccacgcactgccttttggtctttactgagcacctgctgtgtgcaggggctgctctagcccctgggaccaccaagggccagccctccgcaaccccagccctgcattcagcccccacccacttcctccagagccccacaccccacatactgaggactctaggcgttttcccactcttgaaggcactgagctgggaacaccacctctggccaccagctgtggactgcagagaggcctacggtgaccaggaagggtggagctgcccaaggtcatacagcaagccggcactgcacaagctgatcccatggctgcccagccttggggaatgggggacttctggcatgtccccgagctggcctcatctgggccctggtagaaggcaaataaaggcaacatctcaacaaggttgtgatagctgggacaaattgaggacacagtgccggggatccaggcaagcaagggacaatccaggaaggctcccaggaggaggtgaggggcctgaagcccaccctggcctgagcccctcctcggtactctagcctgcctagccctacccgcttcctcgacgggcccctcacccagcctcagccttggcctgacatttcccgtgacatttgctacaaagaaattgagtcataaatccaaaggttaaatttgcacatcgcctcaaactgctgggggaagcagtggtccctccacccactgggcgccccgtgggtgcggggtttgtgtggcagggtctacccatcctggggcacttgctggaggcccacaggtctcctctggtcctccgaggcacttcaaccactgtttcccaaaacaggttcctgggcacaccaggccctgaggtacatcgcataggggtgcctctcagagaaggtgctgcccacccctctccaaaacagagcccaagatgccctgcgggaaaggagcaccatcagcacc

SEQ ID NO: 424 - DNA, 1208 bp, Homo Sapiens
gctactacaaagatatcaataaccatccaaaaatcacttaaaatttaatatcccttaatttccaaagacactttgtgatctgactgttcttgaaggaaagcctagaactgaaactactagaacttggctcctctctaggaatgtggagacaggtattctgcaaaggagaacttgacaaggaatgctacaaaataccagtcacctctttagaagctcctcccacctctcctgctccatttgatggaatggcaggctggattcagagaggcacgtgccaaaggagctgtttaaatccctctagacatcccttttcaatggatatctcttttgagtataaagagagctttcaatgtgtcttgctatcattttcctgaccctaatcccagattaactagaatcacctttagcatctaagtgagtgggtgctatgaccttccatcaacgcatgtggcatagatgctaaagcaccagtcttacatggtgggaaccatgttaaaaatcaatggataaagtagcagagcctctaaactaagaagaaagagacatagcttaattacagaacactgtattttcataatcactatttcattgtgagtatgaagttctcctcttttccttaaaactaaattccatcttccctgagaatagggttaagagaaatattaaaacgcaaaatgtcaagggccttttaaaagataacacaatgggatgtctatagctaactgcaacgtaaatgtgtttctactctaaaagcttttccattactcaggttttaacctcacctcccctctggactctaggaatacatgtagagatgggaaaagtcaatggggaaaatgtgcgaatgatcgatttcttcgattgtcggattgagggtggcacaatgtcttaggcggcggcgggtaagtgactcaagcgaacctgttcgttccctaggcgcccctgtctccaagaggcggccccgaaggtgatccgccccccagagcaggaaaccagcccaccagtcccagcaaactctcctccgagcctgggatgaggaaaggagtcctgcaggtctctaacgatgggtcctaggggttcagcagcaaagttgacacaaagctgtctctgccctatacccggtgctgcccatggtactgcactcgaccgggccttgacccggagtcgccgatactacagctgccatggccgccaagtggcatctcttc

SEQ ID NO: 425 - DNA, 1114 bp, Homo Sapiens
catctgcgtcagcctcccaaagtgctgggattacaggtgtgagccaccacacccagacattcatctttatttttaaaggacatttttactgaacataaaattctctgagttggcagttttttctttcagcaatcttaagatgtttatgccttctggcttcaacagttggagcaagaagattgctgtaattcttatcttggttcctctggatatttttaaggttttctttctatcagcaatttgattacgatgtgcctcataaggatttatttgtgtttatcctgcttggggtttattgagctttgtggacttgtacatttatagttgtcactacagttggaaatttttaagccattatttctttaaatacgtttctatctcaagaagtacagttatctccaaatgagcgtcatctacatgtccacaactctgatcagaccactcttagagccagtaatgattattttaatacctaccatactttgtgtatatttactcctcagtaaatatttgtagagctgcacatagggaatttctttaacacctttaaagtttatttatttaaataagaaatacatgcccatggtaaatatttcaaatagtacaaaaatatttcaaatagtacaaaaaaggaggtattctgtgaaaagtaagtctttgtttcaccaaagataccaatccctgccccctccccgtcctaaggccatcactgttagcatttccttttttctcctcccaaaattgtctgtgcatgttcaagtatatatggatatatatccttgtgctagcatactatatacactgttctgcatctttttaaagtttaataatcttggcgatcattctatatcagtacatataaagtgggctttttatgaatggcctaacattacatcatacagatgtatcataatttaattaagtggtgccctgttggtggatattcaagtcgtctggtcttttgctattgcaaataatgttgcagtaaagtaaaatgtaaaataaaagtaaatgtcttacttacttaaaaacctattttaaaagtaaatgatggactttaggaggttaagaattaaaaattaataaacatataaataaatgaggtactctagca

SEQ ID NO: 426 - DNA, 1464 bp, Homo Sapiens
tgactgtatttcaaaggcagtgactgtaaacaaacttggttgaagaaataagaaccacatgacaaaatgcttgaattaaatcttttttttttttttttttttttttgccacatttcacatttgagaacccagaattcagctcctgttatacaaaatttgtaaaaatttattgccttggcgtaaagtgacaatcatgccttggcgtaaagtgaaaatcttcacagaagggtatgctttgtgtcaccaaatgggggtgcagctgtgtgatatctgtgcagtttgtgataaaattaaaaattttctgtgaaagattcttaactggaaattggaagggaaaacaagaagaaacaatgtaatgtagcagtggaaacaaaattctcacaatgaatagcagtctttccagcttctttgacacggatttcctcatcatcaatggcggctctcctgaactagggatgagtgtgaatctccatttgaggaaggggaagaagagcttggagggtgacagcctccccctgagagagccagttgtgttcatgattttggttccttcttcctcctaattaagcatctgcccaggagcccaggagccagggcttagcttcctggctattttcaactcttcttagtgaagaccagcattgccagcccactgaccccagtagggtcacccctgcccactgagaaccagccaccccctcaccccccaccagagttccctgaaggaaccagctgcctctagtgggagacagagtaaaggcagaggggcccctcctttctcaggtgccctgtgctagtgttgggcagctctaaggttggaaactgctttccccactgagctgaaggctgcctcctgggatatgcacccggcggtccccattcagccccgggagccactcggatcaagtctggctgtatcccgagggcgaccaggacagccctgtgagcagcagttcccctcctggaacactgcttcaccagcccatcaccccagccctgtggactgctcctccctcacctggtttctacgtggacccaccattcttgccctcctggacccctaaactggcccatgtgtttagttgtagaatgggggccaggactggacatgtggtttgattgctaaggacctagcagaggctcatcatgtggtagactctgtattttatcgtgtgtgtatgtgtgtgtatatttacacacacatacacacaagatagatatatatattaagtggacactgtatgtgtatatatacacatacatatattatagatgtatgcatatatgtatatatgtatacatatatgtatatgtgcatacatatagaggtatacatatagatgcatatctgtatacatgtgtatatatatacatatatggatacatacatatttatgtgtacacatatatgtatatgtgtatatgtgtacacatatatgtatgtgtatacatacataagtatat

SEQ ID NO: 427 - DNA, 2631 bp, Homo Sapiens
gagtgtgccaggcagtggagatacagtgataaatgcttgctgaagagcgctaagggacaatgtccagaaaaagagcaggcctaacggcatctttttagcaagtttcctggcagtaaagtgaaaaaggatgaatgacagcaacttagtttacttgcagcttcctgtaaatttagtcatctgaacaagaggggactgaactgtttcaaaacagaaagcaattgtttcatggacactggccagtctacaagcagagcactctcatggggagcaccagatgagttccagccgcagttcttttataagctttaagtgcctcatgaagacgcgaggatctcttccaagtgcaacctggtcacatcagggcacattcagcagcagaagtctgtttccagtatagtccttggtatggctaaattccactgtccctttctcagcagtcaataatccatgataaattctgtacaacactgtagtcaataacagcagcaccagacagcatattaattcttttaccataaatttgtgtgtaattataatgttctatgtgtggtgttatcaaaagaatcactgtgtctctaaatatcatatatgtatgtctggataaatacattgctgtacaacatctccaacatgcaggtcatgctctaggacttggggatatagagtaatacatgtttcgtggccaataataaaagtgacaattgtcttcctaacaaaaaataaacatgagaaataggaattaatcagcagtctcaaggctcccaaatgccttagtgatattatttatccctctatttatattacggtctttttcttccctcacatgctcaatacatgagacacgctattgctgttgaattcataggaatgcataaatagactttcttccactcagactgaatatgactccctaaggattttgttggagtgtagtaatgaatgctggttgctaggtagtagaaactgacactgcagcaggcaaccaagtgcaatggtgaaattgctgcttaaaccctgcttatcaaaaagattcacagtgccgattaacttaggtagtctacagagcatcattaatttatacacaaagcagagaggctgctccaaatagcaaaaaatggtatggagtcgggtttggagggagtaaatattaaaatcataaacatcttacagaggcatttctgtgcttcatggagacagatggcatatacaggaaagacagggagctaagacagacaagaacaacatacaggacaaagcacctgattaaacactgcctgaaaatctgattaatcttttgactcaggaatttaaggctagtcaaaaaagccttctgtgaacaccagtgacatttgatgtttgcacaaaaaattaataaataaaaataaaataagggggtaaaaaaaagacacaagagctttgggtgatatttggcactctgcctctgaaaatgatgacaaaccctgggtattttttttttttaaagagtctagaaccaagcagcaatttctggctaaacaatgcaagcctggctggcagttacctttctctcatgttttgtgccttccccaagtcattaagtaagagatctggcctcggcttgcgtgtaaccagtaatgacaacctctttgcagttatctgtgtgcaaacaaccagagacattcagaactccaatacagcatttttgaagaaaagtaaatcaatcaagaaattaaactatttaaaacatatatttctttcaaataataagaaaaaaatgtcaaggagaaaagtgccctccctgccccacaattcaacatgcagaacagtcgaccaatgctttcatatcagcaggatggttcgatgcaagtacacatatcctgagctatccacagtccccgaactctgcaacattgctttcaggtgatagagacaagatggtccatgcaaatgagctgacacaagtcatgtcgtgtgcaatcaagataggatcccagacatcttcagaatggtttacagtcacaagaaataaagttccaatgaagtggttggcatttggaagcacactgttttaaatatatctccctgaaggtatgtttatatattagtgcactggtcaatatctgacactatctgtcattttattgcaaaaggatatcagggcaattaataggagggatcttagcactactttagacaatctttaaagcctgggtaagattcattagctacccaagtggcatttctgacttcaaattgtagtatcatgcaagatttatactgtattaatggagcctggagtaactctacatttaattatttccattatggggtaaacagcacttgaattaatacaatttagccgactgatgcagtttggttgtttggtttacaagatagatgggatgggagatcgagagcgcctcagaggacaaggagagttgtagggtgatgttactggagagagcctcagagcattgcctgccaagcccgctatgttgtttaagcttcgggatttttcatatccttttatgaaaaaatgcacagacatcagttgaattcaaccagaatatagacagacaaataataccatgcagggcaatcaaaagtgctactttcaagctcaaagaagaatttgtttacaaagaatttaat

SEQ ID NO: 428 - DNA, 1864 bp, Homo Sapiens
ctcttatgaagaaaccgttcttacggaagcccagatgagacaacttgagacaggattcagaaacgctgattttagtaaccttaaccctcggcccttggtgggaacttcggctctgtgggaattagtctttgggggactgatggtcatgctgaaatcttattgcgtaggaaattaagtacaacaaagaagacccgtcgtgagaggagagtgcggaagaaatgcgaagtctacgggaggtggcagctgcagaagcttggtgttggatttggcgttaggagaccgggaggagcccagcttccggtccagacggttatcttgttgacttgcacgactgcaaacgccctgagctgcttttgcagtctgaaacatcagcgatcccatcaaaatattctgtttcttgggatataagaaacatcccaaggcgggctgtagagcgagagatttggactcgatttaaatacagacaaaatagtatgcatttactaacaccacatctcacccccacgaaacttggtaagggcagcaacagaactttatctgccatatgcactcctgtattcctattaccaaatagtgccagggactaagtgaatatttgtccaatgaatgagttttaagtaggaaacgtttgcatagaatcattttgtttcttttggagttcaaatcttcggatattttacccttcccaatccaaagaaaagtctctgagtgaagagatgggaacaaaatgtaagttaaatatgttgctttaacaactgtttattgaactcgtgctatagactatagaatgatgagcaaaaccaggcacagtttcggccctggaagaggaaaggcaggcatatatttatcaagtaagtacattaatggcggcacttatcagttgagagaagtgcgctaaggaaaggaatatgattctatgatagcgtataataaaagatccttgaccggggaggggaaacgtaccagtgattaactgatctgaagaatcagtataaattgactttgtagaaagtataggtggatggctgagtgggaccatcattcaggaagcaaatgcctgcagaaaaaaacatcaattttaacaagaaacggtgtatcagagatgaaactgaacctattccttgtcttttcttcttgcttcagacataactttaaaaaattgcttacgctgtctttagccacatctcttccccaaactccacactgttcggcgttttagccgtctcaaatttccttttcttaaagacccatgacaatcttcagtgttgtgtctttttctacgtcgtgatccttttttaaagctgagctcttcttgtttttcgtctcctttctctttttttttttttttttttgtgatggagtctcgctctgtcgcccaggctggagtgcagttgcacaatttcggctcactgcaaactccacctcccacgttcaagcaattctctgcctcagcctcccaagcagctgggattacaggcgtctgccagcaggcccggctaatttttgtatgtttagtagagacggtgtttcaccattttggccaggctggtcctgaactcctgacctcgtgatccacccgcctcggcctcccaaagtgctgggattacaggtgtgagccaccacatccggcccttcctttctcttaagatgaaaatattggttcttttttcctacacacaaggaggcaatgaaaatattggttcttttcattgccttattattaatgttactattaataaatattaatattaacataatggttatttgcttcatctacctatattcacaggtatataaacacaacaatagcaataacaggataaagaataaaaacagaataacaatagagatattgctaacagat

SEQ ID NO: 429 - DNA, 5339 bp, Homo Sapiens
tcaacttgcctctgcttcctcctgggaacctttcctggccctttagctaagataagaaaatggaatcacagcaaatataagcaacatacccaggagcacgcagctggcaaacagctgagctagcacttggactcaggcaaactggctcccgagcctgcacgtgtaaccactgtgtgacactgcctctcagagcagcttcgtgttgccttcggaacaggtcttcggaagagtgtctggaaaatgccttgacacattctaattatttgttcctttatcatgggaatgtttttgaaatcttggaaccagaaaactgccaagctatcttcttaattcttgtttcgtgacacttaacttcgaatacagaatttattatggctggttaacttagaactctcttgattctaaaaacagcttcctgacttattcttcagtctgccagagctgttctttgcagcagtattttaaccccttcacatctttctttatgtcaccatgacattaacttataccacaaccacatctctggaaggggtagccattcatatgcaaaagcatatcacagatgacaccttagaagcccttcttgactggattcacaaaacactgacaaaaaccctcttttctacatccaatggggcattcaggcccaccaaagttttttttttttttttcaaattcctcagaggtaatattctcacagtcactctgactttgactttcagttcccattgaagtgttgatctcccttgccatctgcttccctatgctccatagtgacccatacctggcttccttctcctcctagacttccctgtggattgcacacacacaaggcatttttaggtataacagactttattgaatgtttggggcaacagggatcagttagcagttccatcaccacaacacaacctcaaactgaatttagaattttctgtttctaaatgtcctccagtcatcccatcacagaattctcttaggtcacccttgtagcaagctccagtctcttgcagcttcatcctgctccagttctagctatactttaaatacagtttttctcgcattttatgcacagttgtctagctggcaactccttatttgacttcatgcctgcctttgtctaaaaatttgttaatatcttgctaaacaaaatgaccattgattctttaccagtatagcagaactggcagtgacttttttctcaatgacaggaattttaactttcccctctgatataagaagtggccatagtcattttgagttttaaacacatttattatttaggctaaactagtaacaaaaatgtattagtgttgcttttaaaaatatgataagaaacacagtgtactatggagtgtatataacttcctcatcttctggtaaatgaacattaatatgaaagtaaaccagtaccactggttacattaactgcaggaggtagtggtgggtctgcggccagctttacctttggggagaaattcttgaataaggcagtggttgctaatcaaatctcatttctgcttgttaatggtgcccagtagagaacattacccatacctcagtacagggctcaggtagaaacaaggggagagaatggatccagaccaagtgaggctgtgacagttgactactataagggtgcattagtctgttctcacactgctacaagagatacctgaggctgggtaatttataaagaaaaagagatttagtggactgacagtttcacgtggctgggaggcctcacaatcatggtggaaggcaaaggaggagcaaaggcatatcttacatggcagcaggcaagagaacgtgtgtaggggaactgccctttatgaaaccatcagatattgtgagacttattcactatcatgagaacagcatgggaaaaacccacccccttgattcaattacctcccaccaggtccttcccatgacatgtggggattataggagctacaattcaagatgagatttgggtggggacacagccaaaccatatcaaagggcatctgaacaatccacagacctatcccaagaatgggtgtggtgaaggcagttcatggtaacagaggctgacaatctggcacatggtaccagaggctgacaatctggcacattgggggttccaggtggagcacagagtgcaaagtcaggcatagctaatccacagcagaggcacctgcttcttcacagcagcatggcaaccactgaccggaggatggcagcaagaccctgagagaggggcttagatgggtctttggctagggttctagtcctacaaggagtcaaagttattggtcagcatgtccacaaagattatggaaaaaaatgtttcaacacagtaactggaaaagttgccattggaaggcctgagggacctctactgcttgtcccttgcagggtctgattgacagcacaatttaattcctaagtctgtgtatgggaggcagtttgtgtcttctgatctaattcttgccattttcatgattagctcaggagccttggcagtcctgggcatatgaggaccttggaaggcaaagtcagggaaatgtgtcagggccagtgatcatagaacatcattcagcacacactgggatacagaagaccctggctttcctcctggggcataggcagctagaaggagcattgtttctattcttataatgcaaaaattaaaaagtgtatcaaactataagttatgaattgtctggaactcatagaggaccttggttgtaggacaaccaactgactcagaatctaagaagagaatggggcctccagaaagagacaagacacacatgctggcttggtagggggtagacgctgttgggtaaattgatggaggctgagagtgaactgataggaaactgaagaacctgaggagagacagaattgtgggagtgcgtgtactctctagggctttcctccatgaaccccaatgggtacttacagaagatattggagaaagacttttaaatgtgtcctttctggataaaataaaacaggaaagggaggtactttagttgaaaggctggaccttatggatgaggaagcaaggcatgtggacttttgagggatgagcattccaggcagaaggagcagcaagtacacaggccctgagttgggagtggcctggctggtgagaggagtagaaaggagaccagtgtggctggagctggatgatcagggagaagaggaatagagatgaagctagagcgggatcaggggctgggttgtatagggtctttgggatgactgaatgacagactttggcttttggtttgagtaagatgctgaaaccattggagggttttgaataagaggtgatttaacatgacctttgatttaaaatgatcttgaaaatatttggcaatttccaatgaggtttaacgtacattaaccctttgactctgcaatcacattgctgggtatttatcctagagaaataagaatgtatgtttgcacaaaatcttatgtattcatgttcataaaagctttatttgtaatagtcccaaatcagaaataaccccaaatgtctttcagtgctcaatgggtaaatggaaaaacaaactttggtatatcagtatgatggaaaactactcaagaataaaaacagccttgtgcagtggctcacacctgtattcccagcactttgggaggccaaggcaggaggattgcttgagcataggagttctagattagcttgggcaacatggtgagaccccatctctagcaggaaaaaaaattagtcgggtgtggtggtgtatacctgtagttccagctacttaggaggctgaggtgggaggatctcttgagcctgggaggctgtgtgaaacatgatcgcaccactgtactcagcctgggcaacagagcagactctttctcaaaaaataataaaaataaagagatatcaaatacatttaacagcttgcatggatctcaaggacattatgctaactgaaaaaaaaagccaattccaaaaggttttatactgtatggttccacttatataacatgttcaaaatggaaaaatcatagtgatggagaacagatcagtggttgttggggtttagggttggggaagggtatacctgtaaatgagtggcataggatgtttctttgtggtgatggaacagttctgcatccattttgttttttgtttttgtctttgttttgttttgtttatgaggcagcgtcttgctctatcacctaggctggactgcattggtgctatttggctcactgtagccttgacctcctaggctccagcaatcctcccgactcagcctcccaagtagctcagaccacaggtgtgcaccaccatacctggcttatttaaaataaaatgaaatttttgtagagatggggtctcatgttgcctaggcttgcctcaaagttgtaggctcaagcagtcctcctgccttggcctcccaaaatgcagggattgcacgtgtgagctaccacatccattccagttttgtatcctgattgtaataatgattgcacaaatccatatgtgtgataacatttcatagcaaaaatgtgtatatatgtgtatatatatatataagtgagtaaatgaaaagagtggtagactcctgaaaaggtctctcatttagataaagtattgtaccaatgccagctgtgtgatgtactatggttatgtaacttgctctcattggtgagacctgggagaaggatacacagaatttctctgtattgtttttgccatttcttgtgagtctaaaattatttctaaataaaacattttttaaaaaaggttctctctggaagttatgttgaatcaacactgaagggacaaaggggaagcagggagaccaattaggaggctgctgtagtcatccaggtaagagatgatggtggctgggaccaaggtggaattggtgatggaattcctacctgtcccttccaggctgtgcaatgggacaactttaagagccagagtctccagctgtcactaccctgtcaccatccctactatcatctctggaccccatatttcacctgtgctcaccctgacaccacttctgcccttgtgtctcctcacagcaagtgtgggtgctacttcccctgagatgccatgagtttctttttccttattgccaggattgccctgagccatcacaggcccttgatttttactatctaagctgtatttcctctgcccatccattaggaagaagattgctgtctggtttgaactggaatttctcgctatgtcccactggaggtatgtcatagtctgctcttctcactcctctgtctcaggaaacatggtggaattttcttaagaggcttcgaattccttttcctcctta

SEQ ID NO: 430 - DNA, 4970 bp, Homo Sapiens
gaggaagagctgtttttctgttccaagtccagcacttccacccttgcctgtctacttcactggactttcttccaacaactcctcctctttacccctccccagcttctgtctccctgtccactagctcctcttcctcaacctacaaacatgctcaaattcctttcagtcaaaaaataaacttctcttctatactaccttgaacctagttactgccatctagtctgtcaaacttccatgtgctctcatactaccctgttttagtactgattctgtcacattgtaattgtttatttccttgttttccttctatatcagactgtaagcttctgagaaatctgtctcttgatcctggttgattcaccgaagcccaagctagttcctagtgcatcgtacgcattcagtaaatattttttgaatgaatgaacaatgttagagccatgcctctgccattcactttgtgaactacctgtaatttttttctacccctacatttcggttgaaagttcacttgaaggtcaccacataaatgtgaaatctagtggcttctctctttacatcatgcttgacctctgcaaccattagtgcttacaaatttaccttttccacacattcatggtcacgtatacctgggtcattttgggccagtctcagtattgcattcaaaagaagcagacaagccccgaacctttggaaagtaatgaacttctgtaatatattagtgaaatcttctaatgagatagaaatatacaattacataaagctcagcaaacttcaaataagttctttttacccaccttcccatatccttacacagcttggcaccttcaatctctcttttgtaacagttcacccaaaacttgtacacttttggccaaaaaccccttgtcctttgtccccttttttcatcttctatgtttattttcttccaagaatagattattctttccagtttaaatcactttagcctcttttggctccttccaaccaagttctttcctaaaccagttatcttactcagtattttagaagtccaggagcattgtcttgatttcatttggtttgcccttaccaactttctttgcatcattttatttaatcttaatgcctcacatcagtgagtattccctgacctcctgggtgtctcccttctgtgtctctgtggtgccccgtttataactctctggaaataatctatttctatctcttctctaggctatacatttcttaagggtaggagtcctgtcttttttttgtacccccatatctagcatagtacctggaacatggtgggtgttgataaatgtttattggactgatgcttctgtgaaatttaatactttctcttttgccactggcttttgttttgttactaggtcttcaaatatggattaaggtttccttaatgtctttttttctttttatatactcttagtgattcctctattcccgaggtatcacttatcacttccataaagatgactccaggtccgttttctagtctggctgttctccttattataagaccatttgttttcaaagttgaatgtcagacatctccacatgaatgtgtcaccagtatcttaaatgcaacaaaaaactcagtaatccaaacttatcttccttttaaaatttcttcctatgtgctccatgtctcagttgttctaacccctacccttccggttacctatgctagttggaatcctggcaaatgccttaacttctttcttttatactctccctaatctgtgatcaatgcctatccatcctgcctctgaatgtttttcacgtttgcttccccttcccatctccacttttagtagttttgttatcacttaccttcactattgcagtagtctcttaactgacctcttttctaatctgtcttccgtgctgttgttagaaatatcttcctaaaacacagatctgttgttactgtatgttcatcgcttgactaatttacttatctttcaggtctctgccaaatgtcacttctaaataaagtatgtctgtcttctttgttgtttgtttcatgttcctttcctactgtcatctaatactgtttgtaattgtgtttatatttgtgcattgatttgtttaatgtctttcttcccactggagagatttatgtaagggactggggagagttatgtagaccctgggcctagcacaatgctcgggacatagtaacacttaaaacatatctgttgaatgagtggatggataatagcaaagtacaggcagtgcaggcaaacagataccaagtagcaaaggcagggaaattacagggtcctagactcttagtacattctcacagaccttaatctgtagtttaaaatagtaatgggcttctctcttttgctttttgcatttatttccctaaggatgagagtgaacaacttactaccccacactgacacttcagtgagggcactgtggaacctttctaatcagaagatgggaccaggcttgacaatgattcaatcaaagcagttttagtgtcacacttgtctcatggaggctatttgtatttctgaagaaattccaatcaaataacagcttactagatttttttcctggtctaaatattatttttgggcattttccacaaaaagctttttgggaaaggtggttcttacactggggcttggaataattgtatctctatgcttggccttggaataattctgtctctgttggaattgtgcacacgttgaggcctgaggccttatcttttatagggccttcactatgtagcttctcatatattcagcatcttaggagagaatcatattcaacatagttttgctttaagctttttacttggtatcagcagttttgccttaagttctaaagcttaataatgaaactctgttgaatgagaacctttccaaaagatatacttttctacataagctgagtttattcatccagagtcatcaagaatagattatatttagaacatatggaatgaataaatattagtgaattcatctttattggacttttaaatttctttacatataattccattcactcatttattcagccatctacacttgagcaactactttatgccaaggactgtagtaaacatttaggatctgaagaaaaatatgacttgattactcttaagaattttataagtctaggctttttttcatgtctgaggccagattgatttttcttttcctttttttcactcaggatgaagtacatagtggtataatcctagttgactgcagcctcgaactcctgggctcaggtgattctccttcctcagcttcctgagtagctgggatacaagcctgtaccaccacaccttgctaatttttattatttattttctgtagagatgaggtctctctatgttgctcaggctggtgtcgaatcctggcctcaagcaatcctcctgacttggcttcacaaagcgatgggattacaggcatgcaccaccacacctggccttagagtgatttttcttaagtgcaaattcgtgctcttttttctaaggcctcagcttggaatgtcctcttgtattacccacctctcttctttcaggactcatctcttaggaaccttccctgtccaaggcagctgagtacccttcagtatactcatcctaccctctccctctcctgttgtggcagttagtaccatgttttgtaactacctgtttatttgggtctccccaactagactgaaaaaggcgcttgaaggcagggctgtttccgtccttgtgtcctgagtgctgagcacaatactgagtacagtttgtgacctatagaatttgtggagggaaggcattttggatggaggctgttggttaagtgacctgcaaaactgctccagtatcatgccaggatcagtcttctttgctcattattgatgagaagcaacactaacttatgtctttattcctaacttaattatactccaagtacacatttgcatgcttcattacatgcctgtagtgatatcagtgacactgataaagtattttttcatattttagttctcatgtttttgactctttattttaactttgttgttgattgaattgagtatttgagttgctgttagtataaataaagtttccatcttggatgacttaccatgttaacaaaaaaaaaatcacaagcagtattatgtgctagtgataccttgtgatttaaaatgtattttgttccagcaaagaaccagtttgggtctctttggagaatgggcatacatctgagttgacctcaacttttctgtaggagagattattgaatctcctataaaggattatatgtaaatatataaattaacatttgtctgttttacaaaatagagtgtctgaaacaagaatacataaaatgttattttcaatgtactagagtagaggagtttggtatttaaaggagttctgtactttggtaaagccaaaattcctttgattacactagtggttggttatttaatcaggatgtgaattcaaattgcctacaaaattttgaaaaaatgcagatgtttggctgactccacatctatcagattgcaatttctagtggtagtgtccaagctcctatatattttgtaccaactacctgggtaatttgatgggttttcagaactactcaactatataaaccaaagaacctcaaaccttaacatatatatgatcatgtgggaccttgttaaaatgcagattctgagtcaggagctctgggtgtgacctgagattttccagttccagcgagctccatgtgatgtccgtgctgatggtgtgtgatccacactttgaacaataaggctataaataataaccatctacattttaaaagatttcctttttttttttcatttaagtgtggtgtatctgtttcctactcttgcttattctataagagaagtgtaatgggctttagatccagtctaaaatagttttggtttggatattgtcttccattaaagtttcagtacgcagagga

SEQ ID NO: 431 - DNA, 1811 bp, Homo Sapiens
tgggccatgggtaacaattaaatcagaacatagaaaacaattaaaggccaattgtaagatgtcaaagaactttgaatttcagattttcaataggttgaatatagttatcaaggatgcatcgttttaacattccttcatgtctaccattacgtcaataagaaaatcagttgtgtaaaaaatctacttaatgatacaaggagtttctatctggaaaaacaattctaaaaattttcaggaaattagaaataaaatgcctgaaataactgaaataataataattttggactacagctctttaaaataaaactgtagctaataaattattatctactcactcaaaataagtttcaagaaaggataaaatatacctgaaaattagagttgaaaatatttatttcttgtaaacctgtgattgccagtaataagtttttgttttcccaaaaaaagaaaaaaacaaaccttttgtgaattattagaaatttaccaaaggttaaaggagaagaaagagctctaatgatgagctcaatttgacttctatgaaaatatccaaagttctataatcaatcatagcatatctatttatttactaatgctgtgtagcaaattaccacaaaacacagtggcttaaagtaaccacagtcattttttatctctcttggattctgtgggccatcaattcaagagcagcttgattttatgattctggctctgagtttctcacggagctgagtcagatttcaactggagctgccatcatccgaaggcttgatgggggctggagaatccaattccaagatggctcactcatatgcctggcaggccagttttggcaagtcttcttctccccatgtggacttcaccatagggttatttgagtgtcctcacaacctgatgctagcctcccccagggcaagtgaccccagagagcaaggtgaaacctgaaatacctcctatgtcccagccccagagttcacacattgtcacttctgccacatactatgaggcgcaaaaaaccagcaccaattcagtgtgggtggggatacaaaatggcataagaaatgagaatcattaagggccatcttgtagctagttattacagaacactatggactaagatatcatgggtgggatcatcattatctaagcatataagataacacacaataatatatcttttagtgcaatgaattaacagcagccaatctagtactttatattttctatggctgttttactaaaatcagtgttgctattttttcattaataaataggtaaacaaaataatgataaaagtatttttgccaatcataaaagtatttctacaaaaaatcaaaattcattttaataaaatgtggcatggcctgtgatagaacgggcaaaagaccaggctatgcaaatacaaaggagtcttagcaaacttcctgaaataaatgccaatcactgtatgcatatgatcaccatgcacatgtgtatgtgtatacataaatatatgtacctacacctataatatatctgtatatttttatgcatatagtttgaggtttttgaggatttgaattatttacaaaatgatatcactattgttgtattacttaggattagtttatgttatacataacaaaaaaatagactgggcgccgtggcttacgcctgtaatcccaggactttaggaagccaaggtgggtggatcacctgagatcaggagttcaagatcagcctggccaacatggcaaaacctcatctctactaaaaatacaaaaaaattacctgggcgtggtggcaggcacctgtaatcccagctgctcagaagg

SEQ ID NO: 432 - DNA, 3759 bp, Homo Sapiens
gctcagcagggagaagggctcttgactctgtggcagtgtggccacgtttccatgtgtccatgtgtccatgtgggctgctgtaggccctggctcactggtcccaggacctgtggctaaaaggaggcattgctggaggcctctcttgagaggtgggtacgtgggccatgctgcctatgccctcctcaggtccccagaaggagcacttccaaggggtgctgagtcgggggaggtgggcaggaaaagatgccagggaaagttctgagcccaggtaggagtgacagtgatgtgtggtggagatcctacagccaaacgaggagcagttaacaatgccacttcaaaaacagcgcctgaggctcagaaagaaggtgtatcttgccaaccatcacacagcaagtcaccagcagagctgagaccagaacccaagctcctggtccagggctcagtcattgattgttccagccacacgtggctggtgccaggggcccgtccggtctactccctgcggtgactctttctcctgcctcccaactccagaaaaggatcctgctggggagcctggggtgagatcccaagagcctttccgtgtggacgtggacatagtggggtaggtcgagagaccaaagcaggattctaacaggcctggacatatgtcatgggccatcaagaccatctgcatgaaggtcttttgctacagaagtgaggtggctttttgcagctgctcaggagaacaatctggcgtagaagtgggaagggaccagagaatggggcgttggaagacctaggttggagcctcacctctgccctatcttcgctgtgtgaccttgagcaggtcactctaactcttgccgcctcagcttcctaacagcgcccctgcccggcctctcttgcaggcccacagaatgaaaagagaggagttccaggaaagggtttggcagatggcatccctgcaggactgcctcgcggcgctctgccccatccagcccctacgtactggccatgtgacctcaatgtttgatggactcacttggcctctctgaggctcgctttctccatctctaaaatggaggatgaagcaggttcagccccacgggcaggcagcactatgccagggacatggcgagccctctggaaaagttcacctgatccagacgttgctgggtcaacgggaaggaatgactttcactcctctgcttcaaaccaccagactgtccttggccctccctaatgaaggagcagagaacagcagagtgggcagggaccttggaggtcagcagggtggctgctcagcccagaggcaaccgggagctcgtcccagggtgtgacaattcagtcagccctttactgaacactcggctttaaaccgcctcatgcctggcatgaggaaggcaccgtgctggagggtttcaccacggttctctgtgtgtctccggggagctcactgtcctgtctgaggcccgtccggggtccggacagtggagctttcaggttcgtgcgcaccctctgcctgcctcttctccctgtcagtaaggacgtgggtgtggctgggaggcagatcctgggtggagaacggagctcctggttctgaacagtttgagggtctggaagtcctttaagaagatggtgaaaactatggaccttctccccaaagagaagcacacatccacatccagaggcaaaaaccccatcgctcagaaccccgtggatgaggcagtcattatccagtggtgctgtcactatggctggggctggccttgatctctgttgctggattccacatgttcattctctctggccacattatcagatctctagctccaacatcctgtgtgataccaggatggccattgccatgatcttgtccacgggtccactttcagcagctgggccctggagggcagcacacagctcatgattgggttggagatgggggagtcaggggcagatggtgggagctgtccccagccctgcctctcttaggaccctcctgggactcaggtacatagggtccctgagaaagacccagtttgatgagacaggcaggaggaataaggaagagtgtagtttaagaaagttttctccagctctggttcatgcatccgtcctgaaagaaggcagggaaaggattattcacccatttcacagatgaagaaattgaggcttggagaggtcacggagcacacagagcaaagaagtcaaaaccaggatttgaatctactctgattacctccagagcccatgtcttgtcccaatggatggaaaattcttaactatttaactcaatattgagcagctactgtctacagaattctgtgccagacagcttgggagacacagacctacagggagatatagttcccactggaagcacccagggcagtaataattatcatcataacaaaggaataataatagctaacattttggagcacttactagggaccagcattatgctacacagttttcatggattatctcatttaagctctcaaatattttggggtgtaaataacagtatgcccacaatttttgtttgttgttggtgttcagaagtgtatatccgtttttgagaatggaggctcagcgagattaggagccttgctctcaacgagggaggaattctggctgcgactctgtcccttactacctgggcatcacctctgtcaaacctggacaggtgccacttagacctggctgaggttggctgaggcggggaggatggggaggttgtgggtaggcagcacctattcatacccacagtccagggactgttccagaagaatagtattccctgtgcccttgccgcctctgagccttggtgtcccagcctttcgatcctctcacttctgatgtccttgagccataatctgagccattctctaggataaggagatgcttgaggttgagtgaaaggttgacatttctgcaggagcaaagaatgacttgatgcaggagagaaaggctgtggggggaaagtgagtgaggcaaatccccaaggcagagcagagccttccaaagggtgcaggggagagtcttggtggagggggccagccttgctcagcagccccaacctcaacaaggacccctacccaagaaggcctgcaaaatagcaaatcaatgaagacagcaatgaaagcaatgaggagggaagagggaccagaatcccagtcacatcatcacccctcacccctttttctggcctcagttttccttctgtgaacagagggagctggcccttctgtcatttgcaggattttcatctcaggctggcagcaggagctggaaaagtgagggaggtccctcccttccccggcccggggtctgtgattggcagcacctcctcctctcttcctctcctgtcccttccttccccttccctcccctgctttcctttcccttcccctcctccccttcccttccccagtcttcccctcccactctttcaagcccccagcgtgctgtgcagttattagtttaggttcatttagaatcggcttagcaaccccacacccctggaacctggaagcttaaagcacaagatgtctggcaaatggaaattcaattgctttaatatagagactattttgctgcagtcgaactggagcctcttattaagaatctgatggaatttctaaacagggagagaggccccaaggagggggcatcgcccatcacacaccaacattgctcttgacatatttatggctccaataaaatctcacatctggtatattttaaaataaaattgaaaatttatcactt

SEQ ID NO: 433 - DNA, 1784 bp, Homo Sapiens
gggacagtattctgcctactgtaaataccataatcattcgtgaaaatgaaccaagatggcagcaagagaaactccacagagaagaagcctattactggtttattaatgaacatggtgttggttgccagaggaaaaccataagcttccaagcactactggagaaataacatcagttgcttccaatcaatcactgttcgatggatccaggcacatgccccacctcagcctgacctgagaatagggtaattgggacatatgtcagaggctcaggagtccctaaaaaaatttcaaatagagaatctttttaaaatgtctgaacaccttttattgcacataaaatgcaccttaaagtggacaagatgggaaccaaacattgaaatctgtgagttgaataaatccagtgaagagtgttggcttcagccagaaatcaatataaatcatgaaaataagtggattttaaattcctggtataggaaagattagaaatgaaatttggaatcaataggcaagttctagacctattgctctgcatgctaatttacttagtggttatgcaagccaatcagatagtagtgaattcaggcaaaagaaggaaaaccatttggagaagcacatatttggggaaaatagtgctagaatcattattacaatgagaaacacagttcagagactagagccaacaaggttacattataccttaaataatcaaagttgttggccaattcagaaacaactatactgcttattctgaggaatataattcacagagggaaaaaagatctttacacagactttagaaggtctatcaggagaacagctatagctctttcttcttaagagacagagaacacagaaaagtttcattccttaattcaagacttgagtcaagtaaagcagtggaagaagaaaaagaatacagcaggtccaaactgctaccaacaccatccaactatcacactagactgtcaagttgaggggatagagattgggacagtgttacaaatggatctgagcccagagcaaaactgtcagaaaatgcaaataccaatgaaagcagcagcgggggcttttgtcaaaccacttcttgttcagagcagacaagtaccaggacttctgtcataataatctatctttcttcgtcggacttcagagagccaggctaacaagcccttcatcggtggcttttatatcaattttaaaccaatcatgactgagtttggagagctgaagtctcttcagggagactacatctcagtcagagactcaaaggaacatcagcactgaccagcagtgtgatcagaactgagggaagcagggtcagttactgagggcagcaaacgcaaggcagattcaagagagcacatccagaaggcagcactgaaatgcaaggtgaaaatgagcttgcctcaactcattctaaaacctatgaaaacagagtcgacaaagagagaaggaatttagtgggaactgaaactttccctattcttagcattatccacttggttttactagatgacaataatgatgatcatattgatgattacacacaggttgaattacagagcagactgaccatctttcccccaggaactaggaagcatcagtattcagagcgaatcaagtaaaatctgcagtgtttgtttcagtagctgactggcaggaactaagctcaggcaattcctcacatgcacgcgttttacagccatcgtattgctcagtagctgcgagacacctacagtcatcctgtatgttggcagcctgtttgagaatccaggatggctaac

SEQ ID NO: 434 - DNA, 1877 bp, Homo Sapiens
tcgggaggctgaggcaggagaatcgcttgaacatgggaggcggaggatgtggtgagccgagatcatgccattgcactccagcctgggcaacaagagtaaatctccatctcaccaaaaaaaaaaaaaaaaaccttgtaatatatgtatggatacatggaatcactgtcaggaaaaaaaaacaagtgaaatggcattatattatgcatagaaaaccagaaatccgcagatcttcgcatagagtaagttgatttctgacacccttttccccccacctcaccattataagagtctctgggagttctccttccctgcagacctctgcctccctgatagacaaataataagcatcaattaataaatatatctcagttatctggcttccctattccctatttatctatagctacacattcaagcatatattgttctactgcagtgggcatactagtcaaagaaagatccatactttactccttccaaaatgaacaccatggacactgttgattgagtccttaaacactttcactatttccacccctatttattctctgtcagtttctaatatcaggtctccattgccaaaagaaaatagggtccagtatgacatcagataatttatgccaaaaccaatataaatttaagttcttgataaacctttgctttcatttagcattagaaacttcaatctggaaagataaggtgaacattacttacttgtcccaagctaccaaagccagcctctctataaggaatagattccgctgaggaggaccgactgtataaggtgaaacaaaaagaaaaaaaaggcaaaaaacctagttttactttttattgttgttgtttttttgttttggtttttttcagacagagtctcactctgttgcccaggctagagcacaatggcacaagcttagctcactgcagcctccgcatcctgggttcaagtgattctcatgcctcagcctcccaagtagctaggactacaggcgtgcaccaccatgcccagctaagttttgtatttttagtagagacagggtttcaccatgttggccacactggtctcgaactcctgacctcaaatgatccactcgcctcagcctcccaaagtgctgggattacaggcataagctactgtacccagcctcagaaaacctagctttatatgttgttagcacacagaacactcgttttttttgggggaaggggcacatgtcactaatagaaagtctccgaagctggattgatgggaggaaaacacctttcccttctagttttgagagacttcctcttggctcccaagaggagggattccctgactttgacacacatggccaccttggcacaaaagccttgtggtatgaaaaaacaaattcgtttttatgtcctcttctccttttccatctttcagcataaacttaactcccttaagccgagacatctgttaggacctgacccccagtcattgattaccagtttgtctggcaatctggactttccagtgatgccactgagatggcacctgtcaaaagagcagtggttccatttctagattgtggatcttcagataaattctgccattttcatttcattccctgaaagtcagggttggcttgtgaaaagttgttaaacaatatgctaaatgtgaaatgtcaaccctcactctcaactttccctgttcggagcatgagatgaagacttcattgggttttatagtggctttctgatttttggtaatccattgaagaagggagtttgagagttgttgtatactgttaatgattgtctgcccatgtcctgcctgaatggacagtatctttaataaagctggatacagtttggcttagggaaaaaaaaaaaccctagctttaaacttctac

SEQ ID NO: 435 - DNA, 1077 bp, Homo Sapiens
atgccattacaggagttggtgtcctttgaggatgtggctgtgggcttcacctgggaagagtggcaggacttggatgatgctcaaaggactctgtacagggacatgatgctggagacctacagcagcttggtgtccttgggtgatgcagggagatggagaagaggaaaacccagcagatgttgactttttaaaggaaagagatctgaggagtttaatgtatttcagaacatacttctttctggtgatcctgatgagatggaagcttgacctgtaatgagtcagctactattgctcaagagctaactcaggtagggaggaaaacttttgaacgtcatgtatgtgggaaaatattcagtaagaagcataaagtcactgaacataagaaaatacactcaggaaagaaaccttataaatatagtgaatatgagaaagccttcattagccaatcatgtgttacaaaacatcagagaacacatacagaagagaaaccctatccatgtgccatatgtgagaaatccttctgtcagaaatcaaatctaagcccctcccagtatgtcaaagaactcacacaggtgaacaaccgtatgaatgtaaagaatgtaggaaaactttctatgagaaggcaaatctcaatgtacatcaaagaactcacataggggaaaaaaccctatgaacataatgaatgtggaaaaaagtttcatcacaagtcatacctcagggtgcatcagggttttcatataggcaagaaaccctatgaatgtaacgaatgtgggaaaacctatgagaaaggaatcctcactagccatcagagaaatcacacgggggaaaaaccctatgaatgtaatcaatgtggaaaaccctttggctggaagtcaagccttaggtcgcatcagagtattcacagagggcagaaaacctatggatgtaatgtatgtagtaaaagcttccaccagaagtcagacctcactaaacatgaaagaattcacactggggaaaatccctatgaatgtaatgagtgtggaaaatcctttggctggaagtcaaggctcagccaacatcagagatctcacatagggt

SEQ ID NO: 436 - DNA, 2177 bp, Homo Sapiens
ccccactatccctcctcctcagatacagcaactctgtagggccagggatgtgcttgtgaatgggactggcttcccgggaaaggcaaacagagcaggcagtggtgactgtgggcaaattaacctgtttggcctttccttcttcttcttgaaaagagagagagagaaatgatagaccaggtgtggtggctcatacctgtaatcccagtgcttcgggaggccaaggtgggaggatcacttgaggccaggagtttgagaccagccatagcaagactccatctgtacaaaaaaacttggtaacttgctagaaatgcagactcttgggccccactccagacctgctgaatcagaaactctggggctgggcccagcaatctgtgtgttaacaggccttcagataacgctgatgcacactcgagtttgagaatataaagggctgacatgaagggcttaccactgtgcttgtcctgtgcacgtgagaagccctcctaaaaattgtctttcgtctttggaggggataagctggaccctgaagagtaagtaaaatatggcagcatctttgcatctcatccacaaatttgagttgctcagaaatacatcacttcttaaaaatgttcggtgactcactgaatctccgactcatatcctccacgttgctgcgctggcataaaagtaaacttcagtccttcttgacttttccatgcctttctggggttgggtgttggttcttgggtttcacacagtgctgagaggcgtctaggtcctccatccacttgggtgaccattcagctcttcatccttccggtccacatgaccccttccaaattagaagcctcggctgctctcagagctcgcttggggccccaggctcttcactgaagctgccttgagcaccatcatccagagccacagactcatatgcccaaagggaccaggttcatcaaggagacaaagtggactggctggccaggtgcggtggctgacgcctgtaatctcagcactttggaaggccgaggcgggcggatcacctgaggccaggagttcaagactcgcatggctaacatggtgaaaccccgtctctactacaaaaattagccaggcacggtggcgcgcggctgtagtcccagctactcaggaggccgaggcaggagaatgaacccgggaggtggagactgcagtgagctgagatcgcgccactgcactccagcctgggtgacagagcgagactccatctcaaaaacaaacaaagtggactggctgtgacccagcagcaagaggtggggactgtggggacgtatcatgtttgtgccaggctcacaggcgtgcctctggaaacacaggcctagcgctaccagatctctttatccagacaagctgcaaatctaaatctgaactttcaagagaaatttgaaataatctatcttttattttcgatgttgttgttgttgttgttttggttttctgagacagggtctttctctgttgcccaggctggagtgcagtggcatgatcatagctcactgggctcaagtgattctcccgcctcagcctcctaagtagctgggactacagatgagtgccaccacgcctggctaattttttattttcgtagagatgggggtcttgctatgctgtccaggctagcctcaaacacctggcctcaagcaatcctcccacctcagcctcccaaagtgctgggattacaggtgtgagccaccacacccagcctcagtcttttaaattttggaaatccatcagaaaaaattaaaacactacatgggccaaaccaaacggctgtgagcaggattcagctcaagtggggatgagttagggtttccgggcttggaggcagcctcttctccagggtcctgcttcctccccagggaggtgccaggaagcacaaccccaagacccacagcccaggatcccactactccctctctctcttctctctcccccagccacaggaagtctctctgcaactgggagaggagttctgttctccccactgtggctccaaaacccttggtggtacctcaaatcccctccaaccccttagttcttctgaggactctctaaattctcctaaaagagaagaaaagccagaaagatgtatgagctatttcttgttccccttctgctatatccctcccctgaggcaacagctgcctgttttgatg

SEQ ID NO: 437 - DNA, 2120 bp, Homo Sapiens
ctaattttaaaattctatattcttaacacttttgccattggcccacacaactttgcttttcaccagtgtctaaagtggctgaaacatcagcatcgggtggtggcaatgccttgagggatatcttatcatatgcagcatggcatctctgggcttcgtggaaccagacatagtgatcaaacatggagcatatttctactgcagataactagaaactggatcatggcgataaagctaatccaactggatggatcctagctctgtgacatggctgacttccagaagcacaggcttttttgctctcgaatatcaggatgatacctggagttctgagtctgatgacctggaagatttggggtaattccgtttagtagacacagctatggactcacacaaaattcattcatttttgagtctactttatttacagttatttatcctttcttgaaaacttttagcatcgccttgattaaaataagttcataaaataatcttcactgtatttgttacatatggcacagaataatttagcactttataaatatgtctcattgatgcacaaatgggaggagcaccctttgctgaaagcagtacagtgacttagttcaatttggctacggtagcactttaaaaaattaccatgagatggcgctgtggccaagtaaatgcagtatgctttaaacagttttccctaattatggcagttaattgcttttttttgaatatagaggaatctatcattcaacttaaagtagagcaaggtttgttactccgttttaatagtattcattaaaagtgaatcctttaatcacagatccataaatcatttgacaactgtgtttcacttaggtgtgagtctgtttaaaaagccatagtagtcagaaaattgccagactaaacaaagggcccaaaggtaccattttatttaggatcaagaaactatatatgtggaccattgttttcgccatcctcatagacttgtcttaaagttcttccacaaaattagattaatttccagtttatttaaagagctgatatttttgttacactttaatctgctttgcagcaatggaaggtcatagaaatattagaacatgaattcacatttaaataaacatgatacaaacatgcacacatgtgtatatactgagtgttttcattgacttgcttttcgtccatataaatatataaatattgaataaagtgcatgagaacatgtctgtacatatatacagctacacatttgcctatacagtatacacttgaatagatacttatggaagaaaaaaacacatacacatttgtaatatataggtagtcaaaagacatctatcaggcaacattaatgtacattctgatcaagattgagtatatgggggtagaatctgtaatcttttccctaatatataatgaaatgtgcagagttacaagtgaaggcaaaatacattagagtggagacattttaacatttatattttcatcagttagtatggtatatcataaggagtagttcagttcaaatgcagccttggtactagcagcatattatacattctatctttgaaacagtgaaccatctttcaacatatctatgaggacataatgagaattttatgcatttccaaattacacaatgacacttcccacattctttagttttcaaatctgtatttttttcccaaaggtttagggcaaacactatttctcattcaatagaaatgcttcagcattgtaatcatatatataacattgattctaataacaacatgcaatttaaccttgagtgttataatatcaaggtggattaactgttgttaatctctttttctctttagtaaccatttcaatgaaatattataatatctgcttttctattagggagcccagtgtcaatgagtaatactgaaatgagtgagtttttggagaaatagaagaaaaattttgctcaaaactatggtagttataaactggcttgagattgaggtgcgtatttctaaattaattgcaatgttaagcctcaagtgatattttccccctcctttatttgtttggtgtttattggtaaccaatcaggaaaacttatttttaaaactactctcacagttgaaacaaacttgtttctg

SEQ ID NO: 438 - DNA, 1025 bp, Homo Sapiens
cttggctctccaacgccagcgccgcctctcgctcgccgagctccagccgaaggagaaggggggtaagtaaggaggtctctgtaccatggctcgtacaaagcagactgcccgcaaatcgaccggtggtaaagcacccaggaagcaactggctacaaaagccgctcgcaagagtgcgccctctactggaggggtgaagaaacctcatcgttacaggcctggtactgtggcgctccgtgaaattagacgttatcagaagtccactgaacttctggttcgcaaacttcccttccagcgtctggtgcgagaaattgctcaggactttaaaacagatctgcgcttccagagcgcagctatcggtgctttgcaggaggcaagtgaggcctatctggttggcctttttgaagacaccaacctgtgtgctatccatgccaaacgtgtaacaattatgccaaaagacatccagctagcacacagcatacgtggagaacgtgcttaagaatccactatgatgggaaacatttcattctcaaaaaaaaaaaaatttctcttcttcctgttattggtagttctgaacgttagataatttttttccatggggtcaaaaggtacctaagtatatgattgcgagtggaaaaataggggacagaaatcaggtattggcagtttttccattttcatttgtgtgtgaatttttaatataaatgcggagacgtaaagcattaatgcaagttaaaatgtttcagtgaacaagtttcagcggttcaactttataataattataaataaacctgttaaatttttctggacaatgccagcatttggatttttttaaaacaagtaaatttcttattgatggcaactaaatggtgcttgtagcatttttatcatacagtagattccatccattcactatacttttctaactgagttgtcctacatgcaagtacatgtttttaatgttgtctgtcttctgtgctgttcctgtaagtttgctattaaaatacattaaactattaaaagaaaaa

SEQ ID NO: 439 - DNA, 3210 bp, Homo Sapiens
tttttccaccttatggataaatataaaactatattatagtttgacagacctaattattttgtaggtgctttagaagtagaagaactaggattggtggttggtcagttaaaatggaaagtcacaaagtctagatactttgattgcttgtattagatgtatgcttattttccatacaatcttttaatgaaggactacaccatttctttgagatgtctgctgcctagattctattacatatgcatcatatatagttttcagttttgtcttaaagaaatctgaatagagaattcccttgaactttcacagataccttccctcagttttccagctttcttcatacccctaatttgaccacagtttttacagtaaaaattgtagaaatcaagtaatattgacaaccacctactagctaatagtcatcagtcaacttatattaccttggaagtggttaaatagagtttggttaagagccacaaatttacttcatattgtaatgtaattatttttttaaaaacttccctcaacagaaaggaataatgtgctacaggaaaaggaaaacttacctgaggtagagagtttaagcaagaggtgaatctggtgtaatcaggcaaggagtcaagtattaactctgtatgtgtcaggtgctgggaatatagaggacagtttcttaacacagtctggggtgtaggtggagatacatggggtggctttgaggcctttcaggttttcatcactgatagatacctagcccttatttcatggatgcctcaaaccccattttccagtctaagctttcgcccctaatctatttgcctgtactgcataaccttctaaatatgattaaaatcttccagaagtttttagtcagccctgatctggccttctcaccatttcttcacatactagctaatatttaataagtagaattatgtgtaaatttgggtcttcctggtatatgagcaaaaaaagcaatagtttccttatctgagctgaaaaagacactaatgttcagtggagaacagaggaagagaattccaataagcagagcctgtggttccaggtgaataagtcttaagttcaaggatggtgtagagggacagagatgcattctggccctccagggttagatttgtcaagaggcgaaatagttaatttcagacagttctctggaactgatgtaatctggtttacttagggcagtggttttcagattggaagtacacactattaaacagaagcaattccactttaaaattttgcttggctaaaggattcagtggctattttttttttttttttaattaccaatgtgaataaggtttattggttccggggaggagacaccctctctagtatgagaagctgcaaagaaggttgtacttggagtaaaaaccacactcttcacagaagctgatcgtgatacccattgaggagactgattgggcctcagctttctataacctgggaatataaatgggtgttataaagtttcgtgttacatgactcagttatcagaattgtatctccagcttagaaccttacagggaaaaactggaaattacacataaatatcacccacttgccccctccaccccccaactttataaggtaggtaatattatttacacatgcagagaatgaggtgtggtaacctgcccaatgatacacagtaagcagaggaggcagggttttttggtccagacagtctaattcttaagtgtaagctctttactaagctgcactgttgtgaaagcactgtacttgaagttacaggcataccttgttttactgcactttgcagatattgcaagattttttcttcaaaataacgaaggtttgtggcaaccccatgttgagcaagttcattagtgctattttctaacagtgtgtgctcatttcctgtctgtgtcacatttgataactcttaaaattatttcaggcttaaattatcatgttatggtgatccgggatcttgaatgttactagtgtaatttggagcctcatgaaccacacccatacgatggtgaacataaatgcacgtgttctgattgctccacaaacaggctgttccctctctccgtctccttaggcctctgtattcccggagacacaacattgaaattaggccaattaatagccctacagtggcctctaagtgttcaagtaaaaggaagagtcgcacgtctcagtttaaatcaaaagctgaaaatgattaagcttaatgaggaaggcatggcaaaatctgagatgggccagaaagataggcttcttgggcccattagacaagttgtgaatgcaaaagataaatcttgaaggaaattaaaagtgctactccagtgactacacaatgataagaaaacaaaagaaccctatttctgatataaagttttagtggtctggataaaagattgaaacaggcccaacattctcttaagccaaaaccgtatccagagcaaagccgtaactccaattccgtgaagtcagagaggtgaagaagttgtggaagaaaagtttgaagctagcagaggctggttcatgagatttaaggaaaacacccatctccataacattaaagtgcaaagtgaagcagcaagagttgatgtacgaactgcagcaagttgtctggaagatctagctgagataattgatgaaggggctatgctaaatagcaagtatttaaggtagacaaaatagccttctattggaagcagatgccatctaggcctttcataggctagagagaagtcaatgcctggcttcaaagcttcaaaaaagactgacttgtgaggggtttatgcagctggtgactttaagctgaagccaatactcatttaccatttcgaaaatcctagggcccttaaaaattaagctaaatctactctgcctgtgctctagaaatagaacagcaaagcatggatgacagcacatctctatagcataacgcatctaatattttaaacccactgttgagacctattgctcagggacggaaaaaacctaaagctttcaaaatatgataagctcattgacaatgcacctagtcactcaagagttgtgatggagatgtacaagaagattgatgttttcatgcctgctaacatgacatccattctacaacctatggatcaaagagtaattttgactttcaagtcttatttaagaaatattaggccagacgcggtagatcacgcttgtaatcccagcactttg

SEQ ID NO: 440 - DNA, 1298 bp, Homo Sapiens
gttctggaaacaggaaaaggacccatcttattccaaaagtgtttgtacttttttctggactccaagttggatgccttcaccaaagtggtttcaaagactggaacaaaaaagcctccatcgaggccctggctagcacagtccctgttactttaagagtagcattccacctccccctcacacccacatacttgtcctctctttgcacagcaagtgccaagcagtgacatctactatagtttctaggacacgatggtctctgctctacagggaaaaagagcgagcgggacagaaagaaggcgggtggtgagggagaaggagcacaagcccagctatgttcccagaggaggagtcacttcctcgcaataatcctgagatgctgtttatggctgttctgctgatatgaagcctggagccgcaggatgcagcctccccctggctgtccattaatcacgaggggctgttacagagtgtacagagtgggagttctgcctacaagtggcctctaactgtctccagctcaatgaaatgaacctgtgtgaaaacttgttttatgagagattggtttatttgtaactaaactacttcctctgttatttgataagatcaaatatttgctactgataatctgagagtgtcacatttattatcctgtttcagccgttgcctaactcctttggaactgactccgttaactctttgagggacagcagtaggttttagaggaccggtttctattttctttcagcaaagccaatgctatctttcagacactgagtcagcattattttagaacagctatgacatgtgaatcaaaaagaagcctttctcttccaaaacagaaagcagacaaccatagtaacaggaggctctgataaattccctggaggttctgaagccaccatgaaaaggaaggaaaggtattctgacttactaatataaaaatggttttgcacgtgctaggatttctgaaatcacacattttcaatatgttcaggatgactttctatagtttgttagaccctcaaatatctatgtggggcatgatctctaaatccggcagcattctgcatcttgacacttggccttttggagtctgagctcatttgcatttggcaggacttgatttcctgctttgacagaacggcggtaaggtggtggtgaaagcctttacagtgctccctcgaagggctcaaaggactttctggatatataaaattatgtttccaagaattaaatggaccagaatgaggcagattttgtttgaaaccaggctctgttacatgcaacacatctgaaaa

SEQ ID NO: 441 - DNA, 8880 bp, Homo Sapiens
agagcttcctgtaagcgaacccgtgaaggttccaggaggatggcgcacccggaaagggcgtggaagctccgcgccccttcccacagactttcccccatccatctcttcatctggtgttcatcgatagcctttgtaatgtccttaatagtaaaccggaaaacgagaaagatgtgcaaggatgcacaccaaactgttgtcgtcgtcactggtttcctaatgggaaggataagaggaagaggagatggagtctcactctgttgcccagacgagtgcagtggcacaatcttggctcactgcaaccttcacctcctggttcaagcaattctcctgcctcagcctcccaaagtggaggaagaagagaatcaccacatatcgtatttagaggtcctgcagaaagggcagagcgagtttcatgtttgagtgcagcggatgcatgggcaaagcattacacagccgctccatggaagtgacaatgagccttgtctttcacacgtaactccaggaaccaggggaaacaaaaccaattccacccagaggtacagacaaagaagagcaccctcccaaaggagcccgcatgataagtggccacggcgaacatcactgtgatcagtcagaaaggcaggcgagttattagcttagccctgaacctcctacttaatgtagaaccagtggtgatggttaacagaccctggctgcagtgacaagcctgggacctgctcgaggaaatccaattgaaaagcagccaagaggaacaacaagctagaaacagatgttccagctaccaggatgtgcacgcatttaacctgaacatgtagttggggtgggatggtagcattcgtttctaaatatagtgatttcacttcttcccccatatagatattgtcaagtttaattatagccatccacattagttttgtcaaattttcagcaatttctttaaaataagaagatgtcagaatgataactgctattaagggaattcagggtgtttggtttatctacccagtcttactaaaacatttcagttaaatcatccactcttaaactccagtctcatagcaattaaaaattatcttttaaaaaattgcccaaatgaaattccaacagttcatgtaattatttgatttaatattaccatgttagtaaaatatctttaagatagttatattttcatgagtcactttcttagtcacttctagttcctaaataggggagtttgggttgacagaggtgtgataaccatgcgaacaggggctagaatataagcttaacagaatcagttaattagatttggaagagagttgagtcttgtgaaccacagtgatatgtcatgtacattaggaaacattctcctttacgtcaacacaattctggttttctctaatgggctttatacgaggagagagaccatctcactgtgttgatttttctcaagaaaaaaatcaatactctcaatggattttaagtagatctaatgtagtactgcactatgctcataagaagataagcatatgtaaaagattttaaaatgtgaattaatgcatgccacactgaaaccagatcataccccacactcatgttgttattatgtgtacctaaagcaaagaacagctgcagagtattttctctggtaacacttcattttttattggtaggttttaatccgatacatttttggggtcactgaattcttatttgctttagaatgcccgattatatcattctgcaaaggataaaagggcttgagccatcatcctgtgctgaaatttattgaaggtatttatgaagagggtgatcttgaggaatgcaagcttttaaaatctaagaacagcagcaaaaataaattaatcaggaatccatcactaatttatacatgagtcacttacgaggaaggtaaaacggttcagtaaattatggatttacaaataaacttgattctagggccttggaaaatacttcgattggaatatagatccatttttcctcaaaacaattttcacttcaacttcagatgtaggggacataaaaccaaatcccctctctgaaaattcaaggggaactcttttctggtaacgtgaggcatgagtggtgatggttcacagggattcatctgctctccacaaactcaggggtgggacccatctatcgtttttctaactcattcccatgaattctaaattgtcaacacctaaggttaatgatacctgtctttttgctgtcataaacagttagggtggtttagcaagagataaatcatctttacacagaggattgtgctattgttctcagcaaacaaaggacaaagcttatttctgtataatgttaaacactgttctaatgaaataggcttttttttcttttatgcattaatgaaattattagcctacaacacatttctttcttgatttggaacatctgttcttcaaaagtgtgtagagtaataatggagagtttctacacatcatggctcactctcatctcaaaatatacactgatttttaaggaatgtgtagaaggaaaagccaaccatccttttgattattggattaaccaccagagctgccttcatctgaaacatactccactcgattgaggatgatacttttagctactaaataaatacacagaggaggtgtggaataacaactttaccaagaatagccaacaagttcatcttacaactactatgagcaaaaagcgttcataaaaaatatcttttttttttttttcttgagatggagtttcactctttttgcccaggctggagtgcagtggcatgatcccagctcactgcaacctctgcctcctggcttcaagagattctcctgcctcagcctccaagtagctgggattacaggcacccaccaccacacctggctaattttgtatttttagtagagacggggttttgccatactgatctcgaactcctgacctcatgtgatccacccacctctgccttccaaagtgctgggattacaggcatgacccaccacgcctggcccaaaaaaatatcagaaaaaaaaattgttttcacccctttaaatattaaataattgatttttttctgaaaatatttcttatacaattcaataagcacactaattttagaatggagggtcattaatgctgtaacaaaattggaaatatttgctattatatgtttttaatacacactaggtacatattaaatactatatctgtgtaatagttaaacatattaggtagttcattaggttcatttaaaattggccaagctcagtagctcacgcctgtaatcccagcatttttggaggctgaggcaggcaaatcacttgaggtcaggagttcaagacctgcctggccaacatggtgaaaccccgtctctacagaaaatacaaaaattagctgcgcatggtggcatgtgcctgtggtcctagctacttgggaggctgaggcaggagaactgcttgaatccaggaggcagaggttgcagtgagacgagactgtgcactgcactccagcctgggtgacagagttagactccgtctcaaaaaaataaaataatataatgtaaggccaagggctcagcaacaacgtaatgtaaggtgcttaggtataattttacaattttaagagagaatgtgcttgagctaggaaccattgagagagagtagatggtggcaatagtcagtcaattgtgctacaaatacattgcaatggaaaatatacactacaaaattttacaaaagtagcaaacaaaaaactttttttttttaattttttttgaccaagtcttgctctatcacgcaggctggagtgcagtggcatgatctcagctcactgcaacctctgcctcccagcttcaaacgattctcatgcctcagccttccaagtagctgggactataagcgtgcaccaccacacccagctaatttttatatttttagtagagacagggtttctccatattggccaggctggtcttgaactcctggacttgagtgatccaccctcctcagccttccaaagtgctaggattacagacgtgagccaccgcgcccagccggcaaacaaaaatttacctatgattcaataaatggttttcccctaccagccttcccccaccacacatatacactttttctgattctgttttaccataatgatgacacaggtgcttaaccagctccgtgagctattggggtggctccttgccttgatttagtcttgtgcccacacactgacccatgcagacttagccatgcatccagcacaaattacgctattttacatgtttggtttaatgtattcgtacctgctagacattgtagccaaaagattgtttgctgcctaatcctagccagctcttagggtgactgcctaagcctgtattgctggcttcacaagtttttttgtttcaggtaaataaaaatcaaagagcgttcgaggcagccgcattgactcaccttgcagacaagcaagcagagccgcagagcagtgacccgtgcccagcgcctcgcagctagagctggattggaatccagggctttgcaggcttcctgcttcactcaatcctctttctgttgcctctggcctcaaggtgttggcctgggaggaagtagcagattaaattccatgggcacgaagtccgtagctgacgaatacttaatatgttgcagtttcacagtgaaagttggcaagtccagggtgggaacatgccccaagcagctgagtcttctggattttacttctgttctttgcctctcaatttttgattttgttatataaaaagcaaatcagtaactattgcattatattctgcagtgactcaacagcgacacttaattcagccaaccaaggtttactgaactgctcgtggtgccgggaaccgtgctgggataggatacagggaccaaccagtcctgatcattagcttagccagagaggtaaactgactgacaatcaatctgccagggatcaattactatggaagctcatagtgtgggcccctaacccagactgtgggtctgaggaggtctcctggaggtagtgctatcctaacagagacctgaagggtacttggaatccagccacagaatactatttaccatctcattttactctcatgagaattctccccactgtaggcaggatgggtgttgatttaaaagaaaaaaaaaaaagtagcctggcggggtggctcacgcctgtaatcccagcactttgagaggccaaggcgggcagatcatctgaggtcaggagttcgagaccagcctgaccaacatggagaaaccccatctctactaaaaatacaaaattagccggacatggtggtgcatgcctgtagtcccagctacttgggaggctgaggcaggagaatcgcttgaacccgggaggcagaggttgcggtgagccaagatcatgccattgtactccagcctgggcaacaagagcgaaactccgtctcaaaaaaaaagtaaacagaataacaaacttaagggtggccagcattagagctggaatggaaccctgatgtccaatgagctccctgtagagtggactttgtacaggaccatgttctcctaaagtgactagagagcaggagccacctgtcactcaatgcagcagcattggaccctcccagccaaaccccactcccacctcccatcctactggagtctctttcccttcgtcttggtctacttgagtagatagggtcctcgttggtgcaaacaatctgtgatttatgacccagatagtcctgccaggtcacagagaagtgtactctgcacccagcagtcctcaagacagacttaggctctcggttcctgcaaggcacccctagaggacagcctctcagcagtacccagcaccctgcacagggccacttttgtagcctccacctgcctgctcactccctttttctctccttggccttctccaccctgaatgcttgtgcaagcatgctcactctccttccccagcccctctgcacacactgacacacactcagctcccagctttcatcctctctcccacctcttgtggtgagttctgagcctctccatggccatcctcccagcccaggccatcctcccaacccagcctctccatggccatcctcccagcccagaccatcctcccagcccagcctctccagcccatggccagcctcccagcccagcctttccatggccatcctcccagcccaggccatcctcccagcctagcctctccagcccgtgaccagcctcccagcccagcctctccagcccaggccatcttcccagcccagcctctctagcccatggccatcctcccagtccagcctctccatggccatcttcccagcccagccccacctctccagcccatggccatccctcccagcccaggtcaggctctgagcccaggctctccagcccatggctatacttccagcccagcctctccatggccatcctcccagcccaggccattctcccagcccaggagtatttctggaaatgctcccagcccagcatttccagaaaaggaaaatacagccaatgctgagagtctcaaaggtcactcagttcagacctgcagaaatgtttttgttttatttttttacttgggatctttcaaccagtcagcctgatgctcttgtttgatttccatgtttgttgtagtgaaatactgataatcaaaaagttattctacatgatgagctgttcctcctacttctttacagtttctccattttccaaaatttctacaatcaagatgtattgcttttataatcataaaaagttaaaatgttaacatattctgacagaaatataggaattattaagacttttttctaggtggtggaattatgggtaactgttttttctttgttctgtatatttccaaatcatctaaaatcaacatatattgcatttaggtttgtgtgtgaggggttttttcccccatttttaaatttgtgtgtggttttttgtttgtttgtttgtttgtttttttctttttttcagatgggggatcttgctatgttgtccaggctggtctcgaactcctaggctcaagcaaccctcccatctcagcctcccaagcacctggtgaggtttttctctaaaaaggaaaaacatgtggaagacaatcagagatgatttttgagtaatgcagaacaactccaaaagaataagcagaatgaatgctcataaggtgaaagcatttcagaaaacctattacaagcaacaatggaagaaaattgattgaaactgtgcctaccttccctaacactctccaccttcatctgaggtttgtgatccacagactcaagccatcatggaccacgtcttcatagtcccacactattgtctgcatgatttatacaaatgcaaagcctaccattacttaaatggtaaaagaaatacaggaagcagagactgtgctatatcaaaatgtatctttctctactaccactgttttgcttcgtgctgtgcagaactgccactaagcattttcatagtcgagagagccagagacacagaaagagagaaattatggtcaaattatggcaccataccattaacgtacgagagattggtgccgctagtgtatgattactgcttttaatatgattttcgctttctatcttgtaaaatactgtgaatttactgctgagcctgtgtactgctactctcccaaagagaaaattacttcttccagaggatctgcttgcacaagcgtaaaatctttgcagctctctgagcagcaagagaaccacatcagacttgatatgctgatttggctcttttgagttacctgttccagagaattttgggcaaggatttttccaagatgtcattttctttatatgttattttctttatatttgtatccattcacatcatcaagtgtcttattgagtacctcctaattgcaaatgatcttagtggctgctgtgagagacacatggattctaatacagggtgcttggtttagagagacttgtaagcaccaactgatatcgagggggaaaacaagcagagggaacaggaagtgcaaaggccctcaggaagaaatgagcaaggccaacagggctgggaagatgaaggtagaggagatgagaataaagaggtgggtaggggtgcggtcttgtaacatttgaggagctgaattatattctaaatgtgataagaagccatttgaaagctttgagcaagagaataagggcatctgatttttttttttatccctctagctatgagaataggctataggggactaaaagcagaagcgagtaggccagttagtaggacgcaactgcagacatttaggctggagaagacagtgacttggacgagggtggtggtgtgaaggtcactgaggtgtgtggagactggaaggcacagagtcagaggacttgtcttctaactccatgatactgctccagatgatgaacaggcactcagaaggaacccaataaacatgtcttcctgaatgtatggctgaatgaagagtaccgaccccctcacttataagtaggagctaagttatgagtataaaaaggcgtaagaatgagataatgggctttggggattcagggggaaaggggtgagggaggtgaggaataaaaaacaacacactgggtacagcatatactgctcaggtgacaggtgcagcaaaatctcagaaatcaccactaaagaactgatccatggaacaaaaaaatcacctgttccccaaaaactattgaaaattaaaaaaaaaaattaagcaaccgaataggaatgctccactgattgtagatattttctttctttctttcttttttttttttttttttgagatggagtttcactcttgtcgcccagattggaatgcaggggcacgatctcagctcaccacaac

SEQ ID NO: 442 - DNA, 16818 bp, Homo Sapiens
atacctcacattccccagcacggttccgacaggcccatgagtggggagtcctcatggcctgggaaggtggccgagaaagtttgaacagctgcagagcctgcccgtccactctctccagccacatttgtgtgtgtgtgtgtgtgtgtgtgtgtgtgttgtgttttgaccaacctcttaggcttatgtaacacacttggaagtcaagaagtaaggactcattactgacagcctcagagaggcttgcgaaacacttgctgtgaagaaatctttccattgagaaaaagttccctggtgctcatgctcccagtggctcaggtatgtggctgggggtgacggtggtgtgagaagcaggggtccccagggctccagagcccagcgccccctgccggagctgtgtcgcgcccggaaatggaattgagcatcgcttttgtcctctatgtcactgctcacgtcaccaccaacaaccgacgtcggtgactaaactctcgccgcgtatcaggcactatgctgggcccctgcgtttgtgattttcctgggcgcgtgcatgaccaagggctaggtgctcctacgcccattttatagaggaggacacaggcaaggcggtggggtcggggcccttgtcagcaggctgccaccccacacctccctgaggtacatgcaaaagcagacccctcccctccccacaggtatagctctatgtgggccctttgcatgagtgtatttttaagctacttgctagatcccaagaggaaatgagtgctcatcctgcagggagaggccagcattccactgggccatttcccttttcagagagctgatgtggaggattctgcgccgttcttggccatgccgtcatctggggccccaggaaccttacagacccgagggccagggtttggggcccagagcccagcagatagccatcttagaagcattctccccaggaccagggctgctaaacccaaccccacatctcccacacaaatgcgtctttcactggggctctggaaaccggagaccatgtaaatccaagaagatgaaattgtgtgggtctgggccgcagctacagactgagactcagcagccgaggggccccagcctcagagggaactcaatgaatttgtcagggaactgaaaacagatgatttcaatcagcaggggaaaaaaatgacttcatggccacagttgaccgaagcaagcggcgttcggctgccaggccctgcctgggaggcgcttccagaaagcctggcctcttccgcagcctctggccggggtcttccctgcgaggagccagcgccgctcgagccgcagcatggcccggcagaaggcacggcggccgtgatggggctggcggggcgcggtgataacccgggctccccgcccccgcgcttcctctccgctgcgctttcatgaatggccccgcttcccaaacagccgattggctgaacccccggccgcgacgcccaatcagcggctgtggccgcctggtctccgctccgcgtggggcctcggtcctgcagccatgaatggcgcagcctcagctgcctgcagccaccgcctaccttgcgggggccgcctccccccgagggaggaggagcaggggattttttctttcccccagactgttcagggttctggtgcaattgtgtcaatctgaggcttggctggagctcctgacaatagcccttgggcttccaaggttgacattcaaggtcttgtgacagtgaaagggcttgcatagttagaaatgaatttctttgcctatagcccgggctgattccagttccagggaaagaacggcagcctttccgtgtaagcaggcagccctgctggggacaaagacagggccgtgggaggaggtggggccccttcctggccagtgctggggggggcggacacgtgcaaactgctgggaacttcgcctgcaaaccagagggctttggccacccctcttggtcactggccttgtcctagcttcatatgccacgtgcatgaagcggctggggcccctgtcggggaacccagccattccgctgcatttcctgttaagtaggaaaacatgttctgtttgctgatgttataaagaaggcatgtgtttacaaatgctcattggggagagcgtggttaatgggccagcttccggcctcacctccccagatgaagtgattgtgtggctgacagaatgggcctgctcttcaggggaagaccccctactcgggaaaattagactcagcagaagccagaattcaaagctgtctagaaagtgcttttgcaaggtgggttgaggccaggatgaggaaggcctcgaatgccaaagtgaggaggtgtcccaagccctggggagtcatggaaggctggtgagatgcagagtgagattccggagtgtttcagaagcttgactcttccccggcagggacttctctgccaacacacctaccctgagcatggctggggtgaccttttatggaacttccaaattagaactgtgcaaacagcttcctgtgaccccttgatgagccccattttaaagatgagaaaactgaggttcagagtaatctgcaaagggtcccacaatttgggagtggcgagaccaggactggaccctatctctgcctgatgccataggggaaaggcacacccaggtgctgcacgcccacagggactggtgtgaggaggcttcagcaaaaaaatgcgggcagatcactaaacactggggcaggcactgactcattgctgcagtggttaggatcagaactggtgagaaatgtacctgctcccaaatttctatgagccagactctggtctcccaggtagattcgtgaggccatgagtatgcagcagggggcggcctgacaaattcatgtagatttccagttgtagcatctattttttttttctttttttttgagatggagtttcgctcttgttacccaggctggagtgcagtggtgtgatctcagctcaccgcaacctccgcctcccaggctcaagtgattctcctgcctcagcctcccaagtagctgggattgcaggcttgcgccatcacatctggctaatttcgtatttttagtagagacggggtttctccatgttggtcaggctggtctcaaactcctaacctcaggtgatccgcctgccttgagatggagtctcactctgtcgcccaggctggagtgcagtggtgtgatctccattcactgcaacctccacctcctgggttcaagcgattcttctacctcagcctcctgagtatctgggattacaggcatgcgccaccacacccagctaatttttgtatttttagtagagacggggtttcaacatgttggccaggctggtctcaaactcctgacctcagttgatccacccacctcggcctcctggagttctgggattacaggcatgagccaccttgcctggcctgtagcatctatttctgccagcctaatgcccagtatctgtttttaaccttctagttcagcagtttgtaaaatttctggtcttgggacccatttgcctcttaaaagttatcgaggaccccagagagattttgttgatatgggttttatctactgatatttactgagttagaaatgaaaacatagaaatttgtaaaatgcatgattctgcaagcatacattctgttagctctcagagtgacagtgtcatcatgggtcctatggcctctgggaaactccactgcacagtcatgagagaatgaagagagaatgaaaggaaaaaagacaattcatgcctcagtgtcttcatgaaattaactgcaacctctcagacctcctgaaaccacactttgagaactgctctacagagagcagattgagctgggcggcgggtgcctggcgaaagcttcatttcccagccttcttgtggctaggtccggccatgccataccctggctgaatggactgtgagccatcctccatggtgctgggcaacatgatagatctgtgagtgaaggagtcattgcagtggccacatcctgcctctgaccaatgagcttttcccttcttctccgccttccacaggctggggtataaatgaggcatgggtcaatttggccctcgtagacagggcaaccctcaggtgtgacagagcctgggtgaccagtatcatgctgccatatttgttttttgttttttgtttgtttggtttttgttgttgttgttttggagatggagtttcgctcttgttgcccaggctagagtgcaatggcgcgaactcggctcactgcaacctccgcctcccaggttcaagcgattctcctgcctcagcctcccaagtagctgggattacaggtgcctgcccccacgctcggctaattttttgtatttttagtagagataaggtttcgccatgttggcaggctggcctggaactcctgacctcaggtaattcacctgcctcagccgcccaaagtgccgggattacaggcgtgagccaccatgcccagcccatgctgccatatttgtcctggattgactatgtgggctcctgtgggaaaaagaaatcaacagccaggcttctgctactgtattttgcagtctttgctataatagcctaaccagaatcctgatcagtacatcattcttacacacctggcttcctgctcttattatgcttgcaagaagttggatgaaccatccagataagcccttgggaggagctgagtcttcagatggaagcatgaggtggtgaagcacccctgacagatcattcctttaacatgcgtttattgagatattcttgccatgagtccaacagagtccaggagaggaacatgaggtcacagctgatgggaggaggggacgctgggatggagcttgccagagtgtcgggggctgccatacaaatcaccacaccctgggtggtttcctacagaaagaggcagaaacgtactcttgcacagttctggaggctaggaatggagatccaggtgtcagcggggttggcgcctctgagggctgtaaggcaaagaacccatccctggttcctctcctggctcttctggtagcttcagccgcccttggcgttccctggtttgtggcctcatcgcttcaccctctgcctccatcatcatgtggccttgctcttcatgggcctctctgaggaaagcaagaggtgggagcagtgggcctgggccggggtcaacagccaaggtgtggccaaggtccacccaaggtcattggctccttgctcggcctcaaagccagcttgacgcagcagaccctctccccggtctctctttgtcctttcttcttcttataaggacacttgttattggatttagggcccaccctagtccaggatgatctcatctcaagatcttttgccttccctgcatgcacaacgattccttttgcaaataaggtcacactcacgggtttccctggccgtactctttggtgttgcgggggcgaatgggtgcagcattcagccactccagggctctaagtaggagggacaggcagaagccaccaccaggacaactggaagacttcctggaggagggggtgctaatttgggtcttaaggggagtcattgctgcgagaaaggggagtccacgtgggaagctcagatgcagggaggtgcaggaccttggcagggtgtggggcctccaggggaaagatgacaagtgtgctggaggccttgggggtggagggctgagtgcctcaggatgaggctgggagggccaggtgtgggaggtctcagggctttgttctgcagacagcaggagccagcaggggctctagggctgggagtgagagagttccctgcaggacaaaggtgggctaatggattcccactaggttcagggatgcagaggtggtcctgggagggggtgtaaatatgtgtcttgcaaggggtggagggggagatggagccttggggtggtccctgggaggaccctgggggcgtgtggggacgtctgtacagagtgcagcaggaaatcaggctggtctgtcttgctgtgtttccaaagaaaagaggcaaacccaaggggtaaggggcttccttagacgcagggcccagtgcacccgggcgctggcggtgggtctgggggctgactgtgtctgtactctctcctttgtctgcaggcctggtctgcactcagcggctgccaggacctcccgggagcgcccacacaccccacagcccgcctgtcctgggaatacctctccaggccctgaatacctgtcccccactccctgcctaggacaacgggggctgtcagggccatgggcaggcccaccccaccaaccagaccctacgtgggccccgccttggtcccggagccaatgtctggctgatcagggaacaagaggagccttcaacacctcaattctgggacggttgaggttttcacaccgggccacacctgagccactaggagccgggaggctctgatcgtctctccgcctgtctctctctggcatcgccagggctgacttcattccacgtccgcgcggaaacagcagggctatctcagtgcaatcctggttttgtattcagagcctcctctgagtgagtgccagggcgcaccgtgcaaggagcctggctttgcccactgcaatcccgtgccctcaccctagtcttttaacctctcacgactcaggttcctcatctgtgaaatggagctgtcttctttgtggggttagtggaagcaataagcgagaagtgtgtccacacaggcccagcctttctggggcctcactgtgaccagacactgcgctttggactaggggatgggatgcgacttaggggagctgcggccacctgtctctggaggctgaagtctccctgcggaccacccttcctcaggaccacccttcctcacttgcacgtctcccctgcagtcaggactcgcctgcccccacgccaggctctccctagtggatcaggctgtacaacctggtttgtatgaggaaaggcagccgctggggccccagtgcagcaagagaggggaggaggaggtgttcagagggaagacccctccccacccccgttggccccttgtcttcaaaggaagggcgtgacctttctgccccccagacccaccctgagggtcactgtggcggtgaagcctggtgccggcacttgtgcccgccctctgacttgcagtgtcccgagacatattcaggggagccaggtattcaatcagcaaggctcccaacaagatggggtgggtgggagaagcacccacaattctctagaaggctttcagggcattcttcactaaagagacacattggagtctggaacccctcccctagcagggggacacctccaagctgtgctcaaaactgggacaggatatttgggttggagtgttctccgtctctgcctctctgtctctctctctccctttctctctgtctctctctctctctccctctctccctgtctctctctctctctctctctctcactctctcttgctctctctttcctcctgtctctctaaaggtctcctttcctctaagggcaaagcagcagctgtcaggtccttagagcaggatccctggttggtgcaggcccagggccagcccctggtcccggcctttcttcccctgggggatgaacagtgaatgcagccgccctgggagttgggcgacctgcggggcttggagggaagggcaggagggcccagggctgacacagcacgcctggctggggtgggggcagtggtgtgggtggctgaccacattcctgggatgccgggctgcagggctgggcggctgtgtctacacctgtctgcccctgtcggctgtgagcaatgcagccagggacagggcagctagagccatgctgtggtctggccagtgggccaggcacgtgagctggttcatgccctgctgcaccaacaacgttcacctggagaggtcagtggcctcattgaggggaagaagggctctgtccctagagtctagcaagcctgggccatggtctgtggggcttgtcagggtgacttcacctctgtgagcctcagtttccctccctggaaagtggagcataacatgggtggggtccccggtgctggcctgcagagccctgggagacgtgtggagtacaagccccatacgctaggccaaaagatccgcagaccaggcagcttaactgatagaaatgaaagtccaagatcaaggtgtcagcagggcaggctccttctgaggctgcggggaaggaactggcccaggtttctctccttggcttgcaggtggcccatgcctctccacatcagcttccctcccatgcggcctctgtgcctgaacttcctcttttagtaggactgcggtcatattggattagggcccaccctaatggcctcctcagaacttggtgaccactgtaaaggccctatctccaaatcaggaaatgttccggggtcctgggggttaagacttcaacacaaacatcttgttggaggggggttgcaattcagtccacacccgcttccctcgtctcacttcgtccagcactcagcaccctctggccctgcccttagctgtgggtctggatttcccatctcttccacggtaagccctgtgagggcggcgtctttatcccatttgctgttacacctgcaattcctggggtgccggcttgttctcatcatttagcagaccattgctgaatggctaacaaatccaggatacaatttgtaggtgcaccaagccaggcaaggtatctgcgtcacctgcccgtcagtggccccaggctgggaagaccccttgggtcatgcttggacactctgcaccatgggcagccagaactcctggccgagtggtcagcggccgccacaccttgctggagcagaggcacccctgccatcccacaggcaagacggacctagctcggtttcccaacactctgttgagatggggctgcccagaagcccacacaagcccacacctgggggaatcccagccccacgttctggttcaagtcgctgctggtttgggttcagagcccaaacatgagctcctgctcttcttggtgtgatctgaggctgtggatatcctgagaacatctgtctcaacagaacaccttcctccatgttgcctatatcccaaattcactcccaagtggcttttgtctggcagattccggtggattatgcaaagagggactgccagagaatctgagctgttggaagacttctgaaacgtcactgcggtggcggaggcactgccccggggggacaaaagtcttgtctcttcctccaaatgtggaggatcaaattagagttgacttgtgtgtttccaaacccgttgtcgtcccagcattcaactaatttgaagataccaaaagcctcagaagagggtggcagaagaagaaagggacaaacacaaaaggggaaggacaagagggcagaccgttaaaaaaaaaaaaaacctacaagaatgcagtttgctcctgggtggaccctcccaccccgtgcctgccccgagctggcccctgacctgtgccggcagctcaaattcctaacatctggcccagggtaaggatatgggcaactctttaaggaagcgtgtcctcgctaggtgctgatcactcactccaagggactttgctcctggatgcccaggctcagagagggctgtgagcctcccatggtcacacagcagcagtccaagtgcctggggcagtccgatgcccacatcccccttgaggtcccaggtgagggcatggtcacaggatgcagacccctgcctgggtaggtctctggtcttctatggcacctacttgtaagcctccccagcaagttcaatgtggggctcccagcaccggtccttgggatttgggggttccttggtttcttctcttttctctctacccttcttctccctgggtgacctcatctgttcccctggatgaggtgtggtcccctcctcagttcaatgctgggagccctgcactgaacctggagggaaccagcaggctctaggtcccgacttttggagtagggcctgccccttccttcctgcccctttctctagggagtgctgtgaagggtgcatttgggccctgggggcccatgagtttgggcctccaggatagctgagagcacgtgggcctggcctgcccactcttcctgaagccccccagcttcgccccactcctgggccctgaccagcctcctgcctttgcctttgtctggccttgggtttcccaggcagtggcagctttgctctttttctcgcaggtctcaggtgtcacctcttgaaaattcaaaggaggatccttcgaattcatgaaccagcaacctcccaggaggtgggtcttcccaccctgcaccatccggccttaggaattcagtctggagccctccctccccagggcctggggcctggaagtcggagccagccagagcagggaagggtcgggccctggaaatccagagtggcctgcctgggccggggtggggctgggcatggggaggcgtgggtcctgtcggggttgggaccagcgctccagcttccctagctgatttgagcatttaattttaattccacaaatagagaaaaagaaagaaaactcctgaaagtcgcggcagatcctcacggctctgcagatgtcctgcggaggttgagcctctgcactttggcctcagctgcccaggtaccagtctcagctactgtcactggcggtgtggcctgggcagccatgtcccctccccaggcctcagtctcccagtgtgtcaaatatctgccccgtctcaggtctcattctgctgcttcccccttgtgatcataccctgcccctccccactccccaaggacttcttggccttagcccacaaacctatgcaggtggttccatcagagactgtcccccccagccaccccagccctcatcctaagtcccatgctcccctcccctgcaggaggccactccgtcctcctagtactctcttctcccagcatctccagttctccactgcccgcttttcctgctgccccacttgctggtcccctggagtcccccagacatcatcgctcctgcagtcagcaaggatttggtgggtgcctgttgagggggccgctcctctggggctggagtgcagcgatgcgtgaaacattatgatccctgatcgcctggggcttctggtcccatgggatttgagggttccttggtttttttctctttcaacccttcttctccctgggtgacctcatcagttcccatggattgaaatatccttatgccaatgacttccaaatttgtctcttcagccatgacctctcctccaaactctggacccatatatccggccatccacttgacatctccctttggggtctcccagacatgtcaagcagatcgtgtccaagctggtgtccaatcctttcccaggcaactcaactcccatcttccccatctcagtaaatcccactgccacccctccactagctccatccagaaacctctacaatctccttgcttctccctgtccatatccacgatcaggaatccatccacagacctgtgcatcctgtctctgcagatccacagcctcacccccatcagcaccccggtccatagagagagacctggtgacacagatggtacttcagagagaggacatgaatggtgtctctagtcatgagagtcagggtttaggttgaagctactccgccagggagaagtggagatccagggcccatccagggacacgcagggagaaaccgcttcccccagcctcagggtggagcccctggttaccctctgagccccagagccttgtgtccccagggaggcagagggtggaaaagactgatgggtagagagagtgagagcatcaagacccctctacactgcagtacaagaggctcccttttgggtgggcgtgacaggagacatcccagtacgtggatcccagcctttggacttggtgactgtgatcagctaagagtaaaactgttcttgctttattcttctgggaaagggctacacctgctgggttccacaccaggtgaagaccgggcaggtattctattcaaaagggtgtggctttgccacccatttgacaggagagaaaacggaggcatggagttaccaggatgtgagcagcacagcagagcagtcctgttcagggcctcacactccctccccacagcccccttcctgaccctacagcccccgttccaggcagttcctagcaccataaggtaagtggacaagcctcactctggaaggagagcacagggccctgtccctcctgggggcccgctgagaagcacagtggagttctccagggaccaccatcacaccgaggacacgttaccataaagaaagggcccctgctcacacacatttcccagtcactagcagtgagcacgtggcagcctccagcagctcggattcctccaggccacaccctagacctggccacccacattctggcttctcagggcacatggagcagccattcccctgggctctgggccccaggcacaagagacccaggcttgcagctgttttgcagagagtaagggcaaaatggaagctgcagtgatgagggagaaggtgctggggagagggagagagatagctggatgggcagggccgctgttgctgggacctcagccccaggacgggcatcctttcagcaaaatctttgctgggcagctatggtgggctagacactgtgaggtgatggcgtctgggcaagacctacaggacaggggacgcgcagcccagtgggaaagacagggaatcagctcaaccgtccaccatgggccatgtcagatccagttatcctaccatccagaagcagggggccaggaggttaaatgacgtgctggtggccatggtgtgggggcagaagggccagggttcaaagccatacccctttgaacagaacaggtgtagcctatttacccgcctctccctccatccatctgcacattaattcattcattcattcattcattcattcgctgagcacctgctatgtgctgggccctgctctcaagaagtttggattctggtggggaggaaagaaaaaatatccaggttcatcagacaagcaaataatacaactacaaaagttgtcaagagtctcctggaagagaaggagctggctatgtggggcctgcacacacacgtatgcatatattcacatgcatgttcatccatgtacacatgtgtgcatgcatgtctgtgtgtgctttgagcatgactgtacctgtgtatctgtgtgtgcacagatgtgcatgtgcacgtgtctatctgagtgtgtctgtgtgcaggcaggtttcatggatgtttctgtgcctgcatacatgtgtgtgagtgtgtgtgcatgtgtgaatgtgaatgtaattcccaacagaggtatgaacatagctcagaggtgggtggactcagtgggatgtgctttagggaggaaaagaggcccagtgtgccaggggtcagggcgtggggcattgaggggtttcgggaggaaggagcacgtggaggccaagctgtgaaaaccctgtagaccatgagaggaatttgagttttattcaaaatgcaaagggagccaacagaggaatttccacatggctagaaaaaagcacacagccatgggactgtggggagcacggagtggagggggtgtgagtggaggcagatggccaggccagaggccagcactgcacctgcccaggtgagaaaggctgggagatgagaaggaaacccacactgaccaagattaaaaacaatacgatacaaggaattaacagcagatgagacagtgtaaaaaaaaataataataatgaacttaaaaacacagtcatagaaattctccaaaatggaatacaaggagaaaaaagacttaaaaaaaagacaaggaagaacagaacagcagtgagttctgggacatcaagtagcctagcataggtaactggagtccccaatgaaccccagtgagcgtgacccagtatccgcctagtaggacgctgaaataaaaatgactgaccgactcagtgccagcgaggacatggggccactggacccctcccacaccacgggtaccagctctttggaaacctcttctgcagattcttccaaagctaaatatccatctatgtgtgactcagccattccactcctgggtattctccaaagggagattaaagtgcacagcctccccaaatctcgtacacaaaggttcccagcggctttatttgtaacagccccaagctggaaaccacccaaatgcccatcagcaggtgcttgggtaagcagaggcctggggtcaccgttggttcagctgttggcctctccttctgtctctccaagcgccctagggcaagtggcatcttcaagctgagccttggtttcctttcctgtgaagtgggtctagtgagtgggcctgatttgaggtggtgggcaggatcagcgtggcatcactggggaagctcgcagccgagtgtgaagggcccggcatggaggggtggaagatgtcaggctccaagcagcccccgacgctggcagtgctcaggctgacccttggctgcctcagctctgggaaccccatgcagcacgaggcgtcggggcaggtagtggggccataggaggcggcagggcctgggctgtggccccgttccctgaagggctccgtgtgttccatgcagcgggcagggtcaggggtcatgtttaaacgcgggggagcccagggcagtacctccaggccgcatgctatccaagtggcgtgggcaggcggccccttggatggtctcgggacagcacagcaaggccctgggcactcacctgaccagtcacgttggggccgcctgagggaacaggcaggcagatccaacccatggtggggggctgggacttaggatggtttgaggggtgcgccgaaagcctgggaaggagcctgggtgggagagtggatgcccggcacacacactcgagtggaccagaggcggttggctaggccacagctatcccgtgcccagcaccctggtagccagttcagagtgactgtcccagccctagctgagggtatgcagccaaagcagggcacacctggtgtttctggaaacccctctccccatgccactgcgtgccagctccagtggcccccgtgtcggtccttaggactctggccacccacacgctgagctcccacagggcaggtccaatgcccagcacacaggggaagctcagcccatgtgccggcggaacggtgagatgggtgtgaatgaacaaatgaagcatctctctccccctcccctccccagcttctcaaccacagaatctgtgcctggctcaggaaatgtacccttcgtgtgggttttctattgctgcgtaacaaatggtcaccaattgaaaagcttaaaatggcatttatctattgtcttaaagtttgggcaggtcaggagccaggacatggcatagctgggtcttctgtctcatggggctgcagtcaaggtgccaaccggagctggggtctcctctgaggtttgggaccctcttccaagctctctcggttgtggaagattgcatttccttgcccctgttcctcatggggctggatctccaaatcctgcaggagagtctctgacttcaaggccattttgaaagggctcacctgattagcttgggcccacccaggatcatctccattttgattaactcaaggtcagctggttaggaccttaattacacctgcagaagtccggcacctttgcgatataaagtaacctcaccacgggagcacatccaccctctttgcagccctgccacactccaagttggggagtacacaggtgtgtagacacctgggggcagggatgctggaaagcgtctgagtctcctcccaaccacgctctccttggctctgagactgagtcctggccccaggtaggtaatgagtgaagctttgcggaatgaatacacgagggaatgagtgagtgagtgaatgtgtgagtctggcatcttccatcaaactgtgaccttcccagggccagggtccacattggactcacctctgaaatcgccatgccaactagtgctcctggttacctatgacgctttgaatgctcacctgagcgagtggaggagggagtggcgcccctgtctctcctcaaggtcagtgtctgtgcagagcagctccaagacccattcctctgggagccaggtacagggccgcaagctctgtcctcggcaccatctcctctggctcctccatgcagctgaccctccagtgcacagcagcagcccccagggcagcactggccacacagggaccagtggaggcaggctcctggctgtgagaccttgggcaaggccttctgtcccgaccctcctggtctccatcagcaagagaggggtggcaacacctggctggcgtaaggatggagcattccccgcatggccagctctcagggcaatgcctggtgccgtccagatgcccacaccgttgcctcctttcatccctccaagagcatcaccaggcaggtgctgtcattatgcccattttatagcttggtaaactgaggcacagagaggttaggtaatacatacaaagctggggattgggcccagacagtctggctctagccatattggaagggcattccccctcacccctgactactgggttcctgagtagtgagttgaagaccctgctcgtcagtgtgctgtgtgacgttagcaagccagctgtcctctctgttttggccactgtgttgggcttcctggggctgctataaccaagtgccacaggctacacggcttaaaccacagaagtgtatcgtctcacagctctggaggccagaagttcaaaatgaaggttgggca

SEQ ID NO: 443 - DNA, 2058 bp, Homo Sapiens
atgggatttttctagaaggccacgtgcatatgcaccctccccttccattaccccagtatccgccatcaagtagtaacatgttgtaacagaaagaatcccattaagtcctagttctggtagcccggtacaaattttagattttcccccaaaaatgaaaaaaaattatttaaaaaatttagatttgaaatgcttagaaaacaatcatttatttttttatgtcaaaatgtccaagtaaattaatggattaatttccatgcttctggtgatgtaacaccacttggtggtggcgctgaggaaaccctgggaagtgtttttctcttctgtgtaatgaaagactcactgacaaagccgtcggtatccagaatgactgctcttgaaatgatattttgatgatgatgatcagggaagtagcctatgctgatttatttatcatccccccaccccaaccccacttttgtgtcacaaacatttgaaacacccagtgctcaagaatgctgcttttccaattctgctaatatcctctctccccatctggaaacaaagttactaaacctagttttgaaaaagcaatggaaatgaaagtgtccagtgaacttactggcagttgtgcaagttgaaagcttattccttacatcctgagcctaaaagccttattccttatatccggagcctaaaagtttgctcaaaagtagaaaactttccagacaagatcacatacaaaatggttaacatgaaatgctaatgaagaaacaaggcaagaatgaatacaagagaaatggaatctggggaaaaaagtaggttctctaactggggcagggatcttgcttcttgggggcatatggttggatcccaggtgggccacgaaaatcatcttggatatttgtttacaggctgattcctgagtttccctccaaagattctgagtccacagatctagggtgtggaccgagaatcctcattgtaacaagcaccctctgcccccgggacattttaaggtagatggagaactaaggtgagagtgtgccagctaaatactctttcctttgtccctgtgcctcagtcttttttgtttgttttttttcatgtgacactcagtaggaaagtctagttcaagaaccggaaactgagccgggcatggtggtgcgcacctgtagtcccagctactcaggaggctgaggcaggaggatggcttgagcctgacgcccatgccgctgtgagctatgattgcaccactgccctgagcctggacgacagagcaagttcctgtcttaaaaaaaaaagtaataaaaaagacatttaaaaaaaaattagagctcagtgacctgtgactcactttgccactttgtcattttcttgacttctgtcccaacgccagccctgtaatatggagataaagagtggggaggacagaactctgaaacctaaaaggcaagatttttgctaaaccggagaacgtaaaaatacattcctagaggcaatctaaccagccagataaccagaagtttactcttcaaagccaagaatcagtacccccacctcaccttccattctctcttaggctttgtctatgtctctaaggggagtttttcagttgactgatgaggtcctgactggtagggaaagcctgcagggaaatcctgtggcaaagcacactcttgatcacctacttaacaagaaggtctagcaggacattcttgatccaggtcagcttcttccctgaaaataatacatatttttaatttctgtttgaaaaaactccactgtgaaattactctgcttatattagaaggtatgaagacagtagttatgtactgttcgtttgcatacggtcattttgagatagaaaaattaaatttttttaggaaaagaatttcaagcaactttctacgaaaatacagcttgtggttaaatttcctaatgaaagaggaattattcactgaaaaatttgtctaatctgtgccacctcaaaataagaattgtgcctcttcaatgaatgttgtatatgagaatgttacatttgtaacagcacaggaaactcaataaattataaatgaatta

SEQ ID NO: 444 - DNA, 2724 bp, Homo Sapiens
tatgtaacctataatcttaattaaatttagcaaattgttttactgtaatttcctgtttctgctccagaattccatccagaattacactttgcattttgcttacatgtctccttactctcctttaatgtggatcagtcttgttttagtctttgcctctaatgattttggaacttttttcaagagtactggctggttattttgtagaatgtctctcagtttcgatttgtctggtgatcctttttgtttgtttgtttgttttgagatggagtctcactctgtcccccaggctggacttcagtggcgagctatcctggctcactttgcaacctctgcctcccaggttcaagcgattcacctgcctcagcctccccagtagctggaattacaggcacccgccaccatgcctggctaatttttgtgtttttagtagaggtggggtttcaccatgttggccaggctgatctcaaactcctgacctcaagtgatttggccgccttagcctcccaaggagtgagccaccgtgcccggcctgtctggtgattcttcatgattaaatttaggttgccagtttttggtgagaactcctggaagtgatatggtgtcctcctcactgcattatattaggaggcatgtggtgttgtcctgttacttaaccaattatatttagatagtgcattatgctgttaggacttctgaaaacacaccccatggtgcaaaatacccattgaatcttttttaaggtatatgccttaagattatgattactttgtcaaaggttacaaactaaattattttgccaaagtgctttttaaataagctgcctctgtttatactgaataggttgcttcttcaaaggggaaaataggatcccagctctgtaacttgtaattttttttcgaatttattttcattagttggcttcttgtgttctagttggcaagcccaaatctcagcacatagcacggtggtttgagtgtatagtggcaggttggctattcttcaggactgaggtgaatgtacaaatacttaatgattgagttcttgttcataattttggggtttggtctaaggacccttagtttataaattctctgattactttttaagaaaaaaagtgatcttgaatttaaagaaatgtaagggatagtggtggggtgggaaattcattatgttagaggagatttcctggcattggaagggagattttgaaattaatgctgtagtgaaacacaagaagattaaggtgaggaggaggctggtcatagttttgtatttgaaatgcctgtcttgcctcttagttagtagaattagtaccataatctaggacccttgacttcttaacaagtttactctgccttgcaacctcacactctcttccagttctctctgcaggatttttcttaggttcttctttgttcattacatagaaacctggagcttatccatattaggaggtgcttagcctgcccctttgctgctgtttctgaatatatgtgtttagttcagcactcacatattttaaatgagcaatctcttaggttttcagagaagtagaacattgttgtgtctcttacagcagaatattcattattgaatgtagtgtcaacctgaatttctatcaggttttgtcttaactatttaggaatttggtaaggtaatacactcttgatgatgaagactttctgaaaaatagtttttaggatgttgagctattaaaatatcctccaagatagttttaaaatgttttatttaaatgaagctattacagttatgcgtatattattcagtcagggagtttaatatttttgagtgcttaaaatgtgtagaacgtgcctttattagagcctatgagtaggttaagagtatatatgtgtgtgaaaagttaaaggtgcaaaaccataattgtttgttttatttgagatggagtctaactcattggagtgcagtggcacaatgtcggctcactgcaacctctgcctcccgggttcattcaagcaattctcctggctcagcctcccgagtagctgggattacagtcgtgtgccaccacatccaatttttttttttttcccagtagagacggggtgtcacccaggctggtaatctttattttaaattgtacttgctcctaagaatttaggtgttaagagcatagcatgtagaaggaaaaaataaagctgctgtaacctcatcctgccttcttggaggtaatctctgttagtcctttgtgtatcctgggaatttatgtgcaaagtaaacaattctgtccttgaagaataaggatcatatacttagtttggtaaattgtacaaaactacacactttgatgtatatcttatgtttcattttgacaggtacctccttactcttttgttttttggagacagtctcgccctatcgcccaggttggagtgcagatggcacaacctctgcctcctgggttcaagtgattcttctgtctcagtctcctgagtagctgggattacaggcgcctgccaccacacccagctaatttttgtatttttagtagagacggagtttcgccatgttagccaggctggtctcgaactcctgacctcaggtgatccacccaccttggcctcctaaagtgtgggattacaggcgtgagccaccacaaccagcccgtacctcctcactcttaatgtctgtatagtattctattatttgggtatgtagcaacttacttagccagaccctcctttt

SEQ ID NO: 445 - DNA, 2321 bp, Homo Sapiens
tttggacaggaaagttccaggcttcagctcccagaaaccaccttccttcatgtggagggacgcagcctcataagggctggagtgctgtggtgccatcatggttcactgcagccttgacctccagggctcaaatgatcctcccatctcggcctcccaaagtgctgggattacagatgtgagccactgcacctggcaagaaacttttccattaaaacacaatgctccgaaaggtttgttgcaggtaacgcgttccttgtattcagcaagggcggtatatctgcagtgtcttcttcctgggcctacactctgtgaaggtcaatctcatactcaacccagtgtgctgagaaacaggagagtgactgatacaaacaacttatttgagcatatttacctgaaacagtatttaaaaaactgagcatatcttatgacaagaatctcatgctttaaaactctaaactatatccctatgcaaattactgacaatatacgttttaacatcagcattgtacttttaaccttaggtctagggttaccaagtgctgtggcactgctttgataccttatagtttccagttctagtttacaaacataacatgcctttatagttctcagcgctccttaaatatgtggattggaattctaattcctttaaatttcatgttgagttctcagtttctctgcagctactatagctgctctgagttgatgtaattcaaagtctctttaaaagaagctagggcatttctctgttatgcaattccttctgttgcattggagaaacaccgagtaatgcagccacgttgggaaatgctgtcattcccaaatctaagtatcctttaatgggacctactgaaaaaagaagaagaagaagaagaaatgccagtacctttcttccactgaattgctttggacacatgctgctgctgttgttgaactcactgcttttgtatacgaataataagtttccaagctgtggggaggaagacccccctgatgacttacaacccctctcagatcccatgaccctactgcctccaccatcagatcccacagcagcggacttcggggatgccgtgagatccaggggtgcctgggaacggtttgcctctccctctgtgccctgcccagccctgcggcccacgcgtgtgcgtgtagcacagtttgttcttctaaggacacgttccagaattactggagtctcctgaatgctgagatgaatagactgggtgagctttaggtgctgcacctgtccttcaaaatgaaactgaacggaggcccgcagagtctccccgggaaatagggactgaggatgcgttccatctgggttatgctttcatccctgcagcccctggtctgcccccctgtcctcagaaacagctcagtcctttcggtgaaatcggtgaaatcggtggttctcatcttctgtttcttgaacacacgtcttgttcccacccatcggttatggttggagaagcatttcaagaaaacacctgttagggctttttgtgtgtgttaagccgctgtgctggtgtgctttagaatcatccggaaggtttgttaaaaccagagtgctgggtctcttccctggagtttctgagtgtgcaggtgtggaatagagctcaagatctgcgtttctaacatgttctgagctgctggtcccagtactacgctcagccaaccagccctccagacttatatgcaatgagccctgtggctttacacggtatcttgatgaagaaaatgttatgtaaatcatgctctaaaacaacgattggatttcagtgcaattacagaaaaccttttcatcaagatgtctatgaatgaaatactgattttaacaggctgcccattttcaacagcataaaatcacgcattcaaaaccatgatgagccccttaaattttaggattgagtttcacttcctcactgacattttgtgaaaaataacacccgcaagaggcctaaacagggcgatcggaaccaagaaaacttaaggaagtatttgcacgttttgatgtgtttatttatttgggatgcgcggaggctctgaatggagaaagtcgtcgatgcctgcactggtcttggcctgttctttatgttccgcgcggtgacagctttaagatgaaggaggaacataaagggtttcatcacaggaaatagaactattgctttattcaaacatttaaaaaataaatacaataaatcagggatttttcccctttccgagtattaaatacagatgtactgtatgcatatgaaatttttgattaaaatgtctttcaccagtctgtctctttaattaaataaagcctgtttggtatt

SEQ ID NO: 446 - DNA, 13477 bp, Homo Sapiens
acagaagtggttgggcgtcgtgaggaacgcatcggcggcagaacactcaagcggctggttgttgagagcacgccagctgaagagcacccctgcacactggcaggccatccacaggtgtcagaaactcagctcagctggaagaaacttgatgtaccaggtatcagagtagcaagtaaagccacaagccaaaaatgaaagagaatcttttaagtgcttatcgtgatggtgtaagtaattgtccaaaagaaacgccgattccttctgttccatttttacctgtggattgtggattgaaataaccattggaccatgaggagagactctgaagagagagactgcaatgtgctgactgtgcaccaagtctgttccagagagggtgactaccttccttgaggactgtcaggctagtgatatgtgatataatactcttttgtgacgttggaccatggcagtgagccgcagctcccagtcagcaatgcgatcccaagaataaacaaccgattcttgacagtgtcctatgttgccagtcgattttgttcaacagtaggtacatgcaagtacaccccactcccaaattaaaaagattgaccttagccaaacataacacgagagagaggcagaatctcactctgtcacccaggatggagtgtggtggcgtgatcatagcttactgtaacctcaaactcctgggatcaagcagtcctcccacctcagcctccaaagtagctacgactacaggcaagcaccacctaatttaatctttttatttttttaaagacaagctcttgctatgttaaccaggatggtgtagaaatcttggcctcaagcaatcattttgcctccacctccctaaatgttgggattacaggtgtgggctaccacacttgtcaaatgatttcctttcttttggacatataaacatcaatgggatttctgaataatatggtagctctatttttacatgtttacaggaaccttatactgttctccatagtggctgccttaatttacatttctaccgtcagtgtacaagaattccccttttctacctcctcaccggtatctgttatttttgatacctttttgatataaaccatttcgatacaagccattttaactgggatgagatgatatttgattgtggttttgatttgcacttctttgatgattagtgatgttgaacatttttccatatatgtatgggccatttgtatgtcttcttttgagaaatatctgctcagatcttttgccaatttttaaaatcagattatttgctttttttaaaaaaaactattgagttgtctgagctccttatatattctggttattagttccttgtcagatagatagtttgcaaatattttctcttactctgtgtgttgtctattcacttctctaattgtttcctttgctgtgcagaagctttgttagattgatgtaatcacagctgtctacttttgctttggttgcctggggttttcaggtcttaaacacacacaaaaaatctttttccagagcaatatcctggagttttcccccagtgttttcctccagtagttttatagtttcagatcctacatttcagtttttaaaccatgttttactttcatttattggttggtgagatacaggtgtctagttttattcttttgcataaagttatacaaaagtctatatataccagtaccatttactgaaagtacttgcctgttcttggtgcctttgtcaaagatgagtgggttgtaaatgtatggatatatatctgggttctctattctgccccattggtctatgtgcctgttttcagtccaatgccatgatactttggttattatagctttatagtaaattttaaagtcagatagtgtgatgcctccagctttgttcttttggttcagaattactttagctatttggggtttctttcttatggttccatataaatttggggattttttttctctttctgtgaagaatgtcatgaatattttgataagattgcactgaatctgtaaactgattttgatagtgttgccatttgaacattaatttttttaattcatgagcatgtaatatcttttcatttttctctgatgaaaaagtgctcaacatcactcatcatcaaagaaatgaaaatcaaaccacaacgaaatatcaacccaccccagttaaagtggctcatatcaaaaagacaggcaataatagatactggtgaggagatggaaaaaggggaatccttgtacactgttggtagaaatgtaaattagtaaatccactgtggagaacagtaaattccattgacatattttatctatgttcatcaggaatgttggcctgtaattttctttttgttttgaagaaattatatttctttcatctgagttttatagtttttcttggatagatctttcacatcattagttagattcctacatattttatatttttgtaactattgtaaatgtgattgctatcttgatttctttttcaaattgttccctattggtgtgtataaatgcaactgtttttgtatgttaattttgtatcctgcaactttactgaatttatcagttttaacaggtttttgcttttgttttttctggaatctttaggtttttctagaagatcatgtcatcttcaaatcaggctaatttgacttcttcctttccaatttcgatgcccttatttccttttttgcctagttgctctgccaaagacttccagggttatgttgggtaacagtggtgaaaagtgagcttccttgtctccttccactatttataggaaaggccttcaatttttccctattcaaaatgatgttaaccatgggttcatcatatatgacctctattattttgatgtattttccttgtctttccattttgatgaggatttttatgataaaatgtgttgaattttatcaaatgctttctgatggcatatattgaaatagaaatcatatgatttttgttcttgattctgttaatgtggtgtattatatttattgatttgcatatattgaaacatccttgcatctctgggacgaatcccacttgatcatggtgagtaatctttttaatgtgttgttgaatttggtttggtagtattttgttgagaatttttgtatctatgttcatcagggatattgacctgtagttttcttttgttgttgtgtccttgtctggttttggtatcagagtatgctgatctttttgaatgagtttggaagtgttccttccttttcaattgttttggtaaatttgaggtagaattagtattggttcttctttaaatgtttggtggaattaatcagtgaatctaccaggtactggatttttctttgagattttaacatcaggcttaaatctcctcattattggcgttcgttttctatttcttcatggctcaatcttggtaggttgtatgcattcaggaattcattcgtttcttctaggttttcaagtttgttggcatacagttgatcattataatctcttagcctcttataatgattctttgtatttctgaggtctcagttgtttgtgtctccttttttgtttctaattttaattatttggatctctcttctcttttttagtctatataagggttcatctcttttgtttatctttttagaaaaacaacttttcattttattgatcttttctttggagaagacaagatgtttattggtgcttctccttgcacctctatttatgaaagcattcaaaattgctttgctgatatgaaagattaatttattggtttctctgacgtaagcttataatttatttaaatctaaattgtgcaaagacaatccaaccttcgatgaacttttaaaatgaagttgtttgaggtccggttttcctagatacaaaggatacatttctcaggaatattttaataatggtttaatgaaatagcgtcacttaattcttatgttttatataagatattttaattaagatgtgccaaaacagttgaagacaataattaacacaggaaaactacttcaaatatatctaacatacataaaaccaattttaaacatgtagacatttatgtttcatagtttacaaaagtgatggtcatgtgaaagaaagtgtaatgtaattaaattttcactttagtttaggagaatagtatctataatattgaaatctttgtctaaaaatgctcagtaccaagtaaaattaaatatctgtaaaattatctcaaatatcttaatattgtctgcaaagcaaaaggtgattaactctgcatatcatttttatttttaaattctaacttgtaaagcgtagtaaaattttcctgtgcaacacacacatatattgtcatgcaatgtaatatttattcaaaaacttagagagattcatcttttattccttgaggcagaaaaatgaattatttgaactaaaagaaaaatggacatgtgctcctgtatgaggaatatttaaccccatgtctctgagggtgtttctgtttaaattacatcactacagttaaacatatataatataccatggtaattgtgaaacacaaaattcatacctactgaaccatttccttgataatttttctctttgtacccctatatatgaaattctaaattctcttacagatattagagattaatttattaatttgtctgccaaacctgagtttataatttattcaaatcaaaatcaatattactatatattactttgttgtctttcagagatcagtaattatctgtgagagtatagtatttagttttaggattattatacatatagttaatcataatctttaattaggtgcagaaaattgtgtagttttaaattcatatatttggctgcattagttaaaaggcgctaggcattattttgttcaggtactttaggaaaatatcacaaatgattactttggaggatgataattgagtaggcacagtgtgaagacaatcagaacagtagtaatagaaactagaagggcctccctataaagggagagtatgagggactgcctggagatcatgcttggtcatagtgccctgggaagactccctaactacacaaaaggtacacacttacgaaattacataattactgaaatgacagtaaattcaaagagaaatgaattgcattctatgacaaaatgcatatgaagtcgagcatcctatccaacagggaaagggggcttctttatattaattcaagcatcaatagcatttagggtactctttccttttattatttatttaaggtttgctattttttttctttctgatatactctataatttgtctaacatacaaagaaagattatacagttttctacctctttgactatgaattatttatatcattttacaaacaatttaaattacaactgacagctgctaaattacatagatatatcttgatagaaacaaaatgctccttgaaataaatgacatacttagatgtatttctttttcaatacaaacatatgttttgtagtacttttcgtataatcttatctgttaaacttgagcaagtagaagtgccttttattatagtagtagaaatacttgtattttgtgaaattctcatacattgatgaaagtatcatagttgtctattatttttattataatctttctattctagcataaggctaagcccaatatctgtgctcagttaattactgttaattttttgttgataggtaaaatttgtaaattcaattttggttttatttttagaaaacaagtttctcaatgtctgtggttaattgcgttatacttgtcttaaaataagtttatgataacactgatgtataatacataattaatattttacttcagcttgagtggaaaaatgaaaatcattatatagtttaaacattgttttggtagtcttgattaactgacatcttgccattatcacaattacaatagtaacagtaaaatttttgcaaaaagttacaatttatattttcaactataattattcctgtggtttaataggttttactacctctccctgaactgaaagagaaactcactaataaaaagtttgcagtgattaattagaaacctgttgtaacccatcttttgaagacagataaattgtcttttcattttcctcaagataaagttttatagtaatttattttttcttccatggcaattcatggcttggaaagttacttttcttgttttaatatagttcaagtttacagataaaaataaaaagttcaatttggttttatatatgtgtatatatgtgtatgcatatacacaaacacacagacacacacacatatatatatttatttatttatagagatatccatttatgtagaataaactcactcaagcttatgttctgttaacttgccagaatatctgagagcaaagaatgtccagtgctccctaaaacttttcacaaagtcattcactggaagagggtctttaggaaatgagttatggtgctaaagaaaaaatgtgagcagcaaatcctctctcaaatctctacctatatttatatccatatggtcattaataagaaggattccagttgtctttctcatcatcagtcttaagtaattgtatctaaatttaaatgtaaagcccttttaaattattttcaagcttttctgtttttcaaaattatggtgtcagatggtaaattcattacacttacatggagaatacattataaacgttaattactgtattttgctttacatgaaaccaaaggttttgcatgccttggttgatatataatggcacttcagtgatgaaaaagataattatacaaatctgctggccccgacctcaacgtctgcactgaattatttttctagatacaataccatgtaaatacaaacaaacaaagcaaacacatcaggtatgatattgaaaaaaacaaagaaaacaaaagacaaaaaatagacaccttccaaatattttattctctctaaagaatactttattctctcccaaaacatttgggagagaataaaatatgtttcttggttggatcacaaattacagttcaagtatcttgtcccaatgcctaaaataacttttttttgaaatttttatttatatgtactcttgacaaaattgtcaaaatcaaacacataactcattaaagacaaggactcaaattgtgtatactgatttaatctcaataggtgtgttactaatttaatgttcacttcatcatctacataagctttttaaagtggctaacatcaagaataaaataaaatatgagacaaatttcttgaaagaattatattatgtgaagccaatcttgcttttcttcgaaacaaactggtattttagtgagactttccacatatttcacattgaaaaactgactttataaaggcaaatgttttgacatttaaaatatgatcaggaagagatgtgggtaattcactgagcattctgtgtctcaggtttttctctgtaaaatcagaacattaagtaaaattatcttatgtttttttgccagcactcttccaattatggaacagaccagttgagtagctctaggaaatccaaattgtttctcagttttctcttttgcaaatccctgttccatcaatgtcaaaaacattttgtgaagataattatgattaaataagtgttaacaattttttaatgcctaaagatgtgataggaaatggtaacaaaattattttctataaatttatttataatttttatacttataagttaattatgttatttaactttttaatataaaacaataactccaaatatatttttccattttactcagtaaatttaatgctatttaataacaaccatgttctgtttgttatgctagttatctccatttgcccccaaaacaatgtatctagaaatacagtgatacaagaacaatttatttcttcaacaagaagaatgatctactgtttgtatcaactgtttaccgtctataatcacttaattttccatctatgtttctcatgcaaattaaagttaatttccaacagtttatttctgggccagacctctctcctgtatttcagattcatatgtccaaatacctatttaacatctccaattaaatatttaatggatagcttatatttaatataaccacaactgtcaacattttcacctgtatcatccaccattttactaagataattccatttttgcagttgttcagtctaataaatttagagtcatgcataattcttcttaagcattcaataatcaatcaatctatgggggaatcttgttaatgcaaaactatgtacaatctattttttgtccctctacatctccatctacccccatgtttcaaactaccatcatctcttacttagataatgtcatatttttcaactttcacactggcccacctcaatcgattatcaacaaagaaaccaaagtgctgatgatattattcaatcggtactccctacttactttccatctcactcaaagtaaaatccaagattcctggaaaaactcataagttcttctccacaatctgacatagcgcatgtctcatttcctctctgccatcactcttgagatttttccttcacttggtccactgaagcctcagccttgcttttcaaattttccagacttgctaccctgtactcgtttcctatgagtgcaatgttctttctgatatccacatgtctcaccaattttccttgtagtactctctacttactttccatctcactcaaagtaaaatccaagaatcttacgatgactcataagttcctctccacaatctgacatagcccatgtctcatttgctctctgctatcactggagatttttccttcatttggtccactgaagcctcagccttggttttcaaattttccagacttgcttccctgtactcatttcctatgagtgcaatgtcctttctgaaagccacatgtctcaccaatttaccttgttcatcattttgttcaaatgttttctcaaattgttgccttccttaatcatattactagaaatattccaagcactccctgtttttcttccctgcttcattttcctccttagaatcatctaatatcctgtatatttttactaaaacatagtttattgtttctctcacccaccagaatataaattctatgagactagaaatttttaactatcatgcttacctctaatgccagaaccgagatcagtgcctggcactgaaacaaagagagattattctaattatttttcttttaaaattcttctgttgattactagaactgcaaaactcatctcaataaaaagtctatggcagttaaaattatattcatattgctttttcttcttagtcacttacagtgatttctaatataacaaaatcattttaaatgtgtattagaatatggatatactttctgtagcagcccgaaaagaaatagaaaaatatcacagtttgaaaccatataggtcgttttggttgttttgtaatttttattcttaaaagacattacattattataaagacattgtaaactttacccataaagcttgcagaatgttgtgcattaattcgtaggatcagaattaacaataaaactcaagcaccatatttgtctagaaaaaccacctctcagctaaccagtgaacatggatataaatagaccctgaaatctgctcttggttaattcactgacttaaagcactgtgacagataaaacaagttaaacataattaagaaggctagcatattatctgggattctagtgcaaaagaaatatgaagataacctcaagaggatgacctaggaggaagacaagactctagccaggattttgagtgcttactttataaagctgtctgtaacatctgtagcagcaatgttcacaatagcaaagacttggaaccaacccaaatgcccatcaatgatagactggataaagaaaatgtggtacacatacaccatggaatactatgctgccataaaaaaggatgagttcctgttctttgcagggacatggatgaaactggaaaccatcattctcagcaaactaacacatgaacagaaaatcaaacaccgcatgttttccctcataagtgggagttgaagaatgagaacacatggacacagagaggggaacatcacacactagggcctgtcagggggtgtgggtctaggggagggatagcatttgcagaaatacctaatgtagacgacaggttgatgggtgcagcaaaccaccatggcacgtgtatatatgtaacaaacctgcacattctccacatgtatcccagaacttaaagtataattttaaaaagccatctttagaagaacttatgaatggtaatattatcagaagataagcctaaaaagcttaaatgtcttaaattcatttttagttgtattgtatgttatatactctggggaaagaaggatggagatcatgtaaaatggactaacgattttccttctctgcctcaaacactttttgtcagcattatcacaataagtatagttagttgtatgttgtgctaaacacattaaagtcttcttattaatacccattttaaccttatgtggtaggttttattgtcagtataaatctaggttaaactttttaaccagagtagatgatggtttcagggccaacactagtctgttgtcctcctaagccctcttgaatattatagtatattcttcccatgggagtccaagaaaagcctggaaaaaacaagggatcaagggaatggaggaagatgttttgtgggaagaagatatatgagttgtacttgagtataaatcatgcatagtggtgtgctatgaagtctctccacacatgaccgagtttacctcatagagccttcaacaaaatttcatatctgattttctttgaagtagtctgagtattaaagaaaagaatggaaatttgatccagggttaattgcagagataaccagagatggctataaaaatactataactatttttaagctagacagctatttgtcttttaatataaactcagtaattgatatgcctaaacattctgtccaatatcagtgaatatttttctgacttatgatttattattttaactgacagataaaattctatacattatatgtcttaaattatatatacatgtggaatgactgaatctagctaatagaaatatgcattacctcacatacttgtcatttatgtggtgagaacacaagtgttttaaatatgtttgccaaatttcagttaaaaaacagaattaaatttaaaatgcctataattcacaatgtggccataaaaattaatcggatcaaatggatcaaagccattcaaatatatccttattaactgttcttgatatggtaaaatgtagctcatattgtttcagaatttgattttttagatgtggttataattctgccatacaaagaaagctgcatggttgagagagatttcaattccaaacttgcagtacaaaaacaacactgccacttaccagccctgccacaacttgcaaatcacttaagctttctgagctccattatattcatctaggaagtaggatcaatgcacaaaatattttcagtgaatgcagagtaggagatgacaaaaagagccatgctctaattccactccacatgaacacttaagatatttctctccagaaatcacctgtagacaatagaaaaataaattcatacccacttagttaactgtgtgagaatgtaaatttaaagcatttttgactagggaaactttatcataataaaatgctttaatttccctgcgcatgaaatatttcccccaaggaatgtatctattaatggcatgctatgattaattaattggttctgggaactattataccatattagtcactttcacattagtgttcccaagagtggtgaataaataagacagtcactgcacttctacatgtccattttctgccaagacgttttgctgatgtgcagtttctgtgcagtttcccacagtgtacttctcggctgacttagttcaagctttgttagtttaatgcttagaaaagcctcatgttcttgcagaaaatcttttgctctcattacttttttgtgatattatggacaacaatttccctagggagcatggcaattgatcccagcaggattatttacggtgacatggtggcactgttgccaatgggggcattgtcaaagggtaggctccttcaatgtcaattttaacccagcagcaaattctgcagtactaaataattctgtctattttctttctagtcaggtaactgctgtcaaattaaagaggtcttcaaaactcacagcacagttttgctttttcattactacatctgcaatttgattggtgttatatattttcttgcatgaatgaacatcaattaaaggagatgaacatttataggaaatttattcaactagagagggttgcaatttttacatgtcaaccatctgaattcatattgcagtgatatttttggaaaacaagaacttgtagattaaataagttttattagtatttcaaataaaataaaataattttcttaaaatattaaagcaaaatcactgatatatgcctattaaaatattaaattaagtaaatatggtattactactaaaataacttacatttctgacacgtcacttacattttaattcagccttcctaataatccaactatataccacatattgttatgatgaggtaactaatcctcagagatacagataaccttttcgaattagtgtatatattaagtttatgatggaagtttttgacactacatttaacattttttttctatgctacgttggtcctttcccttcaaaagctcttgaagaacattgaaagaaggcaacggccttcatctgcatttcaaccatcaaagcaaccatcacccttgttcacatacctatcgtgagacaaaaagaaatacttacattaatttctaacatcatctcacagagttaatattttatttgtgaacattttacatccactgtcagcatttttcaagaacacaatatattggtaactaaagtcaccatgttgtaccatagatctcttaaaattttattcctcctatctaactgtagttttctatcctttgatgaacatctttcaaatctcatttccaaccactccaacctctggtaattacccttctactgtctacttatataagttaaactcttttagattccacatatgacagagtttatgtggtatttgtcttcctgtggctggatttttgacttaacgtaatgtcttccaagttcacacttgtcacaaatgccagaatttccttcttttctgtggttgaatagtattccattgtgtatatatgtcatgttttctttatccattaacctgttcatggacacaggttgactccagatcttggctactgtgaatagtgctacaataaacatgggagtgtggatatctcttcaatacactggttttgtactctctctctctctctctctctctctctc

SEQ ID NO: 447 - DNA, 8098 bp, Homo Sapiens
agacttttgagatggacttttgaaagagtgtttgagggaactgttaatgctggctgtactgacctgcagaagatggtgcaactgggtctgaaaggtggacactgctgcctccggaccgctgtcaaagcaagaatatcaccgtgaagcaggctgaaagaaatgctctgaagggaaagctaagacattttgatgaggactatgtttctttctgctataaggaaaagccgtggaaacacacccggattgaaatgcccctggcccgcctgacccgaccctaggagaagcagccgagttacccgacatcgtggtcagcaggagctgggtcggtggctggatgctgcagcagcagggactcagcgcctgggagggctcctggggcagggagagaagcagagatgcaacatttttaaaatttcacaaagcatccggctgcacccaggtccctggaacaggagacaaacagaattaatgttttataccttcgggtataggtttgagttttttccccctcatgccaagtatttaaaacctctagaaacccatgatttgacaatcaatgattgcgcgatactttcaatttgaatattcaaaggcttaacaaaatggactatcttctgcagaaatcctgcacacaggcaccccacagagagtccagagaaacagggagtgagacccctttgggtcctggcccttgcttttattatagtttgagcattttgtcctccttcccacagatagagcagatgtcctcaaagatgctctgtatttcagccttcagggcagctaagaagccatgagtgacttaggctgccctggccatgaacaccggagccagactggctggccagactgattcccgcatcccccatctgtgttttgaggggaaatctcaggttttgaggaatgaacatggcagctagtgggtgtggcacagcaagaagtcgctctgggcccaggtggcaggccagcggcctagcagaggccttcgctctgcacctcctatttttctggctccgcctggctaccagcgggcttccctccccctttcatcccgctcttcctgggcccgacactggggtttctgctcagaatgactgcccattaagaccctttcctcctccccacagagctggggatgccaggagcctcatcctctggagactttctgactctgggtttcaccaccgcactgcgaagtgccctctttgctttttcgccttctagagccacccctgcctttttgctgtaggagcacatgttaggaaacaatgacaagtttggctcctgctcattttaactgaaaggatgtggacttaggttcaagccttctcccattggggtgagaagggggagggacttgggatcaggcttcccccttggtccaggcccaagcccctcactaatgacttgggattctactgggtcatcttctgtgagtacttactgtgcctcttccatgtgatttggaaggtgaggagacaggaatggtccacagagggagagagtgccaggccaagtcctctcatagccacccgccccctccacagaaggggacagcaagagaagagagaggcatggtgaggttccttttgcaaataaccaagatatttccaggattcaagaccagtccatggttttaggcctctgctgtttattctctgagttctcagaaatgcaaaaagtgtagtttagccccagaggcctcaagaaaaagattggggtgcccccaaatgtgtcaaatacagagggaaacacacagagcttagggaaagggcaactgagaatgacaagactgataggaattgcttggcagctgaagccacatctctgggggagaggagcaggcctgggaacacctgaggtggcacctggcagtggagggcaggatggatgtattgaaatctgacagcttctggaacttctttctacaaatgcccctgagcctgtgtcctaggtttccctgatggaccagacctgaggaggggaaggacaatgggggtggagatggcacctcccctccctgcatgccttcttcctcgctgtgcctaggccttgccccctctgaaggaacagtgaaccaagcagcttggaatctagggatggtctcttgtcctcatagcgtcttccattacttcttttcttcgctgctctcctcctttttgttatactcttattttttgatttgcttttaaaaaccttctttgttgcatttttgtttatttctttctgtgtttctttgtctctcttcctgtcattgctttcttccatttcttatctgtactactggttttctccctggcttcacgtgtctctgtgttcccctatgctggggtgtcctcccagtgctttcaggcttcatctccttcctaacctctcctttctattttttttttttttttttttgagatggagtcttgctcagtcgcccaggctggagtgctaacctctcctttcatgtggagatggacagggatggcaggagcactgagtgctcttgacaacaccattgaagatgatgctgacgatcagctaccctgtggagaaggcaggccaggctgggtgagaggggagctccttggaagtcagggggtctgtaaggacagcaaggatctctttgtcccaacctccagcagcctttatgggtgcttctgtgttggccttgtttctgggatggccatctcagtgctgttgctggctagcgatttcagaaaactagatttttctaggcctgagccctgttttgagaaagaagcttccctctggtttgtagctcaacattaatgagttttggttcctgttgtttctataattacaaaaccccagcacaggtatttaagagccaaaggccatgcttgtggaagtaagggaggatctttctaaatggatcctgcaaatcctccttacagatctgagtggatgatcaggcccagagcaaccctgagaccccaggtacccacagcattggctgttcttcataggagactcagagaagacttcataggagactcattattgtttactggacatcaggtgctatattgtatagcattcacattccacaggtgaggaaacaggctcagaggaataagtggcatgccaagatcactgagtatatcagtagcagaattaggattcagactttgttaggcctaactccaaagccctggctttttttttttttgagatggaatcttactctgtcaccgggctggagtgcagtggcatgatctcagctcactgcaatctctgcctcctgggttcaagtgattcccctgccttagcctcctgagtagctgggactacaggcatgcaccaccacgcccagctaatttttgtgtttttagtagagaggaggtttcaccgtgttggccaggatggtctcaatctcttgaccttgtgatctgcctgcctcggcctcccaaagtactgggattataggcatgagccaccatgcccggcctttgctcttaactactgatgttgtcttcctgatcttttctacaagaagcttttaaactttttggactttaacctacaataagaaatccattttacatgttcacatgtatctataacaacatttatatttctaaaacaaacttttcatgaaacaagatatacctacatatgtcaggcactctgatattttctattctagtccaccttttccatttcattctatttatgggaaatatatgttggttgggagtcactgagttaatttaatgacccactaataggctgtgagtggcattggaaaaatacctgcttgtaagatatgcgaacacacgtttcaaggttgtttgtgcatgtggaaatattttggggtgctatctgttttaccatcagtttgtacaaggacactaagacagtgtagcctgctgacttgagaatgttctgtaaggactggaaacactagaatcttgaagaaacgcctggctagaggtgagggtaagctgttaattacactgattacagtttgtgcctctcagactgagaactcttttcttcttgctgggggcattgctatctctaggatgtttgccctgaagtcctgatagtctctttggggttttaataaatggctgaaaaaattgttgtggggtttcaacaggcgttcataggcacccttgcttggcaatataacatggcttttgatgtttgggtgttggaagggatctttgaagtgctgagagggactcagtctttttccaaaatctctgcttgtgtctgtccagcctctggctccactgcttggctgagatcctggcccatagtagaatctgtgtagaggaaacgagagctcactatttgtgaggcagcctgttccactattggactgctttaaatgtagtgatcagtgattatgctataatccaatcatgtattaattgggcaccaactatgcactaggcatggtatcaagtaccaggagtacaaaaataagtaaaccttgatttctgctatcaattactctcttctcctacttctgtactactgcttttctattgtgagtttgtttagttcattaattggtttattcattcattcaacaatcatatactgattagctactctgaccaggtccagtactaactctgaagaagttatgcccatcccatcttcaccccaagccttctccttttgagactcctcatccagtttctttagttcttcatatatcactgtttttcagatctctggctatccttgccattgacctcagaaatcctgtatttgaccttaaccttcttatacccagtccatacccaaagtgatggaaatggaatagatttctttttaaagttttaaacgaatattttgactgaaaaattttggcagtcttgtatgcaaatgacactgcagagcattgttttctcccccccacgtaggagattttattcaactaaggcacaggcatattaaaagactttcagtataaggaaaaggggtagtttattccctccaaatttgactacagctcgaaattgtctttattaatgcaaagttcttttgtcaccttgactttgggacactgttaccaaacctcgtgggaaatatcaagttccagaagattgaatacatgcaggaaacaaatgttttttgggccctagagtgaacatttggtccatatgaaaatgaccaggaagacaattaggtgaaggttttttaatgatttgtgctacgtcagtctcttcccataagacatattcaaagttttaacttttccttaagaggcttccatggggagcaagcatttgataattcatcctttaagaaaaacaccaccgtacactgcttgaagagttcctcttctattacttaaaacgtttttattgtgcaacatttaaggcatacaaaaacatataaagaataccatgatgaaaatctatgactgtattaccaagcttaagaaataaaacagttgagtgatctctcatttatgactaaattaacttattaaaaccattaaaacttttggattattcctgttaagatattttcttttttttattattatgctttaagttctagggtacatgtgcacaatgtgcaggtttgttacatatgtatacatgcaccatgttggtgtgctgcacccattaactcgtcatttacattaggtatatatcctaatgctatccctcccccctccacccaccccatgacaggtcccggtgtgtgatgttccccactctgtgtccaagtgttctcattgttcaattcccacctatgagtgagaacatgcggtgtttggttttttgtccttgcaatagtttgctgagaaagatggtgtccagcttcatccatgtccctgcaaaggacatgaactcatccttttttatggctgcatagtattccatggtgtatatgtgccacattttcttaatccagtctatcattattggacatttgggttggttccaagtctttgctattgtgaatagtgcctcaataaacatatatgtgcatgtgtctttatagcagcatgatttataatccttgggtatatacccagtaatgggatggctgggtcaaatggtgtttctagttctagatccctgaggaatcgccacactgtcttccacaatggttgaactagtttacagtcccactaacagtgtaaaagtgttcttatttctccacatcctctccagcacctgttgtttcctgactttttaatgattgccattctaactggtgtgagatggtatcttattgtggttttgatttgcttttctctgatggccagtgatgatgagcattttttcatgtgtctgttggctgcataaatgtcttctttcgagaagtgtctgttcatatcctttgcccacttgttgatggggttgttttgtttttttttcttgtaaatttgtttgagttctttgtagattctggatattatccctttgtcagatgagtagattgcaaaaatgttctcccattctgtaggttacctgttcactctgatggtagtttcttttgctgtgtagaagctctttagtttaattagatcccatttgtcaattttggcttttgttgccattgcttttggtgttttagacatgaagtccttgcccatgcttattcctgttaagatattttcttagggggaagtttagcaggtatatctatcaattttcctaatccaaaagagctaattcctagatactgtatgtttggtccacatttcattcctcttggaacttctaacattttttactgttcttttttttaattgtactaacaatgacattgcatattacaaatgcacgtatgttatttatcagagattataattagaggatactttttttttcttttttgagacagggtctcattctgtctcccaggctggagtgcagtggtgcaatgatggttcactgcagccttgacctcctgggcttgagcaatccttccgcttcggcctcccaaagtgctgggattacaggcggcgtgaactgccacacctggtcagaggatacttccatatcaaaaatcaaatataatataatgccatcatttgcaaataactatagaatattttaatgtttatttagcttgacctttggggattcttgttcctgatttatcatacttgttttagtcacaccagagataatgatcaaacattaaataacttttatttataagatttcttagcaacagatcatagtacatgtacatactaaatgaatatatcaacatttttctgtgctatttcaaaggttcagtaattttatttcataaaggtatctaaaaagactaaaccagtcatcttaaatatattaccactaaagcccaatatccacctactgtctgaatttggagagagtatggctaatgttagatactaaacatggtgagaatcctctcagatactggtttcagagagctgtcacccatagaaccaagggctaaaaagttactcatctttatggtataattttacttcaatctaacaaaaatttactgagcatctacagtgttctgggcctcgagccaggtgctgggacacagaggtgagccactcatgagtcctccccatgagtctctttagctggagaaccactttgtctagagtgtgtgattttgcacttaacctctctagagtctatggtgtgtgagatgaacagtgtaatattgttttgcatagagaggatactgtagacagaacccagtgatggagccttaagtaaagagtataattttggtgtgtggttggtagaatcactataatgtaatgtgacttaaaccttagacatcaatcattattttggtactttaaatataactgatgttttattccttgtgactacactatttagatatttacattaaatatcgaaaaactgatcacaaagatactataatacttttatacatgtgtgtacgtatgtatatatgtatgtatgtatgtcaatgtatgttttactattggcattagtaattattttccctttatgcaatttcttttagagtgcttctgtcttctcctcctacccaatagtaccatgaaattgtattattaactgagctatagcaagtcataatgatcatttgaaatcatttattaaataaatgaggtaaagatgta

SEQ ID NO: 448 - DNA, 1453 bp, Homo Sapiens
gacgactgccgttcagcacctgcgtaagcacctctcggccaggactggcaacactccagaaatgatggagacaggatacatcaacctgtatcactgaagatgatgtggagcagagcctttgtggtcctaagaaacatgtataagataaaaacttttgtggtttttcaatcatttgaggttttaggattgttcattgtatcaacacaacttgcctattctgactgctaaggttgttcactgggttattcataaaggcaaaatgaggttgtgagccacagaaagagaggacaggatggttccatggtgtccccagcttattttttattgtttcctgtttattgatctcatccattggagaactccatgaaagcacatatctatgccacactcaccactgtattatagaactcaaatgtcggttgcatgaataaaatatgtaacaggaaggccactatacctggccctgaccaattacaaatttagtttttcatgaggttttttaaagggcatccagcacaccacagaaccctgtgcacaacaaactacccccaaagttagcggcttaaaacactttctcccaattctgaattccgctgggtcgttctgcttagtgtagtatctactaagtctgggacatcccagataatttcttcatgcatgtctggtgctcagttggcatgtctgaaaaagctgggtttggccagacatctttctgtccacctagtttctccagcagagtaaccagacctctctacacagtagcttagggtgccaagagcaaatgttccaagagggcaagccctgatgtgcaaatccttaagcctctgcttgacaaatgtcctctgggccaaatcacatcggcccagagtcagtgtgggagaggactaactacacaagagtgcaaataccaggtatggttcatgggggcccccagtgttaacagtctacccaatctggtgatcataaggcagacaactgaagtcatgatgcttcgttttacaaataaaaaagcaaaggctcagaaatgaaatcacttgcccaggataacacatgttgtaaatggaaaacaaatatttgtttactggtaataagtcaaaggctagttaagcctttcactatatctcattgcccctaatctttaaactccactttccttttccttattcttagccaactgtgaatatctgtgttcaagaagttaacaatgtagataatccaaaatgaagtgtgttttgtagcattatctgagcagtagatattagatgactaatgtagtatgctctggaaactcgtaacagttcaaaggaaataaagccattttataatgaaaccactttaaaaatcctccactgttttcatcttcacgagaatgacaaagcaccaacttaaagtaaaccaactctttccccttctctgagcttgctgtatttcctaagaaggaaggaaaaagtca

SEQ ID NO: 449 - DNA, 2074 bp, Homo Sapiens
atatatgtaacgtttcccccccatcgattgctttgcatcgcttgtccctcaaactattttataagcatccgatgttttggctgcagggacgatttccagattagtctcgattacatttatttctaaaggatctcggtgtgttctgagcacacgcctgagagcggagccgggtagagctgagcagagcgcggcgagctaagttttctcacgggctcctgtccccctgaagcccccttggcgcctgccctgagcgttcgcaggcaaccgaggcagcgttcttcgggatgtgccaagcgccgcccgcccgctcgctcctccagctcggccccttcccctgcaacagaccacacggttcaagacgacgatgtgacagagagaaaacaagccgctctcttgtctgtgacccgcgaggcgaccgcggcgagcgggcaccagctccccactccgattaggcaattagctgattgctgcctgcccgcagcccgagcgagcggtgcgcggggatctcgctgcctgcccacctctcctgcaaacagaggcacgttctccgactttgatagctccctgggttcctgtgaaaaacaaccacagcgtttccagagtgtgtttctcaaataccagcgtcaggggatcgcagaattacagcagcaaatgttacgaggttgacactgctgttcaggtgaaggagagttcagagtctcagagagcagcagcagcttgtgcttctgggaaaatggaaggatgactcccaggcagccgatcctgccactccgtaaaatggaagaaccttggctccccgtgtgaattctctttgtgatttggaagacaaatacctctgctgagttgtctatgaacagatgctaagataagagtcgatggtgccgtgaaccaaggtactgacatagcagctggagagaagtgaatggatttcaatgatgtaagggagatgaactgacaacaaaataattgttgataagatctggagattgagagaagaatgacagaatgactgtaggatcttgatttgcgccaagtgaatggatgctgctcacttagaagaagatttttgttttggaaaaattctttttagatgaagcagtagagacggagtttcaccatgttagccaggatggtcttgatctcctgacctcgtgatccacctgccttggcctcccaaagtgctgggattacaggcgtgagccaccgcccccagctggatggtatcccctcaagcattactggccttgttccactatgtcaaatgtatgcagcagagaaaggggatacaccagcagctggagtggctgagcggaaggaaggacactagaacatattaatcccattttaagcaacaggcactgtgttaagtgatttcagatacaataccacatttaatcctcataacaagcttgcaaggagaacattgtcacgactgtattcatacatgaagaaactgaggctcggagacattaagatttgagccaggatctgtgttcttccaaagcccatgggtcagaaatgccagctgattctggttccagctagaactaccagacatcttaggccaggtctcaggaatccttgaggcaaaaatctgcataacattgaggccaaagatgagcctaatggagttggacctacccatttagtggtagacttctttattggcaaaatattctgtcaagatctcccctgatggacaagtcaaaattctttccaacataacaaagacctattgtcatcatgggaatgctgcgatcttgctctttcagctcaaaaatctactttctggaaccaggtcatggacttgcaggactttccatctacaattttgtttagggaattgagatcagatgaacagggccgaggaagctgtaggcagacagaattagtgataattctttcccacaatactgcactccattcttctaacatacctcaagtgcatgccctcggccaaaacagatctggcaagaggaagattaacaatgatgacaaaaatagttcctgacttgataaaacaaatatcaactgggacaagaacaagaactgcccataaaccaaccttgggatc

SEQ ID NO: 450 - DNA, 962 bp, Homo Sapiens
atggtaaaggtccaagtcaccagatttgtccacatagagcacctggactctagggcggctttaaaacttcaacaaagagtcatcatcaatgactccttcattgtataaacaacatggtgtacatattccagtatgatttaatacatggcaatttcagtggcactgttgaggctgagaacaagaagcttgtccacaatgggaaggccatctctattttccagaagccatatgctgcctacatcaaatgggttgatgctgtgctgaatatgttgtggagtccattggtcctggggctcacttaaatggtggagccaaaggggtcatcacatctgtcccttctactgatgccctcacatttttgatattcccaacttcaacacagtttccctcccagactccaagaaccatgagaagtatgacagctccctcaagattgtcagcaatgcctcaagtatcaccaattgccttcgccctctgataagtcatccaggataactttggcatcatgaagggagcaaagttcttatgatcactgataccagaagactggtaatggtccatctgaggaactggcatgacagggtggggctgcccagcacatcatctctgtgtctcctgaatctgccaggattgtgagcaaggttacgccagctgaatgggaagttctccaacttggctttctgtgtccgtgtcccaactgtgttggttgtggacctagcctgccatctggagaaagctccaattgtgatggcatcaagaaaatagtacagcaggtatcagagggcctgtaaggagcatccagggctacactgagaaccagattgtctcctttgacgttaacagtggtgcctactatttatcttttcatgctggggctgaattgttctcaaggaccactttatccagctcatttcctggtataataatgaatttgattacagcaagagtggcaaaccttatag

SEQ ID NO: 451 - DNA, 3968 bp, Homo Sapiens
tcacccacttaaatgctggcagtaactggacctcctgctcagctgggtgggtgcattgactaacagaaggggattgtctgggctcctccaggagcagaggggagaggggtctatccaggctgcctgctttgagcaactgcctaactccttcctcagtccctcggccccactcacctccagactgcagtctcctttttcattttaaagacaaaacttcccatcgacaaacagcatgtttatttgcagcttttacagctagcaaatcctttggtaccagggagcgcaggacccagtgggggaagagttcaggcttgggctgaatgcccaggactcagctttgcaaccagccaagagcctggaggcccaactccctgaaagggccttttctgggttgctctgatctgcctggtacccataactgtctgtgttttatattatgggcagacaaacactcagatgacgcatggcagcccaagttatgcttgtttgaaaatgcgtggcatttcataatcctgccggaacacactcttcttgctgcattaggatccaactggaaaacataaagatgaattgctgtaggctggaaaatcaattaggaaaaagaggtaaaacatctggtgttactcttagaatatgaaaattcattttgcacatttaaaataaatgtgttgagttgatttaattgcctgttgaactgtttcgtggaaaatactgggaagttgcattgatcctgggcattttgcagtaaggggcattgtcttgagttctcctttaatcttaatctttaatcaatctggattgtatttctaaggtctttttcacgtgagtttcagtagacttggaacttcagttttcaaagtcaagtgtgtattagaattacacggagggctggttaaaacacagatggctgggcctaaccccacagtttctgatccagtaggtctgggctagggcttaagaatttgaatttgtagcaaggttctaagtgatgacaagctgctggttgggaccacactttgagaactactggcttcgaataagggagagtccttgtcagtgtacagagtagggaggtggtttcctatgaaaatagattaaattccacagacttatggtgctatgccctgcagtcttgacttccttacacaacggagtacatagcttccagagagctttccttctaagataagccacacataactcctatcttctcttccctacattcttctgcaaaaatgggtttaatgcccttctagagattcatttctttctttcctttttaaggctggcagtaactggacctcctgctcagctgggtgggtgcattgactaacagaaggggattgtctgggctcctccaggagcagaggggagaggggtctatccaggctgcctgctttgagcaactgcctaactccttcctcagtccctcggccccactcacctccagactgcagtctcctttttcattttaaagacaaaacttcccatcgacaaacagcatgtttatttgcagcttttacagctagcaaatcctttggtaccagggagcgcaggacccagtgggggaagagttcaggcttgggctgaatgcccaggactcagctttgcaaccagccaagagcctggaggcccaactccctgaaagggccttttctgggttgctctgatctgcctggtacccataactgtctgtgttttatattatgggcagacaaacactcagatgacgcatggcagcccaagttatgcttgtttgaaaatgcgtggcatttcataatcctgccggaacacactcttcttgctgcattaggatccaactggaaaacataaagatgaattgctgtaggctggaaaatcaattaggaaaaagaggtaaaacatctggtgttactcttagaatatgaaaattcattttgcacatttaaaataaatgtgttgagttgatttaattgcctgttgaactgtttcgtggaaaatactgggaagttgcattgatcctgggcattttgcagtaaggggcattgtcttgagttctcctttaatcttaatctttaatcaatctggattgtatttctaaggtctttttcacgtgagtttcagtagacttggaacttcagttttcaaagtcaagtgtgtattagaattacacggagggctggttaaaacacagatggctgggcctaaccccacagtttctgatccagtaggtctgggctagggcttaagaatttgaatttgtagcaaggttctaagtgatgacaagctgctggttgggaccacactttgagaactactggcttcgaataagggagagtccttgtcagtgtacagagtagggaggtggtttcctatgaaaatagattaaattccacagacttatggtgctatgccctgcagtcttgacttccttacacaacggagtacatagcttccagagagctttccttctaagataagccacacataactcctatcttctcttccctacattcttctgcaaaaatgggtttaatgcccttctagagattcatttctttctttcctttttaagagacagggtcttgctctgtcgcccaggctggagtgcagtggtgccatcatagctcactgaagcctcaacctcctgggctcaagcaatcctcccacctcagtctcctgagtaggtgggactacaggtgtgcccagctaacttttaaatttttttttgtagagacaaagtcttgctattttgcccaggatggtctcgaactccagggctcaagcagtcctgttatatcctcctccgaaagtgttgggattacaggtatgagccaccaggccccaacctatttctgccattcctgaattcagaatgcaacagcactctaatttaatcagcgttggcacctactttgtgaactctgatgaggtgggaatacaaaagcaataaaacacagtcctccccctccaggagctcattcacagcctggtggccccctggcagttgcaagaaggcatccaccaagaccacaattatagcatgatgtaatggaggcattaggcaagggcacgacaggagcctagggcacaggtacctatttttgcccgggaagatggggaaggtgtcatggaggaggaatcatttgagctaaatcttaagcaggagtgggtgatgtgtaggtggaaaaaatcttgggggtggggtggggagggagataattgggccattggcacatcgaggatacatacagcttctttatgttactgtagggcctcgcctctgggaataaagctgtcttgggtgagaactactttctacttttagtccctctagcgtatatttcttcagtcaagaagagtggtattacctagccaagtaaaacacagcctctcctcttcgctccctgttcacaaaacaaggagcatctatctggcaggccaggagagggggttggtgatgaagatttcattgtttcctctgtgccttccagggatgtgattcagacacaggactagctttgtgatccctgtgctccggagaaacctccaccctggcctcaaggaggctgtgaaaccaaaagggaccttgggtgccagcttgctgggtccttacttacttggtccatcttctggctggaaggagcacctgggctctcagagtgccccccgactctcagcagctccttttctggcccaagaggtaagagtctggaggaccccagttcagtttcttcctgtttattcttttatcgttgactataagattgtgaacctagcacaatgctaagagcttgagatacagcagctaaacagacagccactatccttacccttttggagtttttagcatagtggtgtgcctaaacaagtcataatcatgatgatgatgagagggtattacacagggcatgactaccagaaggtgggctcattggaagccattttagaagcagctgaccacagtctctctggggcgggcaccatta

SEQ ID NO: 452 - DNA, 1380 bp, Homo Sapiens
ttcaaattcagagaatccttctggatttttggacttttttctccctcaacgtggattaaatgttggacttttctcactcaacttggattgaatgttgtcatagagatctaacagcaagtgaactaatgctgattcaaagacaccaagagagggggcgaaatggaaggtgtgaaatcacagaaaccaagggaatgaaaaactgcaaataaataagccatcacttgatatcctgctacatctccaggaataaaaagctggaaataaataagccagccaagaagattgatacatgactggagcctgaatggtagaactttttcagaagtgaggagtctgttggcccagaagatctgcggtaagatctgcctcaacataccttactcatttttttcaaagagactctagagtctaaaatgaacaaccaatcaattctacaaacattgcatcatgaggagttgctgcacctcttctccaggatttgcaaaacgtgtagtccaaatcgagttcggctagaactggtctgtcatcaagatatggctcatgaaagagattggtgtttaggaggctgggaaaaggaaatattttgagagacttcatgtgctccgcacatggaggtggcttccttttgcctcaggtgaagggagcttcaacaagatcactcagagtttgatcaatgatcttagaatttgcagaacatagggactgccatttgactcaccctttagaagtcaggaggaaaggttacgtggctggcacttctcatgtctgggaaggaacaactgtgaagtgctgacctagacgaatgttgcacttccgctgatgagtaggcaatggcgaatgttttccagggtccaaatgtggacccggcaacagagaggctgtctgtaatcactttataagagacactaacaacaatgaccactgggactaaagagagcacaacggaagtagttctgccagaagggctgaggagagggctgagcaaccaccctcaggggaggcagacccacatcaaagacatctcagcagtccctttcccatgaaagaaagagctagaaattgtccatttgacacacacacaaaccagatcccagattgcaattgattcagataatgaaaagcttgttcttttcacttgctgttctagcctaaccatgtaggtgtcagaagcagttgtaggctaggagagaagtcggagcaatacagaagccagttctgcctttgcctcaagatccactgtccactcagaggcaggctggcacatgggggatgagaacattccaagaaagatgtgaatctggaattttcatttatgcagtagatggggatttactactgaaaggaacatgttttggcaactaatagtgaccaaaagaattt

SEQ ID NO: 453 - DNA, 2042 bp, Homo Sapiens
tctcccacctgtgttaagacagttaaatatttcttgatgttagcttgaggaccaagtgagccatcttgccagttaagcaagtcttatttcagaggaccaaatggttaaaagaggagaatttgtacatttgttgagcttccccatctgaagcttgggttccgtactatcctattactatccatcttcatactgaatgaaacaaactgaaagggaattcataatcttttttcttaactgaacaggaaaacttatgaaaatcaacaataaatctgaattttaattttcattcaacagctgaaaaaccatgtctgttgaccacattggactattgcctagttaaaatccataaaattctctataaaccaatgaaaagaaagtagtctggcaataatttccaactttttaaatcctaatttttagttacaaagaaaaaggatagaacgaggcttttcaaggaattcttgctcatcccttcaataatttggtaggcaacacagtcctagaattcagcttcctttttggttttattactattaaatagatactttcatataaatggaaacatttttcctcaaaacatcaattcaaaacatactccttatattaatggctatggcaccacatttttggtaaattccctatgtgtaactttttcctgttggtatgtgatttttttcatttaatatgactatctgctggtgttgggggcaataggtttgtgaatattctgtggatatgtccatgcataggtgtatatatatacctatatttttccagctaatacctcaaatgtgtgattgtttaatatataccacactatgtttgcacagagcagggcttctattagcagtggatatttttatttcttttttttttttttttttttttgttttgagacggagtctctctctgttgcccaggctggagtgcagtggcgcgatctccgctcactgcaagctctgcctcccgggttcacgccattctcctacctcagcctcccgagtagctgggactacaggcgcccgccactacgcctggctaattttttgtattttttgtagagacagggtttcaccgtgttagccaggatggtctcgatctcctgacctcgtgatccacccgcctcggcctcccaaagtgctggaattacaggcatgagccaccacgcccagtggatatttttatttctaactttgaaaatcagtccacacaatttcattggtgtgaattctttctgttgctctttttcatattttaatgcagagattcctcttacaaggcccatgcttcaaacacaattatatctttctatatccagccagctggaaatatataggggtaagaagtatttcttgaaaagtccttgtttagtaagttagtaacaactgggatgactagttgccaagatgtcttgtaactgcctagcagatgacacctgccgtggcaagtctcattcacttcagtacaagactctgtacatttcaatctgatattctattttgccatttaagtacgccattaaaatcatagagattttcagtgacattggagtactgtaaatattagtttcaaaaagaattattttgaataggatgattaaaccaataagaagaaagaaacacacagaaatgatattttgcagtttatctgtattaagaaatgcttcttgccaatttctggttttggtttttggattgctacataagactttctttccatttactttatgtgtttttaaaagctgcaggtgatttttaaggtttgatggaattataatgggagccttgtataagttaaatgaaactggtaaaggagagcttactttgtctataatgctttcaggattataacttagatttaaaaatgaaatgtctgacttgtaaaatatttaatgttatatcagacttcaataaaattttctgcgagaactcaaagtaaatgcattagatttttaatgaatgttctgaatgaaatatgaatttttgtctttcagtctctgtagtttatctcaatatattaataaaaaggtctgttctcactgt

SEQ ID NO: 454 - DNA, 1588 bp, Homo Sapiens
tgtatgtctgtagtcctgactacttgggagactgaggtgggaggattgattgaaccctggaggttgaggctgcaatgagccattattgtaccttgcactccagcctaggtgacagaaggagaccctgtctcaaaaaaaaaaaaaaaaaaaaattcagtctcttctttttgacctccttaatcacttcagagaaattgatgcagcttttatgacttacctacccatcccctatttaaacttgcagaaagttagagtggaggcataaaaaaataagaaaatattttggagtagctaggtacctggaaaaaatcaatgagttacttagtctaatttttaggtgaccagagcctagaatggtaatagaataattttctgcagaaaggacatttaaaaataatctgtttttgaatgccagacaggaattattttgtagcaatcagttttcaactgttgttttcaaagctcctttaccaggggaagctgtctgatcatctcccatctctagccagtttcaccctacatcatgagctgtctttgcctttccgtacaccattacatgtaactcttgccctaagttgttccatgcatgtaaacaactttttcctcctgcttttcacacctcaactcaatcttcaagttttgatttattttcacttgattcctttatttagtctcccattgggttataatctcatcaagagaagagagttagtactacttactattagttcaaaaataattcctattccctttaagttttagacttttcagagcactttcatttttgtcagagcattataacattcatgtgttagtttttagagagctcactatcctcattttccaatgaggtcactgaggcagaggcagccacacttctccaaggttacatgtaatccaaaactaaatgcctagactctgggcccatgattttttttttttttttctaaatgaaagtcttcgcccattggccaggtgcagtggctcatgcctgtaatcctagtactttgggaggctgaggcaggcagatcacttgaggtcaggagtttgagaccaccctggccaacatggtgaaaccccgtctaaaaatacaaaaattaggcgggtgtggtggcgcacttgtaatcccagctactcaggaggctgaggcaggagaatcgcttgaacccaggaagcagagattgcagtgatccgagatcgcgccactgcactccagcctgggtgacagagcaaggctccatcttaaaaaaaaaaaaaaaaagcaagtctttgtccacatagtattctatatcctgaagatgataggtaatgtctagctttaatgaactcagaaagcatttgtaaatgatattgcaatattttaaaagactgttgatataggactgtaaaaataggggaataagaaaggaggccaggtgcggtggctcacgcctgtaatcccagcactttgggatgctgaggtggacagatcacctgaggtcaggagttcgagaccagcctggacaacatgatgaaaccctgtctctactaaaaatataaaaaaagtggtggggtgtggtggcgcatgcctgtagtcccagttacttgg

SEQ ID NO: 455 - DNA, 6275 bp, Homo Sapiens
agaggctgcgggccctgagccgctcggcgcccgcgccggctccccaccgcggcgctgccccgcccccaccccgtcgcccgtgcaggctccgagtgaatgaacttgattccagggattttgaagaaggcggttcgccttgcaccctttctgcaccccccgcccacatacacacaccgccccccaaatccagttttctgcttggggtggatggggacgagggggaagcaaaggcctcccagacaatggagggaggaaaagtgagcgcctggggctccgagtctacctagctgggggatccggggggcgctggggctaccgggtcctcgcgggcccatccccagggcggggccgccccgcttccacgggtactgctggggcgtttcgaggctcgcccccgattccccggtcctctttccaccgcttcccagctcgtgatctgtcccctcaactttagcccctctcactccctctggtttctgtccaccgtcccctcttccctcccccagcggacctggaggaaccagtgactttttccttcaccaagtgggagttatccacatcaagcatttcacaacgacacatcaagaaaagtaggcaggttcaagtcaaccatgaaatggtcactttttaaccccgtcctgtcctcattagggaaatgctcaaacacagtccgttttcaaagagcgctcttaatgaggcgagcttgccaagtttaccagctgcagcccccgtaaacccagagcccaaagaagaaaggcgctggggggtggggagttcgggaggccggggacgggggctgctgggactaggaagacaggtaaagtcggggagatcgcgcggacccctgcgagttaaccctttcggccacacgccctgggagcggcctccctgcggtccccgcccctgccccggcaaatcctggagtcagcgttctgacaacgttaatttcctttgtgcgggtcatttcttctttttgaaaagctgggataaagttggcagtctttatggatgaaagaaatgaggtgacagggttaatccaagtaaatactcatttctctcagaaattttaggcaacctcatcttagattaaacacacacagacacacacacacagagaaaccaccagcacgaaagcatcactttgtattgcacattacactgcatcccctttctcaccctcaccagattctgaggggagggggtggggaagctctactgataataccagctttaactactgcagtttccctttgaacaaatattcaatttaactggagttaatttaccataaaagacattccccttggcaggaatgcactaatatccttgaacacacctctttgaatgcctggactctcatagaagccattatttcggggtctctttaaaaatcgagcgcccatctctccttctctccctccctcccttcttccctccctcctcaccacaccacccccagtgaaatcctggcacccagagagcactcctttcagcctgagagcccagaaccagccgttgtcccctggcaaaaagaggcccagggctgagccctgggcaagtgtctcccgacatcgctacccctcctccctttattagtttccctttcccaacagaaaccatttccttctgccaccaaaactaggttgcatccaaaagtttttcacaagcttaaaaaagaaaaacgaaaaattgacaagtattacacagaagagcccacaaaagcttcagcaacaccaagggcgaagaagcagcgtcagatccagaaaaaggaaaatgagataggagtatggtgaggcgaggaaaaccaaaaaggaatgaagagtgagcaacagagacttcctgaaaaagaaggtttatgggggtgctcagtttctatggctttgactgtcttctcaggccttgcagccatgtggagaatggctgacaccccccaaaacacttcttcttgtccagccaatgccaaggtcattgcaggccttccctggaagaactctagggagttgtttggaaagagggactggtggatttcggtgcatgggatgcctggcttctcttaacacaacacttgtccaccacctttggtttgaaaatctcaatcttttaaatcccaggtagaaggaggaactgagaaagtgcctgcattgtattcactttccattttttctagcacgtctgtgtcgtggtattaagagtggaaatatctctgaaaagcttctgatagtatcaaaatgggccaaacacttcttaaactttggtacttaccaatcctaaactcttcatctctccctcccacactgagagggttaaaagcactggtgtgacaggccactttcattcaccccaaaacctggctgaggaggcagaaagaagtgaatgattctctcagcaacaggaaactctgttatttcagtattcttaaagatctcctccctagatctccttgctgccttataagggaaaaaaaaaagtttcctttctaactaacagaaagtttattgatttctaaatagaatgccagtgcttcagctcactggatttttcaaaacccagttgtatatttgaaataagcaacgctaccacatttgagcctttcactacggatctccagagaggagcttgacatctcaagtatctaatattgtttttcttttaaccttttccttcctaaagaaattgcagcgacaggttgcaaatcctgggcagtttcatgaaagatttcttggaacttaacaaagctgtcatttccaatacactcgatgcctttttttttttttttttttttttttggctcttgcatgtggtttgcaagaaggttcaactattctacacaccctggctgcatcaccaatatcaatatttaaaaactaaatgcaaaagagacagatgacctcctgaccccagaaagcaggcctgcaaaactgcaagtatctactgcaccatgccctgggatctttcctttttccaaatgaaccacaaaaatcatacatgtgtagtctggaaaacacaaatttatatccacaaggaggaacaccaaaaatccactcataaatgcatatataaacaatcaagaagtattgaaagtgcctgtacttgatgagaattgcaaaatcaattttaccagctcaggtaatcaaattacccagctcttaaactactactgagtactactactactgtctactactcttaaacaaaaaacaaaatcatacccagcccttaacgtactactgtcaaattagggtagtaattttttccccaccagagaattcacaactggttagtttccccacccccattgctagccctttgcactgaaatgaataaataaccttggacctttttctcctcctctgggagctatttggtgtcccctgaggacaaaagtaaatgagaaaaatgacgctgttaataatgtcactgccgaaatgcctctactccactgtttaaaaaaaaaaaaaaagcatcccactaagtgtgtctacatttctagcatatttacaagttataatacagttctgatctcaacaccaactgagccagattcctccactaaggttatccggttttcacttctcaacagagatgaggccagtgcatcaacagagattcccaacactgtaagacacttgcttcacagattacaaagtcagcagttgccctgtaacttttgcatgatgtattttaaactttgaaaatagaggtaatagttgcctcacttatccacaatgttacaaaggttccatatactctctcacacagtgtctcttgtctgctgatattgagagagttgcagttattgctctttttcaaaatagctgacctataaagtaaaactatatgaccattttatttctacaggtaaactggcttctattacccatatacacatgccttgtaacataggaaaacagatgggtttttaagacaggtatagaaagctctgtccaaaatggctaagtagtctttacattctgtattaagtataaaaagtgcatggcagagcaactcaaactttctgcacccctttctctcatttcttctttgaaaactgcataacaatgcataacaacaaaatttcaaagtcaaagcaatgcataacaacagaattgtgcattttaattttcaaattaaaatttaagaaacaattttgtaattacaaagaaaaaacacaaacaattgggcctaaacaaaatatatgttcagtaaactttatctctgagtgtatctgaaattttaactacacaagccaataaatttcaaagcagtaatattatcaaattgtgtaatgtcaaaaactccaaaaacaaagttacagatgttcatgacatcacattcactcaaaattatgctgctgttcagtctgaccatattaaaattaaagggatgcctatgtctgctaaagaataaaaatttattttggacctcaaacaatgaaaccgtcaccatttcttgtatggaacactcagctaatcaatttcctattaaaatagctttcaacaatacttggctttaaaattcatcagggccagtaaaaacgttttcccagtgcacaagaatgcagtcccaaccaccgatgataattactgttctaataattttattgccaaagtactttttcctgtgttcctcatcacttaggcaggaatctgtagtatattgcgtcagtgagttggagtgcttgacctttgcccacatatgatttaatagggacttttcagcgctagagctttctccatctctcataccattaaatgaaaacatcaaacctcaaatgtaaaactggaaaccacaacgttttgtgtttcacaaactctttgcagtttttacttaggatgcttaaaggtcagtttctttgcctcacaatgcttttcttcatattgtaaatacactggaaagtcacactaattctgattttgattaaatcttgaactcctcagtcatatacacacatacaccctgcttatttacacgtgcattcttttctaaccacataagcatgcgtgtgttactttctggacttattccattttagggctgatttaaatgtctgttcaagtgtgggatcaaaagttaactttttcccgcctattggaagttaaagttacaaggatggtgctataagatccgttcaaagaaagtcagagttaatcttgtgtattttggcgccttttccctgccagctactgtacttggggggtgggggaaaaatacttagagatcttgtctgtcctgtctcaagttcagtggcagttcttccaacccgagcagaagatggccatgttcacagccctaataataattctgatcacgccacttcagcatcttgtgtcaaagtcgaaactggcttccccgcccccttcaatctgaaagctgccaagtcctcacacacttcacattcaaccacaacttaatggatgggatattgtgcattaaaatgtgtctcagacgtattggggaaaagaagacaaggagaacgagagatagagacacacataggaagaggaaaaaaatcggcagcaaaaatagcggggttggggggaaactattaacaggagtggaaagaaatccatcaaaatcggttttaaaaagttggtggggggtgcggaagaaaggctaacaataggatgccacaaattcagggatgaggggatgggggttaggactaaactttagaatgaatactgactttaaacattccaacacaccaatcagagttaaatagtacttctttcacttaaaaatgtatttttaaatgagaatatctgtgaattaaaatggagaaaagaatgcttcaagaggagagaatggcctacaaggtagaactaaagtatcatttgaacagtaatttttttccaccactgaggggagaggggcataaagcagagagttaaagcagaacaaaatgctagattctgcaccgtttggaccacaatgttactcactgattcccgtcataagagtgtgtcacatgtactaaagttgccaacgctaaataataatgcatatttgcaaattagttctgcaaatgcagcactatagcccacaacctgtaaaacaaaaatgacatttaggaaaggggtaaaacagccactttgcaatccacaaacaggaaaagaaaaactgtgccagggataggagggggtgcaaagaacgaataaaagaagcaaacaaaacccatcagttcaaagccacataccatcgcactgtattgcattaaataaaagagatcttgagtctgtaacagaaccctgggccgctgacttgacgtgtctcag

SEQ ID NO: 456 - DNA, 1601 bp, Homo Sapiens
tgcccctttcattttgggcctctgacaatgcttcagaagttgtagtccaagcacacacaaatagtgccaggagtcgagtttccaataacttctggctaaaagcctcagagtcagtcagcctttcccagtttctcatgcaaaacgtttaaaattaacaaaagccacctcaaactacaattttcagaatctgggaactcttatatccaagagcaagatggatacacttggattgaaaaatgcagccaagacccacaaatgccaagtccttgccacagaacaagctgtccagctggaagaaactagaggaatccccaaaccatttgtcctctgactcaagaacaccagaattataccaagacaaaactgtgcagctatcactgttctgcacaggtgtaccgccttgtgaagtgatccgggagacttctgtgttaccaaaccctcctcacatacactcactcccactaaaacatctccttctatacaaattagaaactgaggctcccagaaaacaacttgaaaggaatgtagagaaacttatgattgtcagatttagcaaataaaaatacaaggatgcccagttgaacttgaatttcatacaaactacaagtaatttttaatataagtatgtcccaagtcttaaaagaggactacaaataatttgttagtgtgagtgtgcccgtaagtatttgggacatactcacactaacaaattatttgtcatttatctgagattcaaacttaactgggcattctatacttaacttggcaatttgaggaagggtgaaaaaagagaatacattattacattgcatcatggagatacagaccttaaaaataaaaatgttgtaggctgaggccaagacacagaagcctttgcagcagtgctaattgggcattataagtttatatttattaactcttttcagaaatcataatcttgaaggaaaatatcccaaatcatctcaatacagacaatatccgtacaaggatactacttgacatattcaatcaaaacaatatgaattcttacaaactaagaattggactagaatttagaatgtatgctcattggccttttagctatttatagctggagtcccacagataccaaatgtcatgaatggaaatccacatgcccatcattgacaatctaaacagaacttgtttgattaagaataaaggaggaggaaaacaacaaaggaaactatatttcagaatatgggaacgtgattactatcccaagaatataaaaaagtatttttatactatctgacataaccaaaagaatatgaattacatgaaacaagagccagaaggtacaaggatgaattaagaagcttgttaggcgagttaaagacatttcaagaaattgaaaatataggagtattagagtctttattgaaatcagtgaaggaattgacaatgtctatcatcgaattagagtttaaatatcagatgctgtctcagaactcataagaaaaatcaatgataaagagatgatagctctaaaatggtaaaaaaaaaaaaataaagtacacgagttaatttaaaaaggaaaaaaaggtttgcataagatttgccttctgcaacaataaattcca

SEQ ID NO: 457 - DNA, 1933 bp, Homo Sapiens
gtaaaaagcgaggacgtgaccgttttggaagcattgttcttttcactgttagtgaggagcggtcaaggatgcgtattaagaaattactcttagaagaaaggaagcattgagagtaaggaacaaatgccaatgatgacaacccaaacactatgcctcatcggagcacaaagttccaagtgacttcaaagggttttctgtacttggagcagctctatgggacatggaagatgagaaatgaaccgacaccagaggtgcaatgaaaggtaaaactcatagcatcaccacagctcttagggctggtgaattaccagatctccgtcaagtgcagtaaccagttcaagttggaagtgtgtcttttgaatgcagaaaacaaggtcgtggacaaccaggctgggacccagggccagctgaaggtgctgggtgccaacctctggtggccgtacctgatgcacgaacaccccgcctacctgtactcgtgggaggtgtggctgactgcacagaagtcactggggcctttgacttctacacactccctgtggggctccgcactgtggccgtcaccgagagccagttcctcatcagcgggaaacctttctatttccacggcgtcaacaagcatgaggatgcggacatccaagggaagggcttcgactgtccgctgctggtgaaggacttcaacctgctttgctggcttggcgccaacaccttctgccccagccactatccctacacggaggagatgctgcagatatgttaccgagtcagggtctcactctgttgcccaggctggagggcagtggtgcaatcacagctcgttgccatctcgacctcctgggcttaagcgatcctccccactcagcctcccaaatagctgggaccacagacgtgcgctgcctttccagggtaaattttaatatttttttccccacgagtcagagtcttgctctgttgcccaggctggagagcagtgttgcgatcttggctcactgcatcctctacctcctgggttcaaacagttctcctgcctcaccctcccgagtagctgggattacaggctcatgccaccatgcccagatagttttcttctttattttttgttgagatggggtttcaccacggccaggctggtctcgaactcttgacgtcgtgatccacctgcctcggcctcgcaaagtgctcacaggcttgagccaccatgcccagccctaatttttaaatttgttgtagaaactaggtcttgctatgttgcccaggctggtctcaagcgcctggtctcaagcctcccaaagtggtggggttctaggcgtgagccacctcgcctggcacttgcactgttttcctgtgcatgcatctctactcccactgcccaggacctgtggacttagatttgagtcattactgagcacctagcacccagccccgtgcctacttcccacctcgcactacctgtttgcttgatgcattgataaatattccacctgaatccacagcccattcactcctgtgttcaagagctatttcaggaagtgaacctcattttcggcagtgttcagtccagtgacctcagctgtgtgtacctggcagggtggctacgcctctgggggaattggattcagaggtgggggagaaagagtgttgttagagagctcggtctaggactagaggaacgtgcccttatgtaaaacacatctcaagttagggaagaaagcagcggctctgtgctttgtgttttttttttcttttctttctttcttttttgtttgtttgtttgtttgtttgttttgaggcagggtcttgctctgtggcccaggctggagtgcagtagcctgatttcggctcactgcaaccttcacctcccgggttcaagcaattcttgtgcctcagcctcccgagtagctggagttacagatgcgtgccactatgcctggctaat

SEQ ID NO: 458 - DNA, 2109 bp, Homo Sapiens
gctgtgggacttccaggagtccgagtcccatgctctgcctctgaggctggtggctggggtaaagctgggcagggctgagccaggcagggctgtactcaggctccccaatggtaggtacaagcaacggccataacatggatcagaaggcagtgctcaggccactggggcaatgcttcaaggaggagcataacaacttattttgtgccaaagagtcagcatgggaaaagagaagcagtttgtgttccacaacctagcagatggtagtgacacctgcctcactcccacacccttgacccagcaaggctccctcccataacccactcctggcagcaagctgaaacagtaagtcaagacacaagcaatctgtcttcagattacaaaactgtcctatgccacaaaactccctgccagggacaaaaacttggactcccaggccacacccctccgactccagtcctgcatcctgcagtgggactgcccaacgcttatgcccgtgtttcaaacccatgctacactcatctctcagatctggccatggggctcttcctcctcttaagactagattgcaaatctcattcttgagattctctaaaccgatgactaatgcttgttctggatgacagatttccgcacagccccctatgagttaagatcaggaatgatctcctattagcatcaaggtctgggagcatgtgcaaagtacttcctgctgcctcttctcacagtctcttcactgatcccagaattgtatcagttggaagagtcaaggagctcctctgtggcctggattgcctgactcccaagtggaaatgtatactgtgaagatactcttcccctctcaggaacttggaactcacagttttccgtcagacccacagtgtggtctgctgcccaccatatttttcaaagtatccaaagtttgtttcatttttatgttgagcttcctattctttccttgatcacaatgtgaatctctgcacactattttgctatttccaagtgaatgaggttcgctaacaaagcctctatgcctccatcttggagaaaaaaaagctaagtatcgatatattttgttttcatttttatttacttcaaaattttaaatttttactgagacttctattttgacctctcacttatttagaaatgtgtcaattttcagatatttggagctatctcagttatctacatgttactgacttctatttgaacttcattgtagtatgagaacatactttgtattaattctattattttatatttttaagatgtcttttatggcccaaatgtggtcaaccttgaagaacgttccatgtgatcatgaaaaaaatatatatatattctgccattgtggatgtactttgctaaacatgtcaactagataagttagtgatagagatgttcagtttaaatatattttcattttctgcttgttgcatctgtcaattactaatgggtaagtgctgaaatctacaggtataatagtgcctctgttagcctatttctccttcagttttatcaatattactgcatgtattttaatgttctcttgtatgaggcatacacatttaggattgttatgtctttttggaaaattaacccttttatcattagataaagctctgtagccctaataatctctatctttcctgatgtctgctttgtctgaaattaatgtagctcctttgctttcttttgattagcactttgtgtgtttatctttttacttttaacccagatgtatctttatatatttaaaatgggtttcttgtaagtgacatatagctaggtttggttttgttatcctcttcaacaatttctatctttaactggtatatttagaacattaacatctaaagagattattgagtgatatagttggataactatctactatgtttataactgtattctatttcttgtagttttttcctagtttattttttccttccaatttttctgaattctgtgattttaactgaccatgtataatatttaatttatatcatatattagtgtattaattgtacttctttttttaaaaaaaaaaatgatcactgtagaatttaccaaataaaatgtaagttaatctgtctttacctcaaacaa

SEQ ID NO: 459 - DNA, 1691 bp, Homo Sapiens
actatgttgcccaggctggtttcaaactcctgggctcaagtgatcctcccatctcagcttcccaaagttctgggattttaggcatgagccactgcgcccagcccaatattgtattatataagcaaatcttgagatcaactctcacttctttaatataggaacaatgacaatgacagtttcctaactgaatacctgaccacaggggctagactacatgatcgcctaaaatctgttccagctctaagatctggaatttattatctgatccttcacacctgattataaagcttctgcttgaacatgtccatctacttcaaattctattgtttgaaagctttaatcattttttttttttttagctgaaactgtcatccttgaatttctcctcaggacagttctcctattctccaggagaccttcaaagtcccttccaactctgaaattttaagattctatgaaatgtagacgtatggagtgaggtttcaggcagttttgaaaggatcataactgtagtttccatttgcattaagtgtgaattgtactgaagtgggtgttctttggtgtaccccataatatctcaaacattatttggtatacagtacatactcattaagaattatagcctcattagactatgatatagattagtcaatctcaattctgatcatttaaactccattatatgctattaccaaatattaatcttttaaacaacagaaataattcatatatttgtaaaataaaatcaaaaacatagataggaaattgttaaaggtttaaattaaactctaaattccacgagagttgttgggcaagtcttcctttttctatgcacaactccctctggagtttttaaccctgtaccatgaaaattcctgatgagcaaaaacttgaaagcaaggtatgggaaagagttacaaatactctggtccaagctaaaatcacttgtggggatgatgcaacctcaatttaacagaaactacaacatcttccccttagtatgacaataaacttccagagaaaaatgcaagaaacaagaatgcctagagctgagagggagagttgggttaggagtgatggctaaggagtgcatggtttctttttgaggttattaaaatgttctaagagtgactgtggtgatgaatatataactctgaatatcctaatgaatatataactgtgaatttactaaaagtcactgaatttgtacacttcaagtggcaaattatatggtatgtgaattatatctcaaagctgatttaaaaaaaaaaaaaaaaagaaaaagaaagaaagaaagaaagaaaagcaaatatcctttaagaggtacttgaaacttacctccttctccagatccagatccattatctgagaagaaaaacaaagaatgaatatgaacatttttcccggaaatttcatcttatcaaataataaaatttcctatcaaaaataaaactgtgatatccattctcaaagagtccttttctcatatttttgatatcttatttattcttacatacttattttatgctgctcttaaaatataaattgcttagatacataatcatctatatttcatacatctttgtatcccattaaggacatacccagatgctttgcacagagtaaagacaataaatactgtaaagtaaaaggctaaatataaataattaattttaatccactcatttaaa

SEQ ID NO: 460 - DNA, 2669 bp, Homo Sapiens
aaatatttttaaagcgtatgattaatacacttgcctattgctgcgtggactgtgctgggggggtcagggggcagataaatgaaagaggatagctgcacgcggcgttgactggctgattaatcactgcctgttttctataactcatggcagatggcaggagctggctgcaggccctcgttgggaatgaggtgctgcaggcaggatgaacaggggtcgggggagaccctggaaggccccagttgtgtcgtgttttttttcctcggccctacagacctccgtgtccaccccaccccctgcacttcgtggcaattcccaagttcaagagcagtggcgtagcttctgggaagacacaggaaatctcatttctcccttggattttttaggacctagataacgacactgtcaattttgggaatggtcaactttggggtggggagagtcaggtccagtgcaatacttgtatatattttatcttcaattctcccaacaaccccattttctagataggaattgtgaggcttggcaaggcagacacaggtattgttcccagctggtcccacccaaagcctgctcctcgctgtcctcccttttgccctccccaggggagcatcatcagcccaaggcccagaagtgaaggccctggagctggcacagctgccccctccccgggacctcggccctctccatccctgggggccactgcagtcttcccctggtacgggacacattctccccgtcaggcctgcatggctattgcccacctcaccgtgcacattcaatggtgtttttgtctcttgacttgtctttcccaggagatgatggatttcctggaggcaggaagtgtggccaccaccgggagtagctccaggacccggcatgggttaggctctggggtggtgtgacagatgtgtgtccggtcagcctagctgagctgaactgcagcacccagaactcccttccctgcacaggcttgggttatctggggccccaggggaggggcagagggagcagcagtcatgtcttccttttacactcagaaggcgagaggggccagtgcctcccaacacacaggggactcgcaggtgctgctgatctcaggagatggatttggtgtccaggcagctggggcatagctcttccagcccagccagagcctcctgtggccttcttgactcccaggccaggtatatgcttagttcatgaaagtgccggcttcttccacggggtgcccatcctcgaaggtagaggcttagagcaggggacagattgacttggggtctgccacttcccggtgggagttccagctcagcctgtcaggttccgtttgtcctcctaccccacttcatggtcatccccttttccccacgcccgccctgccagctccacgcaccggagaagcagcagttcccttagacggggtggccagtgcccaaggtttcacaaggccaagtccctgtaataggtcgtgtgtgtgtgtgtctgtgtgtgtctgtgtgtgtgtgtctacgtgtttgtgtgtctgcatgtgtctgtgtgtatctgtgtgtgcgtgcgtgtctatgtatctgtgtgtgtctgtgcgtatctgtgtgtgtgtgcgtgtctatatatgtatgtgtgtgtgtctgtgtgtgtgtctgtgggtgtgtctgtgtgtctgtgtgtgtgtctgtgtgtatacgtgtctgtgtctgcgtgtgtctgtgtgtctgtgtgtgtctgcgtgtgtgtctgtgtctgtgtgtctgtgggtgtctgcgtgtgtgtgtctctgtgtgtttgtgtctgtgtgttggtgtccgcgtgtctgtccgtgtagtgcgtgtgtgtgtctgtgtatgtctgtatgtctgtgtatgtttctgtatgttcctgcatgtgtgtgtctctgtgtgtgtgtttgtgtctatgtgtgtgtgtctttgtgtgtctgtgtgtttctgtgtgtgcgtgtgtgtctctgtgtgtttgtgtctgtgtctgtgtgtgtgtgtctgtgtgtgtgtctctgtgtctgtgcgtgtgtgtctgtgtgtctgtgtgtgtgtctgtgtgtgtctctgtgtctgtgtgtctgtgtgtgtgtgtgtgtctgtgtgtgtgtgcgcgtgcatgtcctctcacgtcccaatgttccacttctctgaactctgactggtgcaggtggcagagcctgtaggaacggaatgggaggagatgggaaacccttgtgggatgggaactgtcaggtcgggttctgcagactacgtgggaaagtggaacacagtgatcctggcagagggaacagcatgtgcaaagaccagggggtagtggggcacagtgcctgagcagccgtgggttcctgtcccgcccagaagagaaaaggtctgcagaggaagcagcggctgcctgagtggagcccagcccggcaatgggcagtgggagccaggctgggctttcctgcaggaggcaccacgtggttgctgcagatgagagagggtgatgcccccaggaactccaggctggcaggggttagggacggaattgacgtgggctgtacggcgttggcctagttccttgttggggatacaatcaggcgggagcggcctgtcccttaggatacaatgactgggctatagcagtcgtgctcttgatcaagttaaaaagtggctgctggtatcactggcccc

SEQ ID NO: 461 - DNA, 6804 bp, Homo Sapiens
cggagagagcgcagcgcggggcacagcgggcggtctccgtgccgcgcgcgcgactggaaacggcgtgcagatcctaaaacgagggttccacagagggccacgaggggcaggagagagtccccggagaactctagctccccgacacggctacctcttggcaaacgagcgagaattggggcgcagagccttgggagggccgttccctcggcgggagcggcccgagcacagcctcacagcagatgcgagcgcggcgggcgctttggtgacgaagtagcgggacctgcaggaggcagaggcctggtggggccgtggacgccacgccgagctgcccagacccttccagaagacagtggggactattcaacggtttccagcagaaactaagccaggtgttcgttttacggagattgctcggctgcagggtggaggctggatgagaacaggcgtcctctcaggtaggcgctcgtggtggtaacgctgcccaggaggagggcacgggttccgggaagacttgcgaggttaaaccggcagctccggagaactgagcgcaagaggtcggtgacacagagaggagtccgggaggccgcatgtttcaggctgaagtcacttggcggggacgtttattgagatgcgaaacacaggaagggatagaggctgcgcagagggaaaaggcgatggactcggttttggaaacgctgatgtgaagtccctacgatgaaaaaagaaatcttccgatttctccctttgaagtctttgcttcttccgttgcaaagaacacagcctatgacatcaggttgaaaccaagaatgtagttctctgaaaatactgtgtgtgggggagggagtttatcttgtctcattccttacaaggatactttgctctccgacaccttagctccctgaaagtttcctagatcgtccatcttttcctcattttttcgactgcaagcaatgaactgttaattttttacagtttggttttacagccacacactttattcttctttgtcaagtttaaagtattctagggcttgtgccttcccacataaaatttagaataaacttgtctgtttctacaaaaagccatgttggtatttcgagaggaattgcaatcaacctatggatcaaattgagaattgtatccttattatgttgaatcttccaacccacgaacatgggtggagagagagttagaatgaaggcgaagtttcctacgcacataaagctcagtgagaaagcaattccaagagtaatggaaggaaaacgactctcgggaattcagtttgaacactggcgactgagcccataaacatctttctggaatgaggtttgcagaagaaagcagcggtctaacctgtggtagcctgtgactctgacattaacaccagagcggtgggtctcaaagtgtggttctcagacaagctgtggcagcctcacttgaagacttgttgcagatacaaattcccaggcccacactagaccctctggagcagaagctctggggttgaggcccgcaatctgcgctcccatgccctccaggcgattccagcacaggctgaggtttgagaagggtgctgtgaaaggggcagggaagccccattatataatgtttccagcaaggcagcctcacgttgcttcaccgaagtcactcaaagaagcctctgcccctcctgcttttccaagagtcgtgtcatttcaagacttccgcactggctgtagagagtggagacagccaggctccgagcccgaccccaacggcttccatgtttcctcgatagaatgtctgtgactaccaagaagatacccatatagtgatggtttattttattgaaaaatacactagtaatattgagacaggtatcttttaggccatctggctgataatcaatatagagctactgatgaccatactggctcacatttgccttgtccatcactgttcttggatccctgagaaccacgtactcgataaccttagagaaaagccccggctgtggttttcaacatgctttctcatccattatctcagttcacccttctcgcagatctccagaggaaaagggcagcagcagagcgatctgaggccccccgaaagggacgaagctgcggctctggactccaggcccctgccagaacagctctgcggaacgggagggaggaggaagcctcgagacagacagggcttgactgcaccctgaggcccaggaggcatggggacagagagtggggaaagcagcgatcccgcccccgttctgaagggaagagaataacctctggcaatttttaccttctagaatctggtggaccctggagtcccgcacgtactgctgaacagcgtaatccttcaggtagccgtagcccccgtgcatctgcaaggcctggttgcagatctgcagggagacagggactagacgtcttggactctgggaagactgtggagcaagcagcttcccttcctaccccagcccacgatctggcagcccgccataaacccatgaaagaaccacaaacagccaagctcaaagagggcctccacattctgtatggttagagacaagggaagttcacctactaaacttgtcagttccccccagacaggcgactcaaagccctctgcccctctcccttattacctgccaggcagaagctgcccacagccaccctggctgggatgataaaaagctatggttccccctagtggcaatgcagcctgacaatgtaaacatggcagagtgctaaattggggctgctgtgaaccttccaaaggtggtttctcgcctagaacacaaccaaacaacagtgacataatgaagtgtataatggcatgcagcaggcctaaaagccagcgatgagagctcccacataggccgctcatgagttcatttatatccttaagcttaaggtgatccttgtgggattccaggagggctgggttccaaatctgactcatgtctctcaagacccctgggcctagcagctgttccctgtccatcccaggagagccagaggaatcacttacggcaaagcattcatctgtagcaaagagcttggccatggagcacaaggccactgcatccttcctctcctcctgcagagccactgctgcattgcggaccatcagccgcgcggccaccagccttgttgccatatcagccagtgtgaattgcaagtactgcagcacagggagcagagaaccagacaagactgaggggcttagaccagcacctggtgcaggagcctcggtaagacatctcggaggcgccttttctaagtgatccaaagcttcaaagtctcttgctttttctatagaggaaatttattgcttttaagtgctaagtccacttcactcacccgacactttaatatcgttaaagatatcccaagaaaagatggacagaaataaagcacaagctctggctaggacagtggtgggactgacagaggaatttcctggcttctctcctggaaatgtgggccctagagcaggtcccgggctgcaaatagtgcaaagccatgtggaggcaaggcagaggttacctggttactggccagaggctctccaaactgcttccggacattgaggtggtctcgggtgaggatgacagaggcgtgggcagcccccagggagcaggaagctagaggggaagagcgccgacgttccaaccaagctggaaaacagcagtgcctgtcccggaccgctacctccctgccacacccctgcgtatctcaccaatattgatcctccctccgttcagtcctctcacggcaatgaggaagccctgcccctcgctcccaattctgttggccacagggacagcacagtcttcgaagatcacagctcgtgttggctgggagttccaccccacctggcaaaaatcagggactgcgtggttgcccaacaatccagcaggtagggcggccttccctggggacgggagcctgtgaggtatgggtttcagcacccaagacttagacccacaagaacttaaaatgaggaaaaagaaaaagttcaggtttaaaggcctgtcagcactcagaaagatacctgtttcagctaaacattttctaacttattaagagaatctactaatgtctactctacctgactaacctacaaacacttctcacaacttcttttaggattgtgacaccaactgcccccaatttcagtgcctctaattgaaaaccacaaactatctacaatctcccagttcctctctggctctgaaaatagactgcctttacatcatttccttgctctcttttgttgataggataaactccatttctaagccttttactgaaggtcttcctgcccaggagttagcatgggcttcacacacagtagaagcctaggaaatggttgctgtgttaccaaagagaaggggatgctaaaatgcataatgccttacagttacagaggatcaggaaggatcctgtaggaaaatacagaaacccgaggagctgtgagaaagaggtacacttaggggtcatttcattacctgccttctctcacaaagtccccccataacagtacaaactagagagagatgactgctttgagcatctggtctaaaaaatctgaatgggtcttgagcccttattaccaattacggttacatgatcacaagtctcctgttcatgccctggccatggcggctcttaatcctagaagtatcttacttttcaaattacttacagtacctaagtgtccttcttgggttgctgaaatacccacaatcatctccaatgagttttactttatttttaatcaaagaagcaaaagggaccacacgccttccattactgagacttgtggccaacaccaggtcttctctaagcgtctcttcctggagcaacaaagtgcaccaacgtaagcagctggataaggaacacaggccaaaagcagaggcaggagaggtcagaacactcacaggtggcttgaagaatttactggcaaacattgtcactttccccagaggcctagtgtttaataatgccctgttgtatttcatatgctcctgttgaaaatcctaatagaagcaactgcttcaaaggtaggttagcaagtatgcaaacctgttttctgaaatagagcaggagttgggctggcaggtggcagagtctcataacctgaattgtttcctgtccaacagccactcacctttttctccttcttgccaaagctgaggccaggggtccccttctcaacaactatgcatgagatgcccttggggcctggtcctcctgttcggcacatgaccacatagatgtctgactcaccagcaccactgatgaaggcctgtgggggtaaaaggggtgcaaaaggaccagggaatgcttgagttctcacagcgtctgggaacaccactgggtcctcctgacaataaggtccaatggcacagagactgacaataaggtccaatggcacagagactgacaataaggtccaatggcacagagactgacaataaggtccaatggcacagagactgacaataaggtccaatggcacagagactgacaataaggtccaatggcacagagactgaggtgaggtaaaaggtcgctgcagtgactgcagatcagagaggcagtccaagagagtataaaaaggatagacaaaagtcaacgaaatgatctggaatcagattaggagagatacaaacagtgagaataaagaaagagaaatgggtcagaggttctcttcccaacacataaaaatcctatgggagtattaacccgcggatgtgaaggaaccagaggatgtcaggaggaagctgggaacaatctccaaagtgctctgggaggacgcacgctagtaccttggagccattgaggatgtaatgatctccctgtttcttagcggaggtcagaagagaggcagcatcactcccacttcctgaggagggatcaaaaggcagcagagagaaggtgagaaagtcagtgaggtcgagggagcccagcacaattctatcttctaggaaatcttctctaaacagaccctgctcagagtgtgtcactgcaaaacccaagtggccaaaggaactctctgtacttggtggaaactgctcataccagtcaggccactgcctacctcccaacacaccagataggcttcttggtccttgtgacatcaggtcacaggactctattactcctcaaccaaacagctagataaacagtggctcgacatgtcaagaggctggaaggagtgctcggtaatgccatctgagcaggaagcatctctccctgctatatctcagtgcagtgtggcaaattcacctggttcagtgaggcagtaggaagcaaacttctccatggtacagagcggtgggcaaaatttgtgcctctgttcctcatttccgaagctatcaatcatccaggcacacatgctgataggtacaccaagaagaaaagacaatgacagaaataaagatggaaaagaaaaaaaaatgggggagaaggggaaagagaacaaagggcagggcagtggagtaaagcagaagagtgggaaggggagagtcacaattgggaagactctttaaaggcaaacggtggattaaaacatattcctggaataaggactacccagagataaccaggctgaggtacttctcaccagcacgtttgtactacttctagttaggttacacgagcctctaaaaatcagagttatatgtgctttctattagtagtttctattacttcctcaaatcactggcagttccatctttggattgaggaaaagggtgagaggggccgggtgcggtggctcacatctgtaatcccagcactatgggag

SEQ ID NO: 462 - DNA, 3341 bp, Homo Sapiens
gtccggctgaggcgctctgtcccggctgggtgggtccctgagtgctcatttttcgttttccgtcagaggccgacctttttctctggaacgcacaagccaggtccaaaagttccttcagggcctccaggaaccactaaccaacgtccctgttgacctcagtttctcgcctgtgaaataaattggaactggaagttctggaggctgcctcggctctaaaaaagcccatttctggatgtcggacgtttatcctcagtctcttgcaatttcctttgagaacagccagttaaaaagaagtgagtggcaggtagggcaacttttttcagaaagtcataaatagttcgagtccactgctttcctcatcaataaagaggattcagttcaaccagctttcaatatttgttttttttttccaaaaagatcattactattcatccaaaaaaaaaaaagcttgcctttctttgatttcaacctaatactgtaggctctaactaatccttttcaaggctgaatcacgctactttttgtttcttaaaaagattttggccaaagatgctttgagattcttcttgttttaaacggctcatcagctgatgtctttaaaatgtttaattacataagaccttaaaaaacaaaaaacaaaaaaaaccaaaggccgcacggtggcttaagcctttataatcccagcactttgggaggctgaggtaggacgataatttgagtttaggagtttgagaccagactgggcaataaagcaagacccgcatctcaaaaacaacaacaaaaaacgcttcattctttatactgctgcacagttttatttggtattgttaaattaatagtttattttcctattgatgggcatttattaccaatttttctgctattacaacaaaaaagagctgtagtaaaccttattcaagccttgtttggataggattagtaggctgcatataaaagaaaactgactttttaaggtggtttaaacaagataaaaggttttattgtgattgacttttctttcacagaagcagtgtaaactcgaaactagggctggtatagtggcttctcagccatctggtactcagcctcttcctcatccttctatcatattagcctgtggcttccaccctcaaggtcagaaattccaggatggctcctggagctccagtcatcaagatgacattcaaccagaggaagggagaaggcaggccaaaccaagcacacctttcaagtggagtcaacttcttttaagcagcctacttgaacattgcatacatttctgtttacatctcattggctggaacctagctctccaagggaggctgagaaattgtcttctagctgtatacattgtcatctcaaatgaaattaggattgttataaagggaaaagaataaagtggaggttgagtaggcaactacgcctgctttccttcactcttaggaccagtgcaatttaaattctctcacaccgtaggagtggctgatattctacatattcatgcatgcatctgtatgtaaacacgctaagctatgacctttcctattgacgttgagcagaaacaactcataagaaaaagattttttcttttgtgaaatcataggggaaatgtcatgagctttctccccagagcacattgctccacccagtggcttggagccctatcctagtgcagtcatactaaaaaacatgcacagctgtggctgatcatgtgctctactgggaggggtcaccctggtaattcatattgccagcttcaaagttaaggggcaaacgtgttgggattcttggcccacatatctagttatagagaataagatcattgaaagttttacagaaattgttgggaatgtgtagaaagtttcagggctactgactttcctctaaggaggaaatcaattcggcatataatccactgatatgaaaacatctggatcaattgcattttcaacatttggatatttgaaacttactttagtgtttggaacttgattccattcaacttggggggaattttatttaccaaagacctattgttaaccaagaatcaggtgaggcactgatgcaaaaatgaatataacaatatccttactctggcagagcagataaacaatatgcagtaaatttcatgcagattacaggagatccgggcccaaagggatgatgtgatgatgatgataatctctccaatttaaataagaggaaatcctggttttacaattacacaatttgtctgaggctgcacagctagtgcagcggcaaggcaagaatctaagccgaggtgtactggataacaaggtccagtcttcttggagtccttcttccgccacagcaccatctaggttaatcagtgaggcactcaggatggttaaattgggagccaaatggaaaatgcattgaaaagtctggagcgaggagcactcagatgggacaagagtctgtgccaggtaccaggtggtgcagtgtagactggagaggacagatgtgaaagattgtgtgctcatggcctaagtgaagccacaagtctcttcagtgctctggggttaatactaaccccacctctaagtgattcagtgactgtggatggtaaagttgaatctcagatctaattagtgtcttaacctgagctcatcctggcatgcatcattccacaacagaggagggtgaagcaagactttctagtactatttggaagcaggcgggggtaatattcaaaatgttgaaaaactggagtagcacaattaccagttaatcagaactgaggcagatgagctgatgggtacagtcaccattgtgccaaacattaaccctctaatgactgactcatgggaaggcataggaggagaggcctggggatgggctgagagaggtaatgagtatttaccattttgcacttttgttgctttttaatccaatgtaagaatagacgtactgcatacttcctgggttttaccagcccctaaatttactcacttaaaaaatttaattacatagacacgaatcattcattgtagttgctaaatattggtagcaactaactcgttgccttttgttggaatttcagattttcagtagagaatgtgactggcccagtctgaggcaggtgtccattcctggtcaccaccattatttttgggcagaagagcatactcacagagttaaacataataattaaaattgtgttttcctggctgggcatggtggctcatgcctataatcccagcactttgggaggctgaggcgggcagatcgcctgaggtcaggagtttgagaccagcctggccaagatggtgaaaccccgtctctactaaaaatacaaaaattagctgggtgtggtggca

SEQ ID NO: 463 - DNA, 5191 bp, Homo Sapiens
tgatgacaagatcaaatccgcacatatcaatactaactttgaatgtaaataggaaatgacccaattaaaaggcacagggtgggctgggcatggtggctcacacctgtaatcccagcactttgggaggcccaggtgggcagatcacttgaggccaggagtttgagaccagcctggccaacatggagaaagcccaaatctactaaaaatacaaaaaattagccaggcatggtggcgtgtgcctgtagttccagctactcaggaggttgaggtgggtgaatcacttgaacctgggagccagaggttgcactgaactgagactgtgccactgcactccagcctgggtgacagtgcaagaccctgtttaaaaagaaaaaaaaaatgtcacagaatggcaacctggataaagaagcaagacccaatgacccaatggtatgctgtcttcaagggacccatctcgcatgcagtgacacccataggctcaaaatgaagtgatggagaaaaatctaccaagcaaatggaaaacagaataaaagcaggggttgctattcctaatttcagacaaaacagactttaaaccaacagagatcaaaaaagacaaagaagggcattacataatggcaaagcattcaattcaataagaagacctaactatcctaaatatatatgcattaacacaggagcacctagattaataaagcaagctgttagagacccacaaagagacttagactcccacacaataatagtgagagatctcaacaccccactgacagtattagatcattgaggcagaaaattaacaaagatattcaggacctgaattcaatactggaccaaatggacctagcacaaacatctacagaactctctaccccaaaacaagagaatatacattcttctgattgccacatagcacgtactcttaaattgaccacacaatcagacataaaacaatcctcagcaaattaaaaaaaaaaaacataccaactacactttcaagccatagcacaagaaaaataaaaaatccatactaaaaaaattgctcaaaacgatacgattacattgaaaattaaacacctgttcctgaatgactttggggtaaataatgaaatcaaggcagaaatcaagaagttctttgcaactaatgagaacaaagatccaacataccagaatctctgggacacagctaaggtagtgttcagatggaagtttatagcactaaatggccacatgaaaaagtaagaaggatctcaaattaacaacctaacatcataactagaggaattagagaagcaagggaaaaccaatcctaaagctactagatgacagaaataaccagaatcagtgctgaactgaagggaattaagaaacaaacaaaaaacatataaaacatcaacaaatccaggagttggttctttgaaaaaattaataagatagactgctagctagactaataaaaaaaggagggaaatccaaattaacacaattagaaatggcaaagggggcattaccacttacccccagagaaatacaaagaaaaaaacacacacacacacacacacacaaaacacaaaaaacccagacagtactatgaacacctctatgcagacaaactagaaaatctagaagaaatggataaattcctggacacatacaatctccaaagactgaaccaggaagaaactgaatccctgaacagattagtaatgagttccaaaatttaagcagtaataaaaagcttactaaccaagaaaagcccaggaccagatggattcacagccgaattctaccagatatataaagagctggtaccattcctactgaaactgttccaaaaaaatgagcagggactcttccccaactaattctgaggccagcatcatcctgatacaaaaccaggcagagatgcaacaaaaaaagaaaaccccaggccaatatcccaaatgaatatagaagcaaaaatcctcaagaaaatactaataaactgaatctagcagcacatcaaaaagttaatccaccaagatcaagtagactttatccttgggatgcaaggctggttcaacatacatagatcagtaaatgtgattaatcacataaacagaactaaaaaatttcccaaaaccacataattatctcaataggtgcagaaataaaagagatgtgaataaaattcaacatctcttcctgttaaaaaccctcaataaactaggcattgaaggaatatacttcaaaataacaagagccatctatgacaaacccacagctgacatcatactgaatgggcaaaagctagaagcattcgccttgaaagctggcacaagacaaggatgccctctcttaccactcctattcaacatagtactggaagtcctgtccagagcagtcaggaggaagaaataaaaggcattcagataagaatagaggaggaagtcaaactctccctgtttgcggatgacataattctatatctggaaaaccccagagtctctgcccaaaagctccttgatctgataaacaacttcagcaaagtttcaggatataaaattaatgtatggaaatcagtagcattcctatacaccaacaacatccaaaccaagagccaaatcaggaacacaatcccattcacagttgccacaaaaataattaaaaacctaggcatacagctaaaccagggaggtgaaagatttctacgataagagttacaaaacactgccagaaatcagtgatgacacatacaaatggaaaaacattccatgtttatgggtagaaagaataaatattggctgggcatggtggctcatgcctgtaatcccagcactttgggaggctgaggtgggcggatcacgaggtcagcagattgagaccatcctggctaacatggtgaaaccccttgtctactaaaaatacaaaaaattagctgggcgtggtggcaggcacctgtagtcccagctgcttcggaggctgaggcaggagaatggcatgaacccgggaggcagagcttgcagtgagccgagatcgcgccactgcactccagcctgggcgacagagtgagactccatccaaaaaaaaaaaaaaaaaaaaaaaaaacacagaatcaatatcattaaaatggccatagtgccaaaagcaatttacagattcaacactatttctatcaaagtaccaatgacattcttcacaaaattcaaaaactattttaaaattcatatagaactaaaaaagagccagaatagccaaggcaatcctaagcaaaaagaacaaagctggaagcatcacattacctgacttcaaactatactacaaggctattgtatccaaaacaacatggtactggtataaaaacagacccattgtattagtccattctcacactgctaggaagaaataaccaagactaggtaatttataaaggaaagaggtttaattgactcacagttccacatgactggaaaagcctcaggaaatttacaatcatggtggaaggcaaagagaagcaggcaccttcttcacagggcagcaggacacagtgagtgcaagcaggggaaatgccagccacttataaaaccatcagatctcgtgagactcacccactatcacgagaacagcataggggaaaccacccccatgattcaatcacctccacctggtcctgcccttgacacatggggattatggggattacaattcaagatgagatttgggtggggccacaaaacctaaccatatcacacatagaccaatggaacagaatagagatcccagaaataatggtacacacctacaaccatctgatcattgacaaacctgacaaaaacaatgggggaaaggattccctattcaataaatggtgctggactaactggctagtcatagacagaagattgaaactgggccccttccttacaccacatatgaaatcaacttaagatggattaaagacttaaatgtaaaacctaaaactataaaaactctgggagataacttaggaaatgtcattctggacataggacctggcaaagatttatgatgaagacaccaatagcaattgcaacaaaaacagaaattgacaaatgagacctaattaaactaagagttgttttactgaaaagaaactatcaacagactaaacagacaacctacagaattggagaaaatatgtgcaaactaggcatctgacaaagttgtaatatccataatctgtaaggagcttaaatgaatttacaagaaaaaaaaacaaccccattaaaaagtgggcaaaggacatgaacagacacttttcaaaagaagatatacatgtggttaacaagcatatgaaaaaaatgctcaacagcattaatcattagagaaatgcaaatgaaaaccacaatgagataccatctcacacagcagaatggctattattaaaaagtaaaaaaataacagatgcaggctggctgctgtggctcacgcctgtaatcccagcactttgggaggccaaggcaggcagatcagctgaggttcaggagtttgagaccatcctggccaacgtggtaaaaccccatctctactaaaaatacaaaaattagccaggtgtggtgccaggtgcctgtaatcccagctacttgggaggctgaagcatgagaatcacttgaacctgggaggtggaggttgcagtgagcctagatcatgccattgagctccagcctaggcaacaagagtgaaactctgtctcaaaaacaaaacaaaacaaacaaacaaaaaaacagaggctggagaggttgccaagaaaagggaatgaagggactgcttatacactgttggtgggagtgtaaattagttcagccactgtggaaagcagcatggtgattcctcaaagaacttaaaatagaattaccattcagcccagcaatcccatttttgggtatatacccaaagaaatataaatcattctaccataaggacacatgcacatgtatgttcactgtagcactattcacaatagcaaaggcatggaattaatctcaatgttcatcagtggtagagtggatgaagaaaatgtggtacatatacaccatggaatactatgcagccttaaaaaagaatgaaatcatgttcactgtagcaacatggatagagctggaggtcattaccctaagcaatctaatgtgggaacagaaggccaagtactacatgttttcacttacaagtggga

SEQ ID NO: 464 - DNA, 1951 bp, Homo Sapiens
ttgagagaaggttataggacaccattttaaaaattctaatagatactagtacaagccagttgaaagtaagctattgtgaatgtgaatttccatctttttctttacatgttgattgatggagtttgaagatgaaatcccaaacaaacaaaggagtatcaaaatgttctgattccactatgtcatcatcagatcactggcaaatatccagtcactgttccaaagtactattgagtgccagctgactttatagaatgtgaaaaaataaagcaactcttatagtcaaatgtaatttcttagccaccataagcatgacagaaaactattcttttaatcattgaaaaactcttgatcaatgagccctaaagacattgatccaatccagtgctaaatcctcctacaggaaaatgtgaacatgagatttttccaataagggtccactggaaaaaaaataatagtaatagttcatgaagcgctagtagcagaaagctaacactgtcgagtttttctcaacatacatggtatgtaactctgtctcccctcagtgaacccattcagacatggcctcaacagaaatttgtggaagtatatttccacctaggcatcactgaaaagctagtactcttcattgtctatttcagcgcatcaaagatatattacattatttgacctaagcaattactacatgtttcaggatgttttactgctgatagattatataaagaacaccctgcaattcactaggcagtattggaaaatgcatgggtatccactattctgtgtgtttatagggaaaacaatataagaggtagcaagttcaacttcatattagatatgctggcatctttttaaaaatgtttggaggattcaggctcatgttcataatatatagatactaatatctcaagtgataatgaaacaacatgacttcctacaaatcagcaacatagaaagattaaaagttgtaggaaattggaacttccccaaaattcaaaagtcaaagataaaccagttcctccagtgttcctggcttaatagagtggctttatataacaactgctcaacagaaaaacaaactcaatgcattaaatctcaacaactgcagttttctggctttaccatcttgctgggtatacttctcaaaagacaaagcctaaacttcatctcaaagcaaggtggtctttctgatcacgttgaaatattctatcaaagagcaaaaagcttttgaaggctgcagtaagttttaaaagtaaaagagtgaacaacctggtactatccattattgttttaatgtagggcaagcaggtaactcttgctgctggtgggcatgaagaaaagatcatttttaatcctttgtttcaaagaatgtataagaatgccatttattacaatagccatgataaaaggaaagtggtcctccagtaagaactggtcatctctttgactgaatcattttcaatattcttgaatattgtgtcatgctgaaaatacagatcatgtgggttatccacgctgtggtataaaagcaagaaatctgtaatagagacaggccagctgtagacctaaatcagctgtctctcaatgatattaagcatcttctgtgggatattcgccaggtttaactgaatgggagatggtgggtgaacaagcaccaaataggtgagtctttgactataaccccctctgggctctatggccaagtgtggcagatcccagagtgaacacacaatgataatgttgtagctggggatcatttgccacagcaaacaaccctgtcgtatttgacaatgtttgagataaatttctctccctttattgaaatatgttgagaaagactgaccagtttaaggacacacagaacattgtgtaattcctaaaggttgtatcctttgtactggaaagaaaccctgagctagaatttcaagaaaaagtgaatctagacaaaatgacaaaa

SEQ ID NO: 465 - DNA, 6164 bp, Homo Sapiens
gggttcatggatctgtcctgagaggaggacgaggtgtctccaatgccaagcttcggcagcagaagcagcagccacagcgtacacaaaagcccgaactgttgggaggcggagggtggagggatcctgagagagggactgcggccggatgcccagctgtcggagccccggccagtgtcttctgcagttacattgccttcactggtcatgagaggaggggctgtggtagggccttgaaggacgcctgtggagccagaggccattggattgcaggcagccaagagctacctcgcccctgctatctgctgtggccctcgccgggatgcgatgccctgacatgggttgcctggagctgtgcgcaatgagcaaggggacggctgatggccctcccagatctgcatggcctggaaaccataaaactcttgggaactatcacatcttccccagctacaggaagaatagaagtagtgttggagaagtcaaggggtcagaagtactgggggcgttcccaggttcagccagaaacagttcacaagagagttttaaataaagtgtacctgtggctaaatatgacctactgattactcttaattttttcgccacatttattgagctatgatttacatattgaaaagtatgtatgtttagggtgtacaatagagtgcttttagatgtgtatatatctttaaattacctcaagctggttaacatatctatccccacacatagttaccttatacgtttctgtgtatgtggtgagggcacctgagatctacttttgtaaacaaatttcaagtacaggttattattagctatagtcaccattctgcacataaggtccccagaagttttttattatgtaactgaaggtatgcacccttcgatgggtatctccccacttttccccaattcttagcccatggtaactaccattctagtctctgtttcattttttctttctttctttctttttctttctttctttaagatttcacattaaaatgagatcaagcagtatttgtctttctgtatttcgcttatttcacttagcataatgtcttcaaggttcatcaacattgttgtaaatgaaacaatttcattctttattaaagctgaaattatctctttctcacagtttacctatttatttgtatcagaggagtgcaggtacgcttggtgatactaattttatgtctattggctgtatactccaaattgggattaaagatacttctagtttaaaaattttaaggaacctccctactggttttcttgtttgtttttttgtgttgtttttttgtttataatggctgcaccagtgagcatgttcagcaatggtggacaaatattctcctttctctgcaccctaacactttttgtattttgaatttttgataatagctgtgctaacaccacgatgaggtgatatctcattgtgattttgattttcattactttgataattagcaatgttgagaatctttttatatacctgctggccacttgtatgtctttgggaaaacatctattcagatattttgcccagtttatcaggaaattggtttttgttttgttctgctgtgagtttttttttccacattgactagtgttatgtatattttggatagcaacatcttatcctacatatggtttacaaatattttcttccatcccatatattgtctttatattttgttgattgttttctttattgtggagaaagtttttactttgatatagctccacttttttatttttgcattagttgcttgtgttctttctgtcaaagccaaaacatcgttgccaccaccagtgtcaaggagctttctccctgtttttttttttagaggattcattatttcagttctaatgtttatgtctttattttaaactcatttttgtgataagagaaggctttacttttttgtgtgtgcatagctagttttttctaacaccatttcttgatgtgtctatcttttcctaatttggtgggatcagtttactgtatatgtgtgaatttatttctgggtcctctattctattccatttgtttctatgtaggtactatactttcttgatgagtatagctttgtaatattgtttgaaatcaagaagtttgaggctttcagcctttttattcttctcaatatttggctatttggggtcttttgtggctccatactaattttacaaatgtttgttttacatttattttaatggcattaaaattttgatagaaatttatttaactgtagataactttatgtagtatagatattttaacaatgttaatttttagaatcgatgaacacaggatatattttccattttgtattcttcaattttttatcatcattttatagttttcagtatgcagatctttactattcttcgttaaactcattctatttaatgacttaagtatttaattctatttgataatattgtaaatggaattgttttctttattcctttctcagatactttgttgttactgtacaaaaatgcaactgattttcatgttaatattgtatcctgtaagtttattgaatttgtttttcagctataacatggttttgttgttgtttttggcaaagtggtgggtatttttaaggctagttatactttacatggatagttgctactatcattctttaaaatatgaccacaagggtttctgttgtcatgacttcagtggaattcagatcttcccatttgaaataattttgtcggttttgcctgggccccgggatgggtgggggggccaccccacgggagtcgggagattcaggataaggagggagaagcggtcagggaggaggctgagcgcggaaagcagacaggctccagggacagcagggaggagagggattcctgtcagtgacccagtggggagagagaatgggccagaagaggggaaagggtgggagtgggcatcaggactgcttcctgacacgggtggggggcagggaactttgctaaaactgcaggccccagggaacagtgcaggtagggtgggagggagtagagaagaccaggcggaccccaaagtcatttgagaaaggggtatttcccagttccttcacctctgcccagcgttctgtgggcatggaccccagggccagggtaggggaggaggcggctcctggcatgcagggagagctgaggagcgcacacccgctttgtagggcggtgtgatggtggaagcaagtgaaggctgaggataccgttggctcagtggatgggctcggggggcaggggtggggtcgagctcacagggcccagcacccggacctgcaggtggccctggaggaatccacccgcccgtgccttccaagagaccagtgtgcgaggcgccgcggacacgccttttctagctggaacatttgtgaggctggaatttaagctctggcagacaggcggcagaagaaggactggaagaaacccaagtgcaaagtccagcccaaggagaggaagcggaaatgcctggcctggtcaaactgtgctctgactagaagattctgggctggatggtcaccgtcctatagagacgcaggctcagtgggacttcgaggagcaccagggacccagtgcagcaaagcagagcgggcggtgaggacccacagctactgcttccctgcacagttcgccttctccaaggcccagcccccagctgagcccagcagtgagttgcatggagcctcctggaacactgcctcgggtgaccggtggaagaccccacctcccagggagaggaccgtactatgtcctcagacaataaagcagctcctccgaccagaaaaataaataaataaataaaatataaaaatgttgtttgcttttcgaaaataatttgtatcctgtttactggtcaacatactgcccatttctctatatgcctaattagtcaaacttttaaatgaaattatttaacattacgatttttattatgaaacaaaacagtaaattttgtaatggttttaatatcatctaataggattgaaaatatgtcaatttgtcattgccaatgaatatttgtgttatttattttatactgttagatattctgtctacaaatgtctaatggcttagaatcttgcttaacatattgtatgtgctaagtcctaactattccaattcatcaaattatctttttataccattcttaaaaatacaatattattttttatttttattaaagttatttttctaatataaatatttatgaaaattataaagtctattcagtctgccctcttgtcagttgccctcttgtcaaaactgaaaaaaagtcagtttttttctctttattaatacactagagggtataaatgtagcttcattacagggacatgttgcatagggatgaagtgtgggcttctgtgcaacaatcatctgaacggtgctcattttcccagttaggtattttctcattcctaacccctctaccaacctcccatatttgtgagtctccagtgtctatttttccaatctctatgtccaagtgtatgcattattgagctcccacttgtaagtaagaaaatgtagtgctttatgttctgtttctgaattatttcacttacaataatggcctccagttgcattcatgttgctgcaaaagacatgattttattctttatggctgagtagttttccatggaataaatgtatagtacattttctttatccaatcattgactgataaatttaaactgactccatatcgttgctattgtgaatagtgctgcaataaacatatgagtgtgggtatcttctttatgtaatgaattattttccttcgggtagatacccagtagaggaagtgcaggatcaaatggaaattccatttttagtttttctgaaaaatctttatactgtttgccatagaggttgtagaaatttacactccctcgaacaatgaataagtgttctcttttctctgtatccttgccagtatctgtcatttttctgctttttaataattagccattatgaatggtataaaatggtacttcattgcgatttttaattggaatttctctgatcattggcaatgtttaacattttttacatgcttcttggcaatcattgtcttctatttgaaaaatatctgttctcattctttgcctgctttatagtgaggttacttgttttattcttgttgtttgatttccttgtatattgtagacattagttctttgtcacatgtatagttcacaaacatttttctcatttcatgggttgtctgctcacctgctaattaaaagctccttttcaggaactttttagtttaattaagttccatttgtctatttttgttattgctacatctgcttttgagatcttggtcatgaattatttgcccaggccaatgtccagaagcatttatcattgggtttcttctagaatttttatcatttcaggtctaacattttagtcttttaatccatgttgagttgatttttttacatggtgagagtcacgggttccatttcatacttctgcatgtggtaatataatttttcaagcacaacatgttgaatagaatgtcatttttccatgtatgcttttattgattttgtaaatgatcagtacgtggctttatttctaggttctctattctcttacattgatctgggtgtctatttgtatcagtaccatgttgtgttggttattcaagctttctagtataattttaagtcaggtagtgtaatatctccaactttgttctctttgcttaaatgtgctttggctattcagactttgctatggttacaaataaatttaattcttttgctaattctatgaaaaataacattggcattttggtaggaattgcatttaatatgtagatttttggagggcaatatggtcattttaatgataattcttccaatccattagcagggatgtttttctcatttgtttgtattatgtacaatttttttcatcaatgttttgtagttttccttgtagatatctttcacctgtttgattaattgtatttccaggtacttttgtagctattgtaaaaggaattgactttttaatttggttctcagcttgatcattattagtgtataaaaatgctactaatttttctacattgatttttaataatcctgaaacattattaaatttcatttatccaatctaaaaggtttttg

SEQ ID NO: 466 - DNA, 3231 bp, Homo Sapiens
tgaaagtttgactcggtcttttccttccaacagttataaatctgtgaaatgaaagtctttgtttccttaaagggatttcaagaatttaacaaaagggttggggaatggaacctttgctgtcactatgcctgtctctcaattctaccctaaaggtaaactaaatggaatccttttatggtgactaggattaggatgttgattccaaagcctttccctaaaatctattccttgctccctggaaaggataatacaggttctggcccccactgtaggtactgacagcccaaggcagaataggttttgctaggctttagccttttattctttgacataggtcagtcctgcaggcttcttttttctaagtctcctgcctatccaaaaccagaccttttctcccacctccttctgcttcaagcctcttaataatccatatttctattttctagcaatagtaatagtttattatttagtgatgtatacttgcaccccatttactccttttcaatatttcaggatacatctttgtcctgtatttctgtaccagttcacagaatttctacagcaagatccctttaaatgtatggctttccttcataggttgcaaggattactttatacaagtgctactgtaactatatcttttgtggagtacaattggtatgacatgctgtgttcatagatgaaaatgctaagtgaggcactctgaagcaagttaaagttcacagacattcttgcttgcccaccacccccccgaaccccgccatggaatcatcaaataagaaaaataagacagattttcagattggtgatggcaaagtaagacgctggtattttgcactggcgcagtccatttagttgttgaatttgttcagcatacctggatggtgagtgagttagctttatttttcattctcagcagggaaactgatagactaggcagtttggggaattttcccattgtctactgtcatgggtccatagtatttaagtttacagactacaacattgtccacagaagccatatttatccccttggagggaagggaaaggtgtgctaacttagatcataaaaacaactgaattttaaaacaaggcaaatgccacagttcaacttctccataaaaaagttaagttcatctctccattcttttgcatgcctacaatatttccatataacaactgtaaaatactcttgcctgctgcaatccaaatgttatccggatcacagttcttgctgtcatttcacaggcatgcaatgtatctatagataggtcatatcatacctgaggaagatcagagacagcaagggaacattttccccacacttgagatggaaataataacaggtcagtggctaataaaaagaaacatgtatgactttgtaaaaccctaaaagtgatgttttcaagaaatttaggtttcttttttttattttataaaaaaaatgttgacatgcaatttaattctatttcaatttaggtgctgcaacctgtactggatgtttggggatagaaagatgaatgggacatgatttgtgtgctccaatgagctcagtccagtgtaagtgtaaaagttaaagtgccatattgtttattcagagtatatgttatagtttgtgaaccttatatcatttgttaaatgaaaggtttttataaatcaacagtaatattgccatcccatgtaaaaatcctttgatattgccaggaaacaactttaaatcaccagaaagctttaacatcaaataatacttttagaaggaggggaaaagccttccacctcgacatcgagcctatgaagtattccctaaaaaagaggaactaatctgagaaaagtttacacatttttaatactctaagttgtagataatgaaattgatttaaatcaaagttaactagaataggattcatgtgtcatgaattatattgtctattgtctcataagcaacaagtgacacttattatcttggctgacaaaatcagctaccatttaatgaaccaagttaagaataactcaggtgactgataccaaaaataaatctctaatacagctgagaatccagaaacacaaataatatgttgagtaagtaataaaagtgacatttcaaattagtaaggaaaaaatggattattcaacaaatagtatgggatagcataacaatttagaagaaatataaagttagatctttcacaaaaattaattctagctagactagcagttagtcttctactttttggttactcccttttagaaattggaagctatgaagctatataccctgtccatttgaaaatgcacataagcaaagaactttacaaataggttataaagagaagctcaatctcagcaaaataagggaagtgcacattaaaacacaagaaaccatctcagatccaactaatatttagcgtgcatacaaatcaaaagctggaaagggtgtggaaaaacaggaatacattgctagtgagcatacaaattggcacagcctcttttaaagacaattgtgtatcacccattaaattttaaaagtcacataccctgtgacctaacaattccaacttttaatgtcctaaagaaacatacatgtgttcacaagatagcctgtacaatgatgtcaattgcacctttgcttgtacagtagacccccttatctgcattttcactttttgaggtttcagtcatccaaggtcaaccacaatacaaaaatattaaatggaaaattccagaaacgaacataagttttaaacttcaaacctttctgcatagtataataaaaatctctcactatccctctccatcctgcctgggacaggaatcatccctttgtccagtgtatccacaatgtatacactcattatatacccattttataatgcccattagtcatttctattatcagatcataaaaaaacatagtacatagagggtttggtattattcatggtttcaggcattcagtgagggtcttggaaaatatcctccatgatgggggagctactgtaatactatgaaattggaaaaaccaaaatactcatcaagaggatggactatggtacacatgatgaagtattaagtatcaatgaaaaagagagagtcctacatgtccggcatggaaggatctccaggagacaatgttaaaagtttgggggaaaaattgaaagacaatacctgtaatacatatgatactagtgatgttaaatcacatcacacacacacacacacacacacacacac

SEQ ID NO: 467 - DNA, 8083 bp, Homo Sapiens
actcactgggatttctgttccagcagcctctccgttctagttgtgtatccactacacacatttttggttggtgtctacaatgcctcggctccatgctgggcactgaggacactgcaatgcaccagaaatgatccctgccctgcaggagctgcaattgcctcttggtgactgtttctgacacactttatgtggaagttggttcaatcaggaaagagacacctctttggacccccatctctcacccagtccacacttcctggtggtgactggtcggctccctagtttcctggtctggcctgagcagccggatcttctcctacgtacctgcttcatttttcctgctgcctgaagagagcccttgggacccatcctcccccgtcctttatttgtgtagtcttatgaagaatccgcagcgtaagaattactttctaacaatggcatctaagagtggaaagtttaactcatccagcaaaacagaacatggagactgaggacagaaaagagaaagaagcgtagggcaagacccctcctccaaattgcagtcctttaggaatttctggagaggtaacctggggtctccccaagcttcctgcagcccaaccaaccaacccaccaacctggctgatgcatatgtggaatatcggcttcctgttctctgaagggcaaaaaggacactgaagtatagcctacaggctctgcggcccaaagctcattaagaagataatagatttaggccagccgcagtggctcacgcctgtaatcctagcattttaggaggcctaggtgggtggattgcctgagctcaggagttcgagatcagcctgggcaacatggtgaaacctcgtctctactgaaatacaaaaaattagccaggcctgatggtgtacgcctgtagttctagctactcggggggctgaggcaggagaattgcttgaactggggagacggaggtttcagtgagctgagactgcatcactgcactccagcctgggtgacagagcaagactctgtctcaaaaaaaaaaaaaaaaaaaagaagaagaagataatagatttagaagacacacaaataattgtttaaaagaatggccctaatgtgctgcagtctgaggtggaaggttagtaaggtctggacttcctcggaatatgactgagttttcagatcacgtgagacgtcttcatggaagacattgaggtagttaccacatcttctggatgtcccacagccaacagcatatcaatttgggctccttcagacattaaaagcaggaattggattagtgtagctgccggaggtttcccactgtctccactcccagtttccacgtgcatttcctctggtgctcatcaagtgtacagtgctgctgtggtgagaatttgtcaaatgagtctccagtctcagaaggtctatgtaaatggggtttcaagtcatcacagggactgaatttagtctcaagtaccataaagaaaatacttttaaagctcttctaaaaataaagctcctctgaagagatgtttggcctgtggctaatgtgtttggaaacatgttttctgtaaaactcaaccttattcatctacttgcaaatccagaaagacaactttcactacacacatcagggcttgtcccaaattttccctactcacagtggaagatgccggggtgtgaaccattggcttaaggtgcctctgcctccctttccccaaaacagtttaggaagggagggtttgggtctagtgtccagcctgggctcagctttggatgctggcaacctggacctaggcacaccagggaggctgctttctttgcccttgtcttgccacttcccatctcccatgtcataggaggagcttggaaggagctgaaggccgtcaccttcctacaaagcagagagatcctctctccaagaacggcttttgctgccctctgggtcctgctatttccatggctcctgaagaatcagcctctgatatttcaattgccccttcatcagaactgtcaaacctggtgaatctcttctctttttctctggctcactctctctaaaacacgcatcttaaacaagttttaaaatccctgaagaatggcagaaatacaaagaactcaattccaaataatattgtcatgttctgctgcatagttgaggtaatcaccgttaagtaagtgcaggtatgggtgactctctaagacaaggatgaaagtacagtggacaggtgagcccatggcccaggactcaggcactcacagcctcccacgtttcttctctatttcacaattgctgatccaaggcgggaggggtgccattcatgtgtggcattcacatgagagaggtgggcattgtgggtcctcagtgcagggcctgttgtgtcctcaatgaacccaggattgagtcccacagtggacagactttgccaacttttataaatctctctcaagacactctcctccaatattgcaccttgaactgatgtaatttcttgtagcgaaaaaattaaaatctatcctttttgaccttcatatgcaacatgcatatcaagagagttgtcttagcagcagcaattttatattgggagatttgagcatggactggctgttgggagagctttatgaggcattccatgatgtcttggctttaattttgcttttattttgatgtgacaagatgtgttggactgagatgcctttgggctctagccctggaatttacaaaaagagaatactgcagggttatggtgggggtgaggctggaagatgttacccactcacaaagcttcagcacagcaacatatgttagaagaataaactaacattggaacagtaaatacacacatacacacacacacacacacacatacacacacacacacacagagtgggagagagtgagagagagtgcaaagccagtgttaaatcctggacatccctgcagggtcctcatgcctgcctttttctcttagtcttgtgggggtggggaaactctttggtattctcctttctcacttgtaggaatataaggaggaaaggaaccagaagtaaagtgtctgggcctctctcagccatgcttttcatttccacttattatctaaagtaattcattactacttctgtgctctcttttcatcttttccttgagcctcccctgagctcccttgaaggtggcaggtgacaggctggcttgaccagaacaaagacagttatccctggctgccgcctgtttcccaatgggtgcctgccctgtcttgttacacttcctctgtgtgtctaatttacactgcaagccctctgggcagtggctttttttttcttttttaaaaaattatctgctcttctctgcttacgactgaagtttaacttctgcaccccaactcctcctcattcttaagaaaatgccaacagaaaaatattaaaatgattgctgctgtatgtaaagacagaagggtaaaaccgaggcactggaggctttgggtgggtattgatggaggtctgggagcagctggtgattgacagggagaagagctgaattagttaaggaagggtctcctgggttttgctgggagtggtggccagacacagacaaggacaaggaagaaggccaggacctctgattgcttttctcagaacagaaaagatattattatttgaacctagaggctgggcagtttcctgtcatagaaaaactgactggcctcatggccagagaaaggtaccaactactttctttggtatttatggttctcgtatccaacgtaggaagttagggctagacaacatctggaagtatctggtagaagtatctatttatttaaatcatccatccattcatctatccatccattcatccactgatccatccatccacaatgattaactgcagtgaaagagaagacatttttagaagataaatgtggtcaaatgtcctaaagttttattcgcttgcatgcaagtaaccgtgatgtgtctggaggactggagggctggaaatgaaaggagaaaagcaattatctgggcccatggatttgggaagcagatatggggatcctctcactgctgacagagccccagtaaagcatctggaagggttttaaacagaatgagggtgtaacaatgacagacgtattcttcctccttcaaaatccacaacaaaataaacaaccaccaccaaaaaaaaaaaaaaaaaaaaaaaaaaaataggagaggtcaattcaggaaactttcctagaaaagtacatgaggtagaagagaaaggatagggaggagaccaagcattctaggttgcaaggaagacctaggggatgcctgagggtggggatgaagggactgacaaacatgttccatgggccatctatgggtagggcactcggtcgtgagagtagtgatggcacctgaggcagggctacaggaatagatgaggtagggagccctgtcagggtgcagtaagcatcccatggagaaggcacgcactgtgggcctggagcttactggggaggtggaacaagcagggaagcagtccttggtgcaagcaaggatgcacattccacatcaggctgcccgcccacgaggagggcctacacttgtggctctgaatccatgtggaggcggaaacggtctggttaagatagtgacaatgtgctttgtgtttgtgcctgaagggccagggaccacgctgtggcacaatgaaggcattgagagtcagcagtccccaagactaggtgtcctaacaagatgccaagacccagagagacaagagctgagcccttgccatgaaggtgccgagagctgtggtctcagcccttggaaatatcatcaaaagaagctgttccgagcaaaatgcattccatgtgttggccttgcccatgtgtttcttgtcaatgaggccgatcttcctgggttcagaagggtttctgtttgaaattttatgagccttggctgggaagcagaacttatccctgagtttgtgggagttaatggccttttctggcggcacaactctgggggcctcagggaattcccaaatgccaggaaagaagaaacccatagcccgtatttcaactgaaaattatgctttatttataggcagccatggagaaaagactccccagaacacttctccagcgtcacctcagtgtggtgtgtctgggctcacaggcccttccttggggtgacccttacagctcatgccagcactctgtggaaaagatatgcctcactccccagtgccaaataaagacatcagcctacatccagagcagaaacagcatttgttcctgagtcttccatttttgccatttaaatagagaagtcaaactattccttgatacactcttgtccccctaatttacttcaaccaacacgtatggggcacagactgggaactggtcattttattgggcatcattatgagcacaaagggacagatatgagatgggcaatccagaaggtcttggttcaagccatttccttccattgtctatcaagttctgtcaccgggacaaatcatttcccctccctggacctctgcctcctcatttgtcaaatgaggagcttggaccaatgaatatgaattctgaagaaattcagtgtaagaggaagagtcttaaaatactagtcctaaaaggttaattgaaggagattcatggaagtgatgcaaatattggtgttttgtatgagtgacacttaactgcttcttgtctatggcaaatgatattcctggggtagctaagaaagaccctttcgctgcctggcgtggccctctgtgaaccctgctagcctgacatgtcatatcagagctccctgcagaggagttgctgttcacagcaatcatctgggccaggctcttgacctgtacccctgtcagtgctttgctgtcttggcctgacccttggccttagctgttctctgccctttggacttggggttgctattttctcttcccatcttgattctcagttttccctcaaggtcttggctgagacccacccatggactcacctttcttttttcaaactacctcagataggatttgagtgccctgtttgatcccttgtgactcaatttctgttgctggacaaagaaaaaagaaaggcaagggaattggaaactttacagtataatactctgctcagcagtaagtattgcaccagaattttagtcaaaaggagtatgtataaaataaaccatgttagatcgagctaaaatatgactcactgagaattccaactctaggtcttagatttttcctttgaggttacacatgaacaagcctaattccttctcatatgatagatcttcacatatttaagtataatgatcgagcccccagccttcggtgaccaccccctctcctgccaagtcagttcttctctaggcaaaacaagtcaatttctctagcattcctcagatattttggttttgaatccttttgccgacgtgacggctcttcctaatccagttcaactgatttctgttcctcttcctttgaggtgcctgcagcttcatgcaacactctagacaggctccagtcaacccagggaactgaaatcttttgccttaaattgatgcttcccaaagtgtgttccattcatccaagcccctgtgacatgctctggaggtcaagggtaggtggtcacttagtttcacagtcaaatatgtttgggaaatcctgcagactaatatccctcttggagatttcagaatctgtgttagagtactaaaggatctgagtagtcctgtttacctttacttcatctaatttttcccgaattattcgaccactgagccgtttgttaaagtattactcattaacctccctagtgtgccatgaagctttgggtggcactgttcaacttccatttaagccatctgaaatcatttatttttttcctctttccctccctttctccgttcttttcttccttcttctatcacactattattacatattgattttagtgtcaatcaaacctcctacatatttttcaaacctgttgctgataaatcatatgtaaagtccttcacccttcttccctttatttgggcagctgttatttgatattcatcacttatgtattaagcatgcctttatttaagcccttaataaaaatgaaacttcataaatatttgttgaataagtacaggactgaggcctataccctttggacatggtaattcaattagctattaattatcctaatcacactaatattcagcccatgtttctctatgcttgtccgtgaggctatcttgaaatgcttgtcaaatgctttgctgcaatcagattcactatgaagttagatttcataatctaccagtctagagccatcttgttgaagcaggagatgaaattaatatggtaggactttgtacttcaggttcctgcgcaggagtttagaaacacaggtgagccttgatgggagggtaggatttaaaaaatggaggggatcataaaaaggattgtgggctggttggggtaagcatgagtaacggactacaggcaagtgtaaacatgttgggaatggttaggataaatttaacaatatttatccagtgttcactattgtgaggttttatgcagggagctggcagcaagggggttggttgagatggataaatagctaataattaactttataagtaccacttaaaagataaaatgtgatgagtgttacataaaaggaaggagtaaagtaacatagaacatttgttctgcagagtcagggaaggcttcacaatacaggtggcccctgagcagctatgaagattgggcagggctctgccagagaatgatagagggcttcaggattcaaaactttgatgatggaacagatctgtgaatggaggtgtcaatggattaacatgacttccagattcatgacctctttcttggacctgggcaaagccttgtggcattttagatggagctgggtgactggcactatgaccttgggctctgcctgaacctcacgtggatcatctataacataaaggtagtagtatgacagtgggggtgaggattgcataaacagtggaagtaaatctcccacatatcaggggtgcttactgaacctccttcctctcatctctcccagcc

SEQ ID NO: 468 - DNA, 7975 bp, Homo Sapiens
actcactgggatttctgttccagcagcctctccgttctagttgtgtatccactacacacatttttggttggtgtctacaatgcctcggctccatgctgggcactgaggacactgcaatgcaccagaaatgatccctgccctgcaggagctgcaattgcctcttggtgactgtttctgacacactttatgtggaagttggttcaatcaggaaagagacacctctttggacccccatctctcacccagtccacacttcctggtggtgactggtcggctccctagtttcctggtctggcctgagcagccggatcttctcctacgtacctgcttcatttttcctgctgcctgaagagacatccagcaaaacagaacatggagactgaggacagaaaagagaaagaagcgtagggcaagacccctcctccaaattgcagtcctttaggaatttctggagaggtaacctggggtctccccaagcttcctgcagcccaaccaaccaacccaccaacctggctgatgcatatgtggaatatcggcttcctgttctctgaagggcaaaaaggacactgaagtatagcctacaggctctgcggcccaaagctcattaagaagataatagatttaggccagccgcagtggctcacgcctgtaatcctagcattttaggaggcctaggtgggtggattgcctgagctcaggagttcgagatcagcctgggcaacatggtgaaacctcgtctctactgaaatacaaaaaattagccaggcctgatggtgtacgcctgtagttctagctactcggggggctgaggcaggagaattgcttgaactggggagacggaggtttcagtgagctgagactgcatcactgcactccagcctgggtgacagagcaagactctgtctcaaaaaaaaaaaaaaaaaaaagaagaagaagataatagatttagaagacacacaaataattgtttaaaagaatggccctaatgtgctgcagtctgaggtggaaggttagtaaggtctggacttcctcggaatatgactgagttttcagatcacgtgagacgtcttcatggaagacattgaggtagttaccacatcttctggatgtcccacagccaacagcatatcaatttgggctccttcagacattaaaagcaggaattggattagtgtagctgccggaggtttcccactgtctccactcccagtttccacgtgcatttcctctggtgctcatcaagtgtacagtgctgctgtggtgagaatttgtcaaatgagtctccagtctcagaaggtctatgtaaatggggtttcaagtcatcacagggactgaatttagtctcaagtaccataaagaaaatacttttaaagctcttctaaaaataaagctcctctgaagagatgtttggcctgtggctaatgtgtttggaaacatgttttctgtaaaactcaaccttattcatctacttgcaaatccagaaagacaactttcactacacacatcagggcttgtcccaaattttccctactcacagtggaagatgccggggtgtgaaccattggcttaaggtgcctctgcctccctttccccaaaacagtttaggaagggagggtttgggtctagtgtccagcctgggctcagctttggatgctggcaacctggacctaggcacaccagggaggctgctttctttgcccttgtcttgccacttcccatctcccatgtcataggaggagcttggaaggagctgaaggccgtcaccttcctacaaagcagagagatcctctctccaagaacggcttttgctgccctctgggtcctgctatttccatggctcctgaagaatcagcctctgatatttcaattgccccttcatcagaactgtcaaacctggtgaatctcttctctttttctctggctcactctctctaaaacacgcatcttaaacaagttttaaaatccctgaagaatggcagaaatacaaagaactcaattccaaataatattgtcatgttctgctgcatagttgaggtaatcaccgttaagtaagtgcaggtatgggtgactctctaagacaaggatgaaagtacagtggacaggtgagcccatggcccaggactcaggcactcacagcctcccacgtttcttctctatttcacaattgctgatccaaggcgggaggggtgccattcatgtgtggcattcacatgagagaggtgggcattgtgggtcctcagtgcagggcctgttgtgtcctcaatgaacccaggattgagtcccacagtggacagactttgccaacttttataaatctctctcaagacactctcctccaatattgcaccttgaactgatgtaatttcttgtagcgaaaaaattaaaatctatcctttttgaccttcatatgcaacatgcatatcaagagagttgtcttagcagcagcaattttatattgggagatttgagcatggactggctgttgggagagctttatgaggcattccatgatgtcttggctttaattttgcttttattttgatgtgacaagatgtgttggactgagatgcctttgggctctagccctggaatttacaaaaagagaatactgcagggttatggtgggggtgaggctggaagatgttacccactcacaaagcttcagcacagcaacatatgttagaagaataaactaacattggaacagtaaatacacacatacacacacacacacacacacatacacacacacacacacagagtgggagagagtgagagagagtgcaaagccagtgttaaatcctggacatccctgcagggtcctcatgcctgcctttttctcttagtcttgtgggggtggggaaactctttggtattctcctttctcacttgtaggaatataaggaggaaaggaaccagaagtaaagtgtctgggcctctctcagccatgcttttcatttccacttattatctaaagtaattcattactacttctgtgctctcttttcatcttttccttgagcctcccctgagctcccttgaaggtggcaggtgacaggctggcttgaccagaacaaagacagttatccctggctgccgcctgtttcccaatgggtgcctgccctgtcttgttacacttcctctgtgtgtctaatttacactgcaagccctctgggcagtggctttttttttcttttttaaaaaattatctgctcttctctgcttacgactgaagtttaacttctgcaccccaactcctcctcattcttaagaaaatgccaacagaaaaatattaaaatgattgctgctgtatgtaaagacagaagggtaaaaccgaggcactggaggctttgggtgggtattgatggaggtctgggagcagctggtgattgacagggagaagagctgaattagttaaggaagggtctcctgggttttgctgggagtggtggccagacacagacaaggacaaggaagaaggccaggacctctgattgcttttctcagaacagaaaagatattattatttgaacctagaggctgggcagtttcctgtcatagaaaaactgactggcctcatggccagagaaaggtaccaactactttctttggtatttatggttctcgtatccaacgtaggaagttagggctagacaacatctggaagtatctggtagaagtatctatttatttaaatcatccatccattcatctatccatccattcatccactgatccatccatccacaatgattaactgcagtgaaagagaagacatttttagaagataaatgtggtcaaatgtcctaaagttttattcgcttgcatgcaagtaaccgtgatgtgtctggaggactggagggctggaaatgaaaggagaaaagcaattatctgggcccatggatttgggaagcagatatggggatcctctcactgctgacagagccccagtaaagcatctggaagggttttaaacagaatgagggtgtaacaatgacagacgtattcttcctccttcaaaatccacaacaaaataaacaaccaccaccaaaaaaaaaaaaaaaaaaaaaaaaaaaataggagaggtcaattcaggaaactttcctagaaaagtacatgaggtagaagagaaaggatagggaggagaccaagcattctaggttgcaaggaagacctaggggatgcctgagggtggggatgaagggactgacaaacatgttccatgggccatctatgggtagggcactcggtcgtgagagtagtgatggcacctgaggcagggctacaggaatagatgaggtagggagccctgtcagggtgcagtaagcatcccatggagaaggcacgcactgtgggcctggagcttactggggaggtggaacaagcagggaagcagtccttggtgcaagcaaggatgcacattccacatcaggctgcccgcccacgaggagggcctacacttgtggctctgaatccatgtggaggcggaaacggtctggttaagatagtgacaatgtgctttgtgtttgtgcctgaagggccagggaccacgctgtggcacaatgaaggcattgagagtcagcagtccccaagactaggtgtcctaacaagatgccaagacccagagagacaagagctgagcccttgccatgaaggtgccgagagctgtggtctcagcccttggaaatatcatcaaaagaagctgttccgagcaaaatgcattccatgtgttggccttgcccatgtgtttcttgtcaatgaggccgatcttcctgggttcagaagggtttctgtttgaaattttatgagccttggctgggaagcagaacttatccctgagtttgtgggagttaatggccttttctggcggcacaactctgggggcctcagggaattcccaaatgccaggaaagaagaaacccatagcccgtatttcaactgaaaattatgctttatttataggcagccatggagaaaagactccccagaacacttctccagcgtcacctcagtgtggtgtgtctgggctcacaggcccttccttggggtgacccttacagctcatgccagcactctgtggaaaagatatgcctcactccccagtgccaaataaagacatcagcctacatccagagcagaaacagcatttgttcctgagtcttccatttttgccatttaaatagagaagtcaaactattccttgatacactcttgtccccctaatttacttcaaccaacacgtatggggcacagactgggaactggtcattttattgggcatcattatgagcacaaagggacagatatgagatgggcaatccagaaggtcttggttcaagccatttccttccattgtctatcaagttctgtcaccgggacaaatcatttcccctccctggacctctgcctcctcatttgtcaaatgaggagcttggaccaatgaatatgaattctgaagaaattcagtgtaagaggaagagtcttaaaatactagtcctaaaaggttaattgaaggagattcatggaagtgatgcaaatattggtgttttgtatgagtgacacttaactgcttcttgtctatggcaaatgatattcctggggtagctaagaaagaccctttcgctgcctggcgtggccctctgtgaaccctgctagcctgacatgtcatatcagagctccctgcagaggagttgctgttcacagcaatcatctgggccaggctcttgacctgtacccctgtcagtgctttgctgtcttggcctgacccttggccttagctgttctctgccctttggacttggggttgctattttctcttcccatcttgattctcagttttccctcaaggtcttggctgagacccacccatggactcacctttcttttttcaaactacctcagataggatttgagtgccctgtttgatcccttgtgactcaatttctgttgctggacaaagaaaaaagaaaggcaagggaattggaaactttacagtataatactctgctcagcagtaagtattgcaccagaattttagtcaaaaggagtatgtataaaataaaccatgttagatcgagctaaaatatgactcactgagaattccaactctaggtcttagatttttcctttgaggttacacatgaacaagcctaattccttctcatatgatagatcttcacatatttaagtataatgatcgagcccccagccttcggtgaccaccccctctcctgccaagtcagttcttctctaggcaaaacaagtcaatttctctagcattcctcagatattttggttttgaatccttttgccgacgtgacggctcttcctaatccagttcaactgatttctgttcctcttcctttgaggtgcctgcagcttcatgcaacactctagacaggctccagtcaacccagggaactgaaatcttttgccttaaattgatgcttcccaaagtgtgttccattcatccaagcccctgtgacatgctctggaggtcaagggtaggtggtcacttagtttcacagtcaaatatgtttgggaaatcctgcagactaatatccctcttggagatttcagaatctgtgttagagtactaaaggatctgagtagtcctgtttacctttacttcatctaatttttcccgaattattcgaccactgagccgtttgttaaagtattactcattaacctccctagtgtgccatgaagctttgggtggcactgttcaacttccatttaagccatctgaaatcatttatttttttcctctttccctccctttctccgttcttttcttccttcttctatcacactattattacatattgattttagtgtcaatcaaacctcctacatatttttcaaacctgttgctgataaatcatatgtaaagtccttcacccttcttccctttatttgggcagctgttatttgatattcatcacttatgtattaagcatgcctttatttaagcccttaataaaaatgaaacttcataaatatttgttgaataagtacaggactgaggcctataccctttggacatggtaattcaattagctattaattatcctaatcacactaatattcagcccatgtttctctatgcttgtccgtgaggctatcttgaaatgcttgtcaaatgctttgctgcaatcagattcactatgaagttagatttcataatctaccagtctagagccatcttgttgaagcaggagatgaaattaatatggtaggactttgtacttcaggttcctgcgcaggagtttagaaacacaggtgagccttgatgggagggtaggatttaaaaaatggaggggatcataaaaaggattgtgggctggttggggtaagcatgagtaacggactacaggcaagtgtaaacatgttgggaatggttaggataaatttaacaatatttatccagtgttcactattgtgaggttttatgcagggagctggcagcaagggggttggttgagatggataaatagctaataattaactttataagtaccacttaaaagataaaatgtgatgagtgttacataaaaggaaggagtaaagtaacatagaacatttgttctgcagagtcagggaaggcttcacaatacaggtggcccctgagcagctatgaagattgggcagggctctgccagagaatgatagagggcttcaggattcaaaactttgatgatggaacagatctgtgaatggaggtgtcaatggattaacatgacttccagattcatgacctctttcttggacctgggcaaagccttgtggcattttagatggagctgggtgactggcactatgaccttgggctctgcctgaacctcacgtggatcatctataacataaaggtagtagtatgacagtgggggtgaggattgcataaacagtggaagtaaatctcccacatatcaggggtgcttactgaacctccttcctctcatctctcccagcc

SEQ ID NO: 469 - DNA, 10138 bp, Homo Sapiens
ttctgtagctgagctgggtttgggctttactgttaatttagtaagattctgttcaccacagacttcatgtgatttgaaggccaaatcagaactctccttttcttgggctcaggtgcctgtgggctccatcttagctcccctgcctttccttgggtgtcgtctggctcctgacatctgcacctgggggaaccctccaccccctccccctccctgtggtaaacgccccctgctttctggggtgcctctggggcttcgctcggccttggtccctgcccttagactgcagcaggcttcgtgtgcctgcgcccgagaggtggggccctctgcttccctgtctctctgcaggcttcatgcgcctgcccccgagaggtgaggtccactgcttccctgactctctgcaggcttcatgcgcctgcgcctgagaggtggggccctctgcttccctgtctctctgcaggcctcagaagaaggcatggggtgtatgaagggctcgtcccccttcacgtatgtgcattgtagtactactcacaatagcaaagacatgcaatcaacttaaatacccatcaatgagagactggataaagaaaatgtggtacatataaaccatgaaatactatgcagccggaaatcaaatgtttcagaaataattaagcaaatcaaagcatggaactctctaaaatcattattatttataccatattttagtgagagcaggaaatgattgacgattccaaaattacacagaaacttttcttttatataattcttatctcatccttcaaaaatgtctttttgttatgtgatgtgtataacatagtaacagttcttgtacacaacttttaaatacgtgtgcatgctcattgggattcacgttccgaatttcaaaacgtagttcttgtttcaggaagttcagaggttactcttttggaagatccattcttggatgtgctggcaaaagcactgttgtagagatgcttttgggggaggctgcacatcattcatgaataagtcccaaaggcagcatttctaataatgcgttgtctaatatgtattagagctggcttggaggtgtccctggggagcccctctttccttcgcatccatcccggaagctcctcgagaggtgcctctgaaagggatgtggtgccgtcatccctctggagctttgaagccatgcagccggacttcagcaagaatggttgcatggactgttcaaacccgcacctgccggccagcggctgaagagcccgtgttgaccataagggacaggaaagggagcactctctgcacagcctcggggccctgctgtggcccttacctgggagggctggcctggcgcaggcacaggctgctgaggaccagctgctggccggccctgcccgaccaaggccacctgtgttttcattcccaaatttattttctggttatagggacaatgtccctataaccagagtggtattaatgtgtaggtggcacagttgtgtacttatgggtgtggtttggggaactctgtcttaaagagactgccggctccttgaggacaagaacttggagttgcttccatgtttcctgttgctaaaccaggttggcataaagtgggtgctcagcagatgtttactgagccgaatcccatgtacctacaggctccaaggttcccgctgtgatcattcaaacttatggatctcctttgagggacagctggaagttgtttacagaatcagacatggagactttctccttcagacggaatctaactggtcagttttaaagctgtggcattccctggcggggccactgtgctagttctccccatggcgggctttataggaaggccccctcttcacacagaagccgggaaggcgtgcctcggtaagggtatagccctgagtgtctgcaccccccaaaacccctgctccctgctcgtgtgtgacaatctgacttcagacagttaatctttctggctcaagcatttggaatggagatggactgaacccactgggcgttttagttgcatgtaagccgcactccgggctgagcttgccgagctgacttcactgtctgggctgcctgcctggggtgctgggagccaagtgcccatttccagaagctcgctgtgctcccccaggtcagctcctgtctgcctcacctcaccgtggtctccttttcctaatgcgtgatggagaccagcgtcgtgtggcatccatggaccccatcgaggaccttttgatcagtggtggggttgggatggggacaggaggtggtggggttgggatggggacaggaggtgagctgctcatggtgttgatttcttctcctcgcagacacaaggagattcagaggtcctgtttgtgcctctgtctgctttttcttcctggaaattttcttcctgggattcaggacctgaggaaggtctgggtgtggcctcagctttgggccatgaaacccatctggacagatcaggctgacctctgggaagcatctgtgtgtggtttagacagggagagaagctggatggaggggagtggtgctgaagtgggttgagccagtgggggtcaagcggctaagctccagaggggggtctgggctgcaggcgaggaggcttcctggggtcctcaggcggcccctgcacccccagctcagtgggcctggcgaggaggcttcctggggctgtcaggcggcccctgctccccctgcctcagtgggcctggctgtccccttagcacaacggcgagttccaacactggatccctgggagagcatcttttgtttgcttttgtttagtttaaaaatagatatattaggaatcaagatgagatgaggttagtccccaaagttaaattcctcttccttgcctttgagctgtgccattccgaacgcgtctcctttagtccccctaggatccggtctgggctgggcttgcggatgccaggcccccccgatccaccgtgtcagggccagctccatctgtcctgtgtcagtggggtcctcaaacaggatttattttaaatcatcactgcaggagataatctattttccataataatctgcaggtagctttactaatttcctctggagcggggatggaggctcgcctcgcttccgagaggctggggccgcgcctggctgcactgatgccttatcgcccgtgtcctcacgcaaggcttcactttggtgtcaggatctcgggggctcagaaatgcgggttcattgtgggtggagggtaagcccttcctcagcaggtcatgaccagaggtggtcggacggcaaggactgctctccaggcacgtccagcagggacagtgcggccgggccctcccctcggccgctggaggctgcagccctcaggtttctggcagtgacaggcgtcctccagggagggtctgagtcgcaccctccacattggctgaggacccagctcatgctgtgggagaggaggaagcttccatggctccaggactgtcttcctgaaggaagttcgtgggggtgggtggtggaagggggtccggccctaatggggctcccgttgtccctcagcacggcctctgctgggggtggtggcctgaaccctcactccaggggcccaagctccaggtagacgtgcccagcttagctgtgtggttgcccttgggaaccacagtgggtcgggaatcaggcgccccagggatgtctggctctacactgtccctccctcccacagcacaaggcctagtcccctccctgccctgcccagagcccccagttcctgcactcgcgacccaactcctttgtccccactgactcctttgtccccacctttacagactatccctgtccctctggcgaccccgcttgtgcctgctgcttcctgctgttatccctcccggtaccacattctaatcacttgcgattagatcggcactcaggcctctggacacccgagcatgacttctgggacaagctgtgtcttctcccccaacctttaaaaatgtgaaccatgattcaggtggtgaataaaagctggcacggaattaagcggtggatggatgcgacatctttatcgctgtgtcctgattgtggtgcaggacggtcctcgcggtgccgtggctgtttctgtggcggtcgtcggcgcactgtggtggtgactgtggctcacatgcacccttggaggccctcggaggtggcaccacatctgcggacacagcagccccggtggcctcaccctctcactgaggattcccgccatcacctggcgacatcccctgaagattctttttaagaagtctgtgccctacacggcaacattaggctgtaggcgtcacgctcctgtgattgtgaagtcaagcgaccgcggcgtcaggcggggctccgtgctgtgagtgtggccaggcttgcagctgtcagtgctggggagaagttcaggggtccgggcatctgggcggtccttctctgatgccacatcctgggaatggaactccctgaatggaggggcttctctccgttttctcggggcagttttgtgatcggcattggccttgtgttccttccttccctcactgatgtgcacccgacgcctgcatgtggactgacggcctggggtcaggacgctgctgggggtcaggggtgtgtggtgggctgtggcggggtgtggtgaagcctgcctggcctcgagcccggtggaggctctgggaagccccctgcttcctagtcctgacgggggccggtctccaccttcctttggtgttccagagacctgaagcggaggggccagtgtggctccaaggtggccggggctgtgcggtgggctccggagcccccgaagcactctttttctgcagaaccgcatctgggcctccggaaggaagctgcaaatgaaccggcagcagcttccccgatggccctgtcttggcagccctcatccgggcaaggactctgtgggagagcagggccactctctgtgatgccaccgccgggatggctgagctccagcgtggtgcccgtcctgggtctgagggcccggcagccgcccttccgtctgctgccaggagtgtgtgtgcccagcactggagagcagtgagaggcactggtttcccagcacacagtgtgcgcctgcccgctcactctcccggctccgtgtgtgcgcccctcatcagccaggtgctcgctttcccggctctgtgtgtggggccctcaccggccagtgtgtagctgcatggtgtttctggggggctgctggcctgccaggcatggcctctcagtggccagcatggggtctgggggtggtctgggatggccaggcgaggggctaggggctcgggggcagctgtcagcccttgggtgtcaccctgcacttcctgccctgtggccacatcctcccaccctcttctctgtacatcacgctgaagaacaaacaaaaaatctcaccaaacgcgtgttggaggtggccaggctggctccattccgggggccctggtgataggtttcaggatggcagcagcagggccgtgggatggggagagtggactcagctcctaccgccgtgaggatggggagggaggggacaggacgtgtaaccgtggacgaggaagggccagggatggaacaccgtgaacaggaagcatcagggtgaggggctccgacagatttgataggaccacggctgatggccggcagggctcccatgacgctgatgtgccggtattttcacccagtggagcggctccccctcacgaggacagagcgggaagccccaggtcaggcctcattgtccatggcaccagtcccctgccagcctcctgatgctctccaggcgggcaggggcctttcgggccaggggaagaaagtgacacccgcccttctgtgcctggctttgggtcacctgtccccgttccagggcagcgtggcacaggtctgagggctctgctggtcactcagcccctgaggcagccccgccagcccaggcccgagcacctcttccctccaggctgggcacagccagtccccacctcccaccttctgcctccgccagtcccgggacatggagtcacaccttggaggagattcacactgtgtcatcagctggcgcgcaggtgactccggagcgcggatcgtgccaatcggcccagggaggctccgcgccgtcaccatctctccccacgccctccgcccatccctgtccaccccctgacccacacaccctcggctctaacccgggatttcgggttttgctgccatttagaaatgacattcttacttgttgaattctaaaatggaagcaacacagctgtctagtaaatcaaatttagtgaataaacgagccgttcttgtttagtattgtctttaggtcttatttctcatgtctcctttcattagaggttttcattgtaatctcttcggctcaacaaagacaaccaaatctgccctgttaattttgtaattgaggtctatgcaaacatattgccatagccatggaaaatgtttactctttttcagctgaacacacagtacatttttagttgaataagatccaactgaaaggcataaatcaagcgtttaaaaatagaaagaggatcgcaaagcctagtatgtcaatatgctcgtcaagtgttaatgcagaaaggcagagttaggcggccccgggcgctggaaactgcgtttgacctcctccctgcccctctgcgtctacagttcagttctcacagaggcctctggcgggaggagccaccatttagaatacagatggccaaaggaaacaccatttttaaatagttactttaaaaaaatcctttcagatgaaaaaatctgctatggttgatctttctggtgttggtgaaaggaaagagaaatctccgtgtggggaggccctgggcagcgttcagggaccgagccctgtggagcggaaaggctcgagactggacctatcttgcaaaaacaaggctcctgttagcagaatcgaagtccattgaggagctggaagaagacaggtcccttctctaaagcactgtgattagctcaagctcgttggatttgcacttttggagaagatgtgttcagtgagggctgtggaaggctaggcaggctggacgcccggctagaggccaagcctgcagacggcagaaaggcgaatgcaccttccagatggccgcctttcctgaagaactgcctggggttgcatttgtggaagccagccatccttcatcaacaaagcaacaaatatcgattgttcaatttacacattttcattttcataattttatttgtacacatttgaacaccctgaggtttgtaaacatttagtaacttatccaaaggtcacaggactatccacgcttcaaatccgggcccctgtcctggacttgcaggggtgcaggatgaagaaaccccagcctgctgtgagggacctgaggctgctgggagagctgagaagtgtgtgcggttgcaatgacgaagcgtgcacggtggctgggagagctgggaggtgtgtgcggttgtgatgatgaagtgtgcacggtggctgggagagctgggaggtgtgtgcggttgtgatgatgaagtgtgcacggtggctgggagagctgggaggtgtgtgcggttgtgatgatgaagtgtgcacggtggctgggagagctgggaggtgtgtgcggttgtgatgatgaagtgtgcacggtggctgggagagctgggaggtgtgtgcggttgtgatgatgaagtgtgcacggtggctgggagagctgggaggtgtgtgcggttgtgatgaagtgtgcacggtggctgggagagctgggaggtgtgtgcggttgtgatgatgaagtgtgcacggtcgctgggagagctgggaggtgtgtgcagttgcgatgacgatgtgtgcacagtgacggcactgcaaaatgtgacggaggctccgagcaggggttcctaggggccggaggctgggtctaccctggttggggctggcccggtggaaggaacgagaaagacagtctcaggaacagtgacgtgtggagatgggaggatgagacacgcccccagtactgaaggagaccctggtggtggcaaaggcgggttgggacagaatgtgggaggctttgaacatcaagacacgagtctggactcatttatagtcagtatttttttatgagttaaacaaaaagacgtgtggcattttggggtctggacacttttaaatcaatgactcctaagtgtttacaaagcaggaaacaaggtttgaaccatgagcttcaggagcaggacgggctcctggagcctgaaaggagcccagtctccctctctgtgggcggccggatgctcctgacttgggtcaagagggagagtcgttctcctggtctctatgccgggctgtgaccactgcctgtcattcaagatgaccctttcggggtgttgaggactgaggcagctctggaatgtcaccctacctgtaacctaacctgcccagcttcatgggtgctgggaggagatatggggctctgaggtcagggagggaggacagcttgttacagcagtgacagtggctgtgaacccgcaggaccccatgtctactcagccccgtgaagggaccagtgctgccgcacacaccatgagtcagggtcataggagagcacccctgagtcttctgccacagaggaaggcactgcctttgccttccagggctgtatttgctttcaggcgtccttgaacaggtaggcctgaacaaaggggaggccagtgtctcgctacatggggtgtatggaaaatgtgccacccgcagagaattgccttccagtggtgaatcggtggcagctggcagacccagctgagctgtgctgtgggtaagccagtggtgggagaggcctcgcccctggaagcatggtgcccatgtgttgccgccacgtccctggggtctctgggctggagttccaaagtcgtcttcatcatgaagaagcacatccaggctatgggcagaactgtcttgaagccgtccagctgtttaaattctacattctgtggggcatgcacggggttggcttattcaaccttccttccattctccctgtggttggagaagacagagaacaaaacaactcatttccaagatgcttggcagctgggcagagtccaccaacgagaggcacccaaaggcaatccaaaagacaggcggaagaggagcgcatcttgttgccattgtgccatgtttgctggaaagcaccgttgttgagatgtgagtatttctgcgtgatgtccgttcttcaaaccccagacgcagttggatggcagcggatggcagccgtgaccccgcgggctcccggcttctgctcctggtccccagctggctcaggtgaatccatggtcaatggcagccccaggaatggcggcccccatgatgggtgggctttacattgtcctgcaagtagtttctgggagccacagccaagtgagaacttgcttcaactttccagtcactttcagagacaccagcattacctcctttcctgctgaagacacctggagtggcttcccttctctgcctcaaaccctgactggttcacattcttagttcataccttactgttgtttacaaatcacctgcaaactcttggccacagtgcagcgggggcggggctgagcactctgctcctagggtgtggccatcgtggctgagcactctgctcccagggggcggtcaggcaggggtccgggatggagagagggcggccccattaggggcgatgagatgctctcgaatctgatttgatcatccccactcctgctcctcagccccctggagccgcatgtctccttcaaggctgctgtgatgtggattttcacctggcgtccatggatagccacgtccagtggggaggggtgtgggagcaggagagcccctcgggggccccaccctcctcctgcgcacgttgctgctgctggaatggcaggacacaagctgctccagactcagtgagccctcattagtgagctttcttcatgggctcaggaagatctacggccctttgtctacttttgaataacaagttatcccaaatgcaatggcttaaagcacacattatggcacagtttatggggtcgggaatccagggcctgtagctgggcacctcctgcccagggcttctcctgaggacagcaagctgtggccaggcccaggtctcat

SEQ ID NO: 470 - DNA, 10865 bp, Homo Sapiens
gactcagggctgcggccggggtcctgcggggtaggagcgcgaggccggcctgagggaggaggcctagcgacccatccggcgcctcccgccccgggcacccgcccgcggccgcgcatcctgcgggccccaggaggcctccatctcaaaacaacgtgtttttaggtaatttcaaacttagggaaaagcttcaagaataataccgaaaatgtcagtgtccccagcacctagatcccccagttaaatccttttccatttcaccgcgctgccccccgccccctggacggttatgtggccgcgtggggttggctctgcccagggccgcggtcactgcacagaacgccctgcacgtaaggggctccgcctgggtaagaccccgcccagctgggcaggaggagggcgtgggcccaggacatggagaccagcctgggcaacatagcgagaccccatctctgcagaaataaaatattagccggacggtgcacggtggctcaggcctgtaatcccggcactttgggaggccgaggtgggaggatggcctgaggttagtgtctcacatgtctgtgtgaagagaccaccaaacaggctttgtgtgagcaacaaggctgtttatttcacccgggtgcagcccggctgagtcggaaaagagagtcagcaaagggcgatgggattatcattagttcttacaggttttgggatagacggtggagttaggagcaatgttttgcaggcaggtggtggatctcataaggtacattctcaagggtggggagaattacaaagaaccttcttaagggtagaggagattacaaagtacattgatcagttaggatggggcagaaacaaattacaagggtggaatgtcatcagttaaggctgttttcacttcttttgtggatcttcagttgcttcaggccatctggatgtatacatgcaggtcactggggatatgatggcttagcttgggctcagaggcctgacaggagttcaagaccagcctggtgaacatgacgaaaccctgtctctacaaaaataagaaatgaacgcagcatggtggcatgcacctgcagtcccagcctcttgggaggtggaggcataagtcagctgtgaatgcgccctgcactagagcctgggcagcagagcagacccttcctcaaacccaaaaagcgtcgtgccaaccagaccagatggtcgcctaatcaatagagaccatgcccaatcaggtaaggacagacacaaccaggcatgctttttcttgttttgttttttgtttgttgttttgagatggagtttcactcttgttgcccaggctggagtgcagtggtgtgatctcggctcaccggaaccaccacctcctgggttcaagcgattctcctgcctcagtctcccaagtagctgggattacaggcatgcaccaccaggcccggctaattttgtatttttagtagagacgggggtttctccatattggtcaggctggtctcaaactcccaacctcaggtgatctgcctgcctcggcctcccaaagtactggcattacaggcgtgagccactgcgcccagcttgttgtttttctttagacagtgtcttcctctgtggctcaggctgaagggcactgggatgatcacagctcactgcagcctccacctcccaggctcaagccatccttcttcctcaggctcctgagtagcgggagctacaggcatgcgccatcatgcctggctaatttttgtattttttgtagatacggggttttgctatgtagcccaggctggtcttgaactcctgacctcaggtgatccctctgcctcagcttcccaaagcgctgggattacagaacatgagccactgtgcccggcttattgtacagtctttactctcggttttcaccagagaactcaagggctgtgaaaagagcaggacctcaccagctgcacggcggtggtgactggctccatcttgctgtccctcccaatcacacaacatctccccttgaaggctctgcccaggcccggactcccacctttcaagatgtctggatcagtgcaggacctcctccttggccacatcgctctccttggactggttcgttaaccctgttttacccacattttctttttttttctttttctttttttttttttttctgagacagagtttcattcttgttgcccaggctggagtgcaatgactcggtctcggctcattgcaacctccgccttgcaggttcaagtgattctcccacctcagcctcccaagtaggattacaggtacacaccaccacgcacagctaattgttttgtattttaggaagagatggggtttcatcatgttagccaggctggtcaggtgatccatccgccttggcctccccaagtgctgggattacaggcgtgaggcactgtgcccggcctgccccccttttctcttgatgcacatgacagccttcttgcaatcaagaaactacgtgtggccaggatctcatccactatcacagtttcagctttccccaaactggaatgtgtctttgcagacgcccatccttattaaagggcaaagacttctcatacacctaggatggatcttatattcttggcgggactgcagagaaggtgccgtgtcctgagtcctcatgtcagggcacaggcttccagccagttctacctgggttatgtttatctcaattccctggtggtattggtgtctgctgggttttgccagaatgaagacaccgtgttttcatttgtcagttgattcgtattttccaggaagacattctgagattacagcattgtcttagtcaaggtgctgcagaaggacagaactaataggatatatgtacatatgaaagaaagtttatgaagaactggctcacaccatcacaaggcaaagtcccatgacaggccatctgcaagctgaggagcgaggaagccagcagtggctcagccggagtccaacagcctcaaacggaatccaacagttcaggcttcagtctgtggccaaatgcccagagaccccggaaagctactggtgttagtcccagagccggaaggccaaagaacctggagtgtgatgtccaagggcaggaggaatggacagaagcatccagcatggggtaaagacgaaagccagaagactcagcaagctagcttacctactttcttctgcctgccttgttctagccgcgctggcagccggttggagggtgcccacccccactgagggtggatcttcctctcctagtccactgactcaaatttcagtctctctgggagcaccatcacaccagaaacaataccagccatctagccacccttcagttcaccatcacaaccattgtcttattcatgaaacttctgcagacccaccttaacctccatcggtgacttctacctgaagccctctgattgttgcccagtggtgctttttaaaataatttccatagtttcttctacacctttagttggcattctactgtaaaggagagattttattttcttactcatttatttgttagtttatagtcaccaccatatggatgcagagttctgtctcattcactgggaagtattctattgcagtcatgatttattttgatgttcacatcccagagttggtgagtgagcgccccttcacgctggctcccgagtgctgacgtgtccccgtccttctctgcacttttccttacctcctggcctcagatattccagggtcatttgttctctccctgctccaaccctgcagtcagccatctccctagggacgttggttcctttatggaaggtggcatttagaagccaggatttgggctgagcactgtggctcatgcttgtaatcccagcacttggggaggccgaagtgggcggatcgctggaggccaagagtctgagaccagcctggctaacatggtgaaacccttccccgtctctactacaaataaaaaattagctgggtgtgttggcacgtgcctgtaatcccagttactcaggaggctgaagcaccagaatctcttgaacccaggaggccgaggttgcagtgagccaagattgcaccactgcactacagcttgggtgacagcgcgagacaccgtctcaaaaaggataataatttaaaaaacagcaggatttgggtgagcagtgcgctcattgcttctgggctctctcggtggacataggctaggaatgtaagatgtatgtgcctgtgtatatacacacgtctgtagctatgtctatgttgcatacatgtgtttttccaaaaaccaaatccataaccatgccttcagtttcagcccaacacctccgggctctttctagctttctacctttcatgattgtgaataccttctccagcagtgagaaacctggctcctttgtcctcagtggattttcttatttgctcaatttttttgttttttgttttgtttttgtttttgagacagagtcttgttctgtcacccaagctggagtgcagtggcataatctcggcttaccgcaacctctgcctcctgggttcaagcgatactcctgcgtcagcatcccgagtagctgggattacaggcatgtgccaccatgcctggctaatttttgtatttttagtagaaacggagtttcaccatgttggtcaggctggtctcgaactcctgacctcgtgatctgggtgccttggcctcccaaaatgctgggattacaggcgtgagccaccacactcggccaagtcagaattttaagtttcatcttttttgtaattaattgaacacctgcattcaaagaaacagagaagtaccaccacgcataagtaaggtggccatggcgtacctaggtttctcagcctatcaagcttaggggcttctttttacgtgaagtcctcctaagacagcctctgatagctgccttgtggtcagcagggaagaagggccttgtaatagcacgactctgcagggaggcgggcagctctcatggccttagtttgcagacctcgagatgtccactagaaaggaggagatcgtggctggctgcggtggctcacgcctgtaatcccaggattttgggaggccgaggcaggcggatcacgggatcaggagatcgagaccatcctggctaatgtggtgaaaccccgtctctactaaaaatacaaaaacttagccgggcgtggtggcgggcgcctgagtcccagccactcgggaggctgaggcaggagaatggcgtgaacccgggaggcagagcttgcagtgagccgagaattgcgccactgcactccagcctgggcgacagagcgagacttcgtctcaaaaaaaaaaaaaaaaaaaaaagaggaggtcgcagcgtctccagtaacacatcaactccgcaacaaggggccacaagtgttcctcgccaacgggtccctgctacgatccctattttaaataaggggaaactgaggcgtggagggggtaagaaacagagaagtcagaattcaaacctggacgacgcctgttagttttttgggattacaggggtaagccactgtgcccggccacacgtgttagttttttgggattacaggggtaagccactgtgcccggccatgcctgttagttttgtaactccagcattcctgtctctcctgcatttgtcaatagcactagtcctttgtggtgagttttttttttttttttttttttttttttggagacagggtcttcctctatcgcccaggagtgcaatggtgcgatcttggctcactgcaacttccatctcccaggttcaagcaattctcctgcctcagcctcccgagtagctggaattacaagcacccaccaccacgttcagctaatttttgtgtttttggtagagacagggttttgccattttggccaggctgggctcgaactcctggcctcaagagatccgaccacctcggcctcccaaagtgctggggttacaggtgtgacccactgcgcccagcctttttttttttttttttaatacagattgggtcttgctatgttgaccaggctggtctagaactcctggcctcaagcgattttcccaccttggcctcccaaggtgctgagattacaggcatgagccaccgtgcccggccaggaccacccctttggagtgatacctctccccaattttatgtggctctggtgggtcatccctcagtgtccacttaacagtgacagtgacgttatgtcctgcttttcccagaagagtcccaggttatgttaactgttctagcaaaattattcagagcaccccattttcagtctcagaaatgtctccattagtgtcatgtgaagtcaccctaaacgaggtcaagaaaatcatccaggctgggcgtggtggctcatgcctgtaatcccagcactgtgggaggctgaggcaggtggatcacttgaggtcaggagttcgaggccagcctgcccaacatggtgaaaccccgtctctactaaaaatacaaaaatcagtcaggcgtggtggtggcacctgtaatcccagctactcgggaggctgaggcacgagaatcacttgaacccgggaagcggaggttgcagtgagaccagatcgtgccacagcactccagcctgggcaagagtgagactgtctcaaaaacaaacaaaaaaactcctcttagttcatgcgtggattctgatgcaggcttgcagggagaccctcaggtgctgcccatgagtagctgcgttgacggtagctgcttcctggctaccccgaggggctgctctgcagtcaggggagaggggccggctctcagggaaaggcatcaagaaccacacttgagttcctggatccgggcacatctaaaatttaggagcccataaactcccgttttcacagaacctattttgagttgggttcttgccacatgcaatcagaagtcctggccgacacacaactttggcttcagcagtctccctgggtgtccccaccccatcccgttccctgtgttcaaaggcgcttggggccatcctccactgtgaaactcccagacacgccagcccagctgcttcaggtgtgcgctgggaaattttcactccctgaattccaaaaatgatggcagcctctgcctcaccctcataaacgcaacgtttacatttattgtccagttgtttcaggacgtggattttctttgttttgctttttttttttttttttttgagacaagagtttcacttttgtcccccaggctcgagtgcagtggcgcgatcttggctcaccacaacctccacctcccaggttcaagcgattctcctgcctcagcctcctgagtagctggaactacaggcgctgccaccacacctagctaatttttgtatttttagtaaagatggggtttcaccatgttggccagcctggtttggaactcctggcctcaggtgatccgcccgccttggcctcccaaagtgctgggattacaggtgtgagccaccgcgcccagcccttttttctgtctgagaacaagaagacagtaagctctggggaaaaaacaggacccaccttcatctttcttatctttgctgtgcacttcttacaaatatttgctgaggctgtgaattataattgcaaaagtagaatccactgtgtccaagcagaagagagggtgtcatggggagcgggcagtggggagtcacctgtctgccaggctggacgggtgaacacattcatcatctttaggcatgcgagcttctcctacctctatccatccttccttcagcccatttcccccgacttctgccaccacctccgggacgtcctgaaggcgaaccggcctcccacctgctaagtccaacagacacttcagcctggctctcaccagccatggcgggttgccctcctacctcttgacaacacgctcttcctcggctgcagagacacctcctctccgtattttcctcccacattagcaatgaccacactcaggctatgtcactcatggtatttttgcatcagaaatgccatccttgggccgggcgccatgcctcatgcctgtaatcccagcgctttgagaggccgagccgggtggatcccttgaggccaggagttcaaaaacggcctgggcaacatagcaagaccctgtctctacaaaaagaaacagtttttaagtcattcctgattttacaacgctactctgatctgagcccctgtggcctcgggatccccaggcgtctgttcccgagaacgcggggcagaaagcctagtcctgcacgcagtaccaacaatgcggagtcagcgggttgtttcgactttgttctgtttcctgaggggttctgaataagggccacccccttcctcctctgtgccgccatgttccctcccggccacgcccccttgcaacccctccaatctccgccctgcaccctggcagctccccctggcggcagcagcgggtcttcgtggagtcagcccctccgctgcttggccgctgggtttgtcccttattttaatggatgcgcgttggctaggactgcaacattgtttctttcttccacaaattttagtttgaaacagacaggaagttaatttcccgtctggctgccacacctgctggtggcgtggactgcggcccttaggctgttccttgctcgatttaaccctgggagacatcgaagccttcccacccaagctgtagggagctgttgaagacctggttcacacgagatcctttgcggggtgcagctggggaaagcatgatttcagcttgtaagctgcatggagaatgcaaatgtatgtgtgtgtgtatatatatatgtgtatatatatatatatatatatatatatatatatatatatacttttttttcttttctttttttttctttttttttttttggagacagagtgtccctctgttgccaggctggagtgcagtggcacgatctcggctcactgcaacctcctcctcccaggttcaagcgattctcctgcctcagcctcccaagtagctgggactagaggtgcacgccaccatgcccggctaatttttgtatttttagtagagacagactttcaccacattggccaggctggtctcgaactcctgacgatgtgatccatccgcctcagcctcccaaagtgctgggattacaagcgtgagccactgtgcccggccaatgtatatattttttcaagacagctcaacccaaagtagcaccagcatggacaggccgagtgacgaagacagtgctggaggcacacagaggctgtgggggcaagtatgcggccggctggacctgcggggaccctgcccgtggctggaaaggggaccagggggtccctgggaaacacagggctctgacctctgtgcagggtgaggaagggttttaccagcagagggagagctcagcccaggcccgaagtcagcacgacgagcagctgacccctgggatctttgaggaacctgaaagtgcttgatggtctttgtgaatctgaaatccgagcgaagcgtcagaccctcgagtttccccaggggaactccgttagtctcctgggatttgatgtattcacgctttgttccttctggaccagtcacgccccacgccaatctgagccgtcgggggttggcccttccaggatgctgtgattaggtctagggaattccacctggagggaagggtgggctgtgtcctagggaattccacctggagggaagggtgggctgcgtcctcgggagggagacagcaggtggcaggcttcggcctcccaggcagccctattgaaaagtgaagccacctggacttcctgggtcaagtggggactgggacaacttttctatctagcaagaggattgtaaaatgcaccaatcagcgctctgtaaaatgcaccaatcagcactctgtaaaatgcaccaatcagcactctgtaaaatgcaccaatcagtgctctgtaaaatgcaccaatcagcactctgtaaaaatgcaccaatcagcgctctgtaaaatgcaccaatcagcactctgtaaaatgcaccaatcagtgctctgtaaaatgcaccaatcagtgctctgtaaaatgcaccaatcagtgctctgtaaaatgcaccaatcagcaggattctaaaagtagtcaatcgcagagaggattgaaaaaagggcactctgataggacagaaatggaacatgggcggggccaataagggaataaaagctggctgccaccaaccacccccgccccccccccccacctctagccagcagtggcaacgtgttcgggtcctcgtctatgctgtgaaagctttatcctttctctcttcacaataaaccttgctactgttcactttttgggtccgtgccatctttaagagctgttaacactcaccgcgaaggtccctagctccattatcgaagtcagggagacaacgaacccaccagcaggaaccacctccggacacactatgtccctgcatccccgaagctcccgctactccctggaatattctttgaaaagggtccctgtgtccttttttgccagcaacagaaactctaaaaacagccaccattatagcaatcaattaccaaactcttctgctgaggccaggcagaaagcaaagcacaacggaccttaccaggaggccccgccgctcctgtccagcccctgcccactcactcaggtgctcatcacccccaggaggctccactgctcctgtccagcctctacccactctctcaggtgtccatcacttccaggaggctttgcgctcctgtccagcccctgcccactcactcaggtgctcatcacccccaggagggcccccctccctgcccagcttccccctactcactcaggtgctcatcacccccaggaggccccactgctcctgtccagcctctacccactctctcaggtgtccatcacctccaggaggctttg

SEQ ID NO: 471 - DNA, 2486 bp, Homo Sapiens
gtagtagtcggcgtcgtagtcgtcttcgtccttgtcgtcttcctcctcctctccgctgtcctcggagccctccggggagtgcggaggggcgtgagcgagcccatggctctggggggcggcctcctgcccgccgcgcggccgaggcccgagcgcccccaactgctccgggtgccctccggggacccgcgccccgggaccccacgcctcaggtgacggcgagggctgctgtaggctccgcccgtgtcccccggcgtgctcacgtgggagggtgtctgcggcaccccaggcgtctcccgcggctgccgaagaggccgccaccgcagctgcggctgccgcccggagccctagccccccggtgccgcggggaccccgccttccccggagcctggacagcgtcctcctcagagggtccgccatcccctctgccttagccgcgaggctcacccccgccagggggagaggtcggagccccgctggggagaaaaccgcgctcgcggaggcggaggcggaggcggcggcggctccccatgaccggcgctggccctcgccggctcctcacatacttggcataactctgccgcgggaaggcgtgggggagggcggtggcgccgcaacgcgcatgccccggagccccgggccgcgacggggcgcgcgggccgggggcggcagaggtgggttctcggggtgggcgagtggtgcaggtggaggcggagggcgcgggccggtaggttgagtagtaggtcggctgaagctgaccgacggaagcaggggtgggcgcacagagcgcgaagggtgcggggagagttgaggcaggggaaagaagaacgagcaggaacgtgagtttgggctggtggctgcaaagttttggttagggagcccgagaaagggaaagtgccctcctggctgtcaccccagcaccttcaccgccaccgctgcacgaggtgtgtcttaggcacagcaagtcctagcttgagagaaaacaaagattgttttgacggacaaagtacgagtgcaggtgtatctcggtgcatgtgttctagaaatgtatcaatcattttaatcgcccagagagctagctagctaaaagaaatttgcagcgattccttttctataagagttcttttatcaaaaacaaaacaaaacccacccaccgatgtctcttttaagtctgtttttccttctttatttcagttaatgcatgctaacaaaattattacatcagccaaaacttgtaaaatggagccacaaatattatgtccctcatcaccctacctacaagattatcatacaggtttgcagctttctaatataaaaaagttaacacttcattttaatttaaatagtgagttgagaagcaattgaattgaagttgagacacagtgtaatctagaaataccggctgtctcccaaaaacgttaaattccaggttctgggcagcagttgcaaactcaagtacccctcgttgccagagattaattgattcagtgactgataagaatcagtcgtgctatcatccctgatttgagttactttttttagtgtttacatagtagaaagggcctttttctgagttactcataaatatgctgacacctagcacagtgcgtgcacttagtagatactcaaatacttaagaaaatatttgttgaataaataaatgtttgcattactgaataaaatgaaataattttgccctaatttaccttatttgcaactgcagtatattttcctatgtcagttgttttcttgttgtccagtggctccaatctctgaatgtgctttgactatactacctttattagtacctagtctctgctttctggaataattgttacctgcatctgagatttgcagataagagagaatatttgcagaaatcttacccactctctaaaactctgctctaggccaggcggggtggctcatgcctgtaatcttagcactttgagaggctgagatgggcagattgcttgagcccaggagttcaagaccagcctggacaacatggcacaacctggtctctacgaggaacaaaaacaaacaaaaaaaaaaacacaaaaaaaattggctagatgtggtggtgtgcacctgtagtcctagctactctagaggccgcggtgggaggatcacttgagcctgtgaggctgaagctgcaatgaaccgagatcatgacacttcattccaacctggatgactgagggagattctgtctcaaaataataagaataaaataataaaactcagctcaactgccttcttgtttatgaagtcatctctgatctcccagacgggaactcaagttctaaacttcaatattactttattcccacccatagtatagttactgttttttgttttatacagtttgtatacatgtcctttctcctttacaagaaaattcataaactccctaagggcagaaactgtttataattgacctttatattctccacaggagtataactttagcatcttatatattgtgc

SEQ ID NO: 472 - DNA, 2564 bp, Homo Sapiens
ccgcttccgcctggcgtaggagctgaggcatggccttgttctccagctgagaggacgatcgtccttataggagaggccgagtctccgagggcaatttcagaggtctggtgcgaggtgggggaagcggcgcggcgtcgatgacgacttccttacatcgcccccgacccccgcgttctcttgttaacttctgtgcattgttgcctgtctgcactttccgtctccaaaacctttgctctcctcaccccgttttcccttgtaattataccccagcgatcactagtctgggttcgaagtgattgtgtgtctccataattgacctggttgcccccggttatcccagaagtcaaagatgacagagaaaaaaaggaagagcgaggggcttatctcgtgttctctacgtcagactcctcttcccctgtccttcctgggtgatctttatccttcccagcactgttctttcttaagttaagcaccaaggaagagggcaactgcttgggcgctgttggcactccgaagcagccgcagtggttcgagattgccagtcggactagccaagggagctgctgagtgagtggttttcgagaacgctctagattctggcaacagttaggccagattattggaagtggggttggaacagagttgtgggtagtcatacttgttctaatcctaaagcagaattgacaagaaggttctagaagtttggagccctttccttatcagctgcgggttagtctgacccttttgttcaagatatctacagtgccctcagtctctttgcaacatactttatatcttcataccaagcccgttgtgtcttcaggctgggtaatttgaggcggtgatgtagaattagttcatgagatctgaaatcaggattctgagatttttactatctaatgagttcgaaatataagaagtactcggacgcaatgaatagttatcaagcttgagggtggttaccacagccagatctcaagttcctgatctgctgggagctgaggggcctgacaaagtgtaataggcccctgggatatcagagaagccaggacaccagagtccagtctctgttcttaattttgagctttcatgttgttcctacttcttcctagatatttaaagctaagcatcatcaacccttatacatcattaaagagctgcacaatgggaaacaaaattcctcccagtgcagacggagcttaaattaattgtagagatttacttgtatttggaaagagttcagtggttctttatactgtaaatagggatttggccacaggttatttattttttattttttgagacggaatctcgctctgtcgcccaggctggagtgtagtggcgcgacctcagctcactgcaagctccgcctcctgagttcacaccattctcctgcctcagcctcaccagttgctgggactacacgtgcccaccaccacatccggctaattgttgttttttttttgtatttttagtagagatggggtttcaccctgttagccacgatggtctcgatctcctgacctcgtgatccgcccacctcggcctcccaaagtgctgggattacaggcgtgagctactgtgccgggctggccataggtaattttaaaaactcaccctactcattgtaaatctctgatgtagagtgtccctattttggacttcatttcatagcctcctatcttaagcaaatacatttcttcaatcacagccttagaggatagtctatcataaaattggagtaaatgaacctgaagacatataataaaataggttatgctgtaatgtgaccacatcacacaaaacatggtatttgatagcagtacaacaaaataaggtaaactaccttatttcatggaatttaagtgtcattaggctgggtgcagtagctcacacctgtaatcccagcactttgggaggccgaggcaggtgggtcagctgaggtcgggagtttgaaaccagcatggccaacatggcagaaccctgtctctactaaaaatacaaaaattagcggggcgtggtggcacacacatgtaatcccagttacacgggaggctgaggcaggagaatcgcttgaactcaggaggtggaggttgcagtgagctgagatcgggccattgcactccagcctgggtgacaaagtgagattccatctcaaaaaaaagtcattgattgcagaatgcaaattattttatctgtcactaagaaaatgtaactgtaaattaaacatgacaacatgcattattcctgtagttcaaatagtgacagaaaaaaattaattaaaaaaagaaaaaagactgggcgtggtggctcacacctgtaatcccagcactttgggaggccaaggcgggtggattacctgaggtcaggagttcgaaaccagcctgactaatacggtgaaaccccatctactaaaaatacaaaaattagccaggtggggtgatgctgtaatcccagctagtcaggaggctgaggcagaggttgtggtgaggggagatcatgccattgcactccagcctgggcaacaagagcaaaactccgtctcaaaaaaaaaaaaatcaatt

SEQ ID NO: 473 - DNA, 4258 bp, Homo Sapiens
gaatgctagttatttgtcagatacatgttttgcaaaccatttatctgtatttggtttctttttgttatcttagcagtgtatcctgaagaatagttttaaattttgatgtaatccaaaatatttcggttgtttgtgttctttgttatcctatttttgttgttgttgttttatagatatgggggtctcactacgttgcccaggctggtcttgatctcctgaactcaagtgatcctcccacctcagcctcccatccttgtctacctaattaggctttgtgtaactcagtgttgcaaagctttgacatctgtttgagttaatgtttatatatgttgttacttaagggtttcacattaaatttaaacatacttatattttataaccaaacaagtcatgttggggcatactcattaggattgagtgctttcttacaccaaaatacatgtatacaaagatttaaaacactttcggccgggcgcggtaatcccagcactttgggaggccgaggcgggtggatcacaaggctaggagatcaagaccatctggctaacacggtgaaaccctgtcgctactaaaaaaatacaaaaaattagccagacgtggtggcaggcgcctgtagtcccagctactcgggaggctgagacaggagaatggcatgaacccgggaggcagagcttgcagtgagccgagatcaccccactgcactccagcctgggcgacagagtgaaggctatgtctcaagaaaaaaaaaaaaaaacttttataataacaactgtaaatagttcaattgacagtcatttgtaagatgtttaagtaaactgtgaaacagtaagtaaatggatgaaaacacactgattaaaactgctgcttttatccaacaagatggatgaatttcccaggaaagaatacttgagttcaggcctgttcaagtcccaacctgtttgtggtttgaggttgctctctgcctcgtagagcaaagtggaaaatttatcttctgggaggacagagttttcttctctgaaaaagtttcctacatagttggctttggcatttgcaaggaatgaaaggtcagggattgaggcctcatgagtctggatttctagctgaggttgagagaaaaggtagtgattgtaaccagaaaatccagagtgggtgtatttacctccagaactcatcacttaaaaaaaaattttttttgaactgacatgcttgaggctttttcttttttttttttttgagatggggtcttgctctatcccccaggctggagtgcagttgtgcagtcatagctcactgtagccttatcctcctggcctaagcagtcctcctgcctcaacctccctagtagctgagaccacaggcgcatgccacctgtgagtttctagagatgaggtctccctatgttccccagcctggtcttgaactcctgggctcaagtgatcctcctgcctcagccttccaaagtgttggattacaggcgtgagccactgtgcctggccagagctcatcactgttaactcagcctgggtttttcacagcagtcatggaaatagattcattaataatagtaacaaatatatagtctccctctcaaagaaaccttgagtggcagtggcataccagatacacagtaggaaatactgtagaattatgttgttaagttcataaccaaacatcatacatgatgataaaagacaagataatggtcacatttatgcagtattaactgagagggcaaatttgtgcctgagaagctattgggaatgttctctctctttgcattactaggaattacatgggaaacacatgtagacagtcttcaggctattaagatttgtccacttaatctttacttatacatgaataaaaaatgggaaaacatgataaatataataaactaatacactcaaccctgccccttgattatataatagaacaaaatcagcatgcccggcatgagcctgccagattgccaattccatcctccaccttcagaggatgccgccatccagaattttgccttactcattttactttcttcatagttcgacaccttaaatgtatattactaatagtagctttgcatttttggctgatttaaaaattgatataaatgaaataatgctgtagagatgctttttggtattaagtggatatactgttattcttaaagatgtttgaaatgaatatacctttctaaatatctttttaaaataatacattaaatgatactgctttagaattcatgaactgcatctcatgagaatatgtagagatgacgtgggcaggtaaagtaaaacttcaggttgaatatcctatgataatttaaaaatgacaaaatagtgtggtgaataatagagcttgagcactttaaggcaccgtagggaccccttcaatgtaatgatgacagtgctgaggtgcagagaagttaggtaatcagcccaagccactactctaaggacagaccctatctacttttcctaatttgtcagaagactgcctatgatactactaataaaaagtcctatgaaattggtattgtcattattttacaaataaaataatcttcaatttttgtttcctctatgcatgggttacttagtattttgtaatttgaatttcaagcataattaaaaagaaatcaggtatctaggctgggcatgatggctcaagcctgtaatctcaacattttgggaggctgaggcaagaggatcacttgaggccaggagtttgaggtatcttttgttgatctctacactgattgtattctctcttttattctatgaaagttaaagattttttctgatactacatattgtcagttttttaaatactcagtttgtgctaaaagaaaacattcggcaactgatatctgctgttctgtatgtatctgtcagtccagatttgtccattatggtgtatgaatctaatagaacctcaccaatgttatacctgccttcttgaaatcattactgagatagctaatattaaaatatcctggtttgtctgtatatttaattctttactctcattatactaaatttttttaatgtaatttgaattgatggtaaaaattgtatacaggccgggtgcagtggctcactcctataatcccagcattttggaagtcctatgcaggaggattgccagaggccaggaatttgagatcagcctgggcaacatagtgaaactctcatctttataaaaagtaatattaaaatttttaaaagtgtataaactgtaaagtatattttactggtgttttcttccttattcctacttgtcagatgcaaatacacatttttgtgtgtttgtgtttagtaattataagtatacatatttcattcttctatttcatatatttctatgacattatatcttagatgtgtaatttatgaactactactggattattttaatccattagaaattactattcacgcattctgtattcaattcatgtgatagctaatatatttggttttaaatgcatcttattttgtggttttcttctaggctgttttttgtgctttcttttaaaaatatataggttttaataatcttaattttcttttagtttgaaatgtatatactcattttattcattagtctaagataagaattgtaacacttctctaacctattatagaattgttaatacctttacccttctcttgaacacatcaaaggatgtcattgagtgttggtattggagtatagcatatctattattctgctcaattagaagatattgttcatgttgtatagagataataagtaattgtattgatctgcagatgcatccatctcttggattctcattccttctaccactgcagaactttcacctgtaatcactttcctttggccttaaggataacttttagggttacttttctactaaatttccaatttttgaccagatataatcttatattgtgctcttcctgaaaaatactattgttgtggatagaaatctgggttggtagttatttcttcagcaatttgaccatgtcattccactgtgtccctggcctcctgtatactggatgtgaatggatacaattatatattgtgtttatagttttcctgtgctataggaacagtattcgaatctgatgcaaaggacaacacaccctagagattgtaacagtgagatgaaccaagtgattggatggggttttgagttgctggaataatggagttacagtgtacaatgcataagcaacataataaattatatatctggtgaacaaatgga

SEQ ID NO: 474 - DNA, 964 bp, Homo Sapiens
gagaaaaacttcttttatagctcttgcctttctcaaagggggaggactcatcctggagagaaaccccatggatgtattcaacatggtaaatctttttgatggagctctcacctagttgcacatcacaacttataccagatagaaaatttatgaatgtaatcaatgtggaaagtttttcagcctggtgctcccaccttgttagacgtatactgaagactctgggaacatcgggaacgtcagagagctttcagcaggagatctcatctaattgggcaatagaaaactcatactgaagaaaaacaattccatgtaatcaatgtgagaaatatttcagtgacatccttgattttaattggcatcagggaaagtgtaatagagagaagccttatgaatgtagtcaaggtaggaaatctttctatacagctctggccttgttgcacataaaataactcatactggaaagaagcttcgtgactgtaatcagtgttggaaatggttcagttagagttctcacttgttgctcatcagataaatcataccggtgagaaactgcgagtgtcctgagtgtaggaaatcagctggagctgattacttatatggcatcagagatttcacattagagagaaacctcatgaatgtcactggtgtggaaaatcccgcagcaagaattctcaccttattgaacagcaaataactcattctggagagaagcctataaatgtagtcaacgtggaaaaactttcagacagaattattattgtgtatgcaccaaaaaattcatatgggcaaaagccaacatgaatgtctaaatgtgaaaaagccttcaggagactatctgaccttatggaacaccagatcattcataatagagagaaactgtatgcatataatcagtgcagaaaggcctttcaggcagcattctaatcatgtcaggcaccagataactcattcttgagtcaaactg

SEQ ID NO: 475 - DNA, 2223 bp, Homo Sapiens
agctcagctggagtgcaagctgggaatgcagtcaaggcttcatccaccccaggcagctttcctgagccttgggagactggctctcaatgaatccaagctgcttttatcctttgctgcctatctagtcttgttaacaacaaagaagaggagaatggagattgagcaaccaggaagcagtctcagccacaccatcatatggagaagtgcctgtttcccattctgcccgattttaagtttcctgaggcacccccagccatgcagaactctctggtgcctggcccacaggaagttttcactaaatattgaaataaactgaacttagattaaactttggtgtctaacttaggaaaaacaacaagagttctacaaaactatttcttcacaggaaagtctgaagccaggcctgcttagcagaggtctccgtatagtagggatctcactctttcaagatgtaggatctcaactggttagccagccctctgagtgaagctggtcagttggggctgtgacaacatagcacactcaaaggggcagacccttctcagctccaacagattggtgtcattggaaaaggtggacccagtgtaggcagactttcctagagagtccagaagtgactgtgcaagcccaaagcaatccaaacaaatatttgtggaccaccaagaacctctggtatgaagtaaataataaaggcattgaacaataataacctgtctgtatatccaccaatgggaccgatgggccacagtgtgacatctatcctattcatgtcataagggagatgaattctactgtgggacagtctgtgtgactgctcgtaggagattatccaattccttttgctctaatttcatggtcaccaaatttctgcttgctaactttgttttacaacaaactttagaaaggaggtgatctgaataagaggatatatgtttttcagtctctggaaaggggtatttctttgtattgagaagccagaactcttgagtgtgttgagccttgtagagattgaaccactctgggtcagctgacaaaataagattctggtgctgaaaagctgagtatgtgaccatgatattaacagtgacctaagtttgtgtggcccccttcgttctccagaaaccaaccagtcagccttcattttgtaaatgtagcagacaccattttgctagtgaatgaggttaaatctttagccttgtcattggttcggctttgtaatttaaaactctcttattttaccctctgattttaaatccccagattttcctttctgtgtcctttgccccctgaagtttccatctgtctagcaactaagcactgtttgggtatctactgtcttccccaagttgcctttacttttcttctttacctttctcttgttttatttatttctttctttttttgaaatggagtcttgctctgtcacccaggcgggaatgcagtggcgcaatctcggctcattgcaacctccacctcccgggttcaagcagttctcctgcctcagcctaatgagtagctggaattacaggtgtgcacccccatacctgactaagttttgtattttcagtagagacggggtttcaccatgttggccgggctggacttgaactcctaacctcaggtgatccgccctccttggcctcccaaagtgctgggattacaggcatgagccaccacacacagcctctcttgttttacttctgtcattactttttgttcttttaatttggaaacccacctgcttcctcagtgtcattattaaaaacccacatgttacaggttcattaggactgaaacattccttcagagctgagctgaccaacatgttagccactagccacatgtgactattgcatacatgaaatgcaaaatgtggctggtctgaaatgatggtataggtatgaaattcacacaagatttagaatactgaagataaaaaagaatgtaaagtatctcattaatactttttttggtattgatcacctattgaaatggtaatatttggttatactggcttaagcaaatgtacattaaaattaatttcatctatttctttttacttctttaataccagaaaatgtaaaagtacctatctggcaagcaatataaaactattggtcagtgctacttgagagtcttaatgtctgtattttttatatctctgtaagcataaatgctgtattaaaaacccaatttgaataaacacccccaaattactcttcc

SEQ ID NO: 476 - DNA, 4320 bp, Homo Sapiens
atgcgagcggtaagagtgcggcgggacttggaaatcgaatctgtgctctgtgagagatcctaggaaaggaaactgggagcccgggagaactaaaattcccaattaaaagtgaatttaaatctgagctgttcttagacccagaatttcttgcctgaaggaggaatcaggtccccacaaggaaagaccctgcaactgtataaaaaaagaatctaaaaagatcatgactccttcagtcctttcccaaagagacctatggaaatttcctcaggagcacccacaacagaatagacattaaacagctgcataaacaaatgactcagccagttgatgtcagtcagcctgtgtcaacagccaccccaatgctggcacaaaaggcactagaacagaatagcctgatggcagagatgaagtgtgcatggctccagcagcacggactcctctcattaaggctgatctagctactgttgctgccccatgtctaacttgccagcaacggagaccaaagttgagccccggaatcagcaccattcctcatagagaccagctagtcactgggtggaagagggaccaagcaaaaccccagaagagttgatctcaaagcttattttatgaagaaaattgacctgagtgacacaaagggttggactgtagtagatgtcacgttttgctgcctagatctccatccagggatgaactcttatttcctcagcttctttgtctcctcagcttctgggagggttggcagctgatattctcacctgagtccctttctaggacttgcccttgcctgaagagagctgtgctgcccaacatgatgcctcctccaaggtacaatccacacccagtgactaataaacaggggttacaaaggcatgcctgcttgccccagtttgggacaactttaccaggccaacccagcctcaaggctctccacaggaacagggaccctgaaagctgtgtctatgaagttattacaagatattggctactgtggtgcatggagcttctaggccagggtgattctcacacctgcctgatgtggatcttgttgcttcacacctgaaacatcatttgagaagcccgggaagtggtgtggctgctgcatggctgctccaagaactactcccatgggagaggagctcccaacagtgccttgccatcaagctttgatttctaccttacatacctctgaataaactgttgccaatgaggctgatggaagtcttgtgagtttgaatgccaggttgaacttaagaggattccctggtgagcattgcaagatggtatactcaatgttattaatttgtggggagtttaataaaagtattgtttatattgatgtgggaagggtatagggaaattacaaggtatggtgcagtgtcccaagaatagtaacatggggcactgaaaagatagagaaaggaaaagaatgagtgaccagaacctggtgacagagccacaggggagggctgtctggctggagctgtgacttaccattgaaggactcaggaagttcttttttttctttagacagggtctcgctccgtcatctaggctgtcatgcagtggtgtgatcatgactcactgcaccctcagcacacaccaccatactgggctaatttctgtatttttatagacaggttctcaccaggttgcccagtctgatctcaaaatcctgggctcaagcaatcttcctgccttggcctcccaaagtgctgggattataggcataagccactgcacccagccctcaggcagtttttattaattctgcaggaagggagctgggagaataaaaatcccgacctcattttctttccttcttttgttctcttgcttgagcttcccatggatgaactggaagaattcagaaattgaatgatataaataacaaagttaaattaatagacatgtattgaacttagtttttagagtatgtataattttcccaattttctgtggaattattgcaaaatttgatcacaaactataaggctacaatttaaaaatataacaaattcctaactgtaaaaattttctaggttaaattctttgatcacaaagcaggcaagaaatgaatggtggaacaaactaaaatactagctccatgaatgaaaagacctacatggatatgagagtaattaagaaggagttagcagcgatgggactttgtgattgactggatatagacaatgaggaatatagtgaaggaaagatgatttcctgatttctggcatgggcagctgagtagatggttatgctataaactaagaaaagagagaaggataggaagagatgggcctggaagagtatggagtttgagatgagaagagaaaatggaaactctgaggagcacagaaaattaaggcccaagtgaagaaagatgagcttgcagggaagactgggtgatgacaagcggtgtaggagagaatccgggtactctgttttgctgaaatgagaaagacggacatacagatgcatataaaggcatatagaggcagatatatttatatttgaggaagtctggacattgagtaagttagtgctgataacttctagtttcttagttaagaaagagatgaggttatctatacggagtaaggaggaacgtggtggtgccgttgctactacggtgtaatacgtcactactattactattaattatggtgtaatacctaaaacgtagtggcttgaaataacaataattatcttttatctctcacagtttctctgggtcagaaatttgaggataaggtggtgaatgattctggctcaaggtctcccatattgttgtgatcagtggctggagccagaacagcagagggcttagagaatctagggattggtcagatgtcgctttcgttttatctggctttgagacctctccaatgtgagctaatttaggcttcctcatagcgtggtaacctcaaggtatgtgaaccgtgtagcggttgacgcttccaagaacaagtattctagcaggcaaggttcatcttttatgctttaggcatggaaattacatagcgtcactttccctaaaatgagaaaggatatagcatgtttggacagtacgaaccagtatcacctaattgacattaatagaccatcctatccagcaatggcagaatacatatttcaagtgtagatggaacattcaccaaggcagatcatattctgggccatgtacaaaaaaaactgagaaatttaaaaggattaaaattacagaaagcatgctctctgaccacagtggaattaagctagaaatagaaaacaaaaaattatatagaaaatccccaaatatttggaaattttttatttttgattttttaaaattgtgttttttaaccaatgaaaaataattgtattatctgtggagtacatagtgttgtttcaatacatataaagtatagtgatcagatcatggatattagcatatcagtcattccagacatctataatttttgtgtagggaaccttcaatattatcttccagctatttgaaactacataatatattatggttaattacagtttttctattgtggtatagaaattagataatatactcttttaaagtccatgggacacaatgaaaaataattagaaaaattagaacatactttgaactgattgaaaattaaaacacaacatatcaaaatttgtgagatgcagctaaagcagtacctactgaaaaatgtatgggattagatacttaaaaagtagatgttaaaccaatgtcctaagcttctgcctcaagaaacttaaaaaaagagcaagcaaagtaaatccaaaacaagtaagggaacaataaagataagattagaaatcaatatagtagaaaaaagggaattatagatacaaccaaagaaacaaaaaaactggtgatttgaaaatagcaataatattgatataggcctctgatcagactcatcaagaacaaaagaaataatatacacactaccaacatcaggaatgaatttgtaggaacattcctacaaatcctacagacactaaaatacaataagaaaatattataaacaatttatgcttataaatttcattacctaggtgaaaagtacaaattttttcaatgattcaaactgtcaaaggtcactcaagatgaaatagataacctgaatagccctgtatctattagagtaattgcattcatagtttaagatctcctttcaaataaattccagactagatggcttctctggtgaattttaccagacatttaagaaagaaacaatgtggccgggcccagtggctcacatctgcaattccagcattttgggaggctgaggcggatggatcgcc

SEQ ID NO: 477 - DNA, 11704 bp, Homo Sapiens
agacggccatcccccaggcccagccttgcccacaagattcccagatttcacaactggggctggcgctgaatcatgtacagtaagtccggggagagaaactcccggctgcctggcgtccccgggacaggacagctgccaagcctgccctccctcccaggggcccaccggcagccagggatcatcccctctgggcccctgaccagctagggggtgatgggcgagacacacaacctcccttggctgtgccagggatcaagggaccgtgtggtttccagggaaccttcaggctctggagggataggggcaggccagggtggtgggagaggggtcgaagtggccttgtattcaaccacggcctgccaccaaatcactggtgacctggagcagtccctaactgtaactctaagttacggtttccttatctggaaagtggggataatcacagccctgacctcacaggtggctggaaggactctgagaagatctgtgtacagtgcttaccgcaggaagcgcccaataaatattattattattgttgtgacgtcgagctggtcatgacacgctttaagaccctggagaaatcatccagttctttggaggacgtctcccctgaaacacccacccctcccgctgtgatacaaattacatcttatcttttcaaaacttcttcagtacatcagcaaacatttattgagcaccactgtgttccgtgcctgctaccaggtcctggagatacagcagtggacaaaacagaaagacatttaaaagccctctgttctcgtggagcctgtattctagctgaggagaatcagacatttgaggtcatttcagtaagtgagcagggctccaaaggaaataaagcagaaggtgcgatggagagagcctgggaggtcccctctgatggggtgacatttgaacagaagccccaacaaagaggagaagcccacgtgcaaaggcagggggtgggaaacggtgctccaggcagagggaaccgcaggtgctaaggccaggctgtgggatcctcttgttgaaggctcagcaagggcagtgtggctggagcagagggagtgagtgaggggcagaggggtgggaggtgagcttagtggggcccccaccctggagcagctctcctaatgccaggctcttcctgaaagtggccacctggtgcctgacttctacctgtaggggcagccacctgacaagggcccagcttcttcccatccggggtcccaaggccccggagctgcctgctcacagtagaaagcctcattcccaggaaccccacggagggccaggctccccgcccctgccctttgctcaggctgccgctgggactcccctgcccctcccggaggatgtgaccctccctgcctctcagccgctcagagtgtgggcatctgcatctcggagtctcagtgtgcccacctgtgagatgggcaccatgttgcctcagggagggagtaaaaggaggaagggagctctggccttagtatctgtcccctgaaccctggaagaaggaaaacatcggggctcactggggaccaggctgtgcgttcatagctggacggagagctcaggcgtgtgtatgtgcgtgtgtgcatgtgtgtgcatctgcgtgtgtgtgcatgtgtgtgtgtgcacgtatggggtgggggagacgggggtggcatcaagacccaggagccacaagagtgaggaagagggaaggggtgggcttccagggacagggggcagtcagagcctggttctggcgcccaagtggggattggggcagggggaataagaggcctgccctccctcctgggggcccagcggcagccagggatgatttcctgggatgttttaaaaatcatttatttctagaaaagtctttcatcatttcccttcaggtcacggaggctgagatggctgacggggtaggtggctgtggcctgatgtgtcacttttggcctcaaactgaggcaatggggacgaagtggctgcgaggcgcagtatctggcatatgtgtgagaaacaaccacagtgccctggggaggggccacgtcctcaccccgcaccgccagggtctcagcgtgtctcccaaaggtcatgtgggcctttaagaggtggttgggtcctgagagctctgcccttatgaatggattagtatcattattgcaggagtggcttcatgatggagagagtggatttgtcatgaaagtgagttcggccattccttgctgtctcacgtgccacctcttgccatgggatgccctcgccatgggatgacagcaagaaggcccttgcttgagtgagcccctccatcttcggctctccggcctccaggactgttagaaatacatctctgttctttgtaaattacccaggctgtagtactctgttatagcaacacaaaacagactaagacactactatgtagatgaagaaacaggcccaagaggtgaggagtgttgtccaggtcttctggccagaggagcggcagagatgggatttcaaccctgggactgtgtggcttgtgaccactcctagcttcagccctgcccggtgctgaggggtttggggccagaacgatggccagatgtttgggcacactgggccctacccacctggaaagaggctggcctggggttgaatgagaaccagaagtgactcaggctaggacccctctgcaccctccctcaggccgtgggtaattacctgcccaggttaatagcgcccacttcccgccacctttcatcaaggctcctggagctgccaggcagtaattaaccctcacagcacccttctgaagtcagcactggaggcagacgtgtgatgaaacacgtttattacaggaagcaccagttagcccagatgcttctcatctttggagttgagctgcaggctggagacctggaaggccctcgcagcgcctgctcccatcctctcacctcacgaaagcgcaggaatgtgggtttggagccaatgaaaagtactggaatctggctctgctctgtgaccctggacaagtcactgcccctctctgggcttcagtttcctccttggtaacacagaatgattatacctaccccttgggtttgttgacctgaatctacccctcagtcattgcctttccttcttgctgcagccacactggccccttgacagttccttgaacacaacaagccctttcccacctcagggcctttgcatgtgcagtgccagatgcctggaatgtccttccttccaatctccccatggccggctcattctcatctttcttggctcaaatgttacctccccaacctagacagcaccgctgccacctcttcaccccgtcttactcttcttcaagcacttctggaggtatcttgctatttatcttgtttatatctttttcagctccatgagggcaggggattttgtctgtttcattcacaatgtgttcccagagctcagcacagtgtcaggcacacactaggtgagtaagaaacaattgcttcctctacctcttcccctgctagccccaagttcagctaactggctgtgtgaccctggggattgcttttcacctctctggtcccttattctcccttgtggacaaaggatggcctgggcatgagtttcttcaaggactcgggtagcagtgaaatccctgggaccctagcctcagtacctccccaggcaatggggtagagagcaagaaggcagggttggccatgatttgtgaaggagatgccattttccattggatggacagtgagcaagtgaacgcttagagaagaagaggacaaaacaagggaaaagcctgcctgacaggaagcagcacagagctggacaggctttgaactcctggatcccactgtacctgaaattaggcaccttcaactttctagttatgtgagccactgtctttcccatttttggctgaaaacagttgggactggctttctgtcccttgcatacagaaggtgctgactgacccctgccccatggaagaagatactccaggcagaggaaatagtgtgtatagacacccctaagcgaatgccaagcggggcactcatgtaccaagaagaaggaggaggaggcacctgggagctgagcttaagagttagtcgggtggtcaaggtgggagaagggggtatctttagcagagggaacaaccattgcaaaagcttggaggggtgactagttagtgaagatcaactgtgtgctgagctcgtgttgggtggcaagggacacagacgaaaagggcacggtggaacccagctacttctcacctgctccagcgcagtgcaggcttgtctgcttttggagccgagcctggacacctccgtgtccttcccccggcagagtgctgccagcacgctgtctcagactctccagcatctcctggttgatgtgcatcatggggaccacacaagattattttataggctgcacaggcaaagcataaaatcacctcgggtcacatagcgagagttattctctctgcaaattctttacagtctttcctttatatccagaagagtctctgtgtggtgctaacttgcctcgaagaccaaataattgctagtctccctttgtgaaaaggagagcaggtgtcaggctcattcatgtctcaggcacacaattgtatctagctagacttttcaaaatgtcctatagagctgcagcacatatgaatgaggtgtccagctggtcccaaacctgtaatcggcaccccagtgagcagactggacatccccacccccacagctgccctttctcccctccactcatgttccctctagggccaccacgatcccgacttgtatcaccacagatgagtttcacatgtttttgaattttacatcttatctgttttctgttcctatacaagtttgccttttttgaattccatataagtgggattctacaatgtgttatctcaatttgagtctgttttttttttcctgctcagcatgatgtttttgagatgcatatatgcggttttgtgtatctgtagatggttcttttttattgcagaataatgttccagggtatggatgtaccaaagcttgttcatccattcaccagctgagggatatttggactgtttccagttttcagccattataaataaagccactagaaacatttgcaaacaggtttttatgtgaacataaatttttgtttatcttgggtaaatttctaggagtggaattgctgggccaggtggccaagtgtatgtttcactttatcagaaaccgctgagctgttttccaaggtgtctgtaccatttttcatccctaccagcaatgtatgaaagtgtcagttgcttcgtattctcaccagcacttggtggtgttagttttttgtgtgtgtacatgtgttttacttttagtcattcaaataggtgataatagtatctcattgtggtgttagtttgcatttccctaatgactaatgatgttgaacatctttgtatgtgtttctttgccatccgtatattttctttggtgtagtatctgttcaaactttatgtcagttaaaaaaaaagacccaattgttttcttcttaatagatttggagagttctttatatatattctggatactagtcaagcctttgtgaaatatgtgatttgcaaatattttctcctgttctgtggcttgtctttttattctttcaataggtagactttaataacatcgttttgttttctttttaagtatttttctggttatctttgatttgtggcatgtattctttggtttttcaattttagtgataacaccaaatgttttcttttaaaatgaatttatttaagtaaaaacgtcagtaaatttgaagaaacacattaaataaggaatagtagaagtggacagtagacagcataaaaatcgtgaaggcagtttccaatttgcataaccaaagtgtgggcagctccgattcgttcgtcaacaaatactgatggagcccccactgtccaccaggctctgagccaggtgctggggacacagcaccaagcgagatagttgtttgctcttttaatgctggtttttctccagtgagtctctcttcatctttcaaaagccaatttgaatgacccttccttcatccagaccttccctggaatgtttgtcacactctactgcaaatttctatttctgtatctcccaggcaaggggcatgtcgggcagcctctggtagggttgtagagagcttggtgcatagatatctcaataaatagcctctcacatagtacaagctatgatgaggtgctgaagaccagttgctgattcaattggttgaaactagccaggcctgatgaaggggcctgaggaccttccctgctgcagtctggctgaccccaagcaaaccaaagtctctccccttggcctcccctcccacataaagataccaagagaaaaagcctcccaaacccactgccttcagcctctgctatttgcttcccatccagtgcccatggatgcctttcctgcaagacacagtattcacacagacacttaccaggcatctttgttctgacctgccccaggaccaccactttcaccttggcctcttaccaccattcccctgttcctccactccagcacaccagccagtgtttgcccctccaacatgcccagctcattcccacccctgggcctttgcactagctcttccctagttctttgccttctctagctctccacattcagttctgaacttcactgaccctcctcagaggctctctaggctatgctaccaaagccctctctcctctttttttttttttttttttttttttttttgagacagggtcttactctgtcacctaggctggagtgcagtggtataatcatagctcactgcagcctccatctcccaggctcaagtgatcctcctgcctcagcctcctgaatagctgagactacaggtgtgtgccatcatgcccagctatatacatatatttttaaagtagggatatactcactcactgagctcagtatgtagctcaggctggtctcaaactcctgagctcaaacaatcctcccacctcggccctccaagtgctaggattacaggcgtgagccactgtgctcagacaccccatgtatttttgatcccttcattctgtttctgtcctttgtagcatggaatgctctcatttccgagtttatttgtgtgtttgtttgtttctcgccgtgtcccctgttggagtggcagttccatgagggatttgggtctgtccttctctctatctccccagtgcctagcacagtgttcagcacacagtcggtactcaatcagaatttgttgaatctatgagtgaatgaatgaatgagctcatgagctctcccttctccagatgcactcacggcaaagttgaacccatctatctgcccatgcgtcaggctagttgtcctgtgggcccctcctgggtgggtactgagggatgcccactgggtccagccaggcctgtgtcttgtcagctgcccaggctaagggactttccattgtccttggagttggcctgtggaaagttgttctcaggacctcgtgagcctggggccatggatggggctaaaggtaactgcaaggtatagggacccggcgtgaaattccatcagttaacactgtaagtgaggctttccagctccctttcgtcctccctgtgatgccaaggggagggagaaactccacgtggggcttgtgtgtcttgagcaccttcctaccacctgctttttcttcggaagaaacagagcagatcccaagtacaagccgtcatcggcaatagtagctggctttgtttcacttttttgtatatttcaccaattgtcttccatttgcagcaagtgccttagattgggtgcctgcaagcagaccttaacagaataaactgaaggcaagtagcctatttgggagatgcctccagaaagcactggtagggaagtgagatcagggaggaagggctgccaatctcaagagcgctaccaagccagtaaccacttaggcagctggggctcggtcctgctgtggcacgctgggagcccatgtagtaacggagttagccccccaggggcggagatcgggtggtcagggagctggggaagggacatgtcagctcctgcctatcattgcttgacagctgccgcttggagtgttagttcccagcacatccagcctgccccatgagcaaagctcacaggtgaaggggacaggtgctgcaggtggaatcctgtctgtgttcaccggagaaaagggagaggaggtatgggcagggcacagacaacaaaggcctcacagtcaacactggttcctcatttaaagccaggataaaatgagttcatttaaaattaagttttcgcaaacatttaaaaagcgaattgatggaaagagtaggtaatacctgcaggtgaaatgtgaacatggcaaatgctgctatttttcaaggcgtccaaagcctttaataggcaaacagtgttcttcacgacccacaagaatggcgtgtttggggcggtgaaaacactctccctttcctcccagcatgccaggctcatgctcactcctaacactgcccaggacccctgggagtcctggaaatgggccatgaggcttggaggcagaagccctgtgtgacttggggtttgtcccttaacatctctgggcctgtctgttaaaaggggatgttctcaagtcacataaaagagtaaatgtgcaaaaatagtcaaagcaatgctgaaagaagaactaagagagaggacttgtccgtccagacattagaatatatgacaaaggcatagaaataaaacagtttggtattggcatctaagtggacaaatacatcacgggaacagaatagcatccaggaattaacccggctatcacctggcctacctccactcatagatgtgaaaggatttagaaaagggaagagattggcaggcatgggattctctggattatgttatgtctgggctggtgaagaagcttccaacaggctccccatctgcagccctcccctctaacctaccagccatggcaccagggacactcactgtcatgagctgcactcacccccgctctgctctggaaatatcagagcctcccacgcaagatgggttagaccacagttgtcaccattcctccttttgcacttctctttgattcttctgattaacccaaggagaaagtctcaggcgggcgcggctggacttgaatacctctcccacgtttgctcgtctccctttatgaggcagagctggccttaagctcagggccttcagcaggcaggagaatggagcaagaatttggtaacgttcttttgtgattgttgttttaaggttactttctctttacagaaatgaaaagttgtttcctccttctgatagtaacacaaattttccttttaaaataattttttctaatccatattacaatgagaatgaacctccaaaacatgatgctaagtgaaaaaagccagacacagaggtctttttttttttttttttttttttttgagacaggttcttgctctgttgcccaggctggagtgcagtggtgtgatctcggctcattgcaacatctgcctcccaggctcaatgattctctcacctcagcctccccagtagctggtactacaggtgcgtgccaccacacctggctaatttttgtattttttgtagaggcagggtctccctattttgcacaggctggtctcaaactcctgggctgaagaaatccttccgcctcagtctcccaaagtgctgggactacaggcgtgggccaccatgcctggccagaaggtcacatattgtatgattccctttccaggaaatctccaaaataggtacatccattgagaccagtgaagaatggtggttgttaggggaatggggagcggctgctttatggtcacagggtctccttttggggtgatgaaaatgttttgtgattagctagaggtgatggttgcagaacacaatgcaaaaatgccaccgaaatgttcactttaaaatgcttaatatgatgctatgtgaacttcgtctcagtaagttatttttttaaaaaaccagtggagtaaaccaaaaaatcaatttacttaagaaaaggtatgaatggctttaaagatggcttttaagtgacgtgtgggagacagtggctaaggggatgattctcacccatcgtgagcctgggaccatggatggggccagaggtagctgcaaggtacagggacccggcgtgaaattccatcagttaacactgtaggtgaggctttccagctccctttcgtcctccctgtgatgccaaggggagggagaaactccacgtggggcttgtgtgtcttgaacacacattggcttataccttgctcaggcctggaaggccctctgctcactgacggaatcctatgcatccctgggaacccagctcaagcctcacctctacgggaagcccttcctgattacacaggtggtcaggcggggtcagtcctgcagcccttcagacccggttgtgaatcccagtcttgccacttactagtgggaggagtctcttaacttagacatattgtttgactaagagggcctcagtttccttatctggaaaatgggggcttatgatagctcttatctcactaggttgagctcctacatagaaagttttaggacagaacctggggagatgtagctgcccttcattcacacttcagtctgacactgatcacatcacagttgcattccttttcctcctgtctcctacactgtgggcaagggctcagcctttgtgatctctgtatcatgttgctgtacagaactcacacacagtaggcacccaagaagggcgggttggctgacgtgcagaggaactcccagaattccacctcttctctcacctccacggtccccaccctggtccagaccctgcatggcttacctggactattgtggtctcctcctccctggtttcctggcttctgtcctgaatcctccacctccaatccattccccacatgcagccagagagatcccgtgagaatctaagtcagatctcgtcccttctctgcctggaaacttcccacagctctcaccttgcttagaggaaaagccaaagtccttcccgtggctcatccactgtgggacatgccccaggtcctctctgctctctgttcctcctccccaaggcctcatccctacgacagtctccttgttgttgctccgacactccaggctccacctcagaacctcgcatctgccgttctggtttcctggagcacccattaccccacacggcccgctgctcacttcctcacctcctccaggcctctgctcaaatagcacctgctagggaagcttccccctgcttcccaggttttgctggactccaaagctcttttcttcccagaggcaaagcccttggctggggtcctgggcccagcccggtgactcaggcggagaagatgctcccaggcctcccgctggatttggggcccagggtcagccatgggggtaggcggtacctaggctgtacctggcgcagaggcctctgcctgcccctgccgtgggaggcagccctgccctgcacacacgggcttccaggctgcgggtgggaaagccccacatcctcctctgcttacctgactccagctgactcagacccccagccctggccagaggggagccgcagctgctccgccccttgatgggaagcagagctgtggctgtgagggcctggc

SEQ ID NO: 478 - DNA, 31758 bp, Homo Sapiens
gctccggcttccctccaggcggcagcggaaggtgggagcgacgactgcaaaacggcagcgatgggctcccgcaacctccggagcttgtgcgcgtacttcagggaccggcaccacgtcaccgtcacctcctgagtagtgagttcccctctgatgaaaccactggtgtgtttactcaccatccccaccatttttttttccccaacctgatggaaggaagtacataatggagagcaagtttttaaagcacggtcgtgtcgtgtgaacttgctctagccaaattaggtttatagcactttttttggctctcattacctccagtccccacataaacaagagtgaccagctgggtcatccgcaagaccgtttgaaattattgtggcttgggtggaaacttaaaggagtgaagtatctgctttccagaaaaatcgttgtcattcaaagtgaaattaaacttgttttctttgcaataattcgcctttatttccttgtatatctgtaaactcttcacttttttgtaattactagacaattcggacttaaaaagagcctcagcatgtgtattttggaattgtgtagcttcataatgtgaaaattattcttttctatttgagtaaagtacagttaatttgaagtaaataaaatttctatttccattggttgtttcttttaaaaagtcaccttttacttacaaaagaatcactgtaatccagtttacatttatcattgaaggtcaaaagcaagaaataggaagaaacacaagcatactataaaataaaaggtaactgtcatgtttttgaaggtaaggtgttttgacatatcagcagacattgtgtgaatttatttcaactcctagtggtactggtgtaggtagaaaatgttttgcttggttattcatttcatcaaacactctacttcactgtttttttttcacttcaggaaaattcgaggaggaacaacacatactagtgtctttcctttctttctccccgtcttctgcaaatagtcccttcctcttcctgctttctcctccttctcatgttaacatcttcaaccataagatggtgtgttaaaagattgaatatacctctatggaatgacttccagagggtgtaagtctgatatgagagttttattaccttgagtattttactggaagagatagaacaacaaacattttcataataaatgtgtgggttaggagtgttaggagaaaatacactgatactattactttcaatatttgatactacttactttgactctcactgaacacctatttgtttaggatgaattcactttaagccgggttgaagaacaagcctttaattgtcctattatttgtgccaaatctattataaatttgttaaaaaatttttaatacctaccttagagggtactctaggtatttaatgagctagcatttgttaaaggcttgtatagtaagaattcttatagtaagagttcttaccaatagatggtatattttttaaattgtcctgttgcatcaaaaagttcatctttattggtaatgttgattaagtttgcccatttggtagtttggtttcttttaactatcttactagattttcttacttttacctgaaaagtagtccttactaataggcacatgttttgtatatttccaaaatatgtattatgttaaattctctgtacactttatttaaaaattacagacgttgagggaaaaaaaataccctattaagggaagaatgagtttgtgtataacttgtagaagaaggaggccacccatttttagaaaaatatggatggtattgaaaattttgccatggcaagggataaaaaggacaggcttctctaatgtgtctgaaacaacatttgaatcccctttgttcattccctaaatctgctgctcctttagaattcctgattttcataaatagtaccaccattcacttatttgctcaggcataaaacttggaattttctgattcttcacactcatacaactcatcagacagtaccatcagttcttcctgacaaatacattctgaatttagctacttatcacttccactggtacaacccttgggagccaccatcatctgttgctggaccacagcaataaccacactagttgctatcactttctatctgtaccctcatgaatattttcccatttaaaccattctctatataccaaccaaagcaatcacttaaaaaatgttattaggttatgtcactcccttgtttaaaaccctccaatagcttccttatgcacacagaatgaaatcggaattccttaccatagccttcaagactgcataatctggctcctgcccacttctccatcttcccaggaagcagcacaggaagttgttctcacccttcttactgcctcctttctgtcgtgggctgtgctttttctagtctgtagcagagtctgttagttgtccccaaaaattcctccatttttttcatagtaatagacatggatacatggctacccagaacaaagactatattttgcagccttccttgtagccatgtaatagtgctggctgatgggatgtaagcagtatatcatgtggcacacttgtaaaaccatccttaaaagatagttggtgcacaccttcaatgcggcttttcctttatcctgtaccgtggaatatagatgtgatggcttagaactgtagctgccaatttgtgcctcatgcaagttctctcattctagggatggcaaaactaaactggtggaaaccagggtctgtgagaactttatggatcagagcaccatgctagccctgcagtcgtaaatgtctatattattaaagccactattttggagtctcttgttctcaactgaatttaatcttacctgatactctgtctcagggcctttgcacttgctttttattttttatttatttattttttttctgcctgggatgtggtcttctgtcttggatatggctgactcattctcttccttcaggttaacccaaatatctctgacaggccttccctggccaccgtatctaaaatagctcacgttcccatttattctctgtcaatcacgtgcccctctattttcttaatagcatttataatttatcattatcttgtttattcactgtttattttctacctcccttcaccctacaaaaatataaactacacctgtttttttccactactttatccttcacacatggtaggcattagataaatgctgttaaattagtgagtgaatgaatcaacaaaattcttatccaagattagctagactttttaaataataaatgagtaaatgtcaacagatatccttaacacaaaatttgtaaaatccaatctaggaaacaggaaaaacagtactaaactaataggatattcctgacctccaacttaataaagaagatgtctacctttttctgggaaatctgtaaggctagtacaagttaaaaaaaaaaagactgcactgcagtatatccagggctaaaattcacactaaaaggggtctgaattataatttactagacctcagtttcttcatcttaaatatgtgtaagctttgaatggtaatactataacagttaaaagtttaatagtaagcccaacttatgagtgacaaaacatgttaaacattaatttagtcttcaggcactattttaacaagtggttatttcttgataatactggcaaggattcagagaaacagggctgcttatattgctgagagtgtatgttggcagcacttttctagagtgcagtttggcaatatgtatcaaaagccttgagccatgtgcatttgacccagcgattcttttagaaatgtgtcataagcaggctgggtgcagtggctcatgcctgtaatcccagcactttgggaggccaaggcgggtggatcacctgaggccaggagtttgagaccagcctggccaacatggtgaaaccccgtctctactaaatacaaacaaattagctaggtgtggtggtgcacgcctgtagtcccagctacttggaggctgaggcaggagaatcgcttgaacccggaaggcggaggttgcggtgagctgagatcatgccactgcactccagcttgggtgacagagcaagactctgtccaaaagaaaaggccaggcacggtggctcagagagccacctgtaatgccagcactttgggagtctgaggtggggttggatcacctgagggcacaagttgaagaccagcctggccaacatggtgagaccccatctctactaaaaatacaaaaattagctgggcatgctggcgggtgcctgtagtttcagctattgggaaggctgagatgggagaatcacttgagcccaggaggcagaggttgtagtgagccgagattgtgccactgcattccagcctaggtgacagagcgagactccgtctcaaaaaaaaaaaaaaaaaagagaaatgtattataagcaaataagggtgtgtttaacaagttaattgcaagagtattctttactgcatcatttattaggagattggttaagcaacatccatacagtgaacagtattcagccatttgaaatgatgtggaggaaattttattgacatgatacattgttaagagcaaaagaaaaagttttaaaatacaaatgtttaatttgtaagtctcacaaacatcatctaacgaaatatacacgaggtgttaagtcagccttgcaaacgtaactattttttcattatttttatatcagttactgttattggagcattttatattgactgaggatctttattaaaacttcttcagccttctgtgaaatcttgttatgatggctatagtgacactatataaaacacataaccagaatatgtttatgctcaaatatttcaagcaatatttgatgcttaaaataccaaagtgacaatgaaaatgaaagaaatttggatagttccttagagttatttgtttgtgtttcagatatgaacataaagtatgtttttaatattaccagttttgagaataatagaataaatgccttctcaccttaataagatgttctgttctgactcagtattcatttgccatttatttttcaaatgtagctgaaatctcagtcatgttccaggcactatgttttgtctctgagagaggaaaaaccaaactttttccctgttctcaaatactactcaatacaatacttctgcaacaagatggggtgggatagcggtcccccctcacccccgcccacatcaaaccatcaattttctagcagacatcagctgggtgtctcaattctattcagttctgacactatctacctggaggcagcatcagatcgaacagattgagggctcggttctgcaagactgcccccaccacttccagtaccagccacaagtagtaggttgtcaccgatactcctgaccaagctgtaaatcaggattcccatgatcccttcctcaggttcaattagttcactagagtggctcacagaagtcggagaaacactttactagcatttacccatttattataaaggatattacaaagcatacaggtgaacagctggatggaagaggaatctgcacaccttttctcccataccttgccctatgtataggtagggagaagaggtgtggcaattccatgccttctccaggcaggccagcttccaggaacctcctagtgttcagctatcaggaagctctctgaaccctgcctgtccttttgggcttttatggatacttcattatgtaggcatgattgattacattattggtcactggtgagcaaataacctttaaccccctctcccctccctggaggtgaggagccaggttaaagttccaactccctaatcacatggttggcttccctggcaaccagctcccatcctgaggctacccaggagcccatcaagagttacctcattagaacaaaagattctcctatcgtccaggaaattccaaggggcttaggagctctgtcaggaaccaagggtcaaagactgaatagaataagattctcctagtgccctttatctagaagttttaggacctctgggctaggaaacagagacgaaaactaaaacgtgcatacagaagatagatctatatatataatattataaatcacatcaccttgtcatttagttctcaagaaaactatgtgatgtcagaataatagtataattttttccattttcttgtatgctacatgtatgtagcagatatcatttaaattggtgaaccacatttccccccctttaaatatccttgtccatatattgaatctctctaatactcatcacctttggaattgatcatggcagtattaaaggcacttctattctgaactgaacattaaagatgctattacccctccagtgcttttgtgggtcactatcatctataaaaaatatcctaaaaggagaagccaaataaatgaggtaatcagtggaaagaatataagatccttggaatctaaaaaatggctgtaaccaatcagcataataaaacctctaacaatagaaaaatagttaaccacttagtttagcatctgctaaatggcaagcaccataattacatgatttcactcaatctgtgtaacatttctgtgtgataggtggtatttgcattttacagatgaggaaatggaggctttaagagaggttgctagatatatctagaaaaccccattgtctcagcccaaaatctccttaagctgataggcaacttgcgcaaagtctcaggatacaagatcaatgtgcaaaaatcacaagcattcttatacaccaataacagagagccaaatcatgagtgaactcccattcacaattgcttcaaagagaataaaatacctaggaatccaacttacaagggatgtgaaggacctcttcaaggagaactacaaaccactgctcaatgaaataaaagaggatacaaacaaatggaagaacattccatgctcatacgtaggaagaatcaatatcgtgaaaatggccatactgcccaaggtaacttatagattcagtgccatccccatcaagctaccaatgactttcttcacagaattggaaaaaactactttaaagttcatatggaaccaaaaaaagagcccacatcgccaagtcaatcctaagccaaaagaacaaagctggaggcatcaagctacctgacttcaaactatgctacaaggctacagtaaccaaaacagcatggtactggtaccaaaacagagatgtagaccaatggaacagaacagagccctcagaaataatgctgcatatctacaaccatctgatctttgacaaacctgacaaaaacaagcaatggggaaaggattccctatttaataaatggtgctgggaaaactggctagccatatgttgaaagctgaaactggatcacttccttacaccttatacaaaaattaattcaagatagattaaagacttaaacgttagacctaaaaccataaaaaccctagaagaaaaccgaggcaatactattcaggacataggcatgggcaaggacttcatgtctaaaacaccaaaagcaatggcaacaaaagccaaaattgacaaatgggatctaattaaagagcttctgcacagcaaaagaaactaccatcagagtgaaaaggcaaccgacagaataggagaaaatctactgcaatctactcatctgacaaagggctacaatgaactacaatgtagatccagaatctacaatgaactcaaacaaatttacaagaaaaaaacaaccccatcaaaaagtgggcaaaggatatgaacagacacttctcaaaagaagacatttatgcagccaaaagacacgtgaaaaaatgcttatcatcactggccatcagagaaatgcaaatcaaaaccacaatgagataccatctcataccagttagaatggtgatcattaaaaagtcaggaaacaacaggtgctggagaggatgtggagaaataggaacacttttacactgttggtgggactgtaaactagttcaaccattgtggaagtcagtgtggcgattcctcagggatctagaactagaaataccatttgagccagccatcccattactgggtatatacccaaagtattataaatcatgctgctgtaaagacacatgcacacgtatgtttattgcggtactattcacgatagcaaagacttggaaccaacccaaatgtccaaccatgatagactggattaagaaaatgtggcacatatacaccatggaatactatgtagccataaaaaaggatgagttcatgtcctttgtagggatatggatgaaactggaagccatcattctcagcaaactatcgcaaggacaaaaatccagacactgcatgttctcactcataggtgggaattgaacaatgagaacacatggacacaggaagggtaacatcacactctggggactgttgtggggtggggggaggggggagggatagcattaggagatatacctaatgttacatgatgagttaatgggtgcagcacaccaacatggcacatgtatacatatgtaactaacctgcacgttgtgcacatgtaccctaagacttaaagtataatttaaaaaaaaacgaggctgctttagattacaaagattataaagagagaggattggaattcaggttttgtaactacagaacctattctttcttttttaaatgtatgtaatttttaaaatgttgtgtgtaatatttttgtatatccgttttcttgggagaggatccatagatgtcacaagattctcgaaggggtccttactgaaaaaaaaaatgtctaagaaccactaaaactccctactatgaatttagtgcacttaataatggggaagaaagtaactctgacatagtttggccacagaatatattttttaattgttactaatcaatcaaatgaataaatatggagaacctaggtagatgcttaaaattctgattcaactaactattgaattgctattatgcactggcctcacagattatacactactgtttctcagtcttgagtactataggagcaccttttatgaatttttgtggatacccagtgtgataaactatttttcttataaagttaccctaatatgtacaaatagaaaactaggagtaaacttaggtttttagctctattttaactattaaactagaaaaaaattaggaatgaaataaaactaaaatattttaagttaacattaatgtgtaagttttttgttaagcctaaatcatcactggaaatagagcacagatttatttgaatttgagatacctatgttgctatgtgataactcaattttcctaacagttttctcttacgatttttttgaaacctttataccagaagcaagcaattacagtatttgacctttacctggcataaatggatcattaattaacttactctttactgtagtccagggcaattttaagttagatagtctggctccaactccattataagcaaacaaaaacatgggcactcaagtcgaagtatttatttatataatggtgtttttttaatccaaaacagagttatgttaacttttagattacctttgaaataaagctacaaaactaaagattttttgtgagaactcacaaatactaaagaatatgttagtgggccactagggatttaagaagcaagattatgagcgtaagggttttgaatagctaagatctgcaattttatctaaccgaaacacatgcaagcttcagtgccctttgaaaaaaatgcagtattttaaaaattacttctacaaacctcagttttgctgcctaaaattcgagcataaaaatatgactatgcctttcaggattgtcataaaaattttatcggatgggccaggcgcggtggctcacgcctgtaatctcagcactttgggaggtcggggcgagcagatcacgaggtcaggagatcgagaccatcctggctaatacggtgaaaccccatctctactaaaaatacaaaaaacttagcccggcgtggtggtgggcgcctgtagtcccagctactcgaggctaaggcaggagaatggcatgaacccgggaggtggagcttgcggtgagccgagattgcgccactgcactccagcatggatgacagagcgagactccatctcaaaaaaaaaaaaaaatttcatcagacgacatatgcaaatgcttagtatagtgtatggaatgaaccaaccactcaaatagttgcgatgatgatgataatagttttatgtggaaaaccacacgtaatctaagaatttttaataaaattactaatgaggcacctgaaaaggaaaatgcaagaaaataatagactatatagacagccatgtaaaaaaacaacaacagaaatataaatgtgctagctagttgagttaaatattttctgttgagaactaaaatcaggtaaggtggggacgtaaaacatatccctaaatgattacattttatagcgtcaactagtgatcatgttttattttcctgccataaaaatatgtttttaagtcactttaaaaaataaacatgttaactaatcttgagtttatgtaatggcatccctttcacaattactaagagggttttaaaagacgcaccactttttaaagacattgtttagaagaagatagttaccagatatttacaacagttcttaaacaaccttacatttttaatatgatgtccaactctgaagtagttagaattgatagtgttaattaagatttttaaaaacactgcctaatgtagaggtaaacaccatattttataaaacacttattgtacttcctcagtaagagtaagattagtttccattagattctagattataaaagttgctacagctgccataactttggtgaaggtgattctggaggaatattatcccaaaacctcttcttttccttctaatgaagcagcctgcaattaggaaacaactcttcataagcataacccatataagcgagcatgtaatagttaaatggcaaaatccagagaaacagccaattgatcttttacaaactcagcagctgccactgaagaaacaggtgataatgtagcacaaaaagataccgtaaaacacaggacttctaaatacttagtaaggaagacctttttgaaagccttatcctgaaaacatctcttcttgctaaaagctagggaatcttagaatcttattaaaaacaacaccacttacaatagagcagagggaagagaaaatctgttttgaatgaaccaacaacaacagacatatttattatacttttttttaatttataagaaaaaaagatttaattggatcacagttctgcaggctgtacaggaagcatggtaccagaatctgcctgacttctaatgagggcttcaggaagcttacaatcatggtggaaggtgaagggtgagcaggcatctcaacatggtggagtgggagcaaaagagagctattacacttctttaattaagttaaagaatttacttggctttgcctagttccttatagaaacaaaaattacaaaaagggaatgaaggagggagagaggaaggaaaaaggaaggaagaaaaaaaggaaaagggaaaggaaaaaggaaaggaaaaagtaaaaggaaaggaaggttctaaactagattcctcagtacactagttccataagatactggtaagtattctgttaaaaagcaaaggatttcattgtaatgctctgaattaagaggtttcattattgccaaatttgtttgttacttttttttcttcttctttttttttttttccccgtatgtttttgagacagggtctcactctgtcacccaggctagagtacagtgtggcgcaatcagagctcactgcagtctccaactcctgggctcaagtgatccactcacctcagccttcagagcagatgggactagaggcatgcatcaccacatccagctaacttttaataatttttttgtagagacaaggtctccctatattgcccaggctgttctcaaactcctgggtttgagactcctcccaccttggcctcccaaagtactgagattacaggtgtgagccactgtgcccagcccattggtatgttaaggtgttaatatatgtgtacctaagtaccttagttcttttttattgaagattttaattaatatcttacaaaaccacaagctatctaactacatttgatggagatactgtacttgaaaggctgaattttgggttcctgtacatagggattgagaattctctaccacagctttgttataagaaattgacacaaggccaggcgtggctgctcacgcctctaatcccagcacgtagggaggcctaggcaggaggatcacttgagtgcaggagtttgagaccagcctgggcaatctagtgagacctcctctctgaaaaagttgacacatgatgtgaattgggtatcacagaagatgtttttaacaggaccaaataagatatttctcttacccttttaggactgaggttttgccaatacattaggcaaggactggctaacacttgatatcataatactataggtacaacagaatctttcttttttgttgatgcatttataatataatattgagtgggagttttcccattgccccgtaattatgattatgccccaaaactgagaataaaattattaaatacttcacattctaagttaaaataactgaataatcccatagtattagccaagtagtgtcacaagcatacctatcaccaccaccactacctcaccaccaccactcctactcacccttcattaaaaaaatggtaggcctgagagaaaataaggaggccttttggagaatcagtttgtggacaggactgttcccaatatataattggagtcggggttgcatgaagagaattatatccaaagattgggattaccaaaataagaggcatatttcttttctctgttgggtgtttgctgggacagaggacttgctgagctcctggagctatatgagtagaggaaagagaatttgcaagagatgatagactaacagaggccaggacagcaagaaagtggtcttcatgcccatcatttagtgtgtcaagaataacggagattcccatggatggtatgaacaccagggaaagtaggtgagcttcagccattttgtcagtatgcgcgctgacctcagcaagagggaatctctgcagcaagagaaattaaagtggttcagtaaactggatccagatgaccaacatcaggaaactacataatgggaagcccctgcaggctccctcaaagaagcctcattatagatctagcttttggatactgtcacacagaggttatcaaaatccagttaatgaggactgcatccttacccagtcaagtaagaaaataatcgcccttttctctgtacttggggtcgggggagagtagaggggaatagtgtaaagagctttgaattgagctggagattgaagctttaaagttaacaacatgattctttaatatattgtgattgttctaataactttaaataactgaaaaatcagagaatctatgtaggatataattaaaggagtcatccctctttttttctatttgattttaaaacttaagtaaagccagggctgggcgtggtggctcatgcctgtaatcccagcactttgggaggccgaggcgggcagatcacctgagatcagaagttcgagaccagcctggccaacatggtgaaaccccgtctctactaaaaaagtacaaaaattagccttgtgtggtgataggtgcctgtaatctcagctactcaggaggctgaggcaggagaatcgcttgaaccagggagttggaggttgcagtgagccgagattgcgcccctgcactccaggtgacaagagcaagactccatctaaaaaaaaaaaacaaacaaaaaaaaccttaagccaatgctaaagtggtagttcagactcagttgctctctaatcctacttttctgtttaaaatctggactggctgacaatatccagattgaatgattttgctgcctatgggtaacaatatcaggattgaatgacatagctgcctgtctttgtaatgggtagcaaatgcaaaaagaagcaggacttttagtaaaccagatagatatttaataacatgtatgcttacattatatagttcatttcaaaatgtgctttcagtctttatcaacttctttggtgaactttataaagttctgcaattgaaaacattctgggcagaattttaaagatatctacaattaacagtttgagtgaagattctggtgttcagacagagcagactaggtaagcaacatcctttgcagaatgttattcttaaaaatcttgctcctctttgcatttgccacccattacaaagacagacagctatgtcattcaatccagatattgtcactcagtcttatattttaaacagaaaagtgggatgaaagagcaactgagtctgaactactgctttacttttagcattcaccttgctgaagttttaaaattaaacagaatttcacagaattttagatcagtatcttcacttctaatcaattaaatgaatataatttaaccccagaaaaaaacagagtaaatctaaaacttgtatttaatatgattgaagatttaatcttccaggtgaatattgaatttcattgatatttggtgcaataacatctagcatgtatctagtcaagccttttaaccatcgcagtctatatggtgtgaagcatgaagaactgttcttcgtttgtttgttttattggtgagggaataatacaagtgattgctttccaacttcagatctggatacaaacaattagatcattcttttatatgaaggacaacatgggtccatgcaaattcccagtgcattcatgctggtatttactgtgtaccaggcactcatccaaatacagggaaagtagagcagtaaggaaggcagataaggttcctgtttttatggaggagataaacaataaatattcaatataatatgcagtgattagaactatcaaggaaataacagctagagaatgataaggggatggtgtgctcttttagataaagtcagtgaagacatctctgagcaggtaacagaagcaaaagatctgcaggaaatgaggttgcatcaagtgcatgttgatgtacatatgatttaggtgtcagactatgaatttaatatttcttaaggacagtattttttgtatattctgaacaaccccatccgagaaatacaattaacttgcctttacaaaaaaatagcatattgttatgtacagtaatatcttcataaaatctggttgttgcttctggtcttactcatttcattttgattcaacagatctttattgagtaattgctgtacttcaaggctttattctaggtttttgctatataccattgaataaaataatgaaccctggctacctggagattgcattctagcaggaaaatgcagacaataagcaataaacataataaattatatactgtgttagaaggtgatttgtgctgtaatggggtatgtaggccagagaaagggaggtactaattacttggagaagaacagcttccattagtaagtatgctagcagagtggccctcaattaggttagacctgagcaaacaacagggacctgagggagttagccaagtgcctgtctgagaaaacagctctccttgactcatacatatctacatacgcttttgcctccaagaaagttactatcttttttccaactcttactatttttttagcaaaaaaaaaatagagtagctatgatacaccatcactgtatataatttacttgaatacgtgattttattttttatttacataggtagccactactatacacacatgcacacatacatatatacatatatgatttatatatatgacatatatatgattttaaatttttatcatctgaaagtgtgaagaactacctttttttttttttttttttttttgagatggagtcttgcttcgtcacccagtctggagtgcagtggcgcgatctcagctcactgcaacctccatctcccgggttcaagcgattctcctgcctcaacctcccccagtagctggaattacaggcgtgcgccaccatgctcagctaatttttttgtatttttagtagagacggagtttcaccttgttggccagactgctcttgagctcttgacctctagtgatccgcccaccttagcctcccaaagtgctgggattacatgcgtgagccaccacacccagccaagaactactatttttaaaggcactgaaaaataacttatgattagaaaacatatatttttatatactggcatgtgtaggtcacactacaaatatactttatgctttccagttaaaaggtaatggtgttcttgaagatatgttagaaatccaaaataataatttaagataagttggaagacatggtagattactcactgcatgctataaattgagtgcagagctaacaagtgtggtatgttggtatgtgtagttagaaaaattgacttttatgagtttattcaataaaattagaatactttcaattcttttatttttgcttcattccatctgccttccagatatcactgactttattacaaaggtgtttaaagttaacattattaatctacatatacttgttattctgcagagtaaaatcttctaatctttatgtttctaaaagcatgacttttaaaaaaagtaaccacacagttacaaccaggcatctaggtattgtaactgtatttcctttccattttcaaattgtgttctgtttttatttttgaatcaatgttaaataacaggtaactgtttgtaactttagatacaatattttactaaaaagatcataaatgttccataagcttatatactttttgtacttcttttactaacctggaagtaatagatttgatttgctttaaaaaataactttttttcttcataaaacccttcctttcaaatcctgtctacagtgtctccttctgtcttctgaatttactttcgtattacctatgtgacacttattagtttggtgcaaaaggaattgcagtttttgcaattacttttttaatggcaaaaaccaacctaatagtatgtgttgtcttgtgtctgttttagcttccaaaaatagaccatacattttccaaggacaaagatccaattcttatcagttagcataatgattgtttcccaaagtaattcttccactatacttgtaaaactcaaagttatattttatctagatatctacctatctatatctaaatatagatatagtatagtatacaaaattatgctatactaaaattgaaatctttttaaaattgaaagggtttatttagtctacctccttgagatagagaaaaaaaggctttccatcatccctcctctgtctttggtggttaaggttctattacctgaaaaattgtgtagccaaagcgccaataaccagcttgtacgtataaaaagttgatcctaagtagtactatatagaaataaatttaaacctaaaatgtttttgttttatattgacaccaaaatattttgcttttatatctgtacagtctgaaaattcaaaagagaagcaatttaaaggacttccatttacttctttcccctctaatctgcacaaaaggttaaatgtagcagtgcagcagttctggccatcaaaatatgattattgtactttaaaagcagccatgagaactctgctctttgatagacttcaacttgcaacaactaaggtaacatattatctggttctacccaaaaatacatatcctcatcctacttatcttagatcatgtgtaagattcagttatgtttaagctgtccttcggaaaaactcacaggttaatctttagcacccactctctactcactttaggtccttatccctgatgactactttatttcttgcaggaataatccagttccagaggagattaggagttgggtgagaggatagactctaatcttagagaaataaggtattgtacaagttatcaaggcctagcaatccaactactttgaccagaattattacagaaagttggaaaaagattaacttgatgcagagttatctgagctgtggacactgcgcttcttcagtttttcctaacaagtttgaacaggtcagtgttgtcacttgttaggaaaaactaaccatgattgaagtgtcacctttgggcagagctgaaatttacttgtttgatacatgatcttctcaaagtccagtgatcgctactttgaaaaggataccaagcagttaatctaataatataaccaaacatggtgccctgtgctacttactgcacaggttgcatgcctatgaagcagatcctctaaataagaagtgcaagcaaataatgaaaatcttaaaagtctattactttaactaacagaacttctagttttgtctcctatgagaactcttaagagtatgtatgcttattaaggttttacttggaaaattatttgatatcgtaatcataaagagttattagctgttttctcctaatgcaagttaaaatgtatagctatgttaaaaattcatatattagtcctagttaaaccatatttttaatatttttctaaataacaaaaattcagactctctaaggagaaaaaattatcagtttttggtcttattttctatgtgaatggcatcaggttgaagttatcatagttttagtagaacattattttggcctcactaataaaaaaaaatatgctttactgagggaacccagtgttatgccaaggacttgcttcattgtcctgatcattaataatcattagacaaagaactagggaaaaaacaccacatttcacatttgtcagacaagcttatgactttaaaacctaaaaagtatagcaactaaattgcagtgtggttaatcgagcttattcagtttacatattgttataatgtggaaagtggaatttgaccaagaacctttcaacccaatctattataacagatttaattgcccttctgtccttaaaaactttatgacagttaagaaagctaagctaaagtttttttaaatttctgattttgacttttaggttagctacctaactagtggatgaaattgataaataggcatgatgattttcactgtgacagtttgttgtgaaataaatttaaaatgcagaacttaagtttcagccttcctaaattgctcccttggactttacaacttactgttgcccttgagaaactggatcgctgaatgaaatctcttttcacactaccttctctctagcaatccactgtttaacagatggagataccctaacccttgcctcagagggcttcaaccctagagagagtgaggcaggcaatagaaaaatcacaagtaaaattttggtatgttagatgtggttaggtactatgggagaaagataaagcaaagaaggaatgtaaggagtctgggtagaggtaggagcatggaggattataatactaaatccgataaaaagaaagtctgaaaagacaactacatagaaacctggaggaagaaaagtacaagccattgaatatccagggaggagcatttcaggcaaagggagctgcacatgcaaaaccccagtgtgttcaaggtccagcatgaagaccaatgaggctggaaagtagtgtgcaaagtggaagctcactaggagacgaagtaaaagatgtaatgaggtgagagtagaaggagtccaatgaagaagagtagagagttccaatcataagtcactctaagctattttggtaattttgatttttactctaagtgaaataagcctttggaggacttgaagtagagaggtgacatgatctattttattaagaagagctaactgaattggggcaagaagcagaagcaggaggaaggccaggtaggatactataggaatattccaggtaaaaggagataatgacttgaaacagagcagtaacagaggtggtggtgagaagcagtcagcttctgaatgtagaataaagagccattaaatccatttagcttatcattgactgaagtactgtttttataattatttgtgatatatactttcatagtaaaatgtttgaaaatataggtaggtgaaaaagtaaaaatcactcagaacctcactctaaacatttgatggatagtctttcactttttctaaatgtatgtgtgtatgtagcttatatttattcaaatgtgatcatacaaaaatcattttattacccattatatgtatttttatatattgtgataatttcctatttctttaaatattttctcacaccatagtattagtggctgaataatgtagtttggatatagcataatttagccattttatagatagaacagtttatttatccagtattctattgttggccatttatacattttccagtttttctgtattataaataccacttaaatgaacatctgcattgctatatctttgaaaatgtggtcactgtattacttaggaatctctgcctatttaaacaatttttttcatcatatttattttttcattgtgtttatttttaatcaaagaattacttttttcttttttttattatttcagtagtttttatggaacaggtggtgtttggttatgtggataggttttttggaatactactcagccataaaacggaacaaaataatggaattcccagcaacctggatggagtcggagaccattattctaagtgaagtaactcagtgagaacaaatatcgtatgttctcacttataagtgggagctcttaaaagtgggagctaagctatgaggacacaaaggagtaagaatgatacaatggactttggggactagtggggaagggtgggggctggatgaaggataaaagtctacacattgggtacagtgtacattgggttttttcccatctataaccgtagaaagaaaagattatatcagatgcatattgatagattttaaagggtgccaaaaatatttgaatatgaactatatataaattcctactgaagactaaataaacattcatgtattttggaatttgttttctatttctgatagacttagttattaccaggaacagatgaccagttgcaagaactgtcactattttaacattctccatcagctgtggccatgttggatttctggcacctgagcattcacatccatctgtttatagggcattatgcccactcatgaggtttattccagtttcaaaaagtcatgtgtaaaccaagattggaaatatatattccttgaggtataaataatctattatttgaactttttgaattatgtttttagaaagaactttagccacttaccaatttgagataactttcaattaggcatatatggaaagcaacattatcagcaaaattttaactttactaactaataaatagaataatagacttcttcaacatgagaaagttgaaattaggaaaatgctataacatatccttgaaaaatattttgaaaccaacatttatttgataactgctgtgtgtgaggtgcttttgtataatttgtgcatataattgtcataatctgtgaaatagatattatccttactttgcaagcaaagaaactaagagaagtgatttacttagtatcacaagtaggaagtgacaaagataatttcaagcccagttctttctgacttcaaagcccatactcttttaaccatactgtgctgcttaagagattgggatccaagcattagagcagtttgacacatctgtaatgttgattgtaagcagttatagtagttaaaatgtaaacaacaacaacaacaaaacaaccaaccaaccaccatcaaccacatgactgctttacttttaaaacactaaatagcccaaggtaagtataaggatataaattagctctcattatcaggaagacagtgctatatagtaattaactgttttaactgtaagagaatatctacttagacaaaatatttaagagaagaaaatctggtgagatgtttgcttgttgtctttacattagtgattttcaaagttgaaaaaaaaagttatttttcccccacagaaagctacataaaacaagtgaaaatggttgaagtgggggtacaagtgaaagatgggggggatgtagctctatttgctccctacccagttctctcctctaattctccatgtaacatcggaagaaaaatttacaaattccagaattcagaatgtcatttaataggccatgttgtggctggaacacttggttgattggcttactttttaaatattcaactgatttattttggttatctaaaaaatgtgatttgggctgggcatggtggctcacacctgtaatcccagcactttgggaggccaaggtgggcggatcacgaggtcaggagtttgagaccagcctggccaacaaaaattagctgggcatggtggtgcgcacctgtagtcccagctactcgggaggctgaggcaggagaatcgcttgaacccaggaggtggaagccgcagcgagctgagatcgcacccctgcacaccagcctgggtgacagtgcgagactccatgtcaaaaaaaaaaaaaaagtgatttgaaagggggaaacagtttctggggcaatggctcacttttatgttatactgaattatctttccttgtttctcccagccagaatcaataaatttattctatcaaatgatttttgaacttcaagtaaatgccaggcactatactgattcctaccttcaagaagtctagaatctgtctggaagagacagataataaagaagtgaaaaaaaaatcaatttgtgctataaagaaaatctgtttttttgtttgtttgtttgtttgttttgagacagagcctcgctctgtccctcaggctggagtgcaaaggcacaatcttggctcactgcaacctccgcctcccgggttcaagcgattcttctgcctcagcctccctagtagctgggattacaggcgcccaccactatgcccagctaatttttgtacttttagtagagacggggtttcaccatgttagtcaggctggtctcgaactcctgacctcaggtgatccacctgcctcggcctcccaaagtgctgagattacaggcgtgagctaccacatccggccgaaaatctgtatttttgataaacaatacttacagtttgttagggaactactttattttggtctttttggcaaaagttacttgtattggattgaataatgttccctcaaaattcttgttcacccagaacctcagaatgtggctttattagaagtggggtctttgccaatataattagttaagaggaggtcatattgggttaggattggccctaatccagtgattggtatccttataaaaacagaaatagagacacagacacacaagggagagtgccatatgaaaatggaggcagaatggagtgatgcatctacaagccaaggaacaccaaaaattgccagcaactactagaagctagaagaggcaagaaaggactttctagagcctttggaaagcatgattctgccacatcttgattttggacttccagcctctagaactgtgagagagtaagtttccattgttttaaaccacccaatttgtattaatttgttatagaagccctgggaaacaaataaactactttagatcagttaggaaggcttcttgaactatatgacatttaaacagagacataaatgatgagactgtcccagccaagttaaaaatatcactgggaatcaaactcactggtgttattccagctcagtggtaaatgttctactggtattttaaataattctaaaataaagtcattatttttctttgcactccaaagtccttctttgcaaaaactatatgaagtaggcattaatattcagacttactatatagaggctaaggaacttagacctagtaagtagcagagcctagattcaagctcaggtaacctagcttcaggagcctgtaatttaaaccatcaggttatactgactctattctcaaccttatgcagtgtgctttcattcttcccacaagcttccaaggtgtccttttttgtgatatcccatggaatccagtctcatatgtgaaatttagcttttcttttttgtctcctacttttcctcttttcctttataatgatagtagtacagattgctaaatgtattgagcactaagtgtgccagctcttttaattcaaacaacaaccatatgaggtagatactattatcatcctcatattccagaggatatttctatggcttagagaggttaagtgacatatgtgggatcataatactaataaatggcagaccctgggttggttggatctgtctgacttcaaagcttctacttttaaaaaaattcgatgtaaaaccaaggtataacttacatgatttaagatgcacaactcctaaatatttagtatgatgaactctgatatgttctatacctgtgtaattatcatcacccagaacattccctgatggaaagactccttaatcaccccccttaacagtagataatcctccaaagataaacaacattctgttatatatcaccatgaattaactttatttttgaactttctagaagtagaatcatatagtatattttcttcagtgtctcatttctttccagagtccttatttttaatgaccatgttatactttgtccaacaaaactgccaagtcctctgtcctattttcctaggctcttgctaagtaacctatgttgatgatgtaatatgctaattcttgctaaaatattagtgggtgaaaattgtttaagttacttttttggggggataacttattagtatcataactgaccttaagctgagaagaatgactattatgaaaattctaagtagagtctgagagacttttaggcaaaaggggcctagctagttccagttttatatggtttgttaactttaggaaagatgctcataaatgaatgcatagaaggaaagcaaaagctgaaaaaaagggggaaactgaaagtatgtaaatacttctgggcaaagaaaggctgtatgagttttatggtattgggagaggggagtgtcctggtccatttctcctgctgtaactaaatacctgagacttagtaatttataaacaatagacatttatttctcttagttctggaggctcagaagtcacagatcaaggcaccagcaagtctgatgactggtaaagccccattttccatagatggtgccatctaggtgtccttacatggtagaagggcaaaaagggaacaaatgttttttcctcacatggcaaaagagcagaaaggcaagagagagctcccttcaacctttgagcccttttataagggtgctaatcccatttatgaggtcagagccctcatgacttaatcatctctctcttagtactcttgcattggggattgagtttcaacatgaattttggaggggacacaaatattcaaatcatagcactggtacactaattgtggacctttaaaatttatttctaaaatgtaaatgttgtatctataactgaaattgaaataccacagaagaaatcttagatgtataaaaagaaatgttaatgtcatatagaaaaatgaacattgaagttgtcaaaagttttgggttctagtcactgctctgcagcttaccagctaattacctcgcttaaatcacctaatctttctgagtcaacttcagtatatgcataaaaacatttaccctgcctgacaggattggtgtgaagattaaatatgaaataagctagtttatattaatgtgctttataaagtctcatatatgaagctttatatatatacacatatcactgtcataaaatagttaatacaatattagatatatgaaaaattgaatactgtaaccacctgatgcaatagaaagtcttaatgacattgtttttgaagaacttctaatttaataacccaggcttccagtcactcagttcaagtttgtcagaactctaaatgaatggatttggaaaaatacaagagcaattttctttcccatttccttttgcttttacatttcacctcttctcagtgataaattttgttggaaagcaagacataatttttttacttttacccttttccttagagtttcttgcatgtcacacgtgaatttgcctagggattctcctgtaacaagaattatttaattgtcaggtaagagtgtgaagaatttattagaaaaatgtgaaagacttcatactgataaccaattattattattattattattttgagaccgagtttcgctcttgttgcccaggctgtagtacagtggcgcaatcttggcttactgcaacctccccctcccgggttcaagtgattctcctgcctcagccttcctgagtagctgggattacaagcatgcgccaccatgcccggctaattttgtatttttagtagatatgggatttctccatgttggtcaggctggtctcgaactcccgacctcagatgatctgcctgcctcggcctccctaagtgctgggattacaggcgtgagccaccgtgccctgctgataaccacttactaatttatagccaatttaaaaaaattggcgtggggtggggaggcacgctgggtaggaggatgggtagtaataatatgttccgctttactttggactgccatctactggtaaattaagtcagacaatgtttgacaaacaaaacaattatgttcagagattagaacaaggaacttgttgaagaatgacatcagcaaaatagtggaacagaagttcctagtactcatctcacagaaacataaatttaaacatctatccacactaaaaaaatacctttacaagaactaagaaattcaagtgagggattatagcacctggatgtagcatggaaataagaaaacatgtattcatgacgacaggaaagacagttttacattacctgtgtgctatggtttgaatgtgtcctctccaaacttcatgtgctgaaacttaatgaccaatatgatggtattaagagatggggcctttaagaggtcatgagctctccttctctcatgattaaggcctttataaaaggggctttgtgtagtgttcacctcattgcctttccaccttttgccatgtgaagacctagtattactcccctccagaagatgcaacaataagatgccatcttgaaagcagagagcatccctcaccaaacaaccaaacctatcagggccttgattttggacttcttagcctccagaatgatgagaaaataaatttgctatttataaattatccagtctctcagatattttgttatagcagcacaaaacagactaaagacaccatgtcactgttttcacaagcctgggcaacacatcatgcagataaatacccttcatgtgggaaaagcagtgtgaagtgagctctcaccttcacttcagaccctggcagcaggcctaccccagtaagcccagactctaggaccaccccagcaccaggagtctccaggccaactgtcccagtctccagaccagctcatgtggtcacaggctccaggcccaaccgagagacaggcttgaccttgcagccttaggttctaggccagccccttggacacaagctccaggcctccaaaggtaaacaacattctgctatctctcactatggattaactttgtttatttttgaacttcctagaagtggaattatatagtatattcgctttggtgtctcatttctttccagagtccttatttttgatgaccatgttatactttgtccaacaaacctgccaagtcttctgtcctattgccctaggctcttgctaaataacctatgttgatgatgtaatgtgttaattcttgttaaaatattagtgggtgaaaatgccctaccactgcaccaacccaccccctgcagactcaggctctagtcccatcctagcaccaagccagctcccatggtcccaggctccagactgccccctgtggccctatgctccagaatatctaggttccaggcccaccccagtagaatttgatactagtccagccctcaaagacccaagctccagactggaccccatcaacccaagaccaaagcctgcccgcatggactcagcctccaggcccactaccatggacccaggtgccagggcaccccactgaaccctggtgctaggtcagctcctgtaaactcaggaccaggcccatctccatggacccaggcaccaggcctcccctagcaacaggttttccctcatggactcgggctttaggctggcccctgtagacacaggtttcagcctacctatgcatgcctacccatgcaggcccaatctctaggcccaacccagtggagtccagcactaggctggcctctgtgaacccaagatccaagcctaaccacctagattcgggttcaacgcctgccccactggacccatgagccagactcagccaagtggacctagccaccagaccagcctgcctgaggattccaacagcaagcttgcaagcagaccccactaaatggctcaccaagaatctctggatggtctgactggtaaaggactttccctgccaaagccagtctgtaaagatgggaaaagctgcctgcttctttttaaaaattatattttattttttagagacagagtcttactatgttgccaggctggagtatagtggatattcataggcacaatcatagcacactgctgccccaaactcctgggctcaggtgatcctcctgccttagcctcctgagtagctgggacttctgtgcctggttaagaggttcctacttctccaaatagacaaacaccaacacaacaccacaaggattacaaataaaactgcctgacaaagaattgaaaataattgtcttcaagaaacttagtaagctcccagagaacacagctagacaactaaacaattatcaggaaaacaatacataaggaaatgagttcaacaaagagaaggcatttaaaaattctggagctgaagaacacaatgcttgaactgaaaaattccatagatagatttaacaacagatttgatcagtcagaagaaagaaccagtgagactgaaaacaggtcatttgaaattagagcagaggaaaaagaatgataaagagtgaagaaagcctatgggacttagagaacaccatcatgtaaaacaatatttgtgtgtaagttttctggaaggagtagaaaaagaaaaggggagaaagcttattttaagaaatagtagcagaaaacttcccaaatctggagagggaaatgaatgtccagattcatgaagctcgaagaaccccaaatatattaaatataaagagatctaccccaagacacattataatcaaattctcaaaagccaaagacaaagattattttgaaagcagcgaggaaagacacgtcacatgcaatggaacccatatgagatggtcagtgaatttctcagcagaaaccttgcagatcttgagagagtggaatgacatatttaaagtgctgaaagaaaaaaaaaaacctgaaaaccaagaatgctacccctggtaaatctttccttcagaaatgaaggagcgataaagactttctcagacaaacaaaagctgtgggagttcatcaccactagacataccttacaaaaactgtaaagggagttcaagttgaaacaaaatgacactaactttctagaagctgaagctgtgaaaaatttttaaaaatgacataatataaaaacatagaagtataaaactgtaaaggtaagaatacagtcaaattcagaatactctaatactaatgatggtaatgatagtacataaataactctagtaaaaagttaaaagtcgtgagtgttaaaaataaatatggcaacaataatttgttagtggatacacattatataaaacatgcaaattgtgacaccagtacataaaatgtgagaggaggagaagttaaaagtgtagagttttgtatgtggttgaagttaagttgttattagatccaaatagactgttataagatgttttatgtaagccttatggtaaccacacacaagaaaagtctgtagtaaataaaagataaagaagacgaaatcaaagcacaccactacaaaaataaatcattaggctgggcacagtggctcacgcctgtaatcccagcattttgggaggccgaggcgggcagatcatgaggtcaggatatcgaaaccatcctggctaacatggtgaaaccccgtctctactaaaaatacaaaaaattagctgggcatggtggcggacgcctgtagtcccagctactcgggaggctgaggcaggagaatggcatgaacctgggaggcagagcttgcagtgagccgagatcgcaccactgcactccagcctgggcaacagagcgagactccatctcaaaaaaagaataaaaataaaaataaaaataaataaatccttaaatcacaaaagaagtcagcaagagagaaagaaaggaacaaaggaactacaaaacagatttaaatgattaacaaaatggcaatattaagttcttcctatcaataattaattgtaagtggattcagttcttcaacaatagagtggctgaatggataaaaggaaaacaagattcaattatatgctacctaccagatactcacttaagctttagggacacacataggctgaaagtgaagggatagaaaaagaagatattccatgcaaatggtaaccaagggtgaacagcagtggttatacttatattggacaaaatatactttaagtcaaaaactttcacaaggacaaagaagctaattatatcatagtaaagagatcagtctatcaagaggatataacaattatgaatactatgcactcaacattggtgtacctacatatttagcaaatattaactgaacagagaaatagaaagcaatataataatagtagagtacttcaatacctcactttcaaaaatggatagatatagatcatccagacagaatattgataaggaaacagtggacttgaaatacagtataatataaaccaaatggatctaacagatacgtacaggacattccatccaacagcaacagaatacacattcttttcaagtgtacgtgaaactttctcaaggatagatcatatgttaggctgtaaaacaagtcttaacaaatttaaaaagattgaaataattatcaatatctttttcaacgacaatgttatgaaatgctgtaaaatgttaggaaaacaacaggaagaaaattagaaaatacacaaatttgtgtaaattagaccacatacactcgaataaccaataggtcaaagaagtcttcaaaagaaaaataaaaggccaggtgcctgtaatcccagcactttgggaggctgaggtgggtggatcacctgaggtcaggagttcgagaccagcctggccaacatgatgaaattccgtctctacgaaaaatacaaaaattggccaagcatggaggcaggcacctgtaatcccagctactcgggaggctgaggcaggagaatcacttgaacccaggaggcagaggttgcagtgagccaagatcgcgctaccacactccagcctggacaacaagagtgaaactccatctcaaaaaaaaaaaaaaaagagaaatgaaaaatatcttgagacaaatgaaaacaaaaccacaatataacaaaacttactggatgcaacaaaagcagtcctaagagggaagtttataacaataaatgcctacttaagaaaaaagaaagatctcaaataaaca

SEQ ID NO: 479 - DNA, 1480 bp, Homo Sapiens
ggggcatttccttcagcgccaccatgccagagagagcggcaacttcccacaggttgcaaatgagtccgcgtgatggggacgtgagttaattagtgcacttgggtttgagaggtgggtaacaagctgccgctctgcatttggtggttccttttccgaacaggtggcaactgactgacgggctttctctgaagtggagaaggacatctgtgttttccatattgcggaacaccggatctttccaagtcacacatttgggaagacagctgaattgccttcaagttcctcctgttatggtacaaatacccacctggtgtgcaaacatgagagacgcagctttacactagaaccaatgaaagcaaatttgagaaaacccaactctttaggaatggagactacagatgtatgaggggatcttaataattaaaagaagaaaatatgtaaacaggaaaaatatccaactgtcacaaaactctacactaaatcaaactgcaaagttttgtctttttaaaaatatagtcatgtgccacatgacaacgtttcaatcaaggaggggctgcatacacgacaatggtcctgtaagattacaatggcgctgaaaatttcctatggcccagtcacatcatagctaccaaaacatcactgtgcaaggcactactcatgtgtctgtgatgttgctggtaccaacaaatttactgcactgccagtcatataaaagtataacacatacaattatatacagtacttaatacttgataatggtaatagtgactatgttactgatttacgtatttactataacttgtgtcattattttagagtgtgctccctgtacttacaaaataaaaaatttaactgtacaacagccccaggcaagtcctttaggaggaattccagaagaaagcattgttatcataggagatgacagctccatgcgtgttattgcccctgaagaccttccagtgggagaagatgtgcagctatagaataaacagtggctggaggatgatacaccaaagaaggaaagaaacaagtgaactcaaatcaaagaattcacatcagcttttttgaaaggggaaaaccaaaaacgtcaattgcaagcctcaacccccttcttcttccccaaactgtttttccttttggtttatttctgcatcagagtctacctaggtttcaaaaccaattttccattttcctagaaccagccaaatatggagtgtgtgcaaaaacatggtagcttaaaagaagaagaagtagacaattatcaaagggaagagggaggaaggaaagagaagggaaataaagagagatgacacaagggaactggaccagataaagacaaagcaatgcacttaacccacctggagagcacatcggaccagcaaggcgctctcagccaatcgcctgggtctgcggctgggaggagagtccgcatgggttcatttggctgaggagtgtgtttcataaaccttacggtgcagct

SEQ ID NO: 480 - DNA, 12969 bp, Homo Sapiens
ttatttaaaaagtttatggaaactgcctaaaaagtgatcagaaattgaatctcaaattttaaacattgatgtaatgtaggtcatatattctaaaactccaataaaattaagttagatgttagtttaaacagtgagaaaaaaaacccttacatgtagaaattatgaaaaaaaccccgacacttctaaacatcttatgggccaaagttattgtaacaataatcagaaaacacataaaactgaataaaatataaatattacatatcaaaactaacgaacacctaaataaaacattatttaactttaattgattatattctaaaaaggaaagactgaaagtgaacgagccaataaccaaacttaagactcaagaacttgaaaaattaacataatacagaatacaaacaaaactgtatattatcatcagaaattatttatatataataaatctgaaatagaagaaaaagcaaaagataatttttgaagagataaaactgacaaatctttagtgagactaatacgggaaaaaaacacataaatacacattgttaagaatacaggcttggtgtggttgctcacacctatactcccagcattttgggaagccaaggcgggaggatcacttgaagcatggagttccagactagcctctgaaacatagagagaccctgtctctacaataataattataaaaaattagctaggcatggtggcacatgcctatagtcccagctactcaggaggcttatatgagcccagagttcaaggctgcaactagccatgattgtggcattgcactgcagactgcgtgacagagcaagagtccatctctacaaaaaaataataataataataacataaatgcaggaagaaagtgcagagactagaaacatgagtatcaaagttggacacataaaaatatgtatacatttaattatataaatataaaaattacaatatatatcatacaacacatctctatttgcatctctatctctatgtccttatatttatagctaaaatataattacacatacctatagtttattcttattatttacagtatttctgttttataagtccccacagacactgaattagccaatagtgaactcagacaaaaatacagttagatttgtgaccctttgttcacattattttgttaatccatcaacacgcacctttgttttatatgtctccatttaaagacaacttatttaatgtattttgttgattcattaacattgaactcatagccaacagcactgcaactcatgcctagacacagcttatctaacacacataattttaccttaagtctcattaccaccttttgcacttaggaacattacatagcactttaagcactacatttgggggccattttaaacagtgaaattttcaacaaaaagcacaagaatgtgaaaaacacagctctaaataaagcacagaaaggacatttgcttgcagtaagtgagctgaaacagaaaggcaaagtgtcactgtgtttgatctcacttgggaatgtatgcattgtgcaacttgtatttttggctctctgcagatatccatgaatgaccatgaaagtacagcaagtgattttcaagctgcaaacaaattttagcaagtaagtgcatttgccaataagcaatacatgaatatgagaatcaaaagcatatataccataatatgccataagtttatacaccataaaatatatctacatatttatatctatatctatatcaatctatatgtatatcataaaaacaacaattatcaacaatgcaatgaatttaagaatacattggaaatgggaatagaatagatgaattcatagaatagtcctattgataaacaactctaatatagtacaaattattctaccgtatgaaaaaaagaatactagttcaatcattttctgaagctagagtaacttaaatacaaaaatgtgacaaggatagtcttagaatgtagaacacacttataaacatagatttttgtgcagtattaaatagaaaatagttggtcaatacaaacaaaaaggccaagtgtggtggcttacacttgtaatcccaaaatgttgagaggccaagacaggaagatcacttgaagccaggagtgggagaccagccggggcaacatagtgagacccccatctctaatatatatatatataaaagctgggcatggtggcacatgcctatagtcccagctactctggagactaagagaggaagatccctttagcccaggagttcatggcttcagtgagctatgatcgtgttactgcactccaccgtggcccacagagtgaaaccttgtctctaaaacaaaatccaaacaccaaaacccaaaataaagacatttatttattaaattttatgtagcatcagaatcttcagctaagctaggcatgcttcacaatgtaacaccctttaaagcaagaagaatcttgaatctacttctcaactattttgcatatatcttctccaattcttttcacattccccgttatgtcagttcctattcacctcttttttagtcatctccatttatttttagcagctcatattatcacctagacaaaaggtcaaagactttatcagcccctgttgtgttctgtttgggtttttgtttgtaatgtcctgtctattttccttttaaaatggcaaaatgataattctatattataaggcataataaccttgagattgcccaattgttgttgagtggataatttaaaaataattgtagagttttcgtcaagaaagtgaaaataaacacaagccagcatcagttccatttaaagcaatactacatagataagccacttcacctttttaatatagcattgacattggcaacaaatgttaaggatgtcatatacaccatgaatttgaataaattaaatgcagaaactagttgacaagtctattttttcataaaattaatgttaaaaattgagtttaagcttgagtgtcctactgtattattattattacataacaaatgagttagttatattgaaaatgtaggaaaagcaaacttttcccaacccccctcgcatcaaagatggtgtctctcaactgcattagaaaatgctgattcaggtaatcccaccctaaccccagatgctgtctaatagtgtattaggaaacccctagtagcttggaaagtattaacctagtatttctgtttatattgccttgattattagtgtaattaaacatttgatttcatcttttgtaatacataggtgtatgtctcttaaaaatattttaccaattgcttacttgattattagtgtaattgaacatttgatttcatcttttgtgatacataggtgtatgtctcttaaaaatattttagcaattgcttattttttcttgtagatttttcttctctgaatcttttttattgaaaattttattcctgagtgaatctcataagttgcaaacattgaatgaagtaggatttttaactttattttgttcacatgtgttgtcaagtgtttaaatgccatcaataaatttgtatatattaaattccttatacgatttgttaccacagtccttattatagctagtttttcagtttgttccattatatcaccatttaattgctttataattaatagcatttttgaaagagtcttcataagtcttcagtgattttcttaaattatttttattttgcagttaaataattttccaaacaaatgaactaatttaaagtgataatttttactgttattactttaatttacataataatttggcaagaaatgaattccagtagatatagcaatgcattgtattccctctgctgtagtggaaagcgccagtgttacaactagaaataaaaatctcaggtatggtagtgtagaaaaattgaaggtctggtagctgtctcatatgaatccaagtagttctgttcagtgctggaaatagcttacgatgtcatggttccaggttctctcttgttactctgtcatgttcagcaaaccatccttgcagctgtttttgctttcatcatcccattctcattgcaggcaaatggaagaagaaagaggagagtggtggtgtgtgctttccctttaatggcagaacccaacagtcgtacacaccacttctaccctcttaagatgggtcagaatccaggcccaattccatgtatacatggaagagaggcttattaaagtagccttcagttgctggacagagttccatccaaaactacagttaataggtaagtcgagaacttacattaagtgataaatggcagtctctgccaaggaaaatattcttatccatgctcatggataagaagaatcaatatcatgaaaatggccatactgccaaaagtaatttatagattcaatgctattcccatcaagctaccattgactttcttcacagaattagaaaaaactactttaaatttcatatggaaccaaaaaagagcctgcatagccaagacaatcctcagcaaaaagaacaaagctggaggcagcatgctacctgacttcaaactacactacaaagctacagtaaccaaaacagcttggtgctggtaccaaaacagatacatagaccaagggaacagaacagaggcctaagaaataacaccacacatctacaaccattgaaactttgactaaccagacaaaaacaagccatggggaaaggattccctatttaatacatgctgatggaaaaactagctagccgtctgcagaaaactgaaactggaccttatacaaaaattaacttacatcttatacaaaaattaactcaagatagatcaaagatttaagtgtaagacctaaaaccaaaaaaccctagaagaaaacctaggcaataccattcaggacataggcattgccaaaaaccttatgatgaaaataccaaaaggaatggcaacaaaagccaaaattgacaaatgggatctaattaaactaaagagcttctgcacagcaaaagaaactaccatcagagtgaacaggcaacctacagaatgggagaaaaattttgaaatctatctttctgacaaagggctaatatccagaatctataaggaacttaaacaaatttacaagaaaaaaacaaacaactccatcagaaattgggcaaaggatatgaacagacacatctcaaaagaagacatttatgcagccaccaaacacatgagaaaaagctcatcatcactggtcattagagaaatgcaaatcaaaaccacaatgagacaccatctcacatcagttagaatggcgatcattaaaaagtcaggaaacaacagattctggagagaatgtggagaaatagaaatggttttacactgttggtgggagtgtaaattagttcaaccattgtggaagacagtgtggtgattcctcaaaaatctagaactagaaataacatttgaccctgaaatcacattactgggtatatacccaaagattataaatcattctactataaagacacatgcacacgtatctttattgcagcactattcacaatagcaaagatttagaaccaacccaagtgcccatcaatgatagactggactaagaaaatgtggcatatgtacaccatgggatactatgcagccataaaaagaatgagtttatgtcctttgcagggacatggatgaagctggaaaccatcattctcagcaaactaacacaggaacagaaaaccaaacaccgcatgttgtcactcataagtgggagttgaacaatgagaatatatgggcacagggaggggaacatcacacactggggcctgtctgggggttgggggcaatggaaaggatagcattaggtgaaatacgtaatgtagatggtgggttgatgggtgcagaaaaccaccatggcacatgtacacctatgtaacaaatctgcatgttctgcacatgtatcttagaacttaagcataacaaaaaaatatatttctgggcagaggaaaaatactttgaaatttacatttaatccagtaaaatttcagtgcattaaattaaagcttgtaatataataatgataataacagacagcatttaaagagcacctcttgtggataatcaagttattgagaaattatgtgtgttatctctgggataaagattgctgcatccttatattcttgtgtataaacagaccctgtatatgtaaaaaaaggaaagagaaaagtatttttaaatgcactaatttgtaattaccacataaactattactcatggaagattagttatttgttgtcagtactttttttttccctttcaaaaatgtattcagattttactatggcctaatatgtaataaatgtatatttcctgtgtgtcccattggggctttcaaagaaaacatatctcttttagaaaacatttttcacatagagatattatgcatcatattcaaaacctttgtagatatctttcttgaattattttatgagtcaaagtttatatttcagaaatatttctttattttttccagtaaaggagaaatcattaataaagaggcaaatttattaacactattacctgaattttttagaatgataacaaataaatttagtaaatattgctgatttattagcagataaagtcattctgctccaagagcatgacagctaaacttccactagctcatttatactctgtggaaatatgatttactgccatatgagagaaattaaattctattattttaattctgtattttgtatcataaaagagaaaccagatatggaatacagaatatgcatatatggaataaaacaatggggaataaataagatttagttcaagaaataaagagatcatgtattcaaacacaccagtgagttctttaaaaaggaaatcttttatgttctaattaaagtagcaaacttcacaacttgagtttttcagctcatttgtttcctgacttctttattccaagttaaatactcctaaggtgggtcatataattcagtgacctttaaagtaaaattgaaatatttaattttactacttttctttatctctttttctctcaccacatgcagcttataaatgccaatagaattaattgcctaattataaggaataaaaacattgccttttgaaggatttcaaatttatgtatcctgctgtggagattttgcttgactacctgacctatacagtctgtgcttcttaaggaaagaaaataagtggactactttcgaacacattttgaacttggtaatgaatgctacaatactgctctgctctataatcttaggttattttatattttaagggcttcacctggagccattttactgttaaccataactattatatatactctttaataagctccattatatttttttttacttttttccttatacaatttagtaatatggcagaaaagcaggtaataaggaaaatactaatcatcattagtttacaacacattgacacacattttccagcaagaaaattcgattaacaggtagcacgaaaaaaagctgcctacctggataactcatataacactttacactatatctctcagaaaaaaattaccatattcaatatgcttcatatttattttcttaataaccacatttttaataacctcattttctctgggaattttgggtttcaggtacatatagcatcttcatgccaattttataaggtcataccttaatcactagttgcaaaagtagggatataaaggcaagaattctagattagaaagtgatatatgtgattttacaggaagacagaagaaagggagaatttgtgaatactatgtgaaagaagaataaacccatgagccaaacttaatttggatattaaagctgattatatcacacatacaccaagagagtatgaaaagatttatttctcacataatgagactttctggacagatcatggcaagctcaaaaacagttctgaaaatggcctaagataatatggagggatgagtagcttgcctgttattttacttggagttgggagttgtgcatctgggatgaagtttacatggtttgaactttccactggcactgaggtaaagatctaagatatataactggcttgccaagatgtagaacaaaacagaagggcgggtggtaaagcataaaaactattaacaataaggcaataaaaatcaatccagactctttattataactcactccaatgtttgactgaggagtaaaatgtgctatgatttatttaattgcatttgaagttgttatagtaagccattatggttacctatgaggctcacagcatgagaacggtaaggaaataaaacttccattgaataccttcgtcagcagatgtgatggttaattttatttgtcaatttaattggttgatgggatgttccagtgtttgcttaaacactattctgggtgtttccatgagggtatttgggatgcaattaacatttatatcagtagactgagtagagcagattttctgccgtattgtagttggaacttacctaatcagttggaaatctaaataaaacaaaaagtctgaatcaccctaaagtaagagagaatcttgctacctgacactttttgaactgtgacattggcttcttttcctgacttcagactcaaactgaaagatcagctttttctgatttttaagcctgccagcctttggactggaactacttcatttgttctcctgagtctccagttttgtgacttgccctgtaaaccttgggacctgctagcctccatgaacttccatgatattactaatttccttaataaatctcattcattctctctctctctctctctccctctcttagttctgttttttttgttgttttgatttgttttgttttgttttttcctggaaaactctaactagtacatgagcccagcattgtgtattttgtgaagtaaaatgtgttccttgctcacaattgctcacaatcaattgctcactattattaatgtgtagaaccgtgaaggggtaaggaataatttggtaaagatttgtattgtggcatcattatgtaaaaagacttgcaaccctggttatatagtgggtacttgtaattcacaaaatttcagagttattttttccaaacaggaggatgttggacatgaaaattttgttgctagcattggcctgcccaaatggccagaccattgtccacagataaatattccgcaaaattatgcagatatggctgattcttggacagagcatttattgttaagattactgcatgatgtttggccagttgcactgagccttgggtctcattcttgatcagggacattctgttgaagcaacagaaagtggctgttatgcagtgggctctattatgtgtaatggcagtgcttccatccatcatggtatattaatggactcacagttccacatggctggggaggtctcacaatcacggtggaaatcaaaggaggagcaaaggcacgtcttacatggtggcaggcaagagagagtgtgcaggggagctgcactttataaaatgatcagatctagtgagacttattcactatcacaagaataccatgggaaaaacccacctccatgattcaattatctcccaccagtacccccatgaaacgtggggattatgggaactacaattcaagaaaagaagtggatggggacacagcctaaccatatcacatgggtagtctggaacctctaaaagacataagaagaggttgccaaagcttctacagtgaacaatctttggggggcactaacttaagtctctgttgtattgcaatactgatagattctagagtcttttgttgtagggtgacccattcagggtaagtcaatttgtgagcaacaacataaatgagcttaaataaatgtaaataaggaatatgtttctttcagaatccaaaaggtcgaaaagatgttgaatttgttttaacattgtgggtgatgacagaatgaacaactgtttctttataatgtcaggaacggagcaccctctagttaaatgatagtgagaaattttactgaggtagtgaggccttttgctttgtgtgagtaagtagtccactaattttgatgagctctgttgtgactgtttggttgtcctgaatgaatgtgtaaatagactctcctaggaggatgacatcaatataatgtcatacatatgttcctagaaaaattttaatgtgattaaggtcttacctacaaaggctgtgtgcaacagtaaatctgttgcgatgcccctgggttgctgcataaggatgtattgtctttttgaaggtgaagaaaaactgcagctaagaagctgttgaaataggcaatgaaaggaatttactagctaaatctgtgactgcaaagtacttacccgtttctgattggattgaatggagtcagtaatttaagtaatatcgggtatagaagacttaatgggtgagattatgacattaaggttgcaataatccatcattaagtgttattcattatttccagttttaagaatagaccaaatacagttattaaataaagagaaactgtgggggataattacctcttctccaaatagttcttgtataatgtgttttgatcttcgaaggctctgtttaactttgtatgtggccacattaagtattttgaccagaggggaaaacccatgaggtccaattctgtgaagctgattgtaagtgccaaacatttgattttattttaatgtattatttatggggtcacatcatccatgcacactatggaatattttagtgcaaagcaggagcttataagtaggtctgtctcattctcttgatattggttgttggcaaatgcagatccaaattcaggcctgcatgtgcgaaccctcactctgattcctctccctaactataagaaaagtcaagccgctggctgcacccccatcccaacctgcgctatctcaaactgttttcttcctgcttaagaactagccatgttcatcccacaaagcctcattatgcgagtaataaactgcttcataccctcttgatgtctgtgtatggtattatcagcttcgacaacttgactaaatgtttggttgggtgtacattcttattgcacagatcaaccacaaaaagaaaccattttcgtctgatgtagtcatgaaaatttttacagaataatttaaatttgaaggagactgacaggtaaaaggatttgcataagctcaaatgagaaatgggaaaattcagtgcaggttatgtggaccatcatatatactggtttgtcaagttgaaaaatatttaatgtgcactagattctggtacattaattgatgttggagtatatttttacttattcattgttttctcatgtatttcttttctttgtgtttctctcctttcccatagacaacaaatagggttattctatgttcattacttcaaggatgatcacagaaatattttttcccctggagctctaagagtagatatccttaaggaaataaacaagtttaaacaaatggtttgctaacatatggtttgattaggtttggccttcccttccccaaataaaaagaaaagaaacataatatatagatacagatatagaagtatagatatttctagggcaggagaagagaacagaaggaatgacaagtttaaatttatcgaatcatatacggaggaaaaatatatgctgcttctagtcttggcttgagtgaaatggtagtactcaaaagaaatttgcaaaattggagagaagaagaaccctgaacagttcaggaagtctaataaagaaaggctgtatattcgatcgaagcagacacatatttaaacaaacttcagtgactctcatgctttagtgagacattggacctgcagttcacacactaaaatgaggcacggagattgccactggaccagaagggtacatcttcttgggaatcagggttatcttagcagcaatatacatagactaataactgagactcaagaagaaaaatcgaaatatctttgttgaaaaatgcaatcagatatctgagactgtgggcttgtccacattgatgccttggcagtaaatacgccacctagaactaattccaactcaaggacagatgctggcaacatggaattgcaaacctactccgagtgttctgacactcacatagaataaaaacttgagttaggaaaaaatagagaaaattatattgtttcactttttaaaaattactatgtcaattaaaatttatatactatatttagatgaaataaggttgacagtaatgtggaaccctagctatgaaggactcatatcagattacagcaattagtctttattttctacagaagattttgagtttgggattttgttataaaatcagtccttaaggaaaattaatctagttttttgcactttgcaataagaggacatttagaaaatataaattacagttaatttctctaatgcagttatgagataaaaattgccccagattatgttgttggatacacatgatagacaggaacataaaaacaaaatgacaaaatattaaaacttgattataaatttactataaaggccaataagaagaaaggaagtacttgaagttgtagttctggtgactggaaagacagaaccaatggattacagaatcaaatcaagaggtttgattgagaaaacaagacaatgccaatttggattatacaagtttctatgttatctagaaggcaaactgaaaagtagttgaaaatatacaaatagaatgcacaagttatcttgagatggatttaggcttttctaatagagattaagaaaggcccaataagcagtgcatcaaaatgcttcaaacataaaaagatgccaatttggaaaggttttaccttctcatttgtaggcagcatattaatggcaaataaatagaaagtaagggggagaaaaatggaagcaagatgcttggaaggaaaagggattaaagtatatgaacagaatgctctttgaaaaccaagcagg

SEQ ID NO: 481 - DNA, 5678 bp, Homo Sapiens
gagaccgcagcctaagcagataccttggttgcagccatgtgagacaacctgaaacagagggcacagctaagcctcagccaggttcatgaccctctgaggaaactgtgagaaagcaaatgtcattttaagctatttaattttggaggtagtttattacacaacaataaataactattataattatcttgaggatttatttcctggggagaatacatggaattgcatatataggtcctcatatgcagaatactggtaccctagagatgttcaccccagagatgttttaggaacctgtgaatatgttacattaaatggcaaagttttcctggatggtttaagtttaagatggaaaagttttactggattatccagtgggtccaatctagtaacatgagtccttaaaaatggagaatattttttggccatgatcagagagacatgtgatgatggaaaaagtgtcagagatgcaatgtgaggggactaaaactgctgttgctgactttaaagatggagagaggggaacccgagtcaaggaatgcaaatggcctctggaagctggaaaaagcaagaaatggattctcctttagagcctgtggaataaaatgcagtcatgctgacaccttgattttacctcagtgagaccaatactggagtatgaccttcggagctgaataaaattatacgtacacatcttaatttcttgggatttgattacttcttctgctttgaaattagaccaagtttagcctgcctttgctattttggcgtatctccaattcttcatgattttctcatcgcaaaggccacataaggacagtgagaaggcagccacctgcaagccaggaagaaaggtctcaccagataccaaccctgccagcatgttgatcttggacttccagcctccaaaactggccttctgctcacatgggcttccgtgcacctgcttcaggagacagcaacacttgcgcccgcaccgcggcaggctcccatcacctggtggatatgccgcgccgagtctcatcacaccttagtgaaggaacacatggacccatatgttagcggatgtatttacatcgttttatacagaaaggggaagaaaactgcatacctcagaaaggggttgctcctcactctgagtactagactaaagataaaaagactagataaaagtactagactaaagacagagctgacccatgacagatggagtcttgctctgtcacacatgctagagtccagtggtatgacctcagctcactgcaatctctgcctcccgggttcaaatgattcttctgccttgacctccctggcagctgggactacaggcctgcaccaccacgcctggcaaattttttaattttttttagtagagatggggtttcaccatgttggccaggctagtctcgaactcctgacctcaaatgatctgcccgctttggccttccaaagttctgggattataggagtgagccaccatgcccagcctgttcttaagtctcctagaacagggattctgaaacacaaaactcatctgtttacgcactgagagcatctaaagaatttgaatgaggagcaaagctttttcaaaggttggattaaactacaattgtcctctccaaagaatgttcagctatcctttatgtactctgttgcaagtatttcaagaaggaggtgagaatatatgaggttcacgtagcagcaaaggaactacatggtagaagagggcaccttttttccaacatctctttatgctaatgttgtacatctgcaagatgcaagaagaggacaagagcctatttttgtagcattcttgagtcaagagcttccatgaaaagctttaagtagcaacaagcctgccattgaaaaagaaatatttggtttggaatttgagattgttaaaaatcattatagaatgcatgttctactgtgaaataaactgataaatgaatagtatgttggggcagcccctgaaaggtcatttacactacctagatgctttatagttaaggaaagtaggtccagagaggggaaatgatctgaccatggtttcaaagttatttagtaagaaatagaatgaggagtagttctcctgacatttagataataggaccaccatagaaaggtggttttatgattccattaagatttggatcatttttttcaaggctttgaaagtgagtggtaaaatttctattttcattatctctggagcagtatactagagtataccagatatataaaaaagcctttcatctaaaaggtaaatgaacaaattccccccaaaccaatgaataatatataaaatgaaacttcagaatacaccatcaaagtggcaagaaaataagaaatcttaagaggaataaaaaacttaaaaagttaaagcaagaatctaggaaattaagctagtataattttaaggcaaaaatgaaagaaaattataaaggatggtatactatttatttatgctgatcactgaatagtctcaactctctgacttcttggcccatagtaagattgtactgcctggattcccatgtgaccaattctggccagtgtcttgtgagagaaactaatgtgtctctctggctttgggctaagcatttaattgtcagtgagatcctccagtgcttgttttctctctagtaggatgattgacaatattccacatagcattttcttccacattttctggtatatcataccacgtgtgatatgatttggctgtgtcccaacccaaatatcatcttaaattcccacctgttgtgggagggatctgttggggggtaattgaatcatgggggcatgactttcctgtgctgttcttatgatagtgaataagtgtcataagatctgatggttttataagggggagtttctttgtacaagctctcttcccttgtctgccaccatgtgagatgtgccttttaccttctgccatgattgtaaggcctccccagccatgtgggacagtaagtcattaaatctctttcttttgtaaattgcccagtcttgggtatgtttttatcagcagtgtgaaagtggactaatacaacatgggaattatgggagctacaagatgagatttgggtgggtacacagagccaaaccatataaataatcttctcagtagatgtgaaataaatactattattatttccacttcatgaaaaaactgaagaagcgcaaaagctttaagtaatttgcttcaaggtcacaaagttactaaattacagaactagcattattgtcagtaagaaggaaaattacccctattgtaaagtctaatatgcaatggcatgacatatgaagatactaatatatatgaggatatacctaaatttcagaatgacgacacaaaactaccaaataataatgattagagaagttatgaaaatgaaatagaactaaaaccctcagcaaaaatagtatatagtttggaaaaggatggagattagatgttcaagtgttgtaagcttctcccagtgttcaaaagtagagcaaatatataaatttttattttattttgttttatttcattttaagacagcatcacagtggtgcaatcatggattagtgcagcctcaacttcccaggctcaagcaatcctcctgcctcagcctccttcgataattttaaactttgtaaaatatttggcaaaatatttataagtggccactacaaagtcagctaaaaagtgtatactctccaactggagaagattagagaattaataatagagaaaagactgaatcaatttaaagggagacaagaacgtgggaaaaaatggaaaaagcaagacaaataaaaattaggtggtagaaagtagaattagtaatttccattgatgtaagtggacttactctttatttacaacacagaaattttgaatgagtaacttgatatcaaaattaaaaatagtggaagtaataagaaatacatattatttctattcatgttaaaatttttaacatggtattagcaaaaataaatgaacaatctaaaaatgtataatacattatgaatgtttagattctccaggactgcaaggtaggtttaatattaaaaaaccaattagtataaattaattttattagcatatgattacaaaagaaaaatgcatgaccttctcaacgggtataaaagaagcattcactgacattcaatatccatgcttgataaaatttacggtaaactagaatcagaagtgatatttaataagtacatgttgaaatacatagaagatgccatgtcctgaatgtttgtgtcttcccaaaattctatgttgaaaacatagtcacctgtatgattgtgtaagaaggtgggttcttttgagaggtgattaggtcatgagggtagaatcctcatggaaaagactagtgccattataaaagaggccccagagacctgcctttcccctttcaccatctgaagacacagttagaaggcatcttctatgacccagaaaattggtcttcatgagacattgactctgctggcaccttgatcttggactctccagcctccagaactgggagaaataaatttctgttgtttacatgctacccagtatatagttttttgttatagtagcctgaatggactaagacaaaagacaaaaatgctcaccataactacttattttcaataattttctggaagtccaaagcaagaagaagatataaaagttagaaatacttttatagaagatagaaaagttagaaaaggacagcataatgttgctgttattattcacatatacattgtttccatataaaatgtaaagcatgtactgataaactactagacttgaacaggaaactttgcaatgttgatcaaaacaatagctctatataaaattcaatttgcattcccatgcctaatcaatgagaattagaaaatttaatgcaaaaatgatattatttacaataacagcaaaaatacaatgtattcacctctccattcacatgtatacttataagaagaaataaaagaaagatttttatgacataaagaaaaattataaaacttaataacattaaaagagatttaaaccaatgggaaggtaaggtataccacgttcataaacagaaagagtccagtagtttaaagctaccaagttctctcttaaaacttaagtcaaaaacttaccaagacttttgtacaacttgacaaattaattctaaaattctaaattgattctaaaatttttgtgaaggaggaagagctaacaacagccaaaacacccctgaaggaatgggaggagaaagcagaaaacatgtcctattggatgtcaagatctttgcataaagcactttagttagaaatgcaattttgacttaaagatagaaaaataaatcaattaaatcagaagagaattagcaaaaacagacccacaaatatatggaaatgatatataataaaacttacagtacaaataattgtgtaaaggaaagacaacttaatgatactagaaaaatagttatttatataaaaaattaaattagatttctctctgtgtataaaaatctattccagttaaagtcttaaatttgaaagtgagtcattttagattttattttaattttagaagacaatataggagaatatctatatgacctttgggtggaagaaaattttataaccaagacacagaagtgctttcataacataaatttgta

SEQ ID NO: 482 - DNA, 2398 bp, Homo Sapiens
gacccctcagggcttaaagacttgagaatgacagatgatcaagtgaggagaaagaacagctgtttaccatcttcccagagtcaaattgaacacactggaacagagagattgcattcttacccaaatactcttcgtgattgcctgctttgcggctttggggtaagtcccagttttccacaaccttaagaaaaaaatgcataacataaaagatgccagaaagacttatgtgtcctgatagtcggggtctgtgaaatatacatgggtttgttacgggggtgggaggcataatgaaataaagaaaagcgatttgtttctgcaaggatcaaaagtgtgcgaaagtgtgcatatgcaaacgaggctcccatcaggaaagccacctctggaatgtaaatgacaaagcttggaacacacacaatcaattattttcaccagcatttaaaatatagaaaacaaaatctgctttgggaattgactgaatattttatttagctttttttattgagacatcctttgaaaaatggcataatataaatagttttacaaagcaacaatataatcaatctctaaactagaatataaatcaaggatttcattaactgctggtagccagtttaaattgtagtcttgtccataatgtctatctatctatgtatgtccaagttatattaaaaacctttaaatggctttgtaatatcagctacatctagctattataataattaatggtactgttttataaatcaatacatgtattcttgataaattcatatccagttaatggtgtaatttaaataaaaaattaatgtaataaaggacatacagaagcgggcaggaaatctttaaaggttaagagccaaatttgtctaaattcatttttaacctgttttggaaaagtttatatttaaaatcagctgagacttaccttgtttctgtaaaactaatcttgccatttctggtggtatctagtattaaatttgtaaggtgttttctgacgttgttttaattacgtagttacaatactgtggaatattttactgtcgttgcactattttgtgactattgcatattctttagtaaaatagaacaaaacaaactaaaaacatcacaccagcaatttatttttaatacacaaatgcatgtaaatgatttattttttgaaaatctccaaaactatacacacattttatttaaggggaaaaatgactgactagttcaataaatttgcatgtggaagagccgagcattttcactgcttccgctgagtgaacattccaagaattttagaaagaaaagaaaaatgcatgaaagagtctgaaatgtattttaacgctgcacccgggtacaggaacattctaccaaaagatgagtgtattacagttctaatgtaaagaatacataccaaagacatatttaaaaaataacaagatttagaaaaacaactgaaggttgtatgttatcaaatacaatatcaaatctttccaaataaaatttcatttggttcataagagtacgcgttttacaaaaaatatctttcaaaattatgcagaccagtctgccctgccatcctccttgacatgatgcagaaatgttcctttaatccactgagctttttctgacatttttcttaacattgctgagccttatttagagcaccaaaggaggcgtgtgcagttttctttgacactgatgggtatttcaaaatgttacagagagaggggggaaaaaaaagaaagaaaagatttgctgccagtcacttcatcaatagagctacagaagcaattactatttgttaaaagtttacatttcaaatgaagctaaattttaaagaagtctcatccttttagaaggactggtgcttggaagagagaggaagagaatgcacattagtgattacatgttaaagtgcactcaagtactggaaccatttaaaatgtattgtgtttttagttgaaacctgcagcaaaaccactcctaagaggcttaatttaggttttataggaggaacataaaaaagaccaggttacagcaacatgctgaaatatggggtacattttaaatatcttcatttaaaaacgtatgtttatttcccctcctgggatcactaacgtgtgtctccacagagaaagcaaggacatgcattcttaaaaattatctgttaaagggatcacattccaagacaggtttgagcatttttattactacagataacctcttaattgtgtcactgccttccacttgttaatcagggacattcaacatagttaaccatgcagtggttgtctttagaagaatacattatcattaaggattagaaacacattttattcctataatcatattgcatgtatggttttagcactgctaaaaccctatttacctgctttaaatacataacacc

SEQ ID NO: 483 - DNA, 7787 bp, Homo Sapiens
attttacttcgacaaaggttgaagtatgtagcaggcgagcgtcagggacaagtgcagctatctctttgatcacatcgctttaaacatttttcagctttaagcttgtcttacaagtcagctctatcagtctattaattgtttcactgtacctaatatcttacacgaaggcaccttgaaaaacagcaggagaaagcacatttgtttaagtcctgcgatggctagcacggcagctaatctccttgcaaattataatcatagttgtagttcatccattaggctggaaaagacaagattcccaagtggccttggtgccttttccagttcccgggagacccaccaaccctcggcgtgtgttgcctgcgcacccggagcgttcttgctaatcagtgaggagctcaacataacagggaaaaggagcacaggatgcagctacttagagggtgttgattgaaaacttcgatctccccaccccatcacggttgatttgacggatttctcacctcgttcacagagaaaatttcaattaaggcacatggagacggacctctacctgcaatgccccccttgcacttggacagaaccatgtgactatttataagctatgacacatgagcagacatgacatgacgggattgatggagcaatgacctcatcttttctcctgccaaatattatgaaagaggactcaagtcactcacctgagggacactgggtgaaagtcagtaatgaagctgaaaggtcgctaaatgctggcaagtgagatggattatagtgtctagactttttcctgaggtcattctatatccagcagatatctttcagtatatagtctattcagaacaatgtgctagtgactattgagtgtggttacattcttttttttttttttttttgagatggagtctcactctgtcccctaggctggagtgcagtggcacaatcttggctcactgcaacctctgcctcctgggttcaagcaattctcctgagtcagcctcctgagtagctgagactacaggcacccaccatcacggccaactaatttttgtatttttagtagagatggggtttcaccatattggccaggctggtcttaaactcctgaccttgtaatctgcccaccttggcttcccaaagtgctgggattacaggagtgagccaccaagcccagccagttacattctttaaacaaggagtggacgtaccctgaaacaagagattagtcaaagagattttgctattcatgggacctaaaaggtggctgtacttccctttactgcttttccatacacagcaatgcacgctgtatgggttcttataggtcagagagtgaaagagaaccaggacctataaaagaatacaagtctctaaaatcagaaagtttattatttaaaaaaatagttacgtgccagtctgcttataatttatttttatgactgagagtgcctttcataagcacattctggcaaactataaaacaaataaattgaaattgaataaaacctttagacattagaagtgtagcaccagatttagtacataactgcaaaacttaaacatgcaattttacatctgcaagcacattaaattgaaagaaactttaacttaatttagatacattaattgatacaaacttttctggtatatagcacttcttggcgcattgagtattcttaatctttaaggcacatgaatataataccttaggaaagatctgttctccacacatttcctctataaagtgccaaaaaaaaaaataacgaagagccagtttgtcttccgcatcagtgtgatttagcatacataaataagtatcttttcacacaaaataaaaggttcagaacccaaagtgtctgatttttatagtgctttttctttccttttaaaaagatagcaagatgagggtaagaggtaatttaagagaagtaatcatcttctaacagccagcttgcagaaactaaaacaaatatcaatgatgtaaaaatgttgttttgacactttggtaaatgaaagtgtgagatgagtaagaatatattataggtgcttgtatatcaaaggcctgtgaaaatggctgattataaaggagaaagttaatgatctctaattgtgttgtaatgtaaatgcagtatcaccgtaatgaagagaacagatttgcatgttaacaaaagaaatattagaggagtgagtgtaggatgtttgggataattaattccatcctccactcctacatacatatgcatatacaaactcaattcaattttaaagagaacccgaagaaccaaaaatagactgaacacacttgatgttgtatgggagcttaaattactatttttgttgttctctgtgactatctcatttagtttctattgtgtttgcagtttcttccaaggtgatttttaatggattgagtaatgcataaaaatttgcagaagtatgcagaaagtttgtatgcagggccatgtagagcttttatcctacagtaaatcctagtagtttgctggtgctgtgtgattttttttgtttgtttagggtttttgtgtgtgtgtgtgtgtgtgtgtgtgtgtgtgtgtgtgtgtgaagcttatttattccatttccgcggtgaggaaggacgctttctaacgggccacattttgctgtgtagacccaaaactcgcctctgaggccccgcgttcaggagcggggtcaggtggccccagggcggcggcggcttgccggagactcgcgagctccgcacccgacgccctctcccaacgcggcctcctgctcgcgccgcggaaccccttcgtcgggtgttttacccaccggaggggtcgtgccggttgaggttgtcaccgggtgcgtggcatagctcgtgatagctcatgggtgaggttttgtgcaaacttggatgcagggaaagttgcctgttagagcctccacctgcgacctgcttcagtcgttgtgtgtgtgtgcgcacctgtgtgagtgtgagtgtgtatgtgtcctgctcagcgttgcaggggggtttatgtagccgtttggacaggatttcccgggttaccctgctggcccaggagctagttcccgcgatgaagccctgtccatcctccgcccagctctctcacgcggggtggtgccacctgggcctgcccaatggctctgtgcctccaataagggcctaagaaaaagtcccacaggctgcccctggcaatatacaaaaatcagtagcatttctatacacaaacaaaaacctagctgaaaaagagatcaagaaggcaatcctatttccaatagcaacaaataatataaaatacctagggataaatttaacaaaagaggtgaaagacctctacaaggaaaactacaaaaaactgacgcaagaaactgaagaggatatgaacaaatgagaagacatctcatgctcaaggattggaagaactaatattgttaaaacgactgtgctacccaaggtaatctacacatttaaggcaatgcctatcaaaataccaatggcattctttttagaaaaagaaataatattaaaatttgtatggaaccacaaaagaccccaaacagccaaagccatcctgaacaaaaagaacaaagctggaggcatcacactcccagactcaaaatacactacaaagctacagtaaccaaaacagcatggaactggcataaaaacagacacacagaccaatggaacagaacagagggcccagaaattaatccgctttctacagccgactgatttccaacaaaggtgctaagcacactcactgtggaaaggacagattcttcaataaatggtgctgggcagtggcttacacctattacagctacttgagaggtgggaggattgcttgtgcccaggagttcaagaccagcctgggcaacacagcaagaccccgtctctacaaaaagtttaaaaattagccaagtgtagtggtgtgtgcctgtagtttcagttacttgggaggctgaggtgggaggattgcccgagctcaggagtttgaggctgcagtgagctatgagccactgccctccagcctggatgacggtgcgagaccctgtctctaaaaaaaaatttctactctagtgcttacagcagaccaattcatagtgactgaaaatggggacatcctaccgcctatcgactgcccatcagcatctgggtggctagcccagctgtggtgcattcacaccaaggaatgccacttggcaattaaaaggaactactgttatgtggaacaatgatgagtttcacaaacactgtgccaagtaaaagaagccagatacaaaagactgagtgattccatccatgtaaatttctagaacagatgcatccacaatgacagaaaacagtctggctgcaaaggggcaagaaggaagttttggtttttgtttggagtcagggtctgactgtcacccaggctggagtgcagtggtgagattgtggcttactgcagcctccacctcccaggctcaagcaatcctcttacctcagcctcccaagtagctgggatcacaggcatgtaccaccatgcccagctaatttcttctatttttgtagagatggggcatcactatgttgcccaggctggtcttgaactcctgggctcaagtaatcctctcgccttgacctcccaaagtgctgggattacaggcatgagctacagcacctggctgtttttaagtaatggaaatgttctatatctccgttgtaacaggatttgcatgggtgaagacatttgtcaaaactcatagaattgcacacttagaatgggttttctttatataaattattcatcagaaaattaaaagggaaaaaaggctaggggtaacaacaaaaatacccttttagatgaatataaaataatccttagagaaccatcgtctccttatccttggcaagcatcccctcagggagagctgctgttctctttccacccctctgatgtcagccccagttcctgggagcccagatccacagcgttgtcagcctaagagagaggttctctagaagaatagatgttagcttgagaacagaacattacaaggagagtacacacgccatagtaaaccatatgcctattcagggaggtcaaggaagacaaaggtctttaaaggaaaagcgagcaggatcacagtggttttgagataattctccttggctacaaacatcaataacaaaggtcattccagtctgtggtagcctgtgtcagaatctccttcctgttaagggctgagcgacgttccattgtgtgaatagaccacagtgcgcgtacccattcgtccatggatggagaagggctgagcgacgttccattgtgtgaatagaccacagtgcgcgtacccattcgtccatggatggagaagggctgagcgacgttccgttgtgtgaatagaccacagtgcgcgtacccattcgtccatggatggagaagggctgagcgacgttccgttgtgtgaatagaccacagtgcgcgtacccattcgtccatggatggagaagggctgagcgacgttccgttgtgtgaatagaccacagtgcgcgtacccattcgtccatggatggagaagggctgagcgacgtgtacccattcttccattgatggagaagggctgagtgatggtccattgtgttaatagaacatgatgcgtgtacccattcttccactgatggagaagggctgagcaatattccattttgtgaataggccacgatgcatgtacctggccccagactctctgtgtgcctctccttctgggttggtgctgtgtgatctagcacagccaccgggatccagaggtcagcgtggggccctgacgggaggtccggatcagacacacataaggctggtctcttcagtcggggtccaggtgcctctggcagggctgccgctggtgtttcatgcatcgtggaggccacgtggtcactgacctcatttccttgatggaggccctgctgcaggctaatcctttctcttggagtgaatgctgacttctgtgtctctgtcactgggtgttgacgtgaggcaccgcccttgttattccagtgggggtgctggtgttggatccgacagatggtccataataggccaccgactgtgttcacgtggctcctgccacagatggtctttgtggtggtggggcccactcagctgaccacgctctcctttctggcaggagacgttctagacccagtgtcttcagtggaaacagagcacaggctgtctgcagtctcaggcttcctagcagccctgataagagaagtagagcaatgcaggtgacattaatccttgcaggtttcatttcacctctatatccaacattttatctcaacatgtagtctgtagaaaacgttaatttgagctttatgggtttttttcatattaagtcttcaaaatgcacatgggatgggatgtaaagaacgctgaagtgggggcatttcagaggtgtctgctgctttttgcctgtgcctgctgggaagttgcagtgctctgtgtggcttgcgtgttgcgaggttgcggtctgcgtggctcacgtgttgggaggtcgtggtctgcgtggctcacgtgttgggaagttgcagtggtctgtatggcttgcgtgttgggaggttgcagtctgtgtggcccgtgtgttgggaggttgtggtctgcgtggcttgtgtgttgggaggttgtggttcacgtggcttgcatgttgggaagttgctgtggtctgcgtggcttatgtgttgggaggttgtggtttgtgtggcttgtgtgttgggaggttgcagtctgcgtggctcgtgtgttgggaagttgctgtggtctctggcttatgtgttgggaagttgctgtggtttgcgtggctcgtgtgttgggaggttgcagtttgcgtggcttgcgtgttgggaagttgctgtggtctgtgtggcttatgtgttgggaggttgtgggtttgtgtggctcaagtgttgggaggttgtggtctgcgtggctcacgtgtggggcggttgcttggctcgcctgttgggagtttgtggtttgcatggcttgtgtgttggaaagttgctgtggtctgtgtggcttatctgttgggaggttgtggtttttgtggcttgcgtgttggggggttgtggtctgtgtggctcacgtgttgggaggttgtggtctgcgtggctcacgtgttgggcagttgtctgcttggctcacgtgttgggaagttgtggtctgcgtggctcatgtgttgggaagttgtttatgtggcttgtgtgctggaggttgtggcctgcgtggctcacgtgttgggcggttgtctgcttggctcatgtgttgggaagttgtggtctgcgtggcttgtgtgttgggaagttgtttatgtggcttgtgtgctggaggttgtggtctacgtggcttgcactgtagttcttttggacagccttgttctgcagtctgtgtttcagccctggaattgccacattctccaagaagccctggtttcttgactagagagccttgtgtagaagccaggacctgggttctgggtgaagccctctgcagatagagctgggagatgcctgttgtgtgtgtctgcaccacatacatggacactgtgcagagggattctgttggcacctgtgtttacatgggttgaaaactgtttttacacggaaacttccagttccctcgtgccccgtgggttccgcccacttcttccctttcagttttgtatctgcgccgtgaggacttgtctcctaatcttcgtatcaactccgtgtcccattgagctgaccttccgcctctcccccaggg

SEQ ID NO: 484 - DNA, 6032 bp, Homo Sapiens
agagatggagtgcatctgccccaagtggaggcagcagcagcagcaggagggaggtgtcggggcagtggggccgcagggccagtcctcaggaaagaaaactggctcagagaggctgagtaacctgctcaagatgacacagcttgtgggtggctgagttggccttccaacccagattcctgtcatgttcctcaagccgacaggttcagcttggttgtgacctctgctagaagccctccctggcctccctgtgcactgagctggtggttcctcctttgcgccccaggtacatgctcagatctgtgtaccctacactttgtcctccagcttcgtgtttggatgttcacaactcccatgagaagggcccccgagagctggcacagtgcatgtgtttcctctccagacttctacaaacctggcacataattgtttgctgaaagatggcatgttcctaaaacagaggaagtagaaccgaataaagcgaaatccaacttcccactccctgctctcacttcctctgggacaggccttgagcaagagagacaaaaagaacaagagatgatctttccctttaatgggatttcagtctgatcagggagatagtaacagaaagactagactagactagtgtatgattaaatgacatttgccatccccagaagagggagagacctgcatggaacagggtggtcaaggcaggcttcctggaggaggcaaagacttagatttaacagtaccagagctccaggatagatcctcctctgactgaactccctatttctttctcccaccccaaccttcccgggtccccagctgaagggatacgtgtgtgtgtgtgtgtacatgtgcctgcacacatgtacacatgtggttagaaagggggtattagtatctctctcctaggatggagtctcaaggacaggcccatcatctcctcagtttgcccctctctctcccacttcacctagggaatggaataagaatgggataagtataacacaatgagacgaatgcagaaccaactagatgtacacccaacaatgtggatgaaccttaaaacagtgctgcctgaagaaggcaagaaacagaatgaaatctgcagcacatcattcatataaactaaaaatacatgcacagagaaaggccacttttttttttttggagacaaagtttcgctcttgtcactcaggctggagtgcaatggcacgatctcggctcactgcaacgtccacctctagggttcaagcgactgtcctgcctcagcttctagagtagctgggattataggagcccaccaccatggccggctaatttttgtctttttagtagagacggggtttcaccatgttgcccaggctggtctcaaactcctgacctcaggtgatccacgtgcctcggcctccgaaagtgctgggattacaggcgtgagccaccgcacccagtcagcaacgtatgttttgtagagacacagacaaagatgtgatgtcaaacacactaatgtggttgcctcatttatggatgggggactgggctggtgaatgaggattaaaggaataaataaataaaacaagagagggcctctgtacagaacggtgatgacagcgtgccgtcgaggagaatgatgaactcaaacttttgcacctgagagccaaacaaaagctcaaaaccaaaatctctcttagaaatgatgccactgactttaggatggcactcatatctgtgtgagtgggagagagaagggtttggggcagggatttgactgtagctgtaatgttttattcctttaaaaaagataagataatctgaaacaaaatgttaatatctgttgaatctggggagaggctatgagggtttctgttaaaccattttgtgtacattttaaatacagtcatgcatgagttaatgatggggaataagttcttagagatacgttgttaagcagttttgttattgtgtgaacattatcgagtgtacttacacaaacttaggatggaatagctgactatataacttagactatatggtctagcctattgcttgaaggctgcaaacccatactccatgttactgtactgaataatgaagacaagtgtaatacgatggcaagtatttgtgtatctaaacatagaaaaggtacagtagaaatgtggtatcgtagtcttatgagagtactgttgtatatgcaatgctttgttgactgaaacatcattatgtggttcatgactgtatatcataattttaaaaaatattttaagaggttgccaatcaagacactacaaactaattttgtggcttttgtcaaaattcatttctttctttcttttttttttttttgttttgagacagggatcactcaagcaatccttctgccttagcctcccaagttggtgggactacagtcttgtatgccaccacgcttggctaattttttttttttttaaattattgaatagagatggggtcttgctatgttgcccaggctgatctcaaacttctggactcaagtgatcctcccttcttgttctccctaagtgggattacagatgtgagccactgtgcctggccctggctaaattttaaattatttttgtagtgacagggttttgctatgttgcccagactgtcttgaactcctggcctcatgtaatcctcctgccttggcctcccaaagtagaattcatttctgttgctaggttggcctctgaacagttttacagagctgaatgctctagtcttctgtgacacagtctttttcttttttttttttttttttttgagacggagtctcactctgtcacccaggctggagtgcattcggctcaatctcggcttactgcaacctctgcctcctgggttcaaggaattctcttgcctcagcctcccgagtagctgggattacaggcatgcaccaccatgcccggctaatttttgtagttttagtagagacggagtttcatcatgtggccaagtggtcttgaactcctgacctcaagtgatccacccacctcagcctcccaaagtgctgggattacaggcatgagccaccatacccgatgacacagtcttaataaggagaagaatatgaagaatttgactttttattgatgctaaaagcattaataaataagatctttggaaaaatgtggaaaatggaaaatgtcactgcctgctgtctgtagggtgaaatgaaatggctaaagagctataggagcattttgttctcacttgttgggtcagatcaacttcccaggactttttgggaagatcacaaatcctagacaatcgtactgcactgctctaggaattcttggagggctggaagtctcacaattagggctttttctctgggcaccaacctgacacgcatggcaagggggctgagcagttgtctatggtatagatgctatattctatgactcctgttggccctagccatagctgattggtatagagggtcaaagctgggccaatcagattatctgtctcaagattctggaattctgaactggggcagagacagggagctgtgggaatgtggttgctttaatgggaatgttctggtgaggagatgcattgactccagatgcttacatcctttcctgaggctcaattgttcaaccttttcttgaaatttagggccaaacaaaaggtcaaaaccaaaatcactcttagaaatgatgccaccgactttaggatggcactcatatctgtgtgagtgggagagagaagggcttggggcagggatttgactgtagttgtaatgttttattcattattgtgaattttgtcatattattgtgatttgtcagggttgatttctattacttgtcctatggagtaggttactatatttttgtcttctcaccttcccctggtgctgctgttaatacatatggtatctttattgagttagaaaaagatgcctgactctgggtggacaagcaagaaaaagctgttctttccttcaggcggacacagcctctaacgagggtggaaggtttggccagtggagcacgggctgggtttcaggccatactctgctcacttccttggcccagcccttttgtgcattgcacagatgacatccccatttatggcggccttacacctgtccaccatgtgcttttgggatgatctgtcttctgcagctaggcattgttcagaatatgaagggctattccagacaagattcacgggacatggactatcatgcaagtcctattctggactttaaggctcatgacaaagatgttaaaagtcaaacctgctcaaagtcaagacttaaaggaaatgtagaaaaactctctggcctgataaagtccacagaagcctcatcttctgatgaatgatcttcaggcttgaaaggatgccttcctccaaacaggctggcagacattcttgaaatgtcaaaggataggccaggggtggtggctcacgcctgtaatcctagcactttgggaggccaatgtgggcagattgcctgagctcaggagttcaagaccagcctgggtaatgtggtgaaaccccatctctactaaaatacaaagaattagctggacatggtggtgcgcgcctgcagtcccagctactcgggaggctgaggcaggagaatcacttgagcccaggaggcggaggttgctgtgagccaagattgcaccactgcactccagcctgggtgacagagcaagactccatttcaaaaaaaaaagaaaaaaaagaaagaaagaaagaaatgccaaagggtactcttccatccccctgtgaaaaaaactaaaaaactagtggtgagaagttaagagcaagatcacaggaacagatgacaaggaggtgtctgaaggccacaatgagagtgacatggaaaccagtcaaggcactgatggccatgggaagaaaatgatctcaaggaagagataattccttgagaggaggctgctccagctctgatttgttcattcattttacagtcaggaagccactccaccccagaagaaggtaatatgagtcctactacctttctgaaaggaaggtgagtacagaaaagcaagacagtaactttcccaagccagggaacccctgtctccccaacttctgcatcatgtagaccatttgtgtctacaacttacaggaggcagtgtagactagcagttgagaatgtgagtctagaatcagaatgcctgggttcaaacctcaactctgtcactttccagctatttggccttggacatattacttaaacatttgtgtgttttaaaacgtgtacacaatcctttgactctctttccatcaagaagtggagcctatgtcccctccctttgaacctgggtggaaatgtgggagtgcctagacaaatagaatgtggcaaaagtgacactgtgtgatttccaaggctaggttagaaaagaccctgcagcttctgatgattcctttagggacactcatgtcgggaggcttcagctgctgtgaaagaaactcagctaccctgaggctgccttgtagagggactgcatttaaagtgagagattcctgaggagttccagccatccagccccaagcagtgtgaacctcctagtctagaccccagcatttgagctgacctcagccccagccaccaattgactgcaaactcatgagacaccctgagtgagaactgcctagcttagtctctgtcaaccctcaaatttcaggaacaaaataaatgattgttgttgtcttaagaccactgtttggggatggtttcttatcatgcaatagatagctgatgcagacttttctataacctagaaacggaatgctgccatcacagaacctaagtcatgtggctttaggactgggagatgggtagagattgtaaggactttgaggatattgttgatggaagtctgatagttctcaaggaagttgctggtgagggcttaaaggaaagtgagaaatttttattagaagcaggaggaaaggggacaaacccttattacgtggtggaagaaagttagtaacattgtcacttgaagctatgtgagcaatagaaaatgtgccta

SEQ ID NO: 485 - DNA, 2931 bp, Homo Sapiens
tttaagacagagtttcactctcgttgcccaggctggagttcaatggcacgatctcggctcactgcaacctctgcagtgtggtagaacgcagatgtggtagaaatagccaccgcatcggcccacatcaaagttttaaacaaagatatgctaagctgtgtctgttggatgtgccaaggacctgcaattttggttacctgcaaaatgctttcctactgtggccttgtgctaccagccaacgtgacaggatgccagaagcacaggccctttgaaactgttgtacttatgctgaggatgctgcccttcattgaaagagcataagagaatgtcttccgctttagcaccagaaagagttacaattcttctaagaaagtggctgcttcggtatcacagacactctgactcacattactaatcatggtcctctccctgcataggctgctgggaagctcagaaccagacctgaggccgtgctcctggctgcttactgtcctgccttctaaccacccttttgcttggaaacctcatcccaggacttattttggttttcctattcttattttcctgatttttcttacttaacacacccacaaacaattctgatctgtggttaaaaatatatcgaaattcagaataaaattaaatgcaacttgttttcaaataaactatgggagtataaactatatactgagagacatgatagggttctaaaatttcttactgagaatttggaacaacaatgttaaatgatggtaaggttcacagggcagtccaagtaaatttaatttaaccatgctgcagcaaaatgacagtgttaagagaagtcactcccagcgtaattctatactcatgttaaaaaagaaattcttattagaggatttgtgtttaaagagacatcattgattatctgaatttgtataggcactggatatattaagtcaactaacaaatcataagcatttaaataggagtaagtccaggggccttgtaaataacccatagtttattcagtcagttgacttgttcttttttccttacataaacaagtaacagggtgatttaattcagtgagagtggtgaagtgaatacagatctgtgaagaacaataaaatgttaattttatgatcctgtttattttgctgaagtttctacatgataggaaacaaatgcaaattttgacccagggtcagtccttactatttccagcagcagaaaatgaatctactaggatacctgaattttataagcaaatccaacctatttcatataaacataataaggtcttggacacagttattcatagtccgagactattaactgggctctcattcagcatttatgcatttgaaatctacctagtcaaattttcttgacaaaatgttagcctctaaaggaagaattctgcttctgataacccattatgctacttttacacgcatgtgttaagcaagcagcagaatcagatttggaatttagaaagatattctttccggtggcaataggcaggatgcctggcagagcaaagaacaggaggtagatagacccggagggggctgtacaaaatgcagacagaaactgatgaaccaacaaaaagcaatcaactcgtgagacataaagaaggtccggcaagggaaataagtgagagaacctgctgggcataaggacctactgactacggtaaagtaaggggagaaagtgaagtgacttccagcttgcacaaggaaatactgggatgatgagaggcaatgctggagtgttgagtttgcctgaaggattaggttggggatgggttagggatgatgtggagttttagtttagatacgaggtgttggtagcataaccagaaaatgcccaggaggcccctggaaaggacaaatggaggggaatcactagagcacacaaggttggagccatgagttgtgggcatctagggagggtgtgggaaggtcaagatggagtgcaaggggcctccaatgtcaagcggagccaagagaggagcagacaaggagaaggtggtgtcccgcacgctagggaaggaagaaagaagctggagactggttaattgggccaaagatacaatgaaggaaagtgacaagaaggaaggtggcaggccagactgcagcagagtgaggagtgagggcagctgacagccgggagagtgcacagaccattcccaccagctgcaggctgtcagggtatcactgacttcctaatcggcacaggccacattggtcttttcccaaggctcttccagacctgcagaatctgggtttctgctctatgagggtccctgagcataggcccttaaaaacattctcaccacccccatagggaacagtacctggccatggcgcagaacaagtgcatgagaggacagagagagaagggaagctgatgcccccggcagggatgctcatgctgcctgccgcagccaatcaggtggaacccagggcctgtggtctaggatctttccttccattaaggtaaacagggcaaaataagactcaaaacaccacaggcttcgaagacatcacctttcagtactccacctagctctgccaaacctagcctcagctgtatcctattgctgaaaactctccttacagtacatccaacctttccaggccttctctacgtctgcttgttccctgactcactctggtaaaatctcacctcctatctttcctttctcttcattttttctgccatccattattactactctgcagaagtatttacattaacactactccccctcctctgctgacactttggaatatggcatgtacccaagttaatttattttcaatgtataaaactgtaccctttgtgataatattaccttaggatactcaaacacaatacaaaaatatttacttaagaaatctaaaacaatagcagctgggagaaatatctattaaaataccaactgtg

SEQ ID NO: 486 - DNA, 2609 bp, Homo Sapiens
ggtaagatcctggcccaagctggcccaaagcaccactcactggctactgggactggttgagggagtggaaacctgaccaaggccctaccccaggccattccagatggagttgaaagagaaaacagttttcctccaagtggcaagactgaaaggggcatgtgtgccctgtcaccggccccgtccccagcatctcctcctgccctgtccccctcacagctctggcactccaagtgtcatctcagtggaagggtttcctgactcctcccctggtgggggctgtccctcttctgtgctcctccatcacccttgctataacacatgataggtgttcaatcaacattttctgcagggagagggaggggagcagggctgatacatttatttttcaaggacttgcatactaataagaataaaggtaataccacagatgccagttcagaacaaagaaattatctggtcacactaggcagcttgtctctcttctgaatatagagatatgtatatcatcttctgaaatcaactcctttttgcagaaatgacttatttgcattaaaaatgacttatcccacatcgttccacatcatgttgcacttggttacctgcatacagcagtgaagtacaacagaaccccaattttttattactttaaaacaatttttttagagacaggggtctcactatgttgcccaggctagagtgcagtggattaccacgactgagcagactctgtgggcgccctcataccacatgctgcaggcaaccacagctaggatcttccttttcctttctcccttaccgctggcacccaggaccacaaaattcattaaagaaatgtttctcactgcttgtgaatttgttttcctttcaggcaatgtgatgacaggctaggttcttatgctttaacagcccatcatgggaatttttaacttaagcaattataaaataaaaatgtactgacgctaaagattcatttataaacctgtcgctttaatctttcttcatgacttgttggtgtaattaggcagctatatagtcacataaaatttcacggaaaaattatatgcttactagttgttggtcatgaaacaacttataacattggacttcacgtttattctcagactaaaaatctaaatgatagcgaaatttaataaaacttcttggaaggcttacagataatttttactttgtaaagcatgtgcatgctttgtaaagctttctcatgcttcagtaaatcagaagtaatgatgggggtacacattttcttacttaaaacttaatactgggaacaagagaactagcacgttgctacagtctcatcaacaactctgaaaaggcaacaagccaatacaaacaaatacagttttccaaaaatacctgataatacttctaaattaagagctgacttcaagggagtggggaataaggggagatttcttaaagaatataaaattatagctagacagacacattaaattctagtgttctgtggagtgctctatagtttatcatattaagtatttctcaattagctagaaaagaggtttttaaatgttcctaacacaaacatacaataaatgtctgaggtgacagatatgctaattactctgatttgatcactacacattgtttcaaaacattactatgtactccataaaaatgtgtcaattttttaaaatcttgttaaaaaactgatttcaactttattttaaaataatttagaagcatagtaatttctggacgtctatttaatgaaatgtaaagaaagaataccaaatatctaaccattcaaagtcaaaaaataacatagatcctacagattgagtctatttgaataggagtaatttctaaaaacaatcattagtttactacttattcctttgcattcatatagtagcttcctaatactcaggttgaaaacaagcttgataagatctactaattaaaatggtaaaactggaacactgtccagtttttaatgttaaaatttaaaatcccacaaactcaaaataaaattacaaaaaactaaggctgggtatacatttcttcatttgctgctctgacattcatcataattagatacagataggaaatttttcagtctctgtagtacatacaccaaatagacatgcaacttgttgttgttgttcaagtctgaaattctcttttcagttaatatatttactgacctcttctgggactctcatgattgaagagaatgccgttcactgcaaagagattatacgcctcacggaagttcaccacaatccaataggcatagagttttgctgcccctgttggaataattttttttaagcaatgaagtttgttgtaaaagacagtgattctcaccatcttcaacagtaacatcttggccgaaataataacttgtaatgcatccaaatacaaaaaagtatcaaaacccaaagacgaaataaaggttattacacctgtcaatcatgttcaccaggaaatattttaagaatttcttacttttgtaatgccaacagtgcattatttgacaatcgaattgattgaatctttcttagatctttttctctctcattctctctctctaacttttgaggaattagaatggaaaaaaatga

SEQ ID NO: 487 - DNA, 42664 bp, Homo Sapiens
ctggccgtgttaggcttcgctggcgtaaagtccccgggagctttgcccctcacggagaacgttagttgaccctgatggggacccgtagggtaaaggttttgtttttgtttttttttacggaaaaggttgtggttaggccccttggaaagttgcgacaaaactcgagttagacaaggaaggtcggaactaagtggccacagcaacaatgcaccagcaagcagggagcgtgataggaagagctaaagaggaatcgggaaaccctggagatgggtttcaccatgtttcccagccttgtctcaaactcctgacctcaagtgatccgccgtcttgggtcttcgaaagtgctgggacagcaggagtgagccaccgcatctggcccggaaagtgttttggagcgtagaaaaatgcaaattatagggctgccttcaaggatcccgaaggacccacagatttgccgcatcaggctcctatgcacgccggtaatttgatgtgttgagatgcactgcccagtgcgttgtttttactggaggagcttgtgtgcggagctccttgctagtgtatgtgttgggatgggagagaagtgcgggagaactatgagataatgccccctgatcctcagggtcttaggaggtatggtcggagaggctaagctaaagtatgaaagccgtgtgtaggcccttctgtgtagtgcagaaaaggtagaggtatgtgatttgaaagagtagggatgacatggaggatgcgactcctggttggatctataaactaatgtctttggaacgaaagcacatgcaaccttttgaaaatggatgggtgataatgaaagaccattccagagaagaaacaccatggtgcaaaggctcaagaggcatactggaagtacaatgaagagagcaatctaactgaaatgggaaaaaaagaaacaaagagtaaaaagtaagatttgatgagaaagatggaatcgatttttaaatttttttatctacacaacaaaatttattatcttaaccatttttgagtgaataattcgttagtattaagtatatttacctcgtgcggccagtctccagaattcttttcatcttgcaaaacaaaccccgaacccattaaacaatttctcattcgccattttccagctagccttggtaacctccattctagttctgtctctgtgaatttgactgtgtaccccgtgtaagtggtatcatacagtatttgtatttttgtgactggcatatttcacatagcataatctccttgtggtttatccatcttgtagcatgtgtcagaatttccttcccttttaagactaaataatattccattgtgtgtatataccacttgtgttatttccaccttttggttattgtgaataatactgcttcaaacatgagtgtacagataactcttcaagatccttttagggtaatacagagatagtaagttatcttgattgttcactgccagttacagaccaaactccttgttctccttgtgctccacttctcaaccactgcacttggctagtcttaaacaaaaaaagaaaaaccctaattttaatagcttgtggggacagacgcagtggctcacgcctataatcccaacactttgggaggccgaggtgggtggatcacttgaggtcaaaagttcgagaccagcctggccaatatggtaaaaccctgtctctactaaaaatacaaaaattagccgggtacggtggcacacacctgtaatcccagccactcaggagactgaggcaggagaaatgcttgaacccaggaagtggaggttgtggtgaacggaaattgcgccgccgcactcaagctgggcgacagcgagactccgtctcaaaaattagtattaatagaatgtgggagattttgaaaccaagtatagaaattcatactttatattgtttaaggtccgtgactaggcatagtaacatgatgaaagaactgttttgggtttgtttggtttttttccgagacagagtctcactctgttgcccaggctggcgtgcagtggtgcgatctcggctcactgcaacctctgcctccctggttgaagcgattctctttcctcagcctcctgagtagctgggactacaggcacatgccaccacgcccagctaatcgttgtatttttagtagaggcggggtttcaccatgttggccaggatggtctcgatctcttgacctcgtgatccagcctcccaaagtgctgggattacaggcaggagccaccacgcccagctagaaagatctgtttcagaaagcaactctggcagtggaagctgaatacatactccatttctataaagcatttatggaggcctctagatgtgccaggcattgtactactgctttatgtaaattattgatgggtccgcgaatccattaatataaatgtgagccagttgttgtgcaccccaatttacaggcaagaaaatcaaggttctgagttgcagatgggctgagaaaaggctcaccaaccacatgtacgcacaagagattaggaaagaaaactgccattggagccaggctccagtaagcactgagtattcattggtttggatgaggatactgaaagaaaaaaatgacatgtaagagtgacttttctcaggagaaagaataggctgacatcaagagtctttgctgtcacattagtggtatgtataagggcacaacacaacagaagtacatttttcaaggttcgtaaaagaaccctggggtttgcttttaggtttgtttattacctttaacaaatataaaatgccaggtaaatatatctttgtatgtagtagagaaattaataagacatacccttccctactcaacatttcatctttgattttatattctcaaaaatattgtgaggtcttttaaggaaatgatctccttttggcagatgaggaaattgagggccagagaggaaaaattatcttcccaatgccacatgcctaattggtctcaaagctttgactggaacctgagcctccagaattgctgctatgctttcatctcccttagagagatagataacagtagtcagagtgagtggacaattcttctattcagtcagtctgatcttcctcagggatgcatatccagactcccatgcagctagtgatagttaaacaaagaggcagagaatatagtgcattataaatagcattcatacactcaaaaatattgtgtgccgatactgtgccaaacacttagcaaagcagggaaaaatccctgtcctcatagcagagactaaaaatattaataagtaaaatatatactaagacaggtaggataagtgttggcaagaaaaagtgaagcagtgagaggggaatagggtgagccgagagtagggagggaggtttttgtttataccagaggcagaggagccccactgagaaggcaaactgtacaaagatctaaaggaggcaaaggaacaagaaatgtgccttgggtggacagggaacattctgggtggaataacaagtgcagaaatcattaaggcagaaagatgcctactacattctgagaacagaaagcagtccagagtgatagaagcagagtacaggagggtaaaagtaggaaatgaagtcagagaggtaagaggaattcaaattgggcatggacttacaggccattgtaaggactttggctttttctgagggagatgggaagccatcgttgagtagaaaaatagtgaaattctacttatatatttaaagaatcacattgacttctagtttgacactagattattgaggagcaagggggaccacttaggaagctattgtaatactccaggtgagagataagtggcatagaaaaggtgcaagcagtggagggatgaggtatctggatatattcagggtggcacacaggatttgatgacaatttatataggatatgagaaaatgaagggagtccaaggtgactacgatttttggcctgagcattttgaagaatggtgttgtcatttactgaactgggaaagatggaggagcaggttggggatgggaagagataaattccattttgggccaggcagggtggctcacacctgtaatcccagtactttgggaggccaaggcaggcagatcgcttgagctcaggagttcaaaaccagcctgggtaacatggtaaaaccccatctctacaaaaattagccaggtatggtggcagatgcccatagtctcagctgcttgggaggatcacttgagccctggaggtggaggttgcagtgagccaaaatggcaccactgcactccagcctgggtgacagaatgagaccccgtctcaaaaagacaaacaaaaattctgttttggagcttaaatttgagatgcctgttagaatgccacatgaaaatattaagaagagagttagatatgtaggagtctggaatttagaaatgtccagactggagatgtaaatttgggagagagcatgtagagagtatttgaagccatgaaataatctacatataaagtgtagacagatgtttgagaaaggtatcttaggcactgaaacaggaggaaaccaggaaaagaatcccagttgaactgggtggggaggatggctcaaggaagaacaaccatgtcaattgctgggttctaactggccactgcttatgatagtggagtagtaaggataaaagcctgattggaatggatttagaatagtgggaacggaattggagagagggagaatagataatttgggtatggagttggttgtaaggatagcgggtagaaaagtgataactgcaaggggtcaagacagtggttttaaaattacttcacaaattttttagtatttctaaaagaattctttttttaataaatataacttcagaccgctattgttcctttgtatcaactaccctgttattcaaattaacccaactgtcttataaaattttttgctaccagctttattgagatataattcatataccatactattcactcatttaaagtatacaattcaacaactttagtgcattcaaagagttgtgcagggtgggcgcggcagcacatgcctgtaattccagcacattgggaagccaagacgaggatcatttgagccaaggagttcgagctcagcctgggcaacatgcaaaaccacttctctacaaaaattagctaggcgtggtggtgtgcgcatgtagtcccagctacctgggaggctgaggtgggaggattacttgagcccaggaggcagacattgcagtgagcgccactgcactccagcctgggcaacaaagtgagaccctgtctcaaaaaaaaaaacaaaagttgtgcaaccaccattacaatttgttttaggacattttcagcaccccaaaaagaaacattactatgcacttagggtgataatgatgtgtcagtgtaggttcatcaattgtaaccactccggtgagggatgttgataatggggtgactgattttgatttgctgtgtgtgtgtgtgtgtgtgtgtgtgtgtgtgtgtgtgagagagagagagacagggtctcactctgtcacccaggctagcatgcagtagcacaattacagctcaccacagcttcaacctcccatcgcagcctcctgagtagctgggacaacaaacgcgcaccaccatgcctagctaatttttgtgttttctgtagagacaggctttcaccatgttgcccagactcgtctcgaagtcagctcaagtgaacccctgccctggcctcccagagtgctgagattacaggcctgagccaccatgcctggccaatttgctttttttttttttttttttttgagacaggtctcgctctgttgcccaggctggtgtgtgtgcaggctggcacaatattggctcactgcagcctccacctcctgggctcaagcgatcctcccacctcagccttctaagtagctaggactacagacatgtgccaccatgcctagctaatttttttaatttttttgtagagacgggatttagccatgtcactcaggctggtctcaaactactgggctcaagtgatcctctcaccttggcctcccaaagtgttgggattacaggtgtgagccactgcacccagtagatcatgtgttttttattctttgttaatatgggccattacattgcttttatgaattcccagagcaaatctcacttgattatgatgtataatcctttttatatgtcactgaaattgatttgatagtattttgttgaagacttttgcatctttgttaataagagctattgaggcagggcatggtgatgaatgcctgtaatcccaacactttggaaggccaagacgggaggattgcttgagctcaggagttgaagacaagcccaggcaacacattgaaaccctgtctctacaaaaaatacagacattagctgggcatgatgatatatgcctgtagttccagctacttgggaggctgaggcggaagggtcacttgagccctggaggtcaaggctgcagtgtgccaaaattgcaccactgcattccagcctgggcaacagaatgagaccctgtctcaaaaaataaataagtaaataagagatatttgtctctaattttcttgtgatgtctgattttggtatcaagataatactggccatataaaatgagttgggaaatgttccctcctcatctattttttcaagaatttgtgaagttttgcattcattattattacttttcttttttgagacagagtctcactctgtcacccaggctagagtgcagtggcaccatcttggctcactgcaaccacctctgagttcaagcgattctcgtgcctcagcctgccgggtagctgggactataggtgtgcgccaccaggcccagctaatttttgtattttatgtatttatttatttatttattgagatggagtcccactctattgctcaggctcctaggctggagtgcaatggcgtgatcttggctcactgcaaccttcacctcccaggttcaagcaattctcctgcctcagcctcctgagtagctgggattacaggtgcgtgtcgccacgcctggctaatttttgtatttttagtagagacggggtttcaccgtgttggacaggctggtctcgaactcctgacctcgtgatccacctaccttggcctccccaaagtgctgggattacagatgtgagctaccatgcctagctattttttttttattttaagtggaaacagggtttcgttatgttggccaggctggtctcaaactcctggcctcaagtgatccacccacctcggcctcccaaagtgctgggattacaggtgtgagccaccatgcccagcctgcgttctgtgtttgtttgtttgtttgtttgtttttgagacagactcttgctctgtcacccaggctggagtgcagtgttgcgatcttggctcactgcagcctctgcctcctgggttcaagtgattctcctgcctcagcctcctgagtagctgggattacaggcacctgccaccaagcccagctaatttttgttttttgtatttttagtagagacagggtttcaccatgttgggcagggaatggtctcgagctcctgacctcataatccacctgcctcagcctcccaaagtgctgggattataggcgtgagccaccacacctggccatcgttgattattttttaaatgtttggtagaatttaccagtgaagccatttgggcctaggcttttttttgtgggtagtttttctttctttctttcttcttattaattcaatctctttattataagtctattcagactttctattccttctcaagtcagtttcagtagtttatgtcattctaggaatttgtccattttatgtaagttatctattttgttggcatttagctattcatagtattcttttttgattctctttatttctgtaaggtcagtattaatgtacctgtctcataatactgtttttttccagtgtgttcaaatcaggccaaataattctgatacacaatattcgatttatttgtctctgtggtctcttgtaatatatagatttccttccatctcattttttcttgatatatatttattgaagaaatgaaattacttgtatatttctcacattctatatttttctgattgtattcttggaagtcattaacatgttcttctatcccctagctagttgataggtagttctttattatgatttaggtttgatttttttatggcaaactatttcttttttttccaccagttgtcaaatgatcctttactgaaatattttcctttgtgcttcttaactagctgggcattccacagcaccactgttgatgtcatctatgatttcatgagggtggtggctgtcaacattacaacccaaagactgggcagtccccaggatctctttaatgtttccagagagttctctggatctctccagattggtgccacatctgttgagcaatgttgatgatctcatcaaaagtgatattcccactgtgtttaatgtttttctgtttatttctgtcttgatggttcctcgagggctttgatgatcagggcagaggcagaaggcaccacctcaatctgggcctgtctgttctgaatggtcagttttcactgtaatcctcaggcccttccagtcacccgttgtcttggcaatgtcgtcaccaaccttttttggagacagacccagggggccaatctgggggccagcgcagacgtggcaccaacttcacccccagtgcacctcaggtatacgactttgatctctttggggttgaactttggcagcatggtggaggcggctggtgtcagatgaacccggattcgggactaccaaagaaagttgcaccttggcctcctccgagctcagatccgaaagcagcaaaactatttatacatcgattatcaggcacatagtttccaattttatctcttttcgtgaagttggcagtcattgatgaccactgcctaggttcattattacaattgaaatagttcaatagaaggcagagtatgggcatcaatcagtccagactataagaacttttgggaggtgacttttgatgattatgagtactacattctatactattcttagaaccttggcatcagggctgggcgcagtggctcaggcctgtaatcccagcactttgggaggcccaggcaggcggatcacctgaggtcaggagtttgagaccagcattaccaatatggtgaaatcctgtctctactaaaaatacaaaaattagacaggcatggtggcttgtgcctgtagtcccagctactcaggaggctgagacaggagaattgcgtggatccgggaggtggaggtatcgtgccactgcacaccagcctgggcaacagagcgagactccatctcaaaaataaataaataaataacctcggagtcaggagatgggatctactcccaactctgccaccaactagctgagcatcctctttggcacctgttttcttatctgtagaatgggggaataaactaatacaatgtctaggacttttggctattctaacattctctgactaaacaagtagaggacttaatctttcccaaagatgatttgggtgagttaaaaaggaactgctgaccttgtgttattattcccatttcataccaaaaatgtttatttcaaagccaacatttatcagtcattaaatccagtaaagtatataacagagtccattaaaagtattatgaggcaaggtatggtggctcacttctgtaaccccagcactttgggagaccgaggcgggcagattgcttgagtccaggagttcacgaccagcctggcccacatggcaagaccccatctctacaaaaaatacaaaatttagccgggcacaatggtgcatgcctgtagtcccagctacttggtggggctgagctgggaggatcgcttgagcccaggaggtcaaggctgcagtgagccatgagtgtgccactccactctagcctggatgacatagtgagaccctgtctcaaaacaaacaaacaaaaaaagtgaaaagtatcaggagagcaggaagccaaggccaaaagcgttgttttctggattctagttctggctctgcagctaatcaacatgcactctcagtgtcctgtccatagggtaaaagattgcatgagtagctctaaaggcctgtaagctttatgattttatgcctattcttgatttttctcacagttttgaggatgctatttttgttaatatctttttttttatacttttaagttttaggatacatgtgcacaatgtgcaggtttgttacatatgtatacatgtgccatgttggtgtgctgcacccattaactcgttatttaacattaggtatatctcctaatgctatccctcccccctcccccaccctatttttgttaatatctttagcgctacttgtttttatctgcattctgattatgctttactcagcaactaactggcataggcctgccccaggtgtcagttcgtatagcaaattcagcttgagcataaagaactttctggaagcaaagacaccaaaatattagcaatttattatttctaggtggtaagattattggcgtgcaccaccacgcccaactaaggcatatttttataatattttaaaagttattcttaaggcatttgatagcatatttttgattgcatgccccagcaaagaggaatcactaaactttaggtcagtagatttctttctcttcctataattcagtttggcagcatcttccattctaagttaacctaaatactttagtaataaagacttacatgtatctaattagatagtcagctttacttaatcttcttaatcatctagattagatgttaagtgaaaaaatattttgtgcctacagaaattaagattcggaaagaacagtagcacatacatgctatcaacatctgtgtcataactcatatggaatctggatttgcgctacttggggaacaggtagtgtctgctagagaagtggtgtgacagaaacatgggcaaaggcagggtgtgtcttttgtaaatgatgaaaacagaagattaaaaacaagtttgctaaatcatgttcataaccactccctggagagcaattactctgattactcgacttacctggtaagtaccacccactgtaggagaaaatacagatgtttggttcactgttatgggtttccccatgtgcaaaggtgttatgctgctgctatgctcgtctttaaacactgtagtagcagttactgaagaatggtagagtaaggggtgccctcacagctgtcaactcactgtgtgatccagacgagtaacgtagcctggtcgcaagctccaaggttacttatctttagtggaggggatagttctagtttccagtgttatcacgactagtaaaattgatattataaaatccacttctcagtaaggaaggcagtttgaaagcgttcttgttgtgagaagcatgacaaatacaggcagttctatggacagtgtttatgtaaaacaaattattgaatagccatttgaacattaactgttgcccagtgtgttataatgtgtacctgctcaggcattttgaagactcttcttacacctagtgaggaccaagggcaaatagcaaaaagtaacctgacatagagttttagtttggagattttcttttgaattgccctcagggagatttctcaagcaacactggtccatgccaatttgcaaatggactcttgtgccagtggctcaatcaacccatccaaatgcagagaaccatttggaggcattcaaaaccaaatgaggggcaattttctttcatttatatgctgtctgttaacctctctttcaccaaaaattaacctgattctgggtatgcatacctgaaaaaacacaatttttacactcaaggaagtttcattttttcataggaaaaaatcaactattactaaactatacagttactacagtgatggagatgtgtgcaggctgctgtaggaacataaaagggagcgcctaacaggtgtgggtgagtcaaagagagctggggaggaatgaaggcaacattcttgagctaaaccaaataaacaaaacattgcaactcacaattatgacctatttcaaactcttagaactacagtaatgatttagactagttctcatttggacagggtttatttactcttacggtttcaagcaccccttaatctttccattttaacaagggtatatggagcttcacagataatatctccaaaaatgggcatattttgacttgtagaccatcacctgcacacacacttcaaggtcactttcatacagcaaagtgaggaaagagtttattagctagatgagaatgtgtaaatgaggccgggtgtggtggctcacgcctgtaatcccagcacttcgggaggctgagatgggtggatctcctttggtcaggagttagagaccagccgggccaacatggtgaaaccctgtctctactaaaaatacaaaaattagctggcatggtggcgggcgcctgtagtcccagctactcaggaggctgaggcaggacaatcccttgaacccaggaggtggaggttgcagtgagccaagatcacgccactgcacttcagactggtgacagagcaagactgtctcaaaaaaacaatgtgtaaatgaaactgccctactatttctgctttagtaaaaacaacagattctggtcagtatttgttcacttatattgggcataagataattcctgctgtttgttgcagatcttggcatactgcctgattgtcctgcatgggaatcttggactgctactacagcaatttcatgactgtgtttcttctatttttgtttttaccacgttagttatatcatgcagtacttgaaacgaaggtggagtctgtcactctgtcagcctgcagtttaaaaagttagatgatgcattaaaaaatcaacaaattttgccaggaaggcagtgtgtgcctgtggtcctaacttctcggaagactgagtcaggaggattgcttgagcctagcagtttgaatccagtctgggcaacatagtgagaccctttgtcttaaaaaaaatcaacacattttaaaagtatttcaagatttgtatttgccatatttccaagctagtattatttatttagagtttcctattgcgggtgaaattctcttgtcttttgctgtttgcagtaacttgagtcttttttcatctcttcagataatctacttatattcatgccaagttttctagttttcctattgcttcctctaattttcaaatagagtatatacaatattgagcatagtttctcattagtctgttcacagtcactaaactaatcctcaaatgtatttgattctatcactttccaaaatttgcctttgctggttcataatatagttacctaacttccccagctctgccctcgctcatgaactgtatttctctacattacccccacactgcattggcattctgagtcatcggggattaggtatccttcctgctattaactacataatatttaaacttccccacttgcccatctcctttatttcgtattcaaacaccacatgaattaaactaacgttggttgcttttaacctgtaattcctgactgcaacaggtagttagttgccacctcttgaaatgaacagatttgactagaagctgacacttcttactcccgctgaacttagtattttacatttatataaattcaaaaagcaaaatcatacctttcttatcaatgggccctctttgtccattgataacataatattgcaatataaacaaaaagtatttgtaccatacctcagaaaacaaattagattactattagtgcaaaacaggggaaaagtagaaaaatgttattgtaaagagactatcacccacttcaagggatttatcaggtaactgcctgtgtaagttacaaagacaatgctaatctataactagtgtatacctagatgagccgccaggacatttgtctaatggcagatggggtaattggactccacatcttcaacttaggcacatggaaaacagcatccctaaaagttgcctggggatgaccagtactgagccaaccagcttagtggaactgttacgagagagaaacttcagagccaaggaatttcttggcagagcctcacattctgccttagaatcatgaaaagttagatctagaaggtaacagagatcatttaatccactgcccttattttacggtgaaaaactgaaggccagagaagttaaggagtttgcctaaggtctcacactcgtagttagtgacagattcagagctagaactagatcatcctgactgcatttcagtagtcttagagctggccgacaaatctgacaactcacattgaacccatgttccaaaaggtattttatattgagcttatgaacaccgctttttaaatttatgttatttatttatttatttatttattatattttaagatctgggatacatgtgcagaacatgcaggtttgttacataggtatacatgtgccatggtggcttgctgcacccatcaatctgccatcctgttttaagccccacattcattaggtatttgtcctaatgctctccctcctgttgccccccatcccttgacaggcccccgtgtgtgatgttcccctctctgcgtccatgtgttctcattgttcacctcccacttttgagtgagaacatgcggtgtttggttttctgtatgaacacccctttcacagaaaattaggcaaacaggttggaatatttagaatagaaaacatttattataaagtcacaagaaatacctgtgtagacttgctgactggaagtatttggcttccgtaagacaaagaagagtcttagtcatctggttaaagttaaaaacgattgtgtcaccaggctgaaagcagacatgctgtggaagcagtaggctgaaattagaactgaatacaagagtttagagaaaattgaatttggagctatctcacaacactgggagttattctgtttttgtttgcttttaataggcacacaaaaaagaatagtgactacaatgaactccttgtgtagccccaccagaccccattttcttccctccccactgaatttggtgcttatatttccatacctattcatgtggttttcctataggtaaatgtatccctaagtgatgtttagcattattttcatattttaagctacataaatgctatcatattgtatatatgtgtctacaacttgcatttttttttttgcttaatactacatttttgagatttatcctattgataaataggatttctctaactaatttattttattttttggagatgaggtcccgctatgttacccaggctggaatgcagtggcagttcacaggcacaatcatagcacaatgtggccttgaactcctggacacaagtgacctcttgcctcaggctcctgagtagctggggactacaggccccagccactgcaccaggccagctaattcattttaactgctttatggtgttccattgtatgaatgtttcaacatttagctaatctcctattgattgacatctagtgagtttccagttttttgatttgctttgtttcatttgctgttttattttaatgttgctactgtaaacatgtttataaaactggtgcatgtgtgaaagagtttgtctagtaacatttacaaggtctcagtgtgtgtgtgcaaatcttgaatttagcaagaagatctcaaaatagcaggttatgagactaacacaaggactgtgtatttttagagttttaattttttgtgaatctgaagagtgtaaaatactgttgccttctggttttaatttctctgattccttgtggggctgagtacctttccatgtgttcacagacaatttggatctcctcttctccctagctcacttttcagatgagctgctgaactttttattgttcattctgaaaaatgttctatagtcattatgtaaatccttattatatgcattgccaatatcttctcctaatctggagcttgacttttcacttttataatgatatattttcatgaacatatttatcaatcttttattttttatttatacttattatttctttaaaacatcattttttcactctaaggtcataagatattccccaatatttttctttagtttttttaaagttttatttttttacaatcttcaagtcttttatgtgccaggaattaacttgtgtgtagtgtgaggtcaggagctagttttatttttttctacatcgacaagcaattgtttagaaaccattaattgaatattacatttcttccccacagttgggtaatggcactttcatcatatatcctggactctctatcagtcaggttattattcctgtgccttattataccatattaactactatatctttatggtaagtctcaatatctggaaagcccctatttgtcaagtggatgcaatgggagctagatggatttgcactatccttcttgaataccatccaagaggtatgaatactgtggggaaggaaacccagaaggatgttatcttagcccttttgtgttgctataaaggaatacttgaggctgtgtaatttataaagaaaagaggattatttggctcacagttctgcaggccttataagaagcatgatccagcctgaccaacatggtgaaaccctgtctctactaaaaatacaaaaattagccgggcatggtggtgcgcctgtagtcccagctactcaggaggctgtggcaagagaactgcttgaacctgggaggtggaatttgctgaaccaaaatcatgccactgcactccagcctgggtgacagaatctcagggaaaaaaaaaaaaaaaagcatgatgccagcatctgcttctggcaagggcttctggctgtttccaccagtggcagaagggtaaggggaactggcagattcagagatcatatggtgagaggggtggcaagaagtgggaggaggttccaggctgtttttagtgaccagctttcctgggaactaatagagtgagaactcagtaccacaaggacagcaccaagccattcatgaggcacctgccccatgactgagcaaaacaccttccattaggccccacctctaacatgggggaccacattttaacatgaggtttagggggacatgaaaactatatcggagactatggggtcagtcattgttgcagtagctgagtggggaaatgggaatcctggaactggagatcagtgtcccacatcaaggaactgtgctctgtggagacctgtgggccctctaagaactcacatgtgtgtctcctgagagacatccaggccttggatacctgaccacaaagggcctcttgtggtccttcagtgttattaagtagaacaacagcaaccagcagaggactccagttgcttccagtgaagtaaaaagtcactttctctgaaagtggagttaagaacacaattctccttacaatggctggacgtgctggctcatgcttgtaatcctagcactttgggaaactgagatgggcagataacttgcggccaggagttcgagaccagcctggccaacatggtgaaaccttgtctctactaaaatacaaaaattagcagggtgtggtggcacatgcctgtggtcccagctacttgggggactgaggcatgagaatcccttgaacctggcaggtggaggttgcagtgagctgagatcacaccacacacttcagcctgggcaacagagcgagactccatgacagaaagagagagagagagagaaagaaagaaagaaaattcttcttacaataacagcaaaaagaataaaacaggaatagatttagcaaaagaagtacaagacttgtacactgaaaactgttgaaagaagttaaagaagaccaaacaaaatcccagccagcttctttgtacaaattgacaaactaatcctacaattaatatggaaatgcaagagaccaagaaaagccaaactattttggaaaaaaaaaataacaaagttcctggaggactcacactttctaatttcaaagctacaataatcaaaacttactacaaacccaaaataatcaaaacggcatggtattggcctacatatagacatattgaccaatggaatagaattaagagtttataaataaacccatacatctgtgttgaattgattttcaaccagggtgccaattcggtgagaaacaaacatcctttcaacaaatggctctaggacaactggatagctacatgcaaaagaatgaagttagaccccttgcctcacaccatatgtagaaatctacatgaaactaaaactgctttaaaaaatagtctatttatttagaaacagggtcttgctctgtcacccaggctggagtactctgacacaacaatagctcactgcagcttcaaactcctgggctcaagtgatgctcctgcctcagcctcctgatagctaggattacagacatatgccaccatgcccagctattatttaattttttgtacagaccaagactgggtcttgccatgttgcccaggctggtctcaaactgctgggctcaagtgatcctcccacctcggcctcacagcacactgctgcaaattccatgagatgggtgaaaaactatgagttcccaacatgtgagaagggggaaacctgcctctgaacacacatctccactggggaacctcaaaacccagattatggaagaaggatttaaccttgcctagagctgaaatggatttagtataaaatataaaagtagaaatagtagcaggaagagccttgtaggcgctcccattctccagcttgggccagggaagccatccctgactgtatctcaccgaggccattgaggaagacagttggcagaatttgggcagggtcgcagggtgaaataagcttccaactgaactgtgtaataattttgactgggcgcaaactctgtcgagcagaaatcgggggtgaaagtgaactgctgcagaaaggagcataggagccacagctgacagtgtgggcagacagggaggggcaaggcctgaaagccatgcttgctttcttagtggggaaacttataccctggggctaggtctgagtcctgcacaccagctgcctggagataaactgtgctgttagcggggcacagtgggagtgaaactggccttgccaactgtgtggtagctgggtgagccctgtggctacttactttcccccacttccctggtgacagaggcgccataatccacactggaacataaccccatttgcctgagaatcagccccctatcccccacagtggctgtggcaaaaagagtctgagctcagacctgcctaatcctgccccaacctgatggtatttccctacccatcccagtgcccagtcacaaaagacaaactcttgggagctttatggccctacttatcacatgagaaacctgaacacttatcctgaccaacttagggcaagcttatatcccccttctactatcacagctggtgctctcctgaacataccacctcctggctggaggccaaccaactcaagatatgacagcaactcatgacaaaataacactgctccaaggaaggaaaaaacagctaactccactatctgcaacatcctggctaaacagaggtcctgtccatgtggcaacatcactgctatcataaccagcatttgagaaagccagcacactaaacatctacaaccaaggcttctcatagagtctatgtcactaccctgccacctcccccagaggaggtgctggtatccatagctgggagacctgaagatggattacatcacaacactctttgcagacactccccagcatgatcctggagcttggaagccccactggatgcctagacccagaaaagcaataacaatcaccacagtctggctctcagaaagccccatccctaaggaaagggggagtgcaccacatcacgggatcaccctgtgagacaaaagaatctgaacagcagcccttgagttccagatttttccactaaaatagtctacccaataagaagaaatcaaaaacataattcaggtaatatgacaaaacaaggttctataacacccacaaaagaccacactagcttcctagcaatggatccaaacccagaaggaatctctgaattgccacataaagaagtcagaaggttgattattaagctactgaaggagatactagagaaaggtgaaaaccaacttaaagaaatgtaaaaatcaagccaggtgcggtggctcacgcttgtaatccgagcacttcgggaagccaaggcaggtcacttgaggccaggagtttgagaccagcctggccaacatggcaaaaccctgtctgtactaaaacaaaaacaaaaattagcctggcttggtggtacatccctttggtcccagctactcaggatgctgaggtggaaggatcacttgaacataggaggtagaggttgcagtgagccaagatcatgcaactgcccaccaacctgggtgacaagcaagaccctctctcaaaacaaaacaaaaagttaaaaaaaaatacaggacatggatgaaaaattccccagaggtatagatatcataaagaaaaaacaattgggccgggcgtggtggctcatgcctgtaatcccagcattttgggaggccaaggcgggcagatcacctgaggtcaggagttcgtgaccagcctgaccaaaatggagaaatgctgtctctactaaaaatacaaaattagctgggcgtggtggtgcatgcctgtaatcccagctacttgggaggctgaggcaggagaatcgcttgaacccaggaggcagaggttgtggtgagccaagatcatgccattgcactccagcctgggcaacaaaagtgaaactcttgtctcaaaaaaaagaaaaaaagaaacaatcacaacttctggaaatgaaagacacacttagagacatacaaaatgcactggaaagtgtcaacaatagactagaacaagtagaagaaaaaacttcagagcttgacaaggcttttgaattaacccaatcagacaaagacaaagaaaaaggaattttacaaaatgaagaaagccaccaagaaattggggattatgttaaatagacaaaactaaaaataattggtattcctgaggaagaagagaaatctaaaagtttggaaaacttatttgagggaataatcaaggaaaacttctctggccttgctagagatctaaacatccaaatagaagaagctcaaagaacacctgggaaaatcattgcaaaaagatcacctaggcacacagtcatcaggttatctaaagccaaaacaaaggaaagaatcttgagagctgcaaggcaaaagcctcagacaacctataaaggaaaacctatcagattaacagcagatttctcagcagaaactctacaagccagaagtgattgaggtcctatctttagcatcttcagacaaaataattgctagacaagaattctgtatccagcaaaactaaccttcatatatgaaaaagagagaaattatttttcagacaaacaaatgctgagagaatttgtcactactaagccagcactacaagaaatgctaaaaggatttctaaatcttgaaacaaaacttcaaaatataccaaaatagaaactccttaaagcatacatttcacagggcctataaaacaatgaaaaacaaacaaggtattcaggcaacaactagcatgaagaataaaatagtacctcacatctcaataataaaatgaatataaatggcctaaatgctcctcttaaaagatgcagaatgggctgggtgtggtggctcacacctgtaatcccagcactttgggaggctaaggcaggcagatcacgaggtcaggagatcaagaccatcctggctaacacagtgaaaccccgtctctactaaaaatacaaaaaaataggccaggcatggcagcaggcacctgtagtcccagctaaccaggaggctgaggaaggagaatggtgtgaacccaggaggcggagcttgcagtgagccgagatcgtgcctctgcactccagcctgggcgacagagcgagactccgtctcaaaaaaaaaaaaaaaaaaaaaaaattgcagaatggcagaatggataaaaatctaccaaccacatatcttctgtcttcaagagactggcctaatgcataaggattcacataaacttaatgtaaaggagtgggaaaagatattccttgcaaatggaaaccaaaagtgaggaagagtagctattcttatatcagacaaaacagactttaaagcaacaagttaaaaaagacaaagagggacattatataataataaaaggatcatttcaacaagaaaatatcacaatcctaaatatatatgcacctaacactggaggtcccaaatttataaaacaattattactagacctaagaaatgagatagatggcaacacaataatagtcagggacagccgggtgcaatggctcacaactgtaatcccagcactttgggaggccaaagcaggtggatcacctgaggtcaggagtttgagaccagcctgaccaacatggcaaaaccctgtctctactaaaaatacaaaaagtagctgggtgtggtagcacatgcctgtattcccagctactcaggaggctgaggtaggagaatcgcttgaacccaggaggcagaggttgcagtgagctgagattgtgccactgccctccaacatgggagacagagcgagactccatttcaaaaaaataaaagaatagtagttggggacttcaatactccagtgacagcactagacaagtcatcaagccaaaaagtaaacaaagaaacaatggagctggacatggtggctcacacctgtaatctcagcactttgggaagccaaagtgggcagatcacctgaggtcaggagtttgagaccagcctagccaacgtggtgaaaccccgtccctactaaaaatacaaaaatttgctgggtgtggtggcacatacctgtaatcccagctaatcaggaggctgaggcaggaaaatcgcttggaccccagaggtggaggttgcagtgagccaagatcatgccactgcactccagcctgggtgacagagtgagactctgtgtcacaaaaggaaggagggaaggaaggaaggaaggaaggaaggaaggaaggaaaagaatttaaactataccatagaacaaatggtctcaacagatatttacagaacttctacctaacaactacagagtatacattctttttagcaacacatggaacattctccaagataaaacatggtgggccacaaaacatgtctcagtaaatttaagaaaactgaagtaatatcaagtactctttcagaccatactggaaaaaaactggaaattaactccaaaaagaaccctcaaaactatacaaatacagggaaacttaataaactgctcatgaatgatctttgggtcagcaatgaaatcaagatggaaattaaagaattatttgaactgaatgataatagtgacagaacttatcaaaacatctggcatatagcaaaagtggttctaagaggaaagttcatagcattaaatgcctatatcaaaaagtctgaaaaagcacaaatagccaatctaaggtcacacgtcaagtaactagagaaataagagcaaaccaaacccaaacccagcagagggaaaaaaaattacaaggatcagagcagaactaaatgaaattgcaatacaaaaatgtataaaatataaatgaaacaaaaagctagttctttcaaaaaaaatgatagactgttagtgagataaaccaaaaaaagaagggagaagatccaaataacttcacttagaaatgaaacgggagatattactactgatagcacagaaataaaaaatgatttaagactactgtgaacacctttacacacacaaactagaaaacctagaggagatggataaatttctggatatatacaagcctcctagattaaatcaggaagaaatagcaactctgaatagaccaataacaagtagtgagattgaaacagtaatgaaaaaaaaaatgccaacagcaaaaaaaaggtccaggactagatggattcacagatgaattctatcaggcatttgaagaagaattggtactgatcgtaatgaaattattccaaaagataaactggaaatcctccttaaataattctatgaaagccgggtgcaatggctcatacctataatcccagcactttgggaggctgaagcaggcagatcacttgaggtcaggagttcaagaccagcctggccaacgtggtgaaaccccatctctactaaaaattcaaaaattagctgggcgtagtggcaggcacctgtaatcccagctactcatgaggctgaagcaggagaattgcttgaacctgggaggcagagattgcagtaagccaagattgcaccactgcactccagcttgggcaacacgagcaaaacttcgtcaaaaaaaaaaaaaaaaaaaactctatgaagccagtatcactctaatacccaaaccaggaaaagacataacaacaacaacaaaaatgcagaccaatatccctgatgaacatagatgggaaaatcctcaacaaaatactggctaaccaaaaccaacagcatatcgaaaagatagcacatcatgataaagtgggttttatactagggatgcagggatggtttaacatatgcaagtcaataaatgtgatacatcacataaacagaattaaaagcaaaaatcatatgatcatctcaatagatgctgaaaaagcatttgacaaaatccagcatccctttatgattaaaaccctaagcaaaatcagcatagaagggacatacctcaaggtaataaccatctatgacaaaccctcaggcaacattatactgaacagggaaaggttgaaagcattccccctgagaactggaacaagacaaggatgcccatttttatcactgctattcaatatagtactggaaatcctagccagagcaatcagacaagagaaagaaataaagggcatccaaattggtaaagaggaagtcaaaccattgctgtttgccgatgatatgattgtatatctagaaaaccctaaagattcatccaaaaagctcctaaacctgataaatgaattcagtaaagtttcaggatataaaatcaatgtacacaaataagtagcactgctatacaccagcagtgaccaacctgagaatcaaatcaagaactcaacccttttaacaacagctgtaaaaaataatataaaatacgtagaaatatacctaaccaagaatgtgaaagatctctacaaggaaaactacaaaatactgctgaaataagtcatagatgacacaaacaaatgggaacacatctcatgctcatggatgggtagaatcaatattgtgaaaatgaccatacagtcaaaagcaatctacaaattcagtgcaattcctgtcaaaataccatcattatttttcacagaactataaaaataaaatcctaaaattaatatggaaccaaaaaagagcccacatagccaaagcgagactaagtgagaagaacaaatctggaggcatcacattacctgacttcaaactatactacaaggctatagttaccaaaacagcatggtactggtataaaaataggcgtgtacatcaatgcaacagaatagagtacccagaaataaagccaaatatttaaagccaactgatcttcgacaaagcaaacaaaaacataaagtggagaaggacaccctgttcaacaaaggctgcaccctaaccacaaatggtcaaatggtgctgggattgttggcaagtcacatgtagaagaatgaaacttaatcctcatgtctcaccctatacaaaaatcaactcaaaatggatcaaagacttgaatctaagacctgaaaccataaaaattctagaatataatattggaaaaactcttctagacattggctaaggtagagttaatgactaagaacccaaaagcaaatacaacaaaaacaaaaataaatagatgagaccgaattaaactaaaaagcttccgcagagagaaaaaaaaatcagcagacttggctgggcatggtggctcacgcctataatctcagcactttgggaggccaaggtgggtggatcacctaaggttaggagttcgagaccagcctggccaacatggcgaaaccccatctctactaaaaatacaaaaattatctgagcatggtggtgcatgcctgtaatcccagctacttgagacgctgaggcaggagaatcacttgaacctgggagacagaggttgcagttagccgagatcgcatcactgcactccagcctgggcgacagagcgagaccctgtctcaaaaataaaataaaataaaataaaataaggccaggcatggtggctcatgcctgtaatcccagcactttgggaggccaaggtgggtggatcacaaggtcaggagattgagaccatcctggctaacatggtgaaaccccatctctactaaaaaatacaaaaaattagccgggtgtggtggcaggcgcctgtagtcccagctactcgggaggctgaggcaggagaatggcatgaaccctggaggcagagcttgcagtgagctgagatcacgccactgcactccagcctgagcgagagtgcaagactctgtctcaaaaaaaataaacataaaaataaaataaaataaaaataatcagcagagtaaacagagaacccccagagtgggagaaaattttcacagactattcatccaacaaaggactaatacccagaatctaccaggaactcaaacaaatcagcaaaaaaaaaaaatcccatcaaaaagtgggctaaggacatgaatacacaattctcaaaagaagatatacaaatgtccaacaaacatgaaaaaaatgctcaacatcactaattatcagggaaatgcaaatcaaaaccacaatgcaataccaccttactcctgcaagaatggccataatttaaatatcaaaatataatagatgttgatgtggatgtggtgaaaaaggaacactttcacactgctggtgggaatgtagtacaaacactatggaaaacagtatggagaatcctttgagaactaaaagtagaattaccatttgatgcagcagtcccactaatgggtatctacccaaaggaaaagaagtcattgtatgaaacagacttacacacatatgtgcatagcaatacaatttgcaattgcaaaaataaggaaccagcctaaccctgatttccagtggaaatcctaggaagttatgatgttagttctgggcttgtaaaagaaaaacaacagcaaacaaacaaacaaaaaagaaaaaccttggaagcaagtaatttgagatggtttatgtcagtttttgtgatgaaaactattttctaatgtttagaaagatgtttccacaattttttgtttcttaacagaactaaatatttagcttttctgtatcatatagatgactcagacattttatgattagctattacccaggttgacataacatgactctaagttattgaaaaagattttttaaacaatgtaaagctcatttataaacttttatttattctcttttgcaagtaaaccttatggtaaataataaaaaacataaaaaagtaaataaagttttatttattcttaggaagtatgcttgagtagctcattaaacaaagttagctactgaaactgtctttgcagggctgagcagtggctcacgcctgtaatcccagctctttaggaggcccaggcaggtgcattacctgaggtcaggagttagagaccagcctggccaacatggtaaaactctttctctactaaaaatataaaaaattagccaggtgtggtggtgggtgcctgtaatcccagctacttgggaggctgaggcaggagaaccacttgaacccaggaggtggaggttgcagtgagctgagatcacatcattgcactccagcctgggcaacaagagcaagactccatctcaaaaaaaaaaaaaaaagaaaagaaaagaaaaaaagaaactgccttcgcaaaattataactgagacagtgaaagaaatctaacttaactgaccatcttgcctctagcatataagctgtctttgttcattccatcttgcctagggactagattgtctttgtaggactaacatttgacacaagattagaaattatgatttaggagtcatgcagctggaggctaaaagattatgaccctccctaaatttctctcaagatcagtgcttgagatattttgcagaccctgcacttgatggatcagctggctccacccagattgataaactggctcatctgatcttgtagcccctgcccatgaactgactcactgcaagaagacagcttcaactccctatgatttcatctctgacctgaccaatcagcactcctggctcactgggttctccccacccactaggttgtccttaaaaattctgctcccaaaatgctcggggagactgatttgagtaataaaactctggtttctgcacagctggctctgtgtgaattactccttctctattgcaattcccctgtcttgagaaatcagctctgtctaggcagtgggcaaggtgaacccattgggtgcttacaccatcatcttcagttttttctttgtaatcatgtttacattccacaaatgttaggaacttaacactttagccagaactctaaagttaaatacacgggtattttgttaatcagaggacacggttgttttcagtaaatcaacagtattaaactagtcttatttaccaacaatttacacaaatcatttgaactaaaaggcatttgagttagcttatatttttctcataaaatatataatttaagtgcttactttttctttaacccaattaattagagttttcgtgtattttggtaatgaaatatcacatccacatggcatatatgaacatatatacatacagacatacaaacaaaagcagagtctgtagcttgataaacttcttcatttgtcagggggtttttttgttttggttttggttttggttttctttttctttttttttttttttgagatggagtcttgctctgttgcccaggctagagtgcagtggtgtgatctaagctcactgcaacacccacttcctgggttcaagcgattctcctgcctcagcctcccgagtagctgggattacaggcgcctgccactgtgcctggctaatttttgtatttttagtagagatggggttttgccatgttggccagggtggtctcaaactcctaacctcatgatccgcccaccttggcctcccaaagtgctgggattacaggcgtgagccaccgcacccagaaaccatttgccagtttttaaatagtttctctcccctctttagactatggagccctaaacaactgttagcaacataacccttaatttgcacttccaaagacatgactcttaagtgaaaatttacatcccaaaggcacagcacttagatctaagcaccattctctgctgagatgaagaaggatatgggtaaagattcagtcgaagtgagattgccaggaaaagtatcttaaacaaaggcagggattgttatgtaaactttaaaccaatgtcttccccatcttaagagttttgtgggttttttgtttgtttttttttagacaaggtgtcattctgttacctggactggggtgcaatggtgcaattttggctcgctgcagtctccacttccctaaggccacaagatttgaagttaggataatacatgttacactgttaacttttagcaaactttacttttgttgaaaaccatgtaagtttgggatttttaattatcctttgctattactaagacctctttagtccaaatcaacttggaattagtatagatggttccttcctggttctgtaagtactttaaggcttggctgagtgcagagctcacacgtttgagcagactgattattaggcaattttcctaactctatttctacgagagtttccctatcaattactgaatactcgttgtgtctttttccctcaatcagccaggagaaaccatccatcatcctgtcctgaagggagttcctcctaggtctggtcggacctttgtatggtagttaattaagatttagatcccctgttaggaaacctgcagggttaagggaattatcagtggttaatgttaaatcatatttttctaacagaatggcctcatatgttaatattcttaagtcagtaagctgcctttttgcttttttgacttaggatagttctgacctggtgaggtgtgctcacaatgaggtttcctctaaaagttatttttgtactttcttcagttagcaaagcagttgctgctacagattgaatgcatttgggccatccccgggttactgggttaaggatttttgataggaaggctactggttgtcagtggcctccgtgcttttgggatatgcccttgtttacactgacaacaagatggaatagctacttgagggtaaatctaggacaggggcagttactaatagatgttttaacctttccacctgttggatttctggtaattgccaaatgaggagggggttttgcccatcttgcgtgagctttttgtataagggttttgtttttagggcataagaggctatccatagatgacagtatctgacttatcttaaagttttctaagttcttgtttggtctccggcagaggcaaggatatgatactttcagtccattcaagctcaatttgccatttacctttgctaattaaatgacttgttctaatatttgactaaataaatttgaagacttcgtaaacccttgaggtaagactgtctatctgtattgctattttcaatcagagtgagggtcttctcactcaaaggcaaataggtcctggctgtcttccgtgaacggacaaacccagaaggcatcttttaaatctattaccataacaacagggtgggtagtttggacttgattaatagctctaaggtcttgcactaactggtgtgacccgtctggcttctttacaggcagtattggagttttatagggtcacggagaagactttcaattataggttttacatttaccctggcttttaaaggaatagggtacattgctttctctttactacttctagctctctctctctctctctctctctctctgactctctgtctctttctctctctgactctcttaagtttttttttttttatccttctaatattttaacattagtcctgggggattattgggggaatattattgttgctagctttatttcttttatcctgtaccttacttggggtatttcccatttttggggtgaggctcaatttcccttaccagaaatatctcaccttttggagggaggctcaatttcccttactggcaatgtctcaccttttggggtgaggctcaatttccctcactggaaatgtcttgccttttagggtgaggctcaatttcccctactggaaatgtctcaccttttggggtgaggctcaatttccctcactggaaatgtctcaccttttggggcgaggctcgatttcccttaccggaaatatcttgcctctttttaatccccaagataccccgaccaaggaatacttcactgccccctgtggtttttctttccttagtcccggctaaggaatgctttaccacccctacggcttctttttccttggtatgtcccaaccaaggaatgtttcactgcccctgcagtttttctttccttagtccctaccaccaaaggaatactttaccagctcctccgctgtttccttctttggcttgtgcgtgatgttgtctggtccacgtggtatgtaaggatcctttaccccaggtcaccggccagtttctttccacattgctgagagtctgggtttattcatcacaccaggtaggtctcggttcctcacccctgaggctgccgaaatgaggcggcggggcacctccttacaagagaggactggagaccgcccagaggagagtgggtccctgcatgggccaccaaactgttagaaatgcaaaatgcttgttccctggtgctgcaaagaaatagcactcaaacatacatttaattttctcagcaaggcaatttttactttctgcagaaagggtgctcctcacagatggaacaatggtgagatcataccaggacaggggaggggcaggagttcttattcctgacgctagtagcccctactgctgtgttgttgccctaatggctaggattggaccgcacagtctaagctaattctgattggctatgttaaaaagagcaggagtatgagctggagtggtgaggtgagtagtttggtgggaagggcagttaggaacaggtaactaaaggtgacttaggtcagagcaggtgaccaccaagggaacagctgtgaactactgatttggactggcgggaaagttgtttactgaaactagaggcaaggagttgaagagaactaggaagttaaactttaaaatgaagaatcaaagaataagagagctggacatactgacatactgattctttgaagagaaacttagggttcactatatttaacaggaggccgagacaggaggatcgcgtgagcccaggagtttgagaccagcatgggcaaaatagtaaaaccccatcttattaaaaaaaatttttttttttgaaatggggtctctctctgttgcctgggctggagtgcattggtgctatctccactccctcaacctctcagccaatcctcccacctcagcttcatgagtagctgggactacaggcgtgcaccaccctgcccagctaattttcgtatttttttgtagagacaggttttcatcatgttgcccagcctggtctcgaactcctgagctcaggcaatcctctcacctcggcctcccaaagtgctgggattacaggcatgagccaccacacccgaccttaaaaaaaattttttttaatatgtggaaagcagacacgagtagaagccagcacaactagctaacttcccctagtgatagaggcaggagacaggcaaatgccatctatgtcattatatatagggagcttgcctaaacatgcccacagtggaaaattccatcccttaacacatgcacagtaagagaaataaatcaatgcagagtggccatttcctttattgccttctgaacatttacctttctagtgtcctttctttttgcatctcgcacattaatctctagcctcatccggctcttgaatccttgcctaacttgacttctttcacatctacatccacatccatgtcctctcacggtgctaatttttctttttatgagagctgttgctaacagattggcttttttttcttaagtctttaatttacttttttttttttttttttttttttctgagttctcctgctcctacggccagctggcggggctgggcaacggcacgggccttgcccccgcgcactgctgtctgtctctcctgttttcttctgattctctttttcacacttactcttagtgtttctttttcctttgctctttcccagttttgttccttggtcacagttaacatacaccttggtggccacttttatagactaggtggtattcatgcctgcagcttctgcttgatgttaccctgggcttgctttacaaataaaatattcagtgcatactgattttcagcagcctcagggttaagtggggtataaagccagaatgctttatagagtctcttataaaactgacttaggctcttgtcagctccttgaaggatttctgaaatcttttttatattacttgcttttttctaccaacttttagactctgcagaagtgcttctcagtacctctgcaaatgctgaagctgaattgcattctctgggtctttttttcccttttttctagagtttaacaggctcttttctttatacaattttttatgcacttggagggttaaacaggcatacccagagtcagtgtaaatgtttacaagtcttaccttcactgagttctaaggcccgaattaaagcaatgagctcagcttaacaacagtgtccagggttaccaccgcatattctgcacctctctctccttgggggttgatgaagctgttcccgtccacgtatagctcccagtctattgatgcccaaggctggtcctggaggttaggtctgctagagtaaatttgagtccaacacctctacacagttatgctcgacagggctttagctgccgggagcaaggtggtgggttcagggtgtttccagtttagtagatcaatggttgaaaagggctgatagatgaaagtctgttgtcccccccaaccccccggatgtgggcctggtcattataatagacaggtcctcgtgtctccctgagaggcatttgcatagcctctcagatctgagatggcccacttgactatcttgatttccttccttggtctctcgaagctccgatcctccccttcaaggtaaaacctggagcgtgttagctcctgaatctcatttctgagggggttgttggcctcagtaaagcggggtaggctgggatatatggagaaagaatttctgttatctctggcggctcccgcaaaactggcttctcttgctgtttctgggactccctttttaactctgtctgccggcgaagctgctcttttacttttggcttttttgcaataagctgttcaacagggctaaatttatgctggttttgcctatattatatttaaccatgagtcaatataaaggaatttgatctaggtacactggctgccctctgacccctgtcaccaccttaaatacatggccaatagttccctgtctatagttccttcggtgggccatctaacaccaaaagagggcaattctaattcacacagagttcttaacctctagggggttaacttaactctataatctcccacagaacctttcctaaggttctgtaacatgcattttaatagagtaagttttgatgctttgatgactttccttttatttttctttttgaaattttttaacatagttcctagcggagtgggcttactttgtgtctgacctatttttctcttgaaacaaaaaaaattcacactacaagaaggaaagggtaaaaggtcactcactcgtctaattcacactaaatcaaaatcaaaactaaaaccaaagtgttgttaaaggcacacctgttcgtcaagcaatttatgccaagtcaaaatcagaaccaaaaccaaagtaccaataaaggcatgcctgtttatcaagcaattcaagtcaagtcaaaatcaaggttaaaaccaaagtatcaagcaattcaagtcaagtcaaaaacaaaaaccaaagtgccagtacagacacgctgtgggtgatcaggccacgcttccactcaaacggagtgggcaagttccaaagaccagtcttaccaagtttcagatgtccggactccaagtgcctgttccttcccggtgttcagccactgcgttgatcctccaccggggcctgccacgcgctgctctggcaaggcgttccactggggcaaatgcctacccgggagcactctcaggatccgcattgctcaagccggagtcccccacagggatgctctacagagcatgcataagctgcctaaggggctacctcgaccgtcagttaatcacctcatttcccggtcagggaaccaagaaatgtagcaggacgagccacagacgaaactcctcagacaccgaattaaagaaggaagaggtttttattcggccgggagcatcagcagactcatgtcttaagagccgagctctccgaaaaagaaattcttggcctttttaaaggcttacaactttaaggggtccatgtgaaagggtcgtgataaatcgagcaagcgtgggaaatgtgactggaggctacatgcatcagctaacagaacaaaaagttttacagcgcttttttcatacagtgtctggaatttacagataacacaggtagtttaggtcaggggttgatgttactattattactttttttaactcctagggccaggtggtggtgccaaggttgtctggctatttatcttacttttgtttttttccaactttttgctttttatctcctcctgtcttgtgaactaggcaaggtggggggaggagggcagcaggagtagtagtggtctccttccttaagactaagggccagcatgcacactggaagaatggggtggagccaccaggaattcatgcctaatgctggagaggagccacgccttttcaacttgcatgtgatggccttgtattcaatttgtgaggtggatacctgcatataggaccctccttttgcttaataaattccgccctcctcacctttcttttcttttttttgagactgagtcctgctctgttgcccatgcaggagtgcaatggcatgctcttggctcactgcaaaactctgcctcccaggttcaagtgattctcctgcctcagcctcctgagtagctgggactacaggcatgtaccaccatgcctggctaattttttgtatttttagtagagatggggtttcactaatttgcccaggctggtcttaaactcctgacctcaagtatctgcccacctcagcctcccaaaatgctgagattacaagtgtgagccaccgcacctggcaccatcctcacctttcaatgtttctgcgtgcctaatttttctggatttagctgaaccaaggaacaaaaaattctgcatcattagttgtgctggcttccacttgtgcctgccagtatcccacatttacatttaatcttgggttcccaaagacaggaaccccatgagaccaggccacacagtgcttccacagcacacctttctgtaaagacattcccctgaggctagtgggcaacccaatgcaaatcagcccactctgtgatcagctcatcttccatcagagtcttaaccattggtagtgaatgttcccacaacctccaggtgttcaaacctgccttttaatctaagtgcgtaaagaacaaatagcccattgcaataataatcattcactacaaccctgtcagccactttccaggttttgccagtgactcgtcagccactgcacacgcaaaagtcaagttctctctcatagtaaaaagtaattcctggtaccccaaaagccaaagatcaggtactacttttaacagctcttggcctggcacagtggctcatgcctgtaatcccagcacattgagaggccgaggcgggcagatcacctaaggtcaggagttcaagaccagcctggccaacatgttgaaaccgtgtctctacaaaaatacaaaaattagccgggcatcatgatgggtgcctgtaatcccagctactcgggaggctgagacaggagaattgtttgaacccaggaggtggaggttgcagtgagccgagatcgcaccactgcactccagactgggtgactgagactccatctcaaaaaaaaacaacaacaaaaaacagctcttagaattcttcattagttacaattttgtttcctccgtggcaatatgaattgcaatttgtgaattaaaaacattagaatttgaaaaaattttggctggacatggtagcttatgcctgtaatccctagcactttgggacgccgagcgaggcaggcagatcacctgaggtctggagttcaagaccagcctgaccaacatggtgaaaccccttctctactaaaaaaatacaaaaattagcccagtgtggtggcgcatgcctgtggtcccagctactcaggaggctgaggcaggagaatcgcttgaacccgggaggcagaggttgcagtgagccaagatcatgccactgtactccagcctgggtgacagagtgagactcagtctcaaaaaataaataaataataataaataaaataaaataaaattcaaaattatctggacatctgaattttatctgacatgccctttcatcatattgctatatcctttgtctttcctcaattatattttatcaagaaggccttttccaaccattttatttagtatggctcccccacctccacttctctcataaattgttctggccctagcaccagcatacagcatagtttcctgtttatttgcttagtgtctgtctccttcagtatagaatgtaatcttgtggcggtcatggtggctaacacctgtaatcccagtactttgggaggctgaggcacgtggatcatttgaggtcaggaattcaataccagcctgaccaatgtggtgaaaccctatctccactaaaaatacaaaaaaattagtctggcatggtggcacaagcctgtagtcacagctactcaggagactgatgcaggagaattgctagaacccgggagacagaggttgcagtgagctgagatcgcaccactgcactccagcctgggcgacagagtgagactccatctcaaaaaaaataaagtaatcttgtgagggcaggattttgatgctatgttcaccactgactccaaaatggcacatagcgggctctcagtagatatctattgaacaaatggaagcataaataaacaagcaatgctacacttgctttctccagcaccatgggagcagatccagggagcagacagggaaagaaggctacagcccctgccccctggtggagctggaagaatcaataattttcatttatttattcatctaatgtgctttgcacgctccctatctgccaggatcagcttgttgccagggataccgggtaaacaatcccataaggttcctgtggtctggaggaagaaacagacattaacgcacaatagggagatggttacttaattatagtggtgaactgtcaatgaaggaaaagcaaaaaaaaaaaaaaggtctaacctggtataggggtcaggggagacttcctcaaggaagggatatggagttgaggcctgaggctgagcatgaattaactggaggcagagctctgtgggtggagatgtcattccaagcaggaagcccggttaatgcaggtaccttgatagaaggaaggccagggtgaggaaaaaggccgggttacaggcagttactaggaaccttgtggcctgacttgttgctgaggaggaagcaatagccagctcagagggccttgtagttcaggtgatgccccatttctgtgttagtctatttttgcgttgctataaagaaatacctgaggctgggtaatttatacagaaaagaggtttaatttggctcacagtttagtaggcgccaggaagcatggcgctggcatctgctcctggtgaaggctcagggagctttcaatcatggcggaaggtgaaggaggagcaggtgtgtcacatggtaagagtgggacagagagacagagacagggagagagagagtgcaagagagagcaaaggagggaggaggagccagccttccttaaacagccagctctcatgtgaactaacagagtaagtactcactcatcaccacggggaggacaccaagccattcatgagggatccgcccccaagacccagacacctcccaccaggccccacctccaacactgggaatcgcatttctttttctttgttttttaattttgtactttaagttctgggatacatgtgcagaacatgcaggtttgttacataggtatacatgtgccatggtggtctgctgcacctatcaacctgtcatctaggttttaagccccacatgcattaggtatttgccctaaagctctccctccccttactcctcccccatagaccctggtgcgtgacattcctgtccctgtgtccatgtgttctcattgttcaactcccacttatgagtgagaacatgtggtgtttggttttctgttcctgtgttagtttgctgaggataatggcttccagtttcatccatatccctgcaaaggacatgaactcattcttttttatggctgcatagtattccatgttgtatatttgccacattttctttattcagtctattattgatggacatttgagttggttccaagtctttgctattgtaaatactgctgcaataaacatacatgtgcatttgtctttttttttgagtcagagtctcgctctgtcgcccaggctggagtgcagtggcaagatctcagctcactgcaaactccgcctcccaggttcaagcaattctcctgcctcagcctcccgagtagctgggattacaagcgcacgccaccatactcggctaattttttgtatttttagtagagaaggggttttgccatgttgtccaggctggtctcaaactcccagcctcatgatctgcctgcctcagcctcccaaagtgctgggattacaggtgtgagccacaatgcctagccatgtgtctttatagtagaatgatttatattcctttgagtatatgccccatgggagggaatcacatttcaacatgagatttggaggggacacacatctgaaccacatcacacagcatattcccaactccagctccctcctctccacaagaatgtaggatacccatcactcccaggatcagcttccttgagcccaatcctctgtaactcactgagatgctatgaagtgcctggtaggtgccacactgtgccacagtcatgctccaagacagtgtggagtgagggccagagggccaggaggcaggattggtttggagacattgcctttcttcaaacctcagtttcctcttaaatcaaataaatgattgcagaagataagctcatattaattccatttctaggaaaaatctgtgttccaaacagtagcactgactaatggaaagtacaactggctgtttcccttgaacagtgggtttattgttgtttttccaattataaaagtaataagattatttgtaaactatagaacagtagaaaaagtttcttgaatgagatttggttttcaatcagggcaaataaagacttttctgggattaagagggctgtttcttctccattactttatacggacccgtactggggacttgtcagctgttcaagtacaacgcacccagttttggttctgtaccaggattaggcctacaatatttcagaattcatatacaaaccccaataaagtgttaaaggagatgactgccctataacctatgttttgctgaatgtttactatgaggttttttttttaccatcctcatgagtatggtattgtaactgaaactctccaggaaaattcctctgcttaaaactaaaaatcaagtgtatctcaggaaactctactgtcccatctgaaatgcctctgttgtgtgttgtctgcaaaggtggagtctccctgttttgttcaggctggtctcgaactcctgggttcaaggaaatctctctcctcaccctcctgtgtagcggggactgtaggcacctggctgtggtggatactattaagccaaattccagtcagcatcctcttttcaatgaagttgaaaggagagatgatgaaactggcagtgttactgaatgggaaataaaggtgggaatacacattgtgagtgaagacacggaagtaacttctgcaatacaaccttgtaagagtcttaatgctacactcctttgtttatcaaatgatgtacctttatcgtaagggaagaacctgggccattccctctggtgttgagaggcaatttggaaactctgccatttcttaggactgagtatttaatatactattttgtggaaatctgagaggcagaaatgggatttaatgatctcaactgtcatccatctaaaaaacctaatttgcaattttaaataaaatggcatgttgccttctactattctctttttgttttttgagacggagtcttgctctgtcacccaggctggagtgcagtggcacaatctcagctcactgcaaccactgcctcctgggttcaagcgattctcctgcctcaacctcccgggtagctgggattacaggcacacgccactattctaggctaatttttttattttttgagacggagtctcgctctttgcccaggctggagtgcagtggtacaatctcagctcactgcaacctctgcctcctgggtttaagcgattctcctgcctcagcctcctgagtagtgggattacaggtgcgcaccaccacgcctggctaatttttgtatttttagcagagacggggtttcaccatgttggccaggctggtctcaaactcctgacctcaggtgatctgcctgcctcagcctcagcctcccaaagtgctggcgtgagccacggctcccagcctactattccccttttaaaacaggaaccaaccctgcatttaattttatgaagtctgatttatttatttatttatttatttatttatttatttagagatggaatctcattctgtcacccaggctggagtgcggtggcgcaatctcggctcactgcaacctttgcctcctgggttcaagcgattctcctgcctcagcctcccgagtagctgggactaaaggtacctgccaccacgactggtgaatttttgtatttttagtagagatggggtttcacgatgctggtcaggctgttccactatgttggccaggctggtttcaaactcctgacctcaggtgatccgcctgcctcggcctcccaaagtgctgggattacagacgtgagtcactctgcccagccgaa

SEQ ID NO: 488 - DNA, 1103 bp, Homo Sapiens
cgtgagggaagtggggagaagctgtcaccccaacttgagttcaagaagactccttggaagaaaagaccaccaaattgagaatgaaaagtaagctgtagctattcttgggatggggcagtggccccatgctctggtccctggcctcagcagctgtcccagctcataaccccaagtgccggctttcccatcccgtctcaggatctgcactcgacgggcaccagggctttcttcagcgaatatctaaactctctcaagtttctccagagactttcatacatctacaaagatgacctcattctgtaacagcatggatttaacccgctcttcaatgtcactcccccacagaatgcactgttcatcgtcaccctatccactatcgtcagtcttactaaaagtcaaacatcaacattagtagtaactctggcattgtagcgatatctccaagagaaaattgttttgaacttttctgggaaaagttcacatatgttttcttaaaacgctagtttttacaatctcgctaccatgtggctttcctgaaggattaaatttctaatgtccttcaactagagagaggtaaaaatttttctagaacatgaattgcccactcccctcattccttctcagaaactaactgaattccagtgggtgtgcctggcaaacccaaaagcagtttctgttcaggatgctggtcttacctgtgaaggcgttcatgaacgtggagagggaccggttcaacattttgaagaaagggtctctgcacggatatttctgagacccacaaaggacggtatgctcaagaatgtgaggaacaccagtactgtccatgggagtagtacggaactgcacgctagggaaggagaatgaccagaacgcaaaaggttcagcttagtgctgcggacacagttcccagatgcatcatcacctcaggctactagaaatcatcattctgacaccacaatcctccagcacagggttttccaactataatgtaaatcattgactcagactgtaaaattgtattttgatgagattataagtcagtgtaaacttttccttatttttcaagatgctctgtcaataaaaatactagtgagatgatattt

SEQ ID NO: 489 - DNA, 16448 bp, Homo Sapiens
gtcccgggggcacaggcgttcttaaggctgcagagccctgggtcccccacccggccccggttcactttgagcggtcccaaggcctgagggcctactgtccagtccccaggttatcgtcctgagcaaagacagaccccgagccctgcggtcttggggctcaaacagtccctggatggccaaacaagcaaatattcgccatggcagtgggtgctggaagggtggctcacggagctgacgccctccgcagagaaccgtggtctagtcctgcggtcacgaggcctatctgggacagtggtgtttgagctgagactttaacgaatagagacaggtgaggttcctgcagcccagggcttcaggatttcatcaaatggtctgctgcactgtgctggaattttgaactccccagagtagtaaacaacatcttctcaagggtatacaagtcatcagatagagaaaacacccattatagagctgtggagcccttacgatatagtgctatgctgcaacaaattagacagaagagtatttgttgaataataaaagagtctcactctattgcccaggctggagtgcagtggcatgatctcggtacactgcaagctctgtctcctgagttcaagcgattctcatgcctcagcctcccgagtagctgggattacagttttccaataataacatagaaaaaaggaagaatttgagagtttctcagattaggcaattccttgaagaatctgagaacacagaagctcccctccctactttccatgattgaaatcagtgattcattggtttctttgtgtgggcttttgaaagatcattagaaaccaacctgaagatcatgagattcttgtggacacaggagcaatgagtggcaatacagtgctttctaatgcaacctactttaaaaggtaaacagataaaagaaaataccgaagactgaaaatgcagaaaattcaaccatgcagcccattccaaattaaatatgtcttcctctctaattcctctcttctagcagagaaggggagatgagctatgactccatgctcatgcttaacaaaattgtgttagattggtgcaaaagtaattgcagtttttgccatttaaaagtaattgcaatgttatctcctagaatttttatagtttcaggtcttaagtttaagtccttaatccatcttgagctgattttttgtatagggctggacgttcgcttaggcaaggatttcatgaccaacaacctgaaaggaaatgcaataaaaacaaagataaatagctggaacctagttaaactaaagagcttttgcatggcaaaaagaagagtcagcagagcaaacagataacaaacagagtgggagaaaaccttcataatctgtacatctgacaaagtgctaatatccagaatctacaatgaactcaaacaaatcagtaagaaaaaaacaattccatcagaaagtggctaaggatatgaataggcaattctcaaaagaagatatacaaatggccaacaaacataggaaaaaacgctcaacatcacaaatgatcagggaaatgcaaatcaaaaccacaatgcgataccacctcactcctgcaagaatggccataattaaaaaaaaaaatcaaaaaacagtagatgttagcatggatgcggtgaacagggaacacttctacactgctggtgggaatgtaaactagtaaagccactatggaaaacagtgtggagattccttgaagaattaaaagtagaactaccatttgatccagcaatcccactactgggtatctacccagaggaaaagaagtcactattcaaaaaagatacttgcacacacatgtttatagtggcacaattcaaaatagcaaaatcgtggaaccaacccaaatgcccatcaatcaacaagtggataaagaaactgtggtatgtatatataatggaatactatgcagccataaaaaggaatgaattaacagcatttgcagtgacctgaatgagattggaaacttattctaagtaaagtaactcaggaatggaaaaccaaacatcatatcttctcacagatatatgggaactaagttatgaggactcaaaggcataagaatgatacaatggactttggggacttggggggaagggtgagaagtgggtgaggtataaaacactacaaatatgctgcggtgtatactgcgcaggtgatgggtgcacgaaaatctcacaaatcatccctaaagaacttactcatgtaaccaaataccatctatacctcaataacttatggggaaaaaagtaattgcaaaaactgcaattacctttgcatgaaccaaaggcctactttggagagtcagaggaattcttaaccataattcaaccaagacatacggtatgtgccttctctttggtggaacagtgaatatacaggctactagcctgtactgagtgtttcagccaaaacacattcttttaaaagtcacagttttaagtgacaatatcccaatgaaaatacaaattaaaaaatgcattggcatatctatattccctcccaaaataacacacatttggaatatataaagaactcttaaaagtcaatgagaaaaaaagcaatagctcagtagaaaagtgggaagaagacttggacacttcagaaaagagaatatattaaaatagtccataaacagaaataaaaggtgctcaactttatgagtcatctgggatatgtagattaaaaccacagtgcaatattataccacccctaccagaataactaaaaagagtaagttggaaaatactcagtgctgatgagaaagtggggtaattgaaactcttatacatcattctaggaacatccacttaggaaaacaacttggcagtgtctaataaagtccagtatatgcattccctataacccagaatttttactctcaggtgtatacccaacagaaatgcaggtgtgtgttcaccagaaatcatgttcaagaatgttcatggtatcactagtcatgaggcacaaaaactggaaatgttcatcaacaatgagtaggataaataagttgtgttaatatttatacaattgaaaattatacagcagaaagaataaataatctaaacctacacacaacagcatgaagaaatctcatgagtggaatgttagatcataacctaaataaacttacctggagcaggtgccactgaagccataaaatggtaggatgaattgctggaggctgactatggactagcttgacagtaaaaaatttggggaggtccattctgaaggaggcccctcacactttcttggattttatcttcaggaagcccaccagattttcatggtgaagatcttagaaaacatctctcatatcttggtcagttgggggaaagtagcattttgaaataatcctagagcattctccatagccaaggtttactcctcaacggaaacaactttaccagagccttagttgaccatggagaagggcagttagccccctacatccctctctagctttcttgtgttacttagtggaaggaaaaaaaggataagaaacacttctgaagtccaattcagggacttgagcccactaaaagactgaaatatacttacctcctccacaccttaccaccacatcaacacagctccagaataatcacaatgggttacaatggaaagagctgcaaaacatagactctatttaagaaggaattcttagggaaatccaatgtggagaaaacaaagacactgaggaaactaaagtctctggcatctatagctatggaaaacatgaagcacaacccatctgctaggcagattgacataaaacctcatactaaagacctattttcctcagttctcattacctgatacatcatgtttgacttttaacaaaaaatcataaggaaggctatacaaaaagaaaaggaaaaacacagtcagaagagacaaagtaagcatctgaactagactttgacatgaaacaaagtttggaataatcaaatagataattaaaaataactatgattagttatgttaaggactgtaatagaaaaagtataagcatgcaagagcagatgaataatataagcagaataatgaaaactctaagaaagaatcagaagaaaatgacagaaatgaaaaacactgcaacagaaatgaagaatgcctttgataagctcattactaaactgaacataaacaaggaaataatcaataatttaaagatatatcaaaggagacattgcaaattgaaatactaagagaaaaaggactacaacctccattccaatatccaagaacaattacaaaaatataacatatgcataattgaagtactagaagaagaagaaaggagcagaggaagtgcagaggaagtacagtagttccctcttatccatggtggatacattcaaagacccccagtggatgcctgaaaatgcagatagtaccaaaccctacctatacattctatgttttttcctatatgtacatatctatgataaggtttaacttataaattaggcataaaaagagtttaacagtataataaaatagaaaaattataacaatactcagaaccaagcacaactgaaaacttgtgaaatgtttatttctgggcatggtggctcatgcctgtaatcccaacactttgcaaagccaaggcagatggattgcttgagctcaggagtttaagaccagtgtgggaagcatggtgaaacctcatctctacaaaaaatacaaaaaattatctaggtgtagtggcacatgcccatagttccagctactcggggtggtgggagggtgtgtggtggggggcagtgtggggtggaagggagctgaaatgggataatcgcttgagaccaggaagtcaaggctgtactgagccttgactgggccactgcactccagcctgggtgacagaatgagaccctgtctcaaaaaaaaaaaaaaaggaaaattattaaggataaagatgggcattaaataatgagaaaggggcaattatccaaaaaacataataattcttaagttatgcaggtaacacagcatctaaatacatgagacaaaaatttataaaactgcaagaagaaataatcaaatttaatattatttaataatatttttggagatctcaacatccctatattaataacagctaatttcaacaagcagaaatcaggaaaatgttcaactgaatagcactaacaatgaacaggatctaactgttcaagtagcagcagaataattaatcaagtaacagcagaatacatattcctctcaagtttatatgggactttatgcaaaatagaccacattctggggctgaaaaagatgccctcacaaatttaaaagaatagaaggtttactgcatgtgttcttagactataatgaaatttaactggaaatcagtgccagaaaaaaactcagaagtccccaaatagtttgagattaaataacatacttttatataacacataggtcaaagaagaagtctcaaaggaaatttaaaaatatttcgaactaaacaaaatgaaatgtacatcaaaatttatgggatgctcaggaaaaatagctagtggatgcttggcttcatacctaggtgatgggttgatctgtgcagcaaagcaccatggcacacgtttacctatgtaacaaacctgcacatcctgcacatgtaccctggaactgaaaataaaaattgattaaaaaagaaagagaaaggataattcctttcacccacagtttcctgtctcctaatagtccttctgttgtgtctttaaataaatgtgtctcaaatcttaagatattcataaaatctgggattgcagatgtattttgcattacaagtcctatttttattttttaatggaatgctgtaaaagcagttcttagaggcaaatttatagcagcaaatgcatatattagaaaagaagaaaaatctaaaatcactaatagaaatgtgccttaggaaagtaaagagaggagagcaatttaagcctcaagtaagcagaagaaaagacataaaactttgagcagaaatcaataaaattgaaaacatgaggtcaacagagaaagtcaataaacccaaaaggcaatgcctttaaaagatcaataaaatcgataaatccatagccaggctaaccaagtgaaaaagggagaagacacaaattataaatattgattccatagacattaaaaagataataaaagaacattacaaacaaatgtatactgacacttttggtaatttagatgaaatgaatcaattccttgaaagacataaaccatcaaaacttatggaaaagaaatacattacctaaatagatctatatttatttaaaaaatagataaatcattaataatctttcgaaaaagaaagcgtctcgcccagattctttcactaatgaattccaccaagcatttaaggaagaaataatgtcagttctctataatcacttttagaaaatagaagtaagaggtatacctcctaactcattcaaggaggcaggcattatcttaatatcaaaaccggggaaatacactacaagaaatgaaacctacagctcaatatattttatgaatatagatggaaaaattttcaataaaatattagctaattgaatccaaaaatatataaaaatagtaatacatcacagtaagtgcaatttattttaggcataccagactgatctgacatttattaactggctaaagaactattttatgattctgtcaattgatgcagagaaagcatttgacaaactccaacatctatttatgagaaaaagtcttagaaaactaggaataaaaaacatcctcaacttaatctggaacatctaaaaaatgggacttcacgctattttatggtgagaaatgatatgcttttcttctatattgggaacaagacaaggttctttttttgccactcttattcaccatcctactggatgtcctaattagtgcaacaaggcaagaaaaaatatatatacagattagaaagaaaaaaagaaaactacctctgttcaagatgacataattacttatttagtaaaactgaaagaattgactcctggaattaatatgtgattatagcaaggttgcaggatgcgaggttaatagaagtcaattgtgtttccatgtaccaccagtgaacaagtgaaaattgaagttgaaaacaaaatacaatttcattccttcccccagcaaaaatgaaatataaacaacaaaatatgtatacaacgtatattatgtatatggaaaattttaagtctgatgaaagaaataaaggaagatctaaataaatggagatgtaccactttcatggataagtagattcaataatgttgagatataaattcttcacgaattggtgtatacatttaatacaattctaataaattctcagcaagttattttgtggttattgacaaatttattctattttttagcttcatctcaaaagatgattttaaaatttatatggaaatgcaagagacccagaatagtctacataatactgaccaaaggactaagttggagaactgacactactcatagtactacaaagctacagtaattatgacagtgaggtatttgtacaagaatagacaaatggattaatagaaaagaggagagagcctcttttagaccctcaactgatccttgacagagcaaaataaattcaattgagaaaggacagtcttttcaacaaataatcatcaaaaattgtgcatatacatgcaaaaatgaatctagacatataccttatgcttttcacaaaaattaatttaaaatggaccttagttctaaatgtaaaacaaaaactagaaaacttctatgagatagcataggagaaaatctaggtgaccttgggtttgattaaatcatgatccatgaaagaaaaaaattaaaaaaaaattgaacttaattaaatttaaaaattgttatgtgaaatatattgttaagtaaatgagaagacaagccacagaatgagagaaaatattttaaaaacatatccagtaaaggagttaaatccaaatgacaccaaggtatttaaataattctatgtaatgatcaaaagatctgaacattcaactcaccaaataagatgtacagatggcatataagcatatgaaaagatgctcaacatcttatgttattagagaatagtaaattaaaacaacaatgagaaaccactacacctattagaatggctgaaatccaaattactgacaacaaccaatgctgttgagaatgcaatgcaagagaaactctagttcatccaattttcaaatgtgactgtaaaaggctgcagccactttagaagacattttgtctgtttcttacaaagctaagcatagccttgcattataatctgcagttgtgttcctctgtatatacccaattacactgaaacattatgtctacaaaaaaatcctgaaaacaaatgtttatagcaggtttattgttacttggtagttaccaaaaatggaaaacaatcaagatgtctttcaatagatgagtgaataaactataagatatccataaaatggaatattattcagcagtaaaaagaaatgagctttcaaatcatgaaaagacatggaggaaactcaaatgcatactgttacatgaaagcagccagtgtgaaaaggctacatgctatataatttcaattagatgacattttggaaagaagcaaaactgtaaagaaaaagatcagtttttgcctggcgttcagggaaagggaagaataagttaagcacaggagacttggggagctgtgaaatgattctgtgcaatattggtggaattttggcaacattatgcatttgccaaaggcaatagaagtttttgacacaaagagttaccataatgcaggcaaattttagaaaattatttagaaggtcagaggatcccagaagcaatgtggactttacagaagaaattcactgcattacaaagcatcagataaccttagtaaggtggagagagaaaatggtcttaacataaatatctttaaaaatgaatggaatctgtcagactataggcaagatgagctgcacaaaagcactgtactctagctgataaaattatttctcattggcttctggttaacagttctgatactgctatacatatatatgggaattgaataattaagcctataaatggcaaacattgggagttatatttctcacggtgtggaaatttacagatcaactaggggaacagtcttgaataatcaatgtgatgatcattacagttggagacatcaaggagaactaatgtttaacttaatatagatatgggtggttatatatagaaatattcaaagatgtttatgtaaatacacaaaagcacaaccatgacacatctaaaataaataacaccctggtaaccatgggcacacttagtactcaaatgctggagtgcaatggcgtgatcttggctcactgcaacctctgccccctgggtttaagcaattctccagcctcagccaccagagtagcagtgattacaggcactcaccaccacacctggctaatttttgtatttttagtagagacagggtttcaccatgttggccaggcttatctcgaactcctgaccttgtgatctgccctccttggcctcccaaggtgctgggattacaggcatgagctaccaggcctggcctgttgattttttcttttttttttttttattatactttaagttctgggatacatgtgcagaatgtgcaggtttggaacatagatatacacgtgccatagtggtttgctgcacccatcaatcggtcatctatattagatatttctcctaatgttatccctcccctagttccctacccaccaaagggcccagtgtgtgatgttcccctccctgtgtccatgtgttctcttttttcaactcccacttatgagtgagaacatgcagtgtttggttttctgttcctgtgttagcttgctgagaatgatggtttccagcttcatccatgtccctgcaaaggacatgagctcatccttttttatggctgcatagtattccatggtgtatatgtgccacattttctttatccagtctatcactgatgagcatttgggttgattccaagtctttgttgttgtgaacagtgttgcagtaaatgggtgtgtgtctttgtagaatgatttataatcctttgggtatatacccagtgatgggattgctggatcaaatggtatttctggttctagatccttgaggaattgccacactgtcttccacaatgggtgatctaatttacactcccaccaacagtgtaaaagccttcctatttgtccacatcctctccagcatctgttgtttcctgactttttaatgatcgccattttaactggcgtgagatggtatctcactgtggttttgatttgcatttctctaatgaccagtgatgatgagctttttttcatatgtttgttggccacataaatgtcttcttttgagaagtgtctgtttatatcctttgcccactttttgatggggttgtttgtttttttttctcgtaaatttgtttaggttctttgtagattctggatattagcccttcggcagatgagtagattgcaaaaaggttctcccattctgtaggttgtctgttcactctgatgatagtttcttttgctgtttagaaactctttagtttaattagatcccatttgtcaattttgacatttgttgccattgcttttggtgttttagtcatgaagtctttgcccatgcctatgtcctgaatggtatagcctaggttttcttctggggttttcatagttagaggttttatgtttaagtctttaatccatcttgagttcgtttttgtacaaggtctgaggaagggttcagtatcagttttctgcatatagctagccagttttcccaacaccatttattaaatagggaatacatcccccattgcttgtatttgtcgggttcgtcaaagatcagatggttgtagatgtgtggcattatttctgaggcctctgttctgtttcattggtctatatatctgttttggtaccagtaccatgctgttttggttactgtagcattgtagtagagtttgaagtcaggtagcgtaatacctccagctttgttctttttgcttagaattgtcttgactatgcgggctcttttttggttccatatgaaatttaaagtagttttttctagttctgtgaagaaagtcaatggttgcttgatggggatagcactgaatctataacttactttgggcagtatggccattttgatgatattgattcttcctatccgtgggcatgatatgtttttccatttgtttgtgtcgtctcttatttccttgagcagtggtttgtagttctccttgaagaggtccttcacataccatgtaagttttattcctgggtactttattctctttgtagcaattgtgaatggaagttcactcatgatttggctctctgtttgcctattattggtgtatacaaatgcttgtgatttttgcacactgcttttgtatcctgagattttgctgaagttgcttatcaacttgagattttgggccgaaatggtggggtattctaaatacacaatcatatcatctgcaagcagagacaatttgacttcctgtcttcctatttgaaaactctttatttcgttctcctgcctgatgaccctggctagaacttccaatatatggtgaataggagtggtgagagagggcatccttttcttgtgccagttttcaaagggaatgcttccagttcttgcccatttagtatgatatcggctgtgagtttcttgtaaataactattattattttgagatatgttccatcaatacctagtttactgacagtttttagcatgaagctgtgttgaattttatcaaaggcgttttctgcgtctattgagataatcatgtgatttttgtcatcagttttgtttatgtgatggattatgtttattgatttgcatatgttgaaccagccttgcatcccagggattaagctgacttgattgtggaggataaactttttgatgtgctgctggattcggtttgccagtattttattgaggatttttgcatcgatgttcatcagggatattggcctgaaattttccttttttgttgtgtctcttccaggttttggtatcagaatgatgctggcctcataaaatgagttagggaggagtccctctttttctattgtttggaatcatttcaggaggaatggtaccagctcctctttttacctctggtagaatttggctgtgaatccatctggtcctgggctttttttggctggtaggctattaattactgcctcaatttcagaacttgttattggtctattcaagaatttgacttcttcctagtttagtcttgggagggtgtatgtgttgaggaatttatccatttctgctagattttctagtttattttcatagaggtgtttatagtattctctgatggtagtttgtatttctgtgggatcagtagtcatcttccctttatcatttcttattgtgtctatttgattcttctctcttttcttctttattagtctggctaacagtctatctattttgttaatcttttcaaaaaaccagctcatggatgcatttacgttttcgaagggtttttcatgtccctgtcttcttcaattctgctctgatcttagttatttcttatcttctgctagcttttgaatttgtttgctcttgcttctctagttcttttaattgtgatgttaaggtgtcaattttagatctttcccactttctactgtgggcatttaatgctataaatttccctctaaaaactgctttagctatgtcccagagattctggtacattgtatctttgttctcattggtttcaaagaactcatttatttctgccttaattttgttttttacccagtagtcattcagaagaaggttgttcagtttccatgcagttgtgctgttttgagggagtttcttaatcatgagttctaatttgattgcactgtggtttgagagatggtttgttgtgatttctgctcttttggatttttctgaggagtgttttatttctaattgtgtggtcaattttataataagcacaatgtggtactgagaagaatgtatattctgctgattaggggtggagagttctatagatgtctattaggtctgcttggtccagagctgagttcaagtcctgaatatccttgttaattttctgtctcattgatctgtctaatattgacagtggggtgttaaagtctcccactattattgtgtgggagtccaagtctctctgtagatctctaagaacttgctttatgaatctggatgcccttgtattgggtgcatatatatttagaatagttagaccttcttgttgcattgatccctttaccattatgtaatgcccttctttgtctcttttgatctttgttggcttaaagtctgttttatctgagactaggattgcaacccctgggttttgtttgtttgtttgttttctttatatttgcttggtaaatcttccctcatccctttattttgagcctatgttgtgtctttggacgtgagatgagtctcctgaatacagcacactgatgaatcttgactctttatcccatttgccagtctgtgtcttttaactggggcatttagcccatttacatttaaggttaatattgttatgtgtgaatttgatcctgtcattatgatcctagctggttgttttgcctgttagttggtgcagtatcttcataatgtcgatggtctttacaatttgatatgtttttgcagtggctggtaccagtttttcctttccatatttagtgcgatgatcttacaatttggtatgtttttgcactggctgatactggtttttcctttccatatcttgtgcttctttcaatagctcttgtaaggcaggcctgctggtgacaaaatgtctcagcatttgcttctctgtgaaggattttatttttccttcgcttacgaagcttagttttgctggatatgaaattctgggttgaaaattcttttctttaagaatgttgaatattggccctcctctgttctggcttgtagggtttctgcagagagatccgctgttagtctgatgggcttccctttgtgggtaacctgacctttctccctggcttccgttaacattttttccttcatttcaaccttggtgaatctgatgattatgtgtcttggagttgctcttcttgaggagtgtctttgtagtgttctctgtatttcctgaatttgaatgttggcctgtcttgctacattggggaagttttccaggataatatcctgaaaagtgttttccaacttggttccattctccccgtcactttcaggtacaccaatccaatgtaggtttggtcttttcacatagtcccatatttcttggaggctttgctcagagaggaggaactcagagaggcagtctggctatagcagatttgctgagctgttgtgggctctgcccagttcaaaatttttggcagctcctttactcaagcctcagtaatgttggatgccccacccccaaccacgcttgagcatcccagggcaacttcagactgttgtgcctgcagtgagaatttcaagcccgtgaatcttagcttgctaggctccatgggggtgggatctgctgagctagaccacttggctccctggcttcatccccctttccaggcgagtgaaaagttctgtctcactggcattcctggcaccactggggtatgaaaaaaaaactcctgcagctagcttcctgtctgaccaaaccgttgcccagttttgtgcttgaaacccagggccctggtggcataggcacctgagagaatctcctggtctgtgagttgcaaagatcgtgggaaaagcatagtatctgggccagagtgcacagttcctcaaggcacattctgtcgtggcttcccttggctaggggagggtgttccctgaccccttgcacttcccaggtgaagtgacaccccaccctgctttggctcaccctccatgggctgcacccactgtctaaccagtcccgatgagatgagccagatacctcagttggaaatgcagaaatcacccgtcttctgcattgatctcaccgggagctgtagaccacagctattcctatttggcctttttttcttttgagacagggtttcactcttgtcacccaggctggagtgcaatggtgcaatcttggctcactgcaacctctgcctcccaggttcaagtgattctcctgcctaagcctcccaagtagctggcattataggcactcaccaccatacccagctaatttttgtatcttttgtagagatggggtttcaccatgttggctaggctggttttgaactcctaacctcaggtgacccacctgcctcggcctcccaaagtgttgggattacaggcatgagccactgcacctggccaaatgttgatttttttaataccattttataataaaaggaacaaggactccctggagaaacagctgatactaaggcaggagtagaaaatatacaagataatcctggaaaatcttgtagggccagaaagtaaacaagtgcattaaaaataagtcacattggtaataatatgtcaaaggaacaagggagtctactgaaagagctcccaaaggccaaagctggaagaagtagagcaagaaagtaaactagctttgaattataacccaaaatataaagtaaatatccataagtctctactgatataaagcacaattgaataataactgggagagggagggagaataaataagttctacgtaaaagaatttcttataaattttgtagatatgactttctaaacaaattctcattcttaagaattcatagtgacttccttccaaaaattacaatatggaaaactgataaaaaatgagtaactctacagtggaggaatctgacacatactacatcagccaggttattgaggtcaacatcaacagccataaatcatgtgaacagtatgtacacttggtatgatgtaacgaatagcacttcacttctgtggtctttctccccaggctcattatctcagtataatcatgaaaaaaaaaaaaaaaaaaaaacccagcaaagtccaatagaggaatattctacaaaatacctcactatactctttaaaagagttaaggtcattaaaatggagtcggagacaatgtcctcaacatgaggagtctaaagagacaggccaactaaatttagtatggtatactggatgaattcctggaacagaaaaaaggttattaggtaacaactcaggaaatctgaataaagaaagaaatcagttaataacaatgtatcagtattgctttattaattatgacaaaagtaccatactagtgaaagatgaataatcggagtaactgtgtgcaaagactgggtagagggg

SEQ ID NO: 490 - DNA, 16730 bp, Homo Sapiens
gtcccgggggcacaggcgttcttaaggctgcagagccctgggtcccccacccggccccggttcactttgagcggtcccaaggcctgagggcctactgtccagtccccaggttatcgtcctgagcaaagacagaccccgagccctgcggtcttggggctcaaacagtccctggatggccaaacaagcaaatattcgccatggcagtgggtgctggaagggtggctcacggagctgacgccctccgcagagaaccgtggtctagtcctgcggtcacgaggcctatctgggacagtggtgtttgagctgagactttaacgaatagagacaggtgaggttcctgcagcccagggcttcaggcactgtgctaagcagttttcctggaagtgtctacctcatttcgttctctgaatagctctaagagcgtgaacaaccccagaaggaaaaagagtgctgttgttaaaggtatctggcatcatggacccaaccatcaccaggagtttctcacttcatctctgtgtgataaattttgacatatgtatacatccatgaagccggcaccacaatcaagataatgaacatctcgcttaccccagaagtttcctgtgccctgtcactcctccgtattcctccatcctcaggatttcatcaaatggtctgctgcactgtgctggaattttgaactccccagagtagtaaacaacatcttctcaagggtatacaagtcatcagatagagaaaacacccattatagagctgtggagcccttacgatatagtgctatgctgcaacaaattagacagaagagtatttgttgaataataaaagagtctcactctattgcccaggctggagtgcagtggcatgatctcggtacactgcaagctctgtctcctgagttcaagcgattctcatgcctcagcctcccgagtagctgggattacagttttccaataataacatagaaaaaaggaagaatttgagagtttctcagattaggcaattccttgaagaatctgagaacacagaagctcccctccctactttccatgattgaaatcagtgattcattggtttctttgtgtgggcttttgaaagatcattagaaaccaacctgaagatcatgagattcttgtggacacaggagcaatgagtggcaatacagtgctttctaatgcaacctactttaaaaggtaaacagataaaagaaaataccgaagactgaaaatgcagaaaattcaaccatgcagcccattccaaattaaatatgtcttcctctctaattcctctcttctagcagagaaggggagatgagctatgactccatgctcatgcttaacaaaattgtgttagattggtgcaaaagtaattgcagtttttgccatttaaaagtaattgcaatgttatctcctagaatttttatagtttcaggtcttaagtttaagtccttaatccatcttgagctgattttttgtatagggctggacgttcgcttaggcaaggatttcatgaccaacaacctgaaaggaaatgcaataaaaacaaagataaatagctggaacctagttaaactaaagagcttttgcatggcaaaaagaagagtcagcagagcaaacagataacaaacagagtgggagaaaaccttcataatctgtacatctgacaaagtgctaatatccagaatctacaatgaactcaaacaaatcagtaagaaaaaaacaattccatcagaaagtggctaaggatatgaataggcaattctcaaaagaagatatacaaatggccaacaaacataggaaaaaacgctcaacatcacaaatgatcagggaaatgcaaatcaaaaccacaatgcgataccacctcactcctgcaagaatggccataattaaaaaaaaaaatcaaaaaacagtagatgttagcatggatgcggtgaacagggaacacttctacactgctggtgggaatgtaaactagtaaagccactatggaaaacagtgtggagattccttgaagaattaaaagtagaactaccatttgatccagcaatcccactactgggtatctacccagaggaaaagaagtcactattcaaaaaagatacttgcacacacatgtttatagtggcacaattcaaaatagcaaaatcgtggaaccaacccaaatgcccatcaatcaacaagtggataaagaaactgtggtatgtatatataatggaatactatgcagccataaaaaggaatgaattaacagcatttgcagtgacctgaatgagattggaaacttattctaagtaaagtaactcaggaatggaaaaccaaacatcatatcttctcacagatatatgggaactaagttatgaggactcaaaggcataagaatgatacaatggactttggggacttggggggaagggtgagaagtgggtgaggtataaaacactacaaatatgctgcggtgtatactgcgcaggtgatgggtgcacgaaaatctcacaaatcatccctaaagaacttactcatgtaaccaaataccatctatacctcaataacttatggggaaaaaagtaattgcaaaaactgcaattacctttgcatgaaccaaaggcctactttggagagtcagaggaattcttaaccataattcaaccaagacatacggtatgtgccttctctttggtggaacagtgaatatacaggctactagcctgtactgagtgtttcagccaaaacacattcttttaaaagtcacagttttaagtgacaatatcccaatgaaaatacaaattaaaaaatgcattggcatatctatattccctcccaaaataacacacatttggaatatataaagaactcttaaaagtcaatgagaaaaaaagcaatagctcagtagaaaagtgggaagaagacttggacacttcagaaaagagaatatattaaaatagtccataaacagaaataaaaggtgctcaactttatgagtcatctgggatatgtagattaaaaccacagtgcaatattataccacccctaccagaataactaaaaagagtaagttggaaaatactcagtgctgatgagaaagtggggtaattgaaactcttatacatcattctaggaacatccacttaggaaaacaacttggcagtgtctaataaagtccagtatatgcattccctataacccagaatttttactctcaggtgtatacccaacagaaatgcaggtgtgtgttcaccagaaatcatgttcaagaatgttcatggtatcactagtcatgaggcacaaaaactggaaatgttcatcaacaatgagtaggataaataagttgtgttaatatttatacaattgaaaattatacagcagaaagaataaataatctaaacctacacacaacagcatgaagaaatctcatgagtggaatgttagatcataacctaaataaacttacctggagcaggtgccactgaagccataaaatggtaggatgaattgctggaggctgactatggactagcttgacagtaaaaaatttggggaggtccattctgaaggaggcccctcacactttcttggattttatcttcaggaagcccaccagattttcatggtgaagatcttagaaaacatctctcatatcttggtcagttgggggaaagtagcattttgaaataatcctagagcattctccatagccaaggtttactcctcaacggaaacaactttaccagagccttagttgaccatggagaagggcagttagccccctacatccctctctagctttcttgtgttacttagtggaaggaaaaaaaggataagaaacacttctgaagtccaattcagggacttgagcccactaaaagactgaaatatacttacctcctccacaccttaccaccacatcaacacagctccagaataatcacaatgggttacaatggaaagagctgcaaaacatagactctatttaagaaggaattcttagggaaatccaatgtggagaaaacaaagacactgaggaaactaaagtctctggcatctatagctatggaaaacatgaagcacaacccatctgctaggcagattgacataaaacctcatactaaagacctattttcctcagttctcattacctgatacatcatgtttgacttttaacaaaaaatcataaggaaggctatacaaaaagaaaaggaaaaacacagtcagaagagacaaagtaagcatctgaactagactttgacatgaaacaaagtttggaataatcaaatagataattaaaaataactatgattagttatgttaaggactgtaatagaaaaagtataagcatgcaagagcagatgaataatataagcagaataatgaaaactctaagaaagaatcagaagaaaatgacagaaatgaaaaacactgcaacagaaatgaagaatgcctttgataagctcattactaaactgaacataaacaaggaaataatcaataatttaaagatatatcaaaggagacattgcaaattgaaatactaagagaaaaaggactacaacctccattccaatatccaagaacaattacaaaaatataacatatgcataattgaagtactagaagaagaagaaaggagcagaggaagtgcagaggaagtacagtagttccctcttatccatggtggatacattcaaagacccccagtggatgcctgaaaatgcagatagtaccaaaccctacctatacattctatgttttttcctatatgtacatatctatgataaggtttaacttataaattaggcataaaaagagtttaacagtataataaaatagaaaaattataacaatactcagaaccaagcacaactgaaaacttgtgaaatgtttatttctgggcatggtggctcatgcctgtaatcccaacactttgcaaagccaaggcagatggattgcttgagctcaggagtttaagaccagtgtgggaagcatggtgaaacctcatctctacaaaaaatacaaaaaattatctaggtgtagtggcacatgcccatagttccagctactcggggtggtgggagggtgtgtggtggggggcagtgtggggtggaagggagctgaaatgggataatcgcttgagaccaggaagtcaaggctgtactgagccttgactgggccactgcactccagcctgggtgacagaatgagaccctgtctcaaaaaaaaaaaaaaaggaaaattattaaggataaagatgggcattaaataatgagaaaggggcaattatccaaaaaacataataattcttaagttatgcaggtaacacagcatctaaatacatgagacaaaaatttataaaactgcaagaagaaataatcaaatttaatattatttaataatatttttggagatctcaacatccctatattaataacagctaatttcaacaagcagaaatcaggaaaatgttcaactgaatagcactaacaatgaacaggatctaactgttcaagtagcagcagaataattaatcaagtaacagcagaatacatattcctctcaagtttatatgggactttatgcaaaatagaccacattctggggctgaaaaagatgccctcacaaatttaaaagaatagaaggtttactgcatgtgttcttagactataatgaaatttaactggaaatcagtgccagaaaaaaactcagaagtccccaaatagtttgagattaaataacatacttttatataacacataggtcaaagaagaagtctcaaaggaaatttaaaaatatttcgaactaaacaaaatgaaatgtacatcaaaatttatgggatgctcaggaaaaatagctagtggatgcttggcttcatacctaggtgatgggttgatctgtgcagcaaagcaccatggcacacgtttacctatgtaacaaacctgcacatcctgcacatgtaccctggaactgaaaataaaaattgattaaaaaagaaagagaaaggataattcctttcacccacagtttcctgtctcctaatagtccttctgttgtgtctttaaataaatgtgtctcaaatcttaagatattcataaaatctgggattgcagatgtattttgcattacaagtcctatttttattttttaatggaatgctgtaaaagcagttcttagaggcaaatttatagcagcaaatgcatatattagaaaagaagaaaaatctaaaatcactaatagaaatgtgccttaggaaagtaaagagaggagagcaatttaagcctcaagtaagcagaagaaaagacataaaactttgagcagaaatcaataaaattgaaaacatgaggtcaacagagaaagtcaataaacccaaaaggcaatgcctttaaaagatcaataaaatcgataaatccatagccaggctaaccaagtgaaaaagggagaagacacaaattataaatattgattccatagacattaaaaagataataaaagaacattacaaacaaatgtatactgacacttttggtaatttagatgaaatgaatcaattccttgaaagacataaaccatcaaaacttatggaaaagaaatacattacctaaatagatctatatttatttaaaaaatagataaatcattaataatctttcgaaaaagaaagcgtctcgcccagattctttcactaatgaattccaccaagcatttaaggaagaaataatgtcagttctctataatcacttttagaaaatagaagtaagaggtatacctcctaactcattcaaggaggcaggcattatcttaatatcaaaaccggggaaatacactacaagaaatgaaacctacagctcaatatattttatgaatatagatggaaaaattttcaataaaatattagctaattgaatccaaaaatatataaaaatagtaatacatcacagtaagtgcaatttattttaggcataccagactgatctgacatttattaactggctaaagaactattttatgattctgtcaattgatgcagagaaagcatttgacaaactccaacatctatttatgagaaaaagtcttagaaaactaggaataaaaaacatcctcaacttaatctggaacatctaaaaaatgggacttcacgctattttatggtgagaaatgatatgcttttcttctatattgggaacaagacaaggttctttttttgccactcttattcaccatcctactggatgtcctaattagtgcaacaaggcaagaaaaaatatatatacagattagaaagaaaaaaagaaaactacctctgttcaagatgacataattacttatttagtaaaactgaaagaattgactcctggaattaatatgtgattatagcaaggttgcaggatgcgaggttaatagaagtcaattgtgtttccatgtaccaccagtgaacaagtgaaaattgaagttgaaaacaaaatacaatttcattccttcccccagcaaaaatgaaatataaacaacaaaatatgtatacaacgtatattatgtatatggaaaattttaagtctgatgaaagaaataaaggaagatctaaataaatggagatgtaccactttcatggataagtagattcaataatgttgagatataaattcttcacgaattggtgtatacatttaatacaattctaataaattctcagcaagttattttgtggttattgacaaatttattctattttttagcttcatctcaaaagatgattttaaaatttatatggaaatgcaagagacccagaatagtctacataatactgaccaaaggactaagttggagaactgacactactcatagtactacaaagctacagtaattatgacagtgaggtatttgtacaagaatagacaaatggattaatagaaaagaggagagagcctcttttagaccctcaactgatccttgacagagcaaaataaattcaattgagaaaggacagtcttttcaacaaataatcatcaaaaattgtgcatatacatgcaaaaatgaatctagacatataccttatgcttttcacaaaaattaatttaaaatggaccttagttctaaatgtaaaacaaaaactagaaaacttctatgagatagcataggagaaaatctaggtgaccttgggtttgattaaatcatgatccatgaaagaaaaaaattaaaaaaaaattgaacttaattaaatttaaaaattgttatgtgaaatatattgttaagtaaatgagaagacaagccacagaatgagagaaaatattttaaaaacatatccagtaaaggagttaaatccaaatgacaccaaggtatttaaataattctatgtaatgatcaaaagatctgaacattcaactcaccaaataagatgtacagatggcatataagcatatgaaaagatgctcaacatcttatgttattagagaatagtaaattaaaacaacaatgagaaaccactacacctattagaatggctgaaatccaaattactgacaacaaccaatgctgttgagaatgcaatgcaagagaaactctagttcatccaattttcaaatgtgactgtaaaaggctgcagccactttagaagacattttgtctgtttcttacaaagctaagcatagccttgcattataatctgcagttgtgttcctctgtatatacccaattacactgaaacattatgtctacaaaaaaatcctgaaaacaaatgtttatagcaggtttattgttacttggtagttaccaaaaatggaaaacaatcaagatgtctttcaatagatgagtgaataaactataagatatccataaaatggaatattattcagcagtaaaaagaaatgagctttcaaatcatgaaaagacatggaggaaactcaaatgcatactgttacatgaaagcagccagtgtgaaaaggctacatgctatataatttcaattagatgacattttggaaagaagcaaaactgtaaagaaaaagatcagtttttgcctggcgttcagggaaagggaagaataagttaagcacaggagacttggggagctgtgaaatgattctgtgcaatattggtggaattttggcaacattatgcatttgccaaaggcaatagaagtttttgacacaaagagttaccataatgcaggcaaattttagaaaattatttagaaggtcagaggatcccagaagcaatgtggactttacagaagaaattcactgcattacaaagcatcagataaccttagtaaggtggagagagaaaatggtcttaacataaatatctttaaaaatgaatggaatctgtcagactataggcaagatgagctgcacaaaagcactgtactctagctgataaaattatttctcattggcttctggttaacagttctgatactgctatacatatatatgggaattgaataattaagcctataaatggcaaacattgggagttatatttctcacggtgtggaaatttacagatcaactaggggaacagtcttgaataatcaatgtgatgatcattacagttggagacatcaaggagaactaatgtttaacttaatatagatatgggtggttatatatagaaatattcaaagatgtttatgtaaatacacaaaagcacaaccatgacacatctaaaataaataacaccctggtaaccatgggcacacttagtactcaaatgctggagtgcaatggcgtgatcttggctcactgcaacctctgccccctgggtttaagcaattctccagcctcagccaccagagtagcagtgattacaggcactcaccaccacacctggctaatttttgtatttttagtagagacagggtttcaccatgttggccaggcttatctcgaactcctgaccttgtgatctgccctccttggcctcccaaggtgctgggattacaggcatgagctaccaggcctggcctgttgattttttcttttttttttttttattatactttaagttctgggatacatgtgcagaatgtgcaggtttggaacatagatatacacgtgccatagtggtttgctgcacccatcaatcggtcatctatattagatatttctcctaatgttatccctcccctagttccctacccaccaaagggcccagtgtgtgatgttcccctccctgtgtccatgtgttctcttttttcaactcccacttatgagtgagaacatgcagtgtttggttttctgttcctgtgttagcttgctgagaatgatggtttccagcttcatccatgtccctgcaaaggacatgagctcatccttttttatggctgcatagtattccatggtgtatatgtgccacattttctttatccagtctatcactgatgagcatttgggttgattccaagtctttgttgttgtgaacagtgttgcagtaaatgggtgtgtgtctttgtagaatgatttataatcctttgggtatatacccagtgatgggattgctggatcaaatggtatttctggttctagatccttgaggaattgccacactgtcttccacaatgggtgatctaatttacactcccaccaacagtgtaaaagccttcctatttgtccacatcctctccagcatctgttgtttcctgactttttaatgatcgccattttaactggcgtgagatggtatctcactgtggttttgatttgcatttctctaatgaccagtgatgatgagctttttttcatatgtttgttggccacataaatgtcttcttttgagaagtgtctgtttatatcctttgcccactttttgatggggttgtttgtttttttttctcgtaaatttgtttaggttctttgtagattctggatattagcccttcggcagatgagtagattgcaaaaaggttctcccattctgtaggttgtctgttcactctgatgatagtttcttttgctgtttagaaactctttagtttaattagatcccatttgtcaattttgacatttgttgccattgcttttggtgttttagtcatgaagtctttgcccatgcctatgtcctgaatggtatagcctaggttttcttctggggttttcatagttagaggttttatgtttaagtctttaatccatcttgagttcgtttttgtacaaggtctgaggaagggttcagtatcagttttctgcatatagctagccagttttcccaacaccatttattaaatagggaatacatcccccattgcttgtatttgtcgggttcgtcaaagatcagatggttgtagatgtgtggcattatttctgaggcctctgttctgtttcattggtctatatatctgttttggtaccagtaccatgctgttttggttactgtagcattgtagtagagtttgaagtcaggtagcgtaatacctccagctttgttctttttgcttagaattgtcttgactatgcgggctcttttttggttccatatgaaatttaaagtagttttttctagttctgtgaagaaagtcaatggttgcttgatggggatagcactgaatctataacttactttgggcagtatggccattttgatgatattgattcttcctatccgtgggcatgatatgtttttccatttgtttgtgtcgtctcttatttccttgagcagtggtttgtagttctccttgaagaggtccttcacataccatgtaagttttattcctgggtactttattctctttgtagcaattgtgaatggaagttcactcatgatttggctctctgtttgcctattattggtgtatacaaatgcttgtgatttttgcacactgcttttgtatcctgagattttgctgaagttgcttatcaacttgagattttgggccgaaatggtggggtattctaaatacacaatcatatcatctgcaagcagagacaatttgacttcctgtcttcctatttgaaaactctttatttcgttctcctgcctgatgaccctggctagaacttccaatatatggtgaataggagtggtgagagagggcatccttttcttgtgccagttttcaaagggaatgcttccagttcttgcccatttagtatgatatcggctgtgagtttcttgtaaataactattattattttgagatatgttccatcaatacctagtttactgacagtttttagcatgaagctgtgttgaattttatcaaaggcgttttctgcgtctattgagataatcatgtgatttttgtcatcagttttgtttatgtgatggattatgtttattgatttgcatatgttgaaccagccttgcatcccagggattaagctgacttgattgtggaggataaactttttgatgtgctgctggattcggtttgccagtattttattgaggatttttgcatcgatgttcatcagggatattggcctgaaattttccttttttgttgtgtctcttccaggttttggtatcagaatgatgctggcctcataaaatgagttagggaggagtccctctttttctattgtttggaatcatttcaggaggaatggtaccagctcctctttttacctctggtagaatttggctgtgaatccatctggtcctgggctttttttggctggtaggctattaattactgcctcaatttcagaacttgttattggtctattcaagaatttgacttcttcctagtttagtcttgggagggtgtatgtgttgaggaatttatccatttctgctagattttctagtttattttcatagaggtgtttatagtattctctgatggtagtttgtatttctgtgggatcagtagtcatcttccctttatcatttcttattgtgtctatttgattcttctctcttttcttctttattagtctggctaacagtctatctattttgttaatcttttcaaaaaaccagctcatggatgcatttacgttttcgaagggtttttcatgtccctgtcttcttcaattctgctctgatcttagttatttcttatcttctgctagcttttgaatttgtttgctcttgcttctctagttcttttaattgtgatgttaaggtgtcaattttagatctttcccactttctactgtgggcatttaatgctataaatttccctctaaaaactgctttagctatgtcccagagattctggtacattgtatctttgttctcattggtttcaaagaactcatttatttctgccttaattttgttttttacccagtagtcattcagaagaaggttgttcagtttccatgcagttgtgctgttttgagggagtttcttaatcatgagttctaatttgattgcactgtggtttgagagatggtttgttgtgatttctgctcttttggatttttctgaggagtgttttatttctaattgtgtggtcaattttataataagcacaatgtggtactgagaagaatgtatattctgctgattaggggtggagagttctatagatgtctattaggtctgcttggtccagagctgagttcaagtcctgaatatccttgttaattttctgtctcattgatctgtctaatattgacagtggggtgttaaagtctcccactattattgtgtgggagtccaagtctctctgtagatctctaagaacttgctttatgaatctggatgcccttgtattgggtgcatatatatttagaatagttagaccttcttgttgcattgatccctttaccattatgtaatgcccttctttgtctcttttgatctttgttggcttaaagtctgttttatctgagactaggattgcaacccctgggttttgtttgtttgtttgttttctttatatttgcttggtaaatcttccctcatccctttattttgagcctatgttgtgtctttggacgtgagatgagtctcctgaatacagcacactgatgaatcttgactctttatcccatttgccagtctgtgtcttttaactggggcatttagcccatttacatttaaggttaatattgttatgtgtgaatttgatcctgtcattatgatcctagctggttgttttgcctgttagttggtgcagtatcttcataatgtcgatggtctttacaatttgatatgtttttgcagtggctggtaccagtttttcctttccatatttagtgcgatgatcttacaatttggtatgtttttgcactggctgatactggtttttcctttccatatcttgtgcttctttcaatagctcttgtaaggcaggcctgctggtgacaaaatgtctcagcatttgcttctctgtgaaggattttatttttccttcgcttacgaagcttagttttgctggatatgaaattctgggttgaaaattcttttctttaagaatgttgaatattggccctcctctgttctggcttgtagggtttctgcagagagatccgctgttagtctgatgggcttccctttgtgggtaacctgacctttctccctggcttccgttaacattttttccttcatttcaaccttggtgaatctgatgattatgtgtcttggagttgctcttcttgaggagtgtctttgtagtgttctctgtatttcctgaatttgaatgttggcctgtcttgctacattggggaagttttccaggataatatcctgaaaagtgttttccaacttggttccattctccccgtcactttcaggtacaccaatccaatgtaggtttggtcttttcacatagtcccatatttcttggaggctttgctcagagaggaggaactcagagaggcagtctggctatagcagatttgctgagctgttgtgggctctgcccagttcaaaatttttggcagctcctttactcaagcctcagtaatgttggatgccccacccccaaccacgcttgagcatcccagggcaacttcagactgttgtgcctgcagtgagaatttcaagcccgtgaatcttagcttgctaggctccatgggggtgggatctgctgagctagaccacttggctccctggcttcatccccctttccaggcgagtgaaaagttctgtctcactggcattcctggcaccactggggtatgaaaaaaaaactcctgcagctagcttcctgtctgaccaaaccgttgcccagttttgtgcttgaaacccagggccctggtggcataggcacctgagagaatctcctggtctgtgagttgcaaagatcgtgggaaaagcatagtatctgggccagagtgcacagttcctcaaggcacattctgtcgtggcttcccttggctaggggagggtgttccctgaccccttgcacttcccaggtgaagtgacaccccaccctgctttggctcaccctccatgggctgcacccactgtctaaccagtcccgatgagatgagccagatacctcagttggaaatgcagaaatcacccgtcttctgcattgatctcaccgggagctgtagaccacagctattcctatttggcctttttttcttttgagacagggtttcactcttgtcacccaggctggagtgcaatggtgcaatcttggctcactgcaacctctgcctcccaggttcaagtgattctcctgcctaagcctcccaagtagctggcattataggcactcaccaccatacccagctaatttttgtatcttttgtagagatggggtttcaccatgttggctaggctggttttgaactcctaacctcaggtgacccacctgcctcggcctcccaaagtgttgggattacaggcatgagccactgcacctggccaaatgttgatttttttaataccattttataataaaaggaacaaggactccctggagaaacagctgatactaaggcaggagtagaaaatatacaagataatcctggaaaatcttgtagggccagaaagtaaacaagtgcattaaaaataagtcacattggtaataatatgtcaaaggaacaagggagtctactgaaagagctcccaaaggccaaagctggaagaagtagagcaagaaagtaaactagctttgaattataacccaaaatataaagtaaatatccataagtctctactgatataaagcacaattgaataataactgggagagggagggagaataaataagttctacgtaaaagaatttcttataaattttgtagatatgactttctaaacaaattctcattcttaagaattcatagtgacttccttccaaaaattacaatatggaaaactgataaaaaatgagtaactctacagtggaggaatctgacacatactacatcagccaggttattgaggtcaacatcaacagccataaatcatgtgaacagtatgtacacttggtatgatgtaacgaatagcacttcacttctgtggtctttctccccaggctcattatctcagtataatcatgaaaaaaaaaaaaaaaaaaaaacccagcaaagtccaatagaggaatattctacaaaatacctcactatactctttaaaagagttaaggtcattaaaatggagtcggagacaatgtcctcaacatgaggagtctaaagagacaggccaactaaatttagtatggtatactggatgaattcctggaacagaaaaaaggttattaggtaacaactcaggaaatctgaataaagaaagaaatcagttaataacaatgtatcagtattgctttattaattatgacaaaagtaccatactagtgaaagatgaataatcggagtaactgtgtgcaaagactgggtagagggg

SEQ ID NO: 491 - DNA, 16589 bp, Homo Sapiens
gcgtccggacgcgcgacagcttccacccgcctcaggcagtatcagccgcgccgcagtcggaggaaatagacgcggggcctgaggctcctggacttgaggtattaggctggtgcagaagtaattgcggcggccgggtgcgggggctcaggcctgcaatcccagcactttgggaggccgaggcgggcggatcacctgagtcaggaagagttcaagaccatcctggccgacatggtgaaaccccatctctactgaaaatacaaaaattagccgggcgtggtggcgcgtgcctgtaaccccagctgctctggaggctgaggcagaataatctattgaacccaggaggccgaggttgcagtgagccgagatcgcgccactgcactccagcctggcgacagagcgagactgcgtctcaaaaaaagaaaaaaaaaaaaaaaggaaggaaggaaagagacttaggctgcattccccgcttttaaaaatatatatttatttttatttttttaaacgaagtctcgctctgtcactcaggctggagtgcagaggcgcgatctcggctcactgcaacctccacctcccaggttcaagcaattctgcctcagcctcccaagcagcagggattacaggcgcgccccaccacgaccggctaattttttttgtatttttattagagacggggtttcaccatattggccaggctggtctccaactcctgacctcaggtgatcgcccacctcggtctcccgaagtgctgggatgacaggcgtgagccatcgtactctgccgcattccctgcttataagcaccagtccctggtcctgttttagaaggctgttgtatcttggcctctgctagcttcaaaaactaaggcccgatgaggtagctcgtgcctgtaatccctgtttacaggagaggctgaaagggcagggattcctttttttttttttcccacttgagacagggtcttgctctgtttctcaggctggagtgcagtggcacactcaccgctcacttcagcctcgacctcttggactcaagcagtcctcccacctcagcctctggagtacctggaactacaggcgaatgccaccgcgcgtggctaatctttttaatttttgtagagataggatctggctatgctgcccaggctactattgaactcttgggctcaagtgattatcccacctcagccttccgaagtgctgggactacaggcatgagccatcacagccagctgggatattgtttttcgaatcgctgtcatgttctgtactatatgcagttcctgaaagaatggaggcaagaaggagtcagctaaccactgtgaactgtcttagtgccaaggacccacccttctctccttggggtcctgctgacccatcagaatagggctgagccaggatggggcttgtggagatgatgtgtatgagtgtgcatgcacttgtgtgtgcatgcctaacatccaaaactagatataaattctttaaacttttcattagttggccaggcacggtgactcgcacctgtgatcccagcactttgggaggccgaggcgggcggatcatgaggttaggagatcaagaccatcctggctaacattgtgaaacccggtctctactaaaaatacaaaaattagctgggtgtggtggcatgtgcctgtaatcccagctacttgggaggctgaggcaggagaattgcttgaaccagggagtcggagcttgcagtgagccgagatcacaccactgcactccagcatgagactctgtatcaaaaaaaaaaaaaaaaaaaaaaattctgcgtgagttgtgtggaggtgtcagtacctttccccagcaagagaagcttctccatatcaggcatatcctagccatgaccctgaaactaaccagccaagagggaaatgtgagacaagcccaggcaagcttcctggatgttgtatgcaggaataggatgtgctctctggacttggagacttcctgcctgctcaagaggctgtgcctccttgtgtctcccacaggcctctgtgtccaccttccccaccctggcaggcctgctaggccagcagccctggagaggaaagggtgaggtggtgtttgaagggacctgcctcctacgagctctgctggttggactgtcggatgacagaaccgtgcctctgagcctgggagagggaggcacccctgtgttctggaagcccccagtgcttcagcaactcctcactgaggcagaatagtggaggaatcaagctgggatccaggggactgaggaggggatagagcagcacctgggccccacattcccttccaacagagcctggggtgctgtgtttccgggagggttttttttgttttttgttttcccgagacagaatctcgctctgacccccagcctggagtgcagtggcatgatctcggctcactgcaacctccgcctctcgggttcaagcaattctcctgcctcagcctcccgagtagctgggattacaggtgcacaccaccacacctggctaatttttgtattttttatagagacggggtttcaccatgttggctaggctggtcgtgaacttctgacctcatgatctgcctgcctcagactcctaaagtgctgggattacaggtgtgagccactgcacccggcctctttttttttttttttttttttttttgtgagacagagtctctgtcccccaggctggagttcagtggtgcaatctcggctcactgcaacctctgtctcctggtttcaagcaattctcctgcttcagcctctgaatagctgggattaccgacatgcaccaccacgcccatataatttttgtattttttgtagagctgaagtttcactatgttggccaggctggtctcaaactcctgacttctggtgatccacccaccgtggcctcccaaagtgctgggattgcaggtgtgagccaccgtgcccggccagagcctggggttctcaaactcgtttctggggaccgcccaccacttttcttgccagtgcccatcttccaggttcctcccaggctgcttctgcctgccttgtcctcttcctgcctgtcacaccacactctcccaccagcatcttcctcattccgctctgactctcctcaccacccagcccgacctgactgaaaaccccgcagtgggagagcaggaggcccctgcttctaggtgccgtgtgagaagcagctgtgaggtcgggttgggtggctcacgcctgtaatcccagcactttgggaggccgaggtgggcgggtcacaaggtcaggagttcaagaccagcctggccaatatggtgaaaacccatctctactaaaagtacaaaaaaaatagccaggtgtggtggcgggtgcctgtaatcccagccactcaggaggctgaagcaggagaatcgcttgaacttgggaggcagagggtgcagtgagccgagatcatgccactgcactccagcctgggcaacagagcgagactccataaaaaagaaaaagagatttaattggctcacagttctgcaggggttacaggaagcatagcacccacatcactcagcttctggggaggcctcagagagcttttactcatggcagcaggtgaagagggagcaggcgagtcacatagtgagagcaggagcaggcgagagagaggccagaggtgccacacgcttctaaatgaccagatctcgcgggaacccactatcacaaagacagctctgagccgtgagggatccgcctcatgatccacacaccttctgccaggccccacctctagcactggggatcacaattcaacatgagatttgggtgaggacagatatccaaactgtgtggacagaggtgatgctcctctacttgttgaactcttgaacactagtgaagagaatgctggtgtattagtctgccaggctgctgttgcagaataccatgaactgggcacttaagcaactgaaatagattttctcacagtgctggaggctagaagtccaagatccaggtgccagcaggtttggtatctcctgaggcctcgcccctgcgcttgcagacagccgccttctcactgggtccttacagggcctttttctttgagccagtgtagagagctctgttctttcttcctctttttataagcacaccagtcctatttaattagggtcccaccctatggcctcatttaatcatttgttgttgtgttttttttttttgagacgaggtctcactgtgttgcccaggttagtctcaaacccctggtcacaagtgatcttcccacattggcctcccaaagtgctcagattacaggtgtgagccattgcgcccagtctcatttaaccttaattactaatttaaaggtgccatcatggccaggcgcggtggctcacacctgtaatcccagcacttttggaggccaaggtgggcggatcacttgcagccaggagttcgagaccagcctggccaacatggtgaaacccccgtctctactaaaaatacaaaaattagctgggtgtggtggcacatgcctgtaatcccagctactcaggaggctgaggcaggagaatcacttgaacctgggaggtggaggttgcagtgagccgagatcacgccactgcactccagcctgggtgacagagcgagactgtctcaaaaaaaaaaaaaaaaagtgccaccaccaaagactgtcatattgggggttagggcttcaacctacagatttggaggaaacactatttagtccacaataactggagaagttgaatttagaagatgggggttggggccaggcacagtgactcatgcctgtaatccagcgctttgggagaccaaggtgggaggatcacttgaggtcaggagttcaagaccagactgggcaatatagcgagactccctctctacagaaaatttaaaaattagccaggtgtagtggtgtgtgcctgtagtcccagctactcggaggctaaggcaggaggatcgcttgagtgcatgggttgtaggttacagtaagctatgattgtgccactgtactccagacaggggaacagagcaagaccctgtctcagcaacaacaaaacaacagggagatagggggtcaggtgctgacttcaccttaacttcactgtgtgcttttacagcaagcctgttaccctctgtgagcctcaacttctctatgtgtaacaaatggccaactttatgggattgtcaagaagctgaaatgagaccctggctggaggatattttatggactataaattcctaaacaattataataacttagttatttatcctatccatggatcacctggaagtttacaatgtgatttaaaatgcattctatcattccaccgacctgcagtgaattttgttgtcattattactccagggatacctaaaggggaagtttgtttataattcgtacccactccttgtagaaaggattcaagacagccgatgatgaaaacacccatgcttgcaagtgaaggttctgcctgtcacttctcgcagaggctgcagaaaaggcccaggaggctgttgatgacatgaacgaccaccaggagaagctggagcaggctgatgcacagaagggcggagaagagggacacgtgccagacaacagctgcagagggctccaggcagacggagttccagagcgaacggtcatacagataattcctatcccaaaaaataaggagaccaggggtcaggcgataagtaaggaaagccaaacaggcaaccccagtagaaaactggggtctcccctgaccgggtcatgggactgggctcatgagggtgaccgttactgctccatttgcaattttctgagtatcagaggagcaagatgctaggatgtgtgacccaaaggagcttgtagttcgtctgtgtgtctttttgtctctctctctctctctgtctgaaaagaccaagcccaagcctccacccatttacctactatgcaggtctttgaatgggtaaccatatttccaagcttgtgtctgattgaaggatgaaacatcaaacatgcaaaaaggaccatctttcagagcaactccagaagtgacaaagcaaatcagggctccaagtaaagccaggccacctgacaacagagcaccattcagcctctgagctaaagaagaagctaccacaggcccaccactgactcttctaaggaaaagctgcattttcaaaagttccaggttcccaactctgattcttctctatttcaaatcaaggataaaaaaaaggaagggagggaaggaaggaaagaaagaagcaggaaagaagggaaggagagaagtgggagggagggaaagaagggagagaaacagcgagagagaagctgcagccaagctctgaaatgactccacttctgtcgctgtgtttctccagctgagagctttcttggccatcagtctgtgctcccactgccctcccagaaaataactgggtttccttccttgacaggtttctagcctgcttctacattggcttctttctcgttccttccttccttcccttccttccttctttctctctctctctttctttttgagacagagtctcactctgtcgcccaggctggagtgcagtggcacgatctcagctcactgcaacctctgcctctgagttcaagcgattctcctgcctcagcctcccaagtagctgggactacaagcatgcgccaccacacccagctaatttttgtatttttagtagaaatggggtttcactgtgttggtcatgccggtctcaatctcctgaccttgtgatccacctgcttcagcctcccaaagtgctgggattacaggcatgagccaccgtgcccggcccatattggattctttcttagggttctagatttttttctccctcccccaaaaatgcctattttaaaaatgtgaataacacctacatagcgtttttctgcagagtcatggagtcattctcccactgaggtcaagctggtttggagttggggagggatcagacaaaggtgcatagtaagttttgactctgagttaaaggagtcaagatgaatcagtaagcctagggcagtggttcccaaaatggggtccctgcccagccgcatcacatcacctgagaacctgttagaaatgcaaaacttccccgccatcctgaatcagaaactctggggagggagcccagcaatccgtgttccggcaaaagccctccaggtgattctcatgcacattcaagtgtcagaactacgtgccacggggaaaaccagaatgagaacagacagtgaatgaaatgtgcaagtgtttatttatttatctatgtacttatttatttatttattttgaaacggagtctcgctctgtcgcccaggctggagtgcagtggcgccatctcggctcactgcaagctccgcctcccgggttcaagagattttcctgcctcagcctcctgagttgctgggattacaggcgcccaccaccacgcccagctaatttttgtatttttggtagagacggggtttcaccatgttggccaggctggtctcaaactcctgacctcaggtgatccgcccatcttggcctcccaaagtgctgggattacaggcgtgagccaccgcgcctggcctatatttgattttttaacatgtaactgagtcagtgggcttcccaacatgtgggctgcagatatcagagcaggctgtggagttaccataaggccacagattcatgtctgagaacgagtgtgtgtgtgtgtgtgtgtgtgtgtttgttacacacacatatactgagatctttcaagtttatacagttgctgctgtaattaataaggtagaaatttattctgggcctcagtttatctgtaaaatggaggggttagattagaatctagtgattagatgatctctggaaaactttcctgttctaagaaaatattagttaaaataactaggaaaatttccatcaatgacacatgattacagtgtcataactcatgtccatattgtccaacaccctaagagagtaacagtttctcacactggtacagacgtctgggtcctcacactggtacagacgtctgggcttcactaagcactactcccttgacttgatcagctcccattttacagatgaaagcctgaaactggaaagatgaagcaacttgcccaagaacttagcgttactgagggtcacagtgaggacctgacttcaggccccaagaccaaaattgcctctttaccgccctgcctctagagtaatagaggtggagacattctgggtgttagaagagtggaatctggtgcttacgcttcgacagagcccactcttactgaagcagccgtatctccagcccatcaaggagatgaggatagctgcagtgagtacctgcaggagagagaagaatgttgagatggggaaatcgactttgccggctgtttctaggtgctgcccacagctgttagagtggctggcagctcacatgaacgcagtcctgttgactctgactctggggacccacatttgtatgacgagcctgatctaacgctgtggatgttaactttcacacccgacctgcctggtcccaagctaggcttcctgtctcttagagcttctacagacccaagatcagcttgttagaataaacttttctgcaaggaatcaaaacactcttcccatgccaccttcctgctccccgccggggtctctttgagagttcacgttcagggaaccccggacacttaccatgaggcctcctccccagagcccagttcccagcatggcatgcctgccaaggaggcccctcaacaggtaggtgacatcccagttaggaaggaggagtgccacgttggccccagcagcaaacagggctgcagtcccaaggctcagtcccaggatacgggagcaagtccgtgagcttgcctgcgtgcagggagaggacaccatcctggaacagatagaaagggagtcgcagcagctctgctgtggggggatggggaagggaactccagcagcatatcatgggtgagggaaacagactacagaaaccgccaccttccagggtcagaccaatgagagccaagcaacctgcttaaaaactctgctccttaggaatcttccccagtgactaggatttaattgtttccttttctgctaacccctgttcacacatacatagtttgcattccatcatattttgtttatgcctctattacagccagtgattatttctgacaaaaagaaatgtttaaaggtgtcttcatgatgtccattgtctccacttctattcaacgttgtactggtcctggccagtgcaatacgaaaataaaaggaagcaaaagccacacagataggaaagaaagaagtaatattgtcggccaggcatggtggctcaggcctgtaatcccagcactttgggaggctgaggcaggcggatcacgaggtcaggagttcaagaccagcctggccaacatggtgaaaccccgtctctactaaaaatacaaaaattagctgggcacggtggtgggtgcctgtaatcccagctactggggagactgaggcaggagaattgcttgaacccgggaggcagaggttgcagtgagctgagatcatgccactgcactccagcctgggtgacacagcaagactccatcttaaaaaaaaaaaaaagtaacattgttattattcacagataatgtgatcacattatgtagaaaatcctaaagtttattagaattaacaggtgagtttagcaacgtcatagaataaaagattaatatacaaaaattatattgtatttctatatacaagcaatgacaaattgaggattgaaattaaaatatatcatttacaatagcataaaaatataatacatatggatgaatttaacaaaatatttgcaagacctatatagtaagaattgcaaagcattgctgagaaaattaatggagacctaaataaatggagacatataccatgttcctgaaccagaagactcaaaatagttaacatgttctccctaaattgatgcaaagatttaaagcaatatcagtcaaaatcctaggagagttttgttatagaaattgacaaactgaatctaaatttatatggaaatgcaaagcaattgtgaagattagccaaagcaattctgaaaaacaaacaaagctggagaacttacgccatgtgatttcaagacttacaaagctacagtaattgaagacactgaagccacgcgtaaggaaacacatatggactactggaacaggctggagctcagaaacagacccggtccaggaaaaatgattttttttttttcttgagacggagtctcgctctgttgctcaggctggagtgcagtggcgcgatctcagctcactgcaacctctgcctcccaggttcaagcgattctcctgcctcagcctcccaagtagctgggattacaggtgcccgccaccatgcccggtaattttttgtatttttagtagagacggggtttcaccgtgttagccaggacggtcttgatctcctgacctcgtgatccgcctgtctcgggctcccaaagtgctgggattacaggcatgagccaccgcgcccggccaataaatgattttttaagaagatgacaattcagcgggaaaaagtctcttccacaaatggtgccggaacaatgcacatgcaaaacaaaactgccttcactattacttcacaacatattcaaaaattcacttgaaatggagcatgggtctaaaagctttataaaatttctagaataaaacaaaggagaaaaacactgggaccttgggttagataaaggtttcttactaaaatgcaaaaagtacaatccacaaaacatgattaatcagactgcttaaaaatttaaatgtcagctgggtgcttgcctataatcccagctactcggaggttgaggcaggaaaatcgcttgaacccaggaggcagaggctgcagtgagctgagatcgcgccactgcacttcagcctgggcgacaagagcaagcgactccatctaaaaaaaaaaaatcatgctaaaagaaataagccagacactaaaggacaaatattgtatgattccacttatatgaaatattcaaaataacaactttatagagaaagaaagtagactggaggttatcagggactgtggggagggaggagagaatggggagttattgtttaatggttacagaggttttcaggttttgttttgtgttgttttgttttttttttttgagacagagtcttgctctgtcagccaggctggagtgcagtggcgcaatctcagctcactgcaacctctgcctcctgggctcaagcaattctcctgcctcagcctcccaagtagctgggactacaggcatgtgccaccacgcctggctaatttttgtatttttagtagagacagggtttcactatgttggccaggctggtcttgaactcctgacctcaggtgatctgcccgcctcggcctcccaccgcgcgcggtggttttggggtttttttagagatgcagtctcactatgttaccccagctggtcttcaactcctggactcaaatgatcctccagcccgtgcctccagagtagctatgaccagatctgggccactgcccacggtttaagggttacagactttctgtttggggtgaagaaaagttttggaaatagataatggtaatggttgcacatcattgcaaatgtaattaatgtcactgaattatacactttaaaatggttaaaatgacaaatctgatgttactttaccacaataaaaaatcaattaaaaaatttgtgattactcaaatccttatcagtaatcaataggtgaatcaagacaaattgtgttatccatacaaatgagttctattaggtaataaaatgcgtaaatttctgctacatataacatggatgaatctcaaaagcattgtgttaagtggaagaagccagaaacaaaagactactcacatgtttctatatatacgaaattctagaaaaggcaaaacttttaacggagagcagatgagcggttgccatgggctgagaatgggaaagaggattagtatggggcatgggaagctttctgaaggggtggaagcattctgtgtctagattctggtggtgaatacataactgtacatattgacaaaactcattaaactttgcacttaaaataggtgaattttattgaattttaactatatatcaataaagctaattacaattaaaatgtcatatctagataaattataaaatgcctcttccactccttatgttcctctcttttatattttcattgatatgtgaacttcttgttttttagaaaaatatgaattaaggccgggcacggtgacttacacctgtaatcccagcactttgggaggccaaggcaggtggatcgcctgatgtcaggagtttgagataagcctggtcaacatggtgaaaccgtgtctctattaaaaaatacaaaaaaattgctggacgtggtggcaggcacctgtaatcccagctactcgggtggctgaggcagcagaatcgcttgagcccaggaggcagaagttgcagtgagcagagatcgtgccattgcactccagcccaggaaacaagagtgaagctctatctaaaaaaaaaatatatatatatacatatatatatgaattaaaataggactagtaatatttgggcagactcatgtcaatgtggatctgaaaaaagtcagcgtcatgacatccccaggaagtggcctgttcccactgtgcagttcagttacacgtctgtctccccttaaggctcgctatttatttatttatttaatttatttatttattttttattgaaaaaaatttatttttagccgggtgcagtggctcacgcctgtaatcccagcactttgggaggccaaagccggcagatcacctgaggtcaggagttcaagaccagcctggccatcatgacgaaaccccatctctactaaaaatacaaaactagccgggcgtggtggcgcatgcctgtaatcccagctactcggaaggctgaggcaggagaatcacttgaacccgggaggtggaggttgcagtgagccgagattacgccactgcactccagcctggacaacaagagtgaaactccgtctcagaagaaaaaaaaatgtaatagaggtgaggtctccttatgtggcccaggctggtctcaaactccttggctcaagggccctcccacttcagacacctaaagtgctaggatgacaggcgtgagccactgcacttggccacttgaggctcttgacacgcctataacacactgctttgcacctaatcagaaaatatgtgtatagaggccaggcacggtggctcacgcctgtaaccccagcactttgggaggctgaggtgggtggatcacgaggtcaggagtttccgaccaacctggccaacatggtgaaaccccgtctctactaaaaatacaaaaaaattagctgggcatggtggcgggtgcctgtggtcccagctactcgggaggctgaggcagtagaatggcgtgaacctggggggctgagatcacgccagtgcactccagcctgggcaagagagtgagattcggtctcaaaaaaaaaaaattaactgcgtggtggtgtgcgcctgtaatccaagctactcaggagcttgaggcaggagaatcgcttgagcccgagaggcagaggtggcagtgagcccagatcacgccactgcactccagcctgggtgacagagcaaaagagagagagagagaggagggagagagggagggagggagggaggaaggaagaaaggaaaggaaggaaggaaagaggaaggggaaggggaagggaagaaaaaaaatatatatatatataaaagatatggatcagaggctctatatatatgcacacacacatatatatcatatacatataatgtataatgtgcgtatatatgtgtgtacgtacacacacacacacacacaatagtcccccatatctgcaggggatatgttccaagagctccagcggatacctgaaaccacagatcataccaaactctgtatattcagatgcttctccacttatgatggggtcgaactcctataaacccgttgtaagtcaaaatatcctaagttcaaaaggcatttaatgctggcaacacagtagactgtccctgactcacaatggttcaacttacaattttttttttttttttttttttgagacagggtcttgctctgtcacccaggctggagtgcagtagcacaatcattgttcactgcagccctgatctgggctcaagtgatcctcccacctcagtctctcggatagctgagaccgcaggcatgcgccaccatacctggctaatgttttagttctatagagacagggtctcactatgttgcccaagctgatctcaaactcctggcctcaagtgatcctctcacctccacctcccaaaatgttgggattacaggcgtaagccaccacgcccagtcccaatttacttttgactttgtgatggtgcaaaagcaatgagtattcagtagaaaccgtaatcccatcataaagggtaaggagttcactgatgatggagttaggtccctagaaacctgtcgtaaagttggaaacttagaagtcaaaccactataagtagaggactgtctgtactatgctttttcctatacatacatatctgtaataaagtttaatttataaatcaggcatagtaagaagttcgcaacaataataataaaatagaacagttataacaacatactgtaatgaaagttatgtgaatgtggtctttctcattgaaaatattttatgtaagttttttgaactgcagttgaccacagatagctaaaactttggaaagcaaagcttcagttaaggggggattactttacatcacacataaataatgaaatatttcacagcatgaagaattaaacattgggggagggccagggctgaaaaactatctgtaggtaccgcgctcactacctgagtgacgggaatcactcataccctaacctcaacatcacacaatagacacggaacaagcctgtatatgtatccccggatctaaaataaaagttgaaattatatttttaaaatttgcattaaaggccaggtgcagtagttcacgcctataatcccagcactgtgggaggccgaggcgggtggatcacttgaggtcaggagttcaagacagcctggccaacctggcgaaacctcatctctactaaaaatacaaaacttagctgggaatggtggtgtgcgcctgtaatcccagctactcaggaggctgaggcagaagaatcacttgaacctgggaggcagaggttgcagtgagccaagatcgcaccactgcactccagcctggaccacagatcgagactccgtctcaaaaaaaaaaaattgcattaaaaaagaattaaacataatgtgtaaaatatatttgtaacttgtgtgagataattaacacccatgtaaacacaaccaatatcaaacatacgtcattacccatcacatcactgacactcaggtgtgccctctccaatcctgccttctttctggattccttcctaggaactactatcctatatttcatcttcaacatatccttttaaaaacagttttacgacttaggaactcagaattgttttagaaacttgtttagtcgggtgttttccatttttcaagactgtagcttttcttttctttttctttttttttttgagatggagtcttgctctgtctcccaggctggagctcagaaacagacccggtccaggataaataatttttttttttcttgagacagagtctcactctgtcgctcaggctggagtgcagtggcgcgatctcagctcactgcaacctccgcctccccggttcaagcgattgttctgcctcagactccccagtagctgggactacagctgcacaccaccatgcccggctaatttttgtatttttagtaaagacagggtttcaccatgttggccaggctggtcttgaactcctggtctcaagtgatcctcctgcctcggtttcccaaagtgctggaattacaggtgtgagccaccaaacccggccagactgtagcttatggtaaagaagacaaggggaggggtgccctgggagggtgggggtaggagagaggaagggtgccctgagaaggtgggggttaggagaagggaggggtgcactgggagggtgggtgtaggagagggaagggtgccctgagaaggtgggggttaggagaagggaggggtgcactgggagggtgggtgtaggagagggaagggtgccctgagaaggtgggggttaggagaagggaggggtgcactgggagggtgggtgtaggagagggaagggatgccctgagaaggtgggggttaggagaagggaggggtgcactgggagggtgggggtaggagagggaagggatgccctgagaaggtgggggttggagaggggaggggtgctctgggagggtgggggtaggagaggggagaggtgccctgggagggtggccagaggacaggggaggagtgcacagggagagtgggggtaggagaggggagggatgcacggggagggtggaggtagcagaggg

SEQ ID NO: 492 - DNA, 4063 bp, Homo Sapiens
ctttccctgcctcgcgacacccagaccgagacctcgggaatgctccggccccctgccgccgtctcccggcccggttctctttcactaaaaataggcgattctggcagcgcccctcctatggggccttgggggcaattggggttttgtcttagagcccgtgtggacccggatggcgacggcagcccgaggagagggagggctgactgtatggttggctttccgacgaccagaccctgcaggattcggcctttccctttggagttttcctccatccccctccgtccctcccaggggatgcccgcaggccacagtggtcactgaaggtcaaccctgagccgaaggagaagtggcctcgaccctggggaccccttcaggtgcagcttgagggggaacggccgcctttcccgttgggcacccagctgtggctgtgccctgtcctcgcccagctcccggcataggcatgcgctctgggccggggccggggccccccgcctccccgggaggaatcgctgggttgactctgggtcagcaaagggagcccggccctttctagcggggggacgtcctgcagccgctggaggaggctgagtcacgcttttcccaccagaagtctacctgtgcctgcgcccgccggacctgccggcctcttccttctcatccagggggcctcttctccagcctcacggaggtgggaagcttgctggaggcccctacctgccttttggggaagaccccgaggctggcccacgccctgctggcaggacccttcctgactgggtccaccgttcttctgggtctcaccacttctcccagcccctgggctgcttcctctctcccgtgtctgggaccccagaggcaccacttccattccatacaaggagtccacaggacctgtacagttggaaccagcccctcaggcttccctgccagagcccttttctccaggagcagaggcatccatcccctcctgccagcattccagaccctggagggcttgcgcggtggcaggttttcccttgaatgctgaggcgaggctgagggaaaggtgcgtggccaggaccagagggcctgctgactgccagctaaaactctgtgcaggaggctttcccacgtactttacgtactttaagatgatgagcaaaatccttactgtctccctgcaaaatccgtgtggcttcctctggcgtgtcccatactcttgtgtttgtggccagactgggcctccgctcttcctccaaactcattagttctctcccacacagaacacacattgttctgcctggaaggcccatcacatccctccccaaccctctcggttcaatctaagctttcttggggtctcagcttaggttgcctgttcagggaagcctctgggaccctcaggtctaggtcacatttgtttcatgctttcacagcggtggtgtagtgtatactggttcttcttatccctcaggtgtctcctcacaaggactgctctgtttctgctaagtgttgcattctcaccacccagtggaggctttggcctgtggaagattctaattttggtggccagcctcatgggttgaaaagtaaaggtcaagtagttaaaggaagggcgttccaggcagagggatcagcgtaggtgcagaggtaaggtagggatagctttgagggctccttaggagggagtgaaacccctgagggtcaaggagccctagtttggaaggccttgctactaagggatctggattttgtcctgaagcctagagtagtttctttaagagtctgatctcggccaggcctagagtagtttctttaagagtctgatctcggccaggcctagagtagtttctttaagagtctgatctcggccaggcgcagtggctcacgcctgtaatcccagtacttcggaaggccaaggcaggcagatcacgaggtcaggagttccagaccatcctggctaacacggtgaaacccgtctctactaaaaatacaaaaaattagctgggcctggtggcacgtgcctgtagtcccagctactcgggaggctgaggcaggagaattgcttgaaccggggaggtggaggttgtagtgagcagagatcatgccactgcactgcagcctgggtgataagagtgagactccatctcaacaacaacaaaaaaagtctgatctcagcactgtcctgcctagactgcttctttttttaggacaagtttttattgctacctgctaaaaacgcacttattgtcacggtgcaggctaggttggaggagtaaaactagagacaagaagagttaagaagccactgcagtattcaagacaaatgagtcaagccaaaggctgagatgctgtacaggaaggtctctagggggaccctaaatttagctgggggtggtggtgcaagattcctacgaagtggcactaaaggagggactgagtacttactaaagaccttatgactaagaggtctctctcatccctacactacttccttcactccagtgtctagaattggcctctgtatataggagctctttggttgagcatggttcacacctgtaatcccagcagtttgggaggctgaggtgggaggatcacttgaactcaggtgttcaagaccaacacagtgagaccccatcgctataaaatttttaaaaattttagccaggcatggtggtgcacgcttgtagtcccagctacttaggaggctgatgcaggaggatcgcttgagcccagaagttggaggccgcagtgagctatgatcacatcactacactccagcctgggtgacagggtaagatcctgtctcaaaaagaaaaaaaaaaaattaagcacaaaaagtttggagaccaggaaacaggagtacaagtataggtgctgtcccactcttagtgaggtcggctgtgaaattaaatcagttcctggaacaaatcttacaaagagatcagagatcacttgcagtttttttttttttttttttttgagacagcgtctcactctgtcacccaggctggagtgcagtggtgccattttggctcacagcacccttcgcctcctgggttcagacaattctcccacctcagtctcccgagtagctgggactacatgcctggctaatttttgtcttttttggtagagacagggtgtcaccatgttggccagcctggtcattaactttttaaaaaaatgtttattttcctgataaagattcagcataaattttaggcagaagtctgacgtctagcagtcccccagaaagcattctgttgtctgttggggcttccttgggagatggactgtgggctaggcctgggtgctttggcagatacagagtcagaggctgtggaaaggggatggtccagacaggactataataaatgcatgagccaccgtgcctggccctcagggtacttttaataaagtgctagctaggcaagcctattcttcctctcaagagtaggtgttccacttttgaacacctatgccaggcaccggctatagtgcctacaagaggatgatatgtggacatgaccactttccctgactacatcagtggttctcaactggggatgattttgcaatgtctgcttatgggacatttggtaatgtctagagacatttgtggttgtcacaactagtggaggggtactacctgcatgtagtgggtagagtccagagatgctactaagtatcctataatgcataggacagctgcccacaacaaagaattatctcactcaaaatgtcaatagggtcgaggttgagaaatcctggtctaggctgggtgtggtggctcatgactgtaatcccagcattttgggaggccaaggcaggaggatcacttgagcccaccaggagttcaagaccagcctgggcaatgtagggagatctccacaaaaaataaaaataaattagctgcactatagtccttgttacacagaaggctgacgtgggagcatcacttgaacgtaggaagtgagtgagctgtgattgcactactgcactccagtctgggcaacagagtgagaccctggctcaaacaaaacaaaaacaaaagcattgaaagaaagaaagaggccgg

SEQ ID NO: 493 - DNA, 1012 bp, Homo Sapiens
cttttgatgggcgagtttagttcatttacattcaatatattattgataagtaaggacttactcctaccattttgttatttgttttctaattatttagtaatcttctcttccttccttctttccttcctgtcttcctctagtgaaggtgattttctctggtggtatgatttagtttttttgctttatattttttgtgtatccattctgtttactgctttgaggttaccatgaggcttgcaaatactatcctataacctattcttttaacctgataatgacactatttgcataaacaaacaagcaaaaataaaactaataaaaactctataccttaactttgtccccctgctttttagctttttgttatgtataattatatcttattatattatgtcttagataattgctgtagttattatttttgattggttcattgtttagtctacttagaataagagtagtttacacaccatggttacagtgttataatattctgtgtttttctgtgtacctaccattaccagtgagttttgtacctccaggtgattatttattgctcattaatgtccttttatttctgacctgtcctacaagaaataactttaacatttgtaggacaagtctagtattaatgaaatccctcagcttttgtttatctgggaaagtatttcgccttcatgtttgcagggtatttttactggacatactattctaggatgaattttttttccttcagctctttaaatatgtcatgtcactctctcctggcctgtaaggtttcccctgaaaagtctgctgccagacgtattggacctccattgtatgttatttgtttcttttctcttgctgtttttagaatcttttctttatccttgacctttgagaatttgattattaaattccttaaggtagtcttttttggggttaaatctgcttggtgttctataaccttcttgtactttgatatttatatctttctgtaggtttgggaagttctctgttattatccctt

SEQ ID NO: 494 - DNA, 2270 bp, Homo Sapiens
gtgcccaacttctgcgctgccctcaaccgcatgcggaagagcacacagtccgacgtggccttcttcaggttcccgcggtacccggccagatgccagaagtgggtagagaattgtaggagagcagatttagaaggtaaaacacatgatcagctaaataaacgttatcgattatgtgccaaacattttgcgacctctatgatttgtagaactagtccttataggacagttcttcgagataatgcaatatcaacaatatttgatcttaccagtcatttgaacaacccacgtagtagacacagaaaacaaataaaaaactgagtgaagacgaaatcaggacactgaaacagaaaaaaaaattgatgaaacttctgagcaggaacaaaaacagaaagaaaccaacaatagcaatgctcagaatcccagtgaagaagagggtgaagggcaagatgaggacattttgcctctaacccttgaagagaaggaaaacaaggaatacctaaaatctctatttgaaatcttgattctgatgggaaggcaaaacatacctctggatggacatgaagctgatgaaatcccagaaggtctctactccagataactttcaagcactgctggagtgcggaataaattctggtgaagaggttctgagaaagcggtttgagacaacagcagttaaaatgttgttttgttcaaaaacacagcagaggcagttctagagatctgtgagaactgtattggagaagaaactctcagggaagtgagagactcacacttcttttccattgtcattgacgacatagtggacatcagaggaagagcacctacctgtgttggtgaggtttgttgatgaatctcataacctatgagaggaatttgtaggcttcctgccttatgaagctgaagcagaaattatggctgtgaaatttcacactatgataactgagaagtggggattaaatatggagtattgtcgtgaccaggcttacattgtgtctagtggattttcttccaaaatgaaaattgttgcttccagacttttaaagaaatatccccaagctatccacacaatctactcttcctgtgccttaaatatgtggttggcaaaatcagtacctgttatgggagtatctgttgcattaggaacaattgaggaagtgtgttcttttttccatggatcaccacaactgcttttagaacttgacaatgtaatttctggttgttttttttttcagaatagtaaagaaaggggtaaagaactgaaggaaatctgccattctcagtggacaggcaggcctaatgcttttgaaattttagtggaactcctgcaagcacttgttttatgtttagatggtagaaatagtgacacaaatattaatggaataactgtataactggccaagcatttgtactctgcagtgcagtaacagattttgatttcattgttgctattgttgttcttaaaagtgtcctatcttttacaagagcctttcggaaaaacctccaggcgcaaacctctgatgtcttctttgcagccggtggcttgactgcagtattgcattcactcaacgaagtgatggaaaatattgaagtttatcatgaattttggtttgaggaagccacaaatttggcaaccaaacttgatattcaaatgaaactccctaggacattccgcagagctcaccagggtaacttggaatctcagctaacctctgagagttactataaagaaatcctaagtgtcccaacagtggagcacattattcaggaacttaaagacatattctcagaacagcacctcaaagctcttaaatgcttatctctggtaccctcagtcatgggacaactcaaagtcaatacgttggaggaacaccatgctgacctgtatagtagtgacttacccaatcccaacatggtctcagccgagcttcattgttggagaatcaaatggaaacacaggaggaaaaatatacagcttccatccaccatctatgaagccctccacatgcctgacatttttttcctaatgtgtatgcattgctgaaggtcctgtgatgaaggttgagaatgagcagtatgaaaacggatgaaagcgtcttaaggcctatttggggaacactttgacagaccaaaggtcgagtaacttggctttgcttaacataaattttgatataaaaaatgacctggatttaatggtggacacatacgttaaactctatacaagtaagtcagagcttcccacagataattcagaaactgtggaaaatacgtaa

SEQ ID NO: 495 - DNA, 5914 bp, Homo Sapiens
ctccagcctgggcaacaagagcaaaactccgtctcaaaaaaagaaaaaacgcagagccctcatgaatgggattagtgtccttatcaaagagactccagaaattccttacctcttccgccatgtgaggacacaatgagaagatggctgtctataaaccaggaatctggctctcactagacaccaaatcacaccttgatcttggacttcccagcctccagaatggtaagaaatagagctatattgtttattaactattcagtctatggtgttttgttacagcagcccaaacaacaagggcccacgtggcttagtattttgcttgcatatactttgagggaattattttgtaaaataaatgggccgggcatggtggctcacacctgtaatccaagcactttgggaggtcaaggtgggcagatcacttaaagtcaggagttaagaccagcctggccaacatggtgaaaccccacctctattaaaaatataaaaattagccgggcatggtggcaggcgcctgtaatccaagctactggggaggctgaggcaggagaatctcttgaacctgggaggcagaggtggcagtgagccaagattgcgccatcgcattccagcctgggcaacaagagcgaaactctgtctgaaaataaaataaaaactaggccaggcatggtggctcatgcttataattccagcactttgggaggctgaggtgggtggatcacctgcggtcagcagttccagaccagcctggctaacatggcaaaaccccatctctactaaaaatacaaaaattagctgggcatagtggtgcatgcctgtaatgctagctactcgggagactgaggcacaagaatctcttgaacctgggaggcagaggttgcagtgaaccaagatcgtgccactgcactccagcctagatgacagagactctgtctccaaaaaacaaaacatattaaaactagctgggcaagttaatcctgtaatcccagctattcaggaggctgagacaggagaatcatttgaacccgggaggcggaggttgcagttagccgaggttgcagtgagccgagattgcaccactgcactccaagctgagtgacagagcgagactctgtctcaaaaataaataaatgacagtgtgtagactatggtgcgatggtcacaaacccagtcttttcaggagcaggaaacttaaggcaggtggaatgaactggaaccgtttttgttgttgttctagctgattgttgctagatcttaagaattttttcaggagaagcaagaaaattaggtatttatatacatgtctgtgggccacatttaaacacagccctttaattctcactgtctggactagcaaaataaagatgggttttggcattagaccgaagtgtgaattttggcaccaggatgtcctagttgtgtgatgttgggtaggtaacttcattctcaaagtgtcagtgtcctctcctttgaaatgagggcagctctgcccacttggcaatggggttgtgataggtataggagggctgtctaccacacatgcagtgactagcacttaggaaactccagctgaggtcgtctgtctgccagcttctaagtgactccttccaatttgctagtcccattttccagagcttttgctaataaacatgactgtcctcaggagaagcctattgggcagatgtttgtagagtgtcatgctgcacaccaggtgtctgcacatgtgtttgcaccgctccatcccacatctggaagcaacagctccaggtgaaggagcaaagctgtcgatcacagaggtgtatgtggatcctccgaccaaactgtggctttgcttcctcagtgtcagccaccaggattggttttaggtgtgttaggccattcttgcattgctataaataaatagctgagactgggtaatttataagaaaagacatttggctaggcaaggtggctcacgcctgtaatcccagcactttgagagcccaaggccggtggattacttgaggtcagaagttcgagaccagcctgaccaacatggtgaaaccccgtctctactaaaaatacaaaaaaaaattagccaggcgtggtggtgggcacctgtaatcccagctactcaggaggctgaggcaggagaatcacttgaacctgggaggtggaggttgcagtgagcagagatcttgccactgcacttcagcctgggtgacagagtgagactctgtctcaaaaaaaaaaaaaaaaaaaagaaaagaaaagacgtttaattggctcacagttctgcaggctgtacaggaaacagtgctagcatctgcttctggggaggcctcaggaagctttactcatgatggaaggtgaagcgggagcaggcgtctcacatggtgaaagcaggagcaagagagagagtggaggcaggtgccacacaccttgaaatgaccagatattgtgaaaactatcacgaagacagtaccaatcatgagggatctgccccatgatccaaacacctcccacgaggcctcacctccagcatttaggattataattcaacttgagatttgggcagggacaaacatccaaactataagaaataaggatgaaaaagggaatcagttgtacattttaaggctttccttttttctgtttaaggaagaatgagtcttttgagaataagaacatttatattgcctccttccaaattctccttgaaagagatcctctggccacctttgggattgcacaagcctgtctcatgccctctttggggccagtgtgtttcagctgctgctgcaaaagtaagatgtgtcagtgcttgttaagtaggctctcagttccaggtaagagcagtcatacacctagatgccatcaatgtgccaggcattttgctctgcagccggggtacaaggataagggagagtcctcatgttgctcctgagtaaaggaggatggcaagtgacttcatagtgaaagagtgcagtgtgaggatgactgtgacaaaggtctaatacccaacctgggagaagggtgcagggttcttagtaaacaactggtgaaggggaaatattagtggctagcaagcaaaaagaattgggggtacatttggcaacagtttagagggaagggtatttacagtggagagacatcataatcaaaggctagaggtgagagcacagcatggctgggctagtggagtatgggggacgctggggatgaggctggaggtcacagcagggaggactctgagtgccttgcaaaggagaatagttttatcctgaccgctctgcacttcagtgattttgagagatgggtgctaagatgaagttacattttacaaagataactctttgctgtagcaaggagaacagactgcaggagcagggatggtggtgaggtgaccatagttgggggattactgtagtaacttcaagagaaatgatgaggcccaggcaatagaggcttgaggaaccacagtgaggggctgacttcagaaacaggcagagggcgaggtgagtgcagggagtggaagagggagtggttgaagatgactcccaggttgtcgtgttggtgacagaatggaacgctgtgccatggatcgtgaaatgggacccaggaagagaagctggtgttggggggccaggagatgtaggcaggggatgtgcccagtttcagaggttaagattttggcaggataagggcccatagtgggcatttacacggactggtttagtgctcaggagagagatgacattgagataaaaattttggagtcatcattaaagacatgggttagatgaaatcatctacagagaatgtgcagatagagaagaggagacactggtgaggagggaaccctggggaaatggagacttcaggagcgggtagaaaagcatagaaacgagagtgactgagagaccagaggaaaatcaggagaaagccaattaggagcttccaggagagagtaacgtaaagtataggggaggatcccttgaggccaggagtttgagaccaacctggcaacatagtgacaccccattgctacaaaaaaaaaaaatgaaaattagctgggtgtggtggcaagtatccacgggcgggggacaaggttattttggtaagcctagcaaactctggggcagagaagtggaggggtagaagcttgcctatcttgagctgaggagggaggaggaagtgagaaatggaggcagccagatgctctcctttgagaaggacctaattcctattctcattggtgtaacttaaaaacaaaacaaaagtgattaaatatttcaaacataaaagtaaaatgaagctgggcatggtgatatgtgcctgtaatccaagttacaggaagccaaggtgcaagggtcgtttgagcccaggaattcaagaccagcctgggcaacccagtgagaccctgtgtctttaaaaaaaaagaaaagaaaagaaaagaaacactcatgacccaattaacagtaaacattttgctgtctttgcgtcaggtttttactttttggacaaaacatgactagtgtttgaaaccccacatttaccctttcctgatcccatttccctccctccatgaggtaaccaccatcctgaatttgatgtttcattcccttgcgtggtttatacttttattacataagtttatatctataagcaataaatataattgttttgcaaatttttaaagtttattatagagatggatcatgctgaatatactgcctcttgcttttttcattatcagtactgttttggagatttatttatgttggcacatgtggctctagttatttcaactgctatatagtattcctttgtataaatataccacattatctctccattctcctgtggtggacatttagttggtttccaattttttgttcaaacaaggttgcaatgatcattcttctacatgtctcttgtacacatgtagggatatttctggaatatataactaaaagtggaacttgctaagccatggattacaggcaccttcaacttcactagatacagtgtcaaactttttcccaaagtgatggtaccagtttacatacaaaatagccatttatgacaattctagatgcttcacgtcctcaccaatatttcatttgttgaaaatttaatttcggccaatttgatgcagttatattctatagtttcctttagatttttacaaggccaccaataatgtagtgtagataccacacaactctaggaggtgctgttcacattttagtctttgtgaacggtgcattctagagttggtacaataacagtggtcttgagtgatgttaagaattttgtttattgacctgttaggttttctcttttgtaggaattacacaaaataattgattatatacatatgaaaaaatagattcctatattaattatacataaaataaattcaaggtaaattaaagagctaaatgccaggccgggcatggtagcttaagcctggccagcactttgtggggctgaggcaggaggattgcttaaacccacgaatttgaggctgcagtgagctatgaacatgccactgcactccagcctgggcagcagagcgagaccccatctctttaaaaaaataaaaactttacgatttttctatgttaataaatgagatctataatttcttttttctcttacactgtctttttgtttctgtgggttttgttttgctttggacacagggtttcactctgtcacccaggctggagtaaagtggcacgatcatcactcactgcaagcttaaactcctgggctcaattgatcctcccaccttggcctcccaaagtgttgggatgggattacaggcatgagccactgtgcatggcctcatgttgtctttataaagttttaacactgagatttggtaaaattgacaaatccactgttattgactgatattccaaat

SEQ ID NO: 496 - DNA, 4068 bp, Homo Sapiens
agctgccagtctcattgttgctcttttgtagataatgtgtcttttttcttctggctggtttttccatcttctctgtctttggttcagcagttttattgtgagttgcataattgtggttttctctatacttatcctgcttgagggtttgctgagcttcttaaccagtgggttaaatgtattttatctgctttagaaaattcccaaccattatccctttgaatattgcttctgctctatttctttctccttgccctctgaaacttcagttttacatggtagacctttcatacttgtcctgtatgtctcttacatttgtttcttattttttctctttctttttttcttccatgcttcactttgtatatttttcattgatatgtttccagttcacaagtcttgtattcaatagtgtccaacctattgttaaactcatatattgagtttttaaatttaattttgaaataatttactttgaaatatttttatcagaaaagttgcaagaacagtagaatgaactcccacattctcttcatccagattcctcagttaatagtttcatattttctccatctctttttgtaaagatgatagatagatagatagatagatagatagatagatagatagatagatgtgtattttcaaggatatgataccttttttgaatattttgagagcaagttaagcaagttgaaacctttatgtcctatcatctgtaaatattcctattactacttctcccaaagacactctcctacagagtaattgccaagcctttcaaatcagaaaatggacagcgataaataccagcattcaaaccacagttcattattatccaacgttccaggcttatcttgaaatttctctacctccatccttgaatcatccacttttacaaggagtccttgttgtttgttatggaaattggaacctacatacttgttattaattgctactggggtgtcattgcacctaggtcctctccatggtcagaattttgaaatatatgtatgtattcatggatatgtacacagacatattcacttgcattgataattttttttgtttctttcctcccttccctttcactctttccttctttccttccttttgctctttccttccttccttcttccttcttaccataacaatagcaatgagttatttttttcgcttccccttttcatatttgtaaatttgttttcccacagagagaaatccagcttccattagcttcaatatagatactttcttgatcaatcctcctttacataattaatttcctaaaaatgctaggtactgccatggccaactcatcactcctgatttcatctccaggcaagttgtcacttttgaactcttctccccaccaaaccctggtctgtttgatatgccactgcctccatgcccctgtctccaccttctggctgttagacacattgttaactgtgcaccccaacttactcttaccttcacctccctggtgcttcttctgctgagcatacaactgccaccatatgtaccccctatacatgcttccttggacaccaggcactctgctgcctccacatggctttcccattatgacttcttttgcccctatgcacatcactatctgtatgcccgccaccctactttcttggctgttggacacactgctatctctactgatcctttccactgcagttttctccatatattgatttcttaactgacgatagtatattttttcaaatttagaatgcctaaagaaatcttttttataggttagttttactgaaaattgtccatttcctcatcaattttgcactttattttcttaaacatattcataaaaattatttgtaaattctcatttgctgattacaatatcttgatcatctataattgtgtttctattgtgtgtgtttttttctcttgattattgggcaaatgaacttgatcttccacatctagtaatttaaaaaatgttagacattatgtataataaaaccataaagggtccagatgatattgccttccaccgaaagtgttccctttttcttctgttgggcaggtagaatagcctttgatcacctcaatcgagtcagagattattctgaatcagaagctggtttcagttttgctaagtgtacctccgattcacttctgttcttagggtgtagccctccagggctttcaattgagagcctggtggatctctgtcttccagccctaaaagataacagcaagttttcagtttagctctttaacctcctgctccataaagcttcaaaattcagcaactcgcttgaaaggaagactggcaatgtgtttgggacactctatagtcttctgtgaagaatagagatctcttttgttgttttctttgagggacagcctgtagctttgctcagaatctgtaaatattcccatcaaaaaaccacctgtaaattaccaatgtcaattccctactccctcttatgtttttatattttacttcttttgttttggggctcctcttttccatagcagttcgttgattctctagcaccatgacactgtgggggacttcactttgcatttcagaagtttggggactactgttttagcctccatacagtctcagaattcagttaatgtcttaatcatgtatttagggtttctcacaccttcagtgagtcaccaaagccccatataactgctaaaagttttgttagtttaacttttttccgcagctgcatctttctgcctggactcagcctcatccttagcctgcactccaacctggcaattttgccaagaggaaaaaattgtggacatcatcaagtcattactggaaagttctcacttctctggaattttaatccatttagttcttgtttttaaaaccctctgattcctttataaatatataatttacctaggtttttctcgttgttagtccaagtgttggcctgccacactgactatatcctttctggaaatagaaattctctctgttgcccttaatgaatttaaaaaaatattttataccactttattgtttattcttagtccaaaacatgttttctaccattgttggaagcagaagttctggaattggtttctatatattttcagatcccgtaaaaatgaattaaggtgaatttgattaatgtaaattagatttatgtgaataaaggataaatagttaagttcatcattgttgcaattagagaagtggtacaggttccccattctagcactgagtatttgaaatcatacctctgctaagatcctgcaaatatttcagctcactccctgtgtgcattgacacatattatcagccctctcttttcttatattaaacagggccacaagatgcaacacacgctttctcattgcttcacaattttttcttctttcactttcattcagtcacttcatatcagctatgtgttaagcataggagatttgtcagtgaaaaaagtatcaaactcctcatctttatggagattacattgtagtaggaagagacaaacaataaacaagagcaataacacgcttcatagtagacatataattccaagcatgtgtacctattagtcttaaatacaggagagacactcaagacagaaataaaatgtaataaaatccaaaccctacagtctgcaggggacttggacaagaccccaagattcttcaaggataggatagggggggacaacctgtaacaattaatgaaggtgtagtattcagctcttctatttctactgataaagttctttctccatacattataaaacttagattgttattgttttaaattgggaaggttgaaaatgttgtgatgtacaggaataaggaaaatgaattcttacggtctgtatatcttggtttaaaaaatgtatgccctggagttaagtttcaggtgccattttcccctctcctatgagtctatcccatacaaatgttgtaacatctccccagtttctactggttagatcagtatttgtttttgtttccagaattttctgatttcttgctgatccatgaaataggaacttcttcttaccttctgaaaatattaaaaggagacttacaccc

SEQ ID NO: 497 - DNA, 3620 bp, Homo Sapiens
ttaacatgaggatgtctgggaggactgattcctaagagatccagtggctctgattaggttttttcttcagaggaacataattagggtctaatctcacccaacaggtcagcccctcctgcgccttgagcccctgccacacagattcaggtagccacgacatgagtggaccaaactagttcagggagtaattgccctggaaagctaggtccacaagcagaacccattgggtctgacacactccttgaattggttaaattcaaaggaaaactctgaattctggggaacaaggcctctaagttggcttaagcctctgcagctgcagaacatgaagttctacccttagaaactcccgctgggtatatgcaaaatacttatggtaaatcattcaaatatttagtcaagtggatgttgagttctaattagggataagaagtcaggctggtgggagcaggagaaagcaagaacaaaaaccaaataagccataaatctgcctttttttcgtggtccaggacacacagccctactgcgcaaataagtcacaatcttcctgcacccagctgtcaccagacatcttaactaatcaaaaagaacacgtaagttagctcactgcaaccttgctgttatcagtattgcacacagccctcttcagcacacagcacaaagaccatcctataaaatcctcaggatgcctttgtctccttgcagttagctcctcttttgctgacttgcctgttgcttttttgaaacacatttccctactttgtctaataaatctgccttttaaaaatctgcaaccattttggtaagtattttttaccacccatgcaacatcagccccagatagtcaatacctgtgacagtggcccattataaccacagaggttctaacttaacagtggcctagatggggatcatctgagatgcccaaattagtgtacctgggaactaggatggaaaatgcatgcacaaaaactcaacagccagaatgggagagctactttcagtggtacctagagaggtagcaaaaagggggaagactgcctcacctccttacaggaggccaacaaacaacttagagatactaactgataactctctagtgctttatctctcttaaagaaatcttcagaattgcttacatcccccttggttcttcccccacctccaggtacatccccagcttactccgacctctctgaacttcctggaccagatctgtttcctctgcctgcatgctctagcctaccatcttcctctccttgtctgctactcactcaacagaaggcaacagggtggtctacttctacaactccgtctcctgatgatttcacaacagtctccctggcagcctttcatctggaagaagtggaaaagggggaacctgtaggaacatctctcatgatcacaccatatagggaatgaccagtaacaggtagggaaaccccagtgatggtctttcaaacctggtcaaaggctgagctaggaggcaaagttaaaaaatttcctgactcccataaagatttgcccaagaatttgagctcattgtcaggtcactcgtcatatggcccgtgtcattcagacccttaccagctgttccacatgttggttttggatgctaaagctaaggaatggctggaaaaagcacagtggtcagaccatttagcagagtcaatttccaaaggtccaataggatgacaacaagtccccaaaagttcagaagacaggctcaaagatgccaaggcatgagccactgctctgttaattataattccttcagcattccaaaggtttgtggattggaataaaatccagcaatgccaccagaacccaaaggaattagtttgagattatttttcatgttttgataaaactttgagacaatattatgggatgtcagctgattgccttgagaacaataaaaatggcgcttattaaatgcaaactttcaaaacagaccagatgatgatttagccactcttgtaaaacaccacataacaaattgggccatggtcagaactaaggaactagttaacttagctgaccaattatcctgtgctatgataaaggaaaaaaaaaacaaaagactgccagagttatgcatttatagttaaagcaattaacttctcaaacctgttagcctcagaataatgaaaagccctctcggtctgaggactcttccctcagcctgttactattgtaaaagaccaagacaccttaaacaggactgctttaggtggaagtggaagccacagcaggaggatacaactcaggaagactaggggtgctctgaggaagttaaagggtttcacctctcccagtattctaccttgacaaattgggaaagattaatataatcataacgtgagctctccattgccttacttgacataggagcaactatatctgtcataaatcccacctgctttagaaaccatgttcctcagagtaataaaaggactagcatgatgggtgtgtctaagaaaactatctcatgctttaaatccaaacctataccttaccgttttgtcaggtttagcaccccctcaatcaagggccctaaatacaacagtcagtcagtcccatgtgttcctaatatgctgggtaagtgtctgttttgtggaccagccttctctttgttcagtttccagagtcaagactaggagaaaatactagaaaagtcttttttggtcaaggcatcaagtcacattccctactcatcgtctaaaggtgagcctgccgcattatcacggatgctgtgatgggcaggtgtgttcgtagtcctctgaaaatagtggatttcttacgtgtgaggttccttggctgtgaccaacacatggcaggtgcaccttccatctggctgctctgttttgtgcagtgagacttggaaggagtgtgggggaccaaggagaatgaacatgcacatgaagcccatcctggctgctgtgccacgagaaagctgacctcaggtgatccacctgccttggcctcccgaagtgttgggattacaggtgtgagccacgatgccaggcctgtagagctcctctttagaaactgtgtgcagagggcagggcacagtggctcatgcctgttatcccagcactttgcaaggctgagatgagaggactgcttgaggccagcctgggcaacatagagagaccttaaaaatacaaaaaattagccaggcgtggtggcgggtgcctgtagtcccagctactctggaggctgaggcaggagaatggtgtgaacccgggaggcagagcttgtgagtagctgggattacaggcatgtgccaccacacctggctaatttttgtatttttagtcgagatggggttttaccatgttggccagactggtctcgaactcctgacctcaggtgatctgccaacctcagcctcccaaagtgctgggattacaggcatgagccaccacgcctggctctctttttttgagacaaggtttcactttgttgccaaggctggagtgcaatggagcaatctcggctcactgtaacctctgcctcctgggttcaagtgattctcctgccttagcctcctgagtagctgagacgagaggtgcacaccaccaagctcggctaattttgtatttttagtagagaca

SEQ ID NO: 498 - DNA, 6205 bp, Homo Sapiens
attcttccaaacagaactgatctggcatgaaggagagagaagaggtgtatgagtgaaattcatctgacaagaaaaagaaagcaagagtgccactgggttagggtctccccgaccgagctggtctcggcaagtggcgtccatcgtgggggctcgaatccaagtcaaaggattgctggagcgacggttggaatggaaaactagctggaggacacccgagtactcttaaagcaatccccgtggtgagtaagaaggggagctcagaagcgtcagggtaatgatgggacaggtatggtgtctggtttgtatcaccttggaactttttcacactgataatgaggaggaacaagagtatagcgaagtaacaaaagaggttacagagcatgtttatttaccagctaaagctaaagcggcaaaggaaggagaggttcatccctacccttctgcaccccctccttattattttgaagacaaagaccctccagatctttcttttctggaggacactgggcaaaaagtagttgccccagtgactgttcaagcagccccttgagcgacggctcttagttctattcaggcaggaattcagcaagctagacgagagggtgatttagaggcttggcagttccctgttagaatacaccccccagatcaacagggaaatattatagctacatttgagccttttccttttaaattcgggaaagcacattcagttgattatatcaaggcctgtgatggtatcggaggtaatctgcataaagctactttgttggcacaggcactggcaggactgagagtggataaaggaaatactccatttcctggagcttgttttaactgtgggaagcatggtcatactaaaaaagaatgtagaaaaaatcagcgagtcaggctgccagataggggaaaaaagaaaactgttgagcctgaaatatgtccaaaatgtaaaaaaggaaaacattgggctagtcagtgtcactctaagtttgataaagaaagaaacccaatttcaggaaatgccatgaggggcccatcccgggccctgttctaaaccagggcatttccagctcaggccattccctcacccctgtacaatgtctgttccctgccacagctagtagtgccacagtagatttatgctgcacaaaagctgtgagccttctgcctggggaacccctgcaaaaggtcccaacaggagtctgtggacccttgccagcagggacaataggattacttttaggaaggtctagtgtaagtttaaaaggagtacaaatacatacaggagtcatttatttagattacaatggggaaactcaaattgttgtgtctacttctgttccctggaaagcagagccaggagagtgcatagcacagctcctgattgtgccacatgtgggaatgggaaaaagtgaaattaaacaaacaggaggatttggaagcacaaataaacaaggcaaagcagcttattgggtaaatcaaattactgataaacgtcctacctgtgaaataactattcagggaaagaaatttaaaggtttgatagatacaggagtggacatttcaatcatttctctacagcactggccatccacatggccaattcaacctgctcaatttaacatagttggagttggtaaagctactgaagtatatcaaagtagttatattttgcattgtgaggggcctgatggacaacctgggactattcaaccaattataacttctgtacctataaatttatggggaagagacttattacaacaatggggaacacaagttctaattccagaacaattatatagccctcaaagtcaacatacaatgcatgaaatggggtatgtccctggtatgggactagaaaaaaatttgcaaggtttgaaaaaactgcttcaagcagaaaaacaaagttcccgccaaagattaggaaataatttttgatggtggccattgttaagcctccagaacctatacctttaaaatggttaacagataagccaatttggatagaacaatggccgctaagtaaagagaaactggaggctttagagaaattagttattgaacaattagaaaatgggcacatagctccaacattttccccttggaattctccagttttcataattaagaaaaaatcaggtaaatggagaatgttaactgacttaagagccatcagttcagttatacaaactatgggagcattacagccaggattgccttctcctgctataattccaaaaaattggactttaatagtcatagatttaaaagactgtttctttactatccctttagctgagcaagactgtgaatggtttgcatttacaattcctgcagtaaacatcctgcagcctgctaagcattatcactggaaagtgttgccacagggcatgtcaaacagcccaacaatttgccagacatatgtggggcaagcaactgaacctattcttaaaaaattttcatagtgttacattattcactatatggatgatatactttgtgctgccccaactccagaaatattactccaatgttatgatcacttgcaaaattcgatttctcatgctggtttaattatagctcctgacaaaattcacactactactgcttactcctacttggggaccttagtgaatgacactaccattgtgctacagaaagtaaccatacatagggatcaactaaaaacattaaatgactttcaaaaattactaggggatgttaattggatacgacctgctctaggcattcctacctatgccatgagcaatctgttttctatccttagaggaaatcctagtctcactaaccctcagcaattaacaaaggaggctgaggcagagttacaactgattgagaagcaagtccataaagctcagataaatagaatagatccagagaagactctagatttgctaatttttcaactcagcattcacctactgctgttattgtccaagaacaagacttagtagagtggctttttcttccacatactaattcacagactctaactccttatttagatcaaatcaccatgatagggattggagaactcgaattgttaaattacatggatatgatcctggaaaaattattgtccctctcacgaaggcacaaatacagcaagcttttataaatagtcttacttggcgaacccatttagctgactttgtgggtattctcaataatcattttcctaaaattaagctgtttcagtttttgaaattaactaattggattctccctaaaacaactaaatttaaaccaatttaaggtgctgagaatgtttttacaaatgggtctagtaatggtaaagcttcttattctggctcaaaaagtaaagttttccagacgtcctatacttcagctcaaaaagcggatcttgtagctgtaattgaggtattgactgcttttgatatgcctattaatgtgatttctgattcttcatacatggttcactccacacagctaattgaaaattctcagttatgatttcatacagatgaacaactgatgactttatttacccagttgcaaacagcagttaggagtagaatgcacctttttacatcactcacattggagctcgtatacctgttccaggacctttgactgaagggaatcaaatggctgattgcctagttgctaatgcaatatctaatgctagacactttcacaatttaacccatgttaatgcctctggtctcaaacgcagatacagcattacctggaaagaagctaaagctattatccagcaatgcccaacttgccaaatggtacattcctcatcttttacaggaggagttaatcctcgaggactggaacctaactctctttggcaaatggatgtcacacatgttccctcatttgggagactagcttatgtacatgtatgtgtggacaccttttctcactttgtctgggctacataccaatcaggagagtcttctgcctgtgttaaacgtcatcttttgcagtgttttgcggtgatgggcattccagcttctagtaaaacagataatgccccaggctatactggccaagctctagctacatttttctctatgtggaatagtaaacacattactggtatcccatacaattctcaagaacaagccatagtggaaagaatgaatctctccctaaaacagcagttgcaaaagcagaaaggaagagacagagaatatggaaccccacagatgcaactgaacctagcattattaactttaaattttttgagcctgcccaaaggccagatgttttcagcagctgaacagcatctacagaaaccagctgcaaagacaaaaacagaacaactgatttggtggagagatctgataacaaaaagttgggaaataggtaaaataataacttggggtagaggttatgcttatatttctccaggacaaaatcaacagccaatttggataccatcaagacacctgaaaccttatcatgagccagatgccgaggaagagactccaggaagatcccaaggacaccccagttgcagccatgtcgagactgatgctgaggaggaccccaactgtcacgagcaacacccgtcgaacacagccacccacctgtggacagatcaagaagctgtcacagatggcggaagaaaacctgaggaaagcgggacaaacagtcacaatgaataatttaatcgtagctatgatagcggttatcaccactgccatgagtaatccttcaataaggactggcaataatgcctggatgcaatcactctatgacacagttacacatactttctgatctcagtatttaccataataaatctgctcctatcattgaggcataccaccctcaaaaaactatttgtaaacaggattggacccagttagaaaaaatgaatgtacttgtttaggaagattgctttgcagaacaggcagaggtgctgcacaatgattcctatggaatcattattaattggtcccctaaggggatgtttagcttgatttgcacctctcagtctgcatgccatggtcacactatgttcagatgatctgaacaaaatggtcagatggtagaaatgataagaagtacggcaaaagttcctgttatctgtaaccatgatggtatagtggcacctcaacctcaaatgatatggcccgctctaggagctaaacataaggatttgtggaaactattaaatgcaaactttgggaaagaataaaaaagcatctagaaggacactctacaaacttgtttttggatatagcaaaattaaagaacaaatgtttaaagcatcccagggacacctgaccttaatgccaagaactggagtgcttaaaggagctgcagacaaattagcagctagtaacccattaaaatggataaaaacacttggaagctctgtgatttcaatgatgactatgcttttaatatgtgttgtttttgtatagtctgcagatgcagatcccgactcctgcgagaagtagctcaccatgacaaagctgcccttgcttttatcgatttgcacatcagagaagggggacatgttgggagcaagccccccaaaatctggccataaactggccccaagactggccataaacaaaatctctgcagcactgtaacatgttcgtaatggccctaacacccacgtgcaaagttgtgggtttacgggaatgagggcaagaacacctggcccgcccaaggcagaaaactgcttaaaggcattcttaagccacaaacaatagttgcagtgatctgtgccttaaaggcatgttcctgctgcagttaactagcccaacctattcctttaattcggcccatcccttcgtttcccataagggatacttttagttaatttaatatctatagaaacaatgctaatgactggtttgctgttaataaacacgtgggtaaatctctgttcagggcttacggctctgaaggctgtgagacccctgatttcccacttcacacctctatattttggtgtgtgtgtctgtaattcctctagcaccactgggttaggatctccccagccgagctggtctcagcaaatataggcctggggaaattgggcttgaactagtgaaagcacttgcccaatataaagctggcagattgtagggctatttagcattctctaaggaagtactttccattgataatgagctgcaggctcctgattattgatagatggtacagtaaaagcaaattttttgcaacc

SEQ ID NO: 499 - DNA, 2379 bp, Homo Sapiens
caaccagtcaatgcgggagccttctcagctggacccagggccacacctctgcccaccggctcacacctgggccatgcaaggcggggtggatgcacctgcctggcccttgagcgcgtgggggagccaccgttgcccacttgggaggctcagttctgaggtcgggattccaggcactcccttctcccccattccgaaacctcctgactggaagaactctctcggcacagccttttctttcagggtcccaaagtgcctgtgagcaggcagctcctgatctcctctgtgacacccacagactcaaagacacccatatgctcactcatgcagacaggcgctctcgcctgtggctctgaggctgagccggctttgccttggtgaaggacaaggccctggcgacccagattctctcgtgggtggctggggacagaagggcggtggcgcgctgggctggctggagggctcaggctccggcgcgagtcctgcaaggatgctgcctccaagtgtgcttgtgggtggcggatcccagggcctgccgggagagtgtccactcctcaggaggcctggctgctcagcggcgcccctctgtggcgagactcgcccaggcccatgtccggcccatctcgccccagccaggctcccctgggcagcctcaggacagagaaccctgaattcagagggaggctggaggtgtggggcctctaggcacttgcagggtggagctaccccacacccagggctcaccctcagacctacccaggcgtctccagcctcacgctcccagaggtaaggaaggggcttcaggaaggtgggggctacctccccgcccagtaccgtcaggctctgaattcgtacctgggaactctgccttggctgacttggggaccccttcactgctcagccttcccctctcttcctgccgggcggtccacctaagctccctgactcttcccacgcggccctgggtcccctccccacaggctgttccctgcacccgcgggtgggactggacctttccctgcacgtccagtctgtttcccgcggtcttcctccgtctgaccctggcagcccgctcctctggccccgggctgtgtggggaccgctttcccccaggcccgtcgtcagtgtcctgagctccgccgactcccgcccattggcgtcgcaggcctggtgacaagctgtcgctggcatctagggctcctgggactcaggcacatggagctccctcggggccaaatttgtgtcacgcgcagggacaccggaggcgcgtgcacagtccgtgtaacggctttgcttggcgcgtctccgtttctcttctgaggggctgagagtcgcggagtttcctagttggaggctgtggcggacgcgatttgcttcctcatatagggttccggaggcggcgaaaagtccagcgggtctccgaagccggtagacggagccatgaagaagacgtcgggcttcaggagggggaagggcgggctgccctggggctcggtcagcagccccgggaaggtgggcgcgggcgccgggagtgagagtgcggaccacgcctcctcccagcccaggcgccacgacccggacaaggggttcgacaggctccgcagagctgccggccgacaccggacagagacgatgcggcggatcctttctctgccgaagagtggcgtggatgacagagacgagaagaacaggctgtccaacgaacagagttctggtgactcatggctttcaatagatgatgaactctttgattctggtaccaagactacctttgagaatgttccacagaaatatgatagtcacttaactggagctgatgatggtcaaagaggaaaaattacaataaaggaacaagaaggaccacactctcagtagcaagggtatagctgtgccttcagagaaatctcgaagaagagcccttggatcaccactcaagacataacaggatcaagggaaagcatgattttccctttatttctgagcgtgtctctggccagaggggaaggagaaagagatgaagaaacagaaatcatcattggaagatactactgctaaatgaagagaagagaagtcatgggaatagtccatcaaaaggcggcagaaaggtcagaatcaggacaacagatctagagactacttttgcaaaggaagagggattgtgagtggaggaggagggaggaaagaaagaagttggctagttaattttggagttgataatagggaaacttgagagctgtcacttctagtgactgcaatatattggcactcaaacagaagattaggtgattgctgttccaggaattactggaaggagggagtgctagaatgggggtaaaccacaggaactaatttcttctctctgtaactatcagacatcaaaga

SEQ ID NO: 500 - DNA, 719 bp, Homo Sapiens
taaggcgggcctgatggtcagagggaggaggaggatgggcagagggaggagagtctgatgccagagggaagaggttgatggtcaaagggcgcacagtgatgatcagagggaggaggatgatggccagagggggaagggtctgataattcgagggaggggtctcgaggctccatgtgaagtaggtctgatgaccagcgctcaaagttcataagtcagtctaataacctaaagaactatggacagtagaaagaatacagcgacatacaagagggctattacatactggacattataatctgtgcttcaagatattgttgccaattattacagcaaattgctaaagtgagtattattatgacttctattacccacatgaagaaacacaagctcacagagactaggaaacaggctcaaagtcactcagctagtaagtgatagggaatttaactcccatctctttctagtaacttaggtttattttatataatagatgggaggtatgcttgttaaaataagtcatttcaagatcatatcacaggtttgtaggccacttcttctttccttgactatatttggttctctttccagtgtgatttttaactggatcctcagtacccgaaattctttacatttccacgtcaccactgctgcccctccacaccacgccaccaccacctctgatcattctggccatgctacagtcctcgctcagaaacacg

SEQ ID NO: 501 - DNA, 1644 bp, Homo Sapiens
gatggattagaggaagagaaaggcagaagtagagagaactatttaggaggtgagggcagttgtttaggcaagaagtagtggaggtttggactacagcagtgttgtggtgggagtggagagaaatttaagagcagtgtcaaaacttaaaggcactgttttgtttttttctttttaaatctaggtcattttataatttctgggccagagaatgggcagtaaggggaagaaaacctaagagaaaatatctaaatgtagacatggcttttacttactaaatttgtgaaggcattcatctataatacagttccaatttttttgaatttccttttctaaggatgcctattttttcctttgaaaatgaattatataacatagacaataattaaaaggccccagggtcaaaagctcttcccacaaataactgtccacacactattagttcatttcctatacactctcctggcaaggcccaacaaaagctaaaagaagatggatggactttgtagggtgacctgagggtcaactgattcagggagctgaactcatcaatacagacagcaaattccatcacagaattccatccactattagtagcatgtattaggttggtaaaaaagtaactgtggcttttgccattacttttaatggcaaaaatctataattacttttgcaccaaccaatacaaacctttcctgttgcaagcatccaactgtgcctcgaaaagtcaagtatagcatatttctcacaaagctgccccaaagtcaaggcccagccctttcttgccacagtggttttacaaatagcacatttagaacacaaatacctaatgcatgtggggcttcaaacctaaatgataggttgatgggtgcagcaaaccatcatggcacatgtatacctatgtaacaaacctgcatattctacacatgtatcccagaacttaaagtacaataaatctaaaaaaaaaaggaatataaaactgcatatgctttattaacaaaactattatggtggattaaatggtaccctttcaaaagatatgtctgcctctaaatgtgaccttatttggaaaaaggatctttgcagatgtaattacgaatcttaagatgagctcattctgggctagggtaggcctaaatccattgataggtccttataagagaagggaagggaaacagaatacacagggagaatggcatgtgatgatgcaggcagagacggaagtgatgcatccacaagccaagaacaccaaggattgccagcagccactggaggctcggagagaggcacagaacagtctccctcagagcctccagagggaaccaaccctaatgacaccttgattttggacttctagcctccacaaaaacagactagaaggaaatcacagactagtgctaagtgtactggtgattggcttataaagttgtgcttgttttttgcgtaaatcgctggactttgctgcattttccaaattgtctaaactgcatatttatcatccaacaatttgatcaaaattattttagaataagaagtacacctgccttaaaaatgtttttatcaaggagatacagaggactactagagggtagagaagaaaaaggagggcaaaggctgaaaaactacctattggatactatgcccact

SEQ ID NO: 502 - DNA, 2941 bp, Homo Sapiens
gtggggctgcgctgcgggaaaggtgctgacgaggcgggcgcgcgagctcggcggggaggggtgcggccggtcggcggctggccggtccccgacttcccggcaccctgggcgaccgctccctcgtgcgagcgggaccacgcctggaccggggcccgcaggttttacagggcagcgggggggatttggggcacgtggggtcgggccgcaccccgacctcgagacggcgcggcgctgcgagcaaagagccgtcgcgcccggagccaggccccgccctacctgggatcccgtcgccctcccgtccccgggcctacacccgccccacctgggatccagtagccctcccgcccccgggcctacacccgccccggtcagctccggccaggtcggggaggaggagggcacgcgccgggaggaccgcgactggccgcctggagcccgtggctcaggctttcccagccgctgttttcccctttgtacatcgggatccgcttcgcacacttagtttctgcctagcacatgctgggtgttgtgtccagatacactaattctttttccccttcttccccgccagtcactagagccggtctggaagggcactaacgcctgggtagtccttcaaacaaaaagcgttgtgtgtcttgcttactggccgttaatagaagtttccccttgagagtggctttggttaggaaaaaggtggcaaagggcccatccctgaactgattagttgagcctgggacctgatcagaattgaggggaggagtgttaccagaattttctctgtgccccgcacttgcataagtgcttatggctaggagccctgtgtagggcacacattaccttggggcgcccttcgcttctttctcctcttgctgccccttcccggaatctctcacctcatgacgtgactatggtcaagtcatcgtttctgggatggcctgacccctggggacacgccagcctccaggagcttatatgaggctggtttaccagagtagacagtgtaaggccctgtcctggaaggaggaacatgaatatgtcctgaagtgcttgtgtcatgtgtcaggggttgtgctaggcttttcacatgagtgatctcatttgattcccacagcggtcctgtgagctagggggaatcatcatccctctatgtagttgaggaaactggttccgccggtttaagcaacttacctcacatttcacagtagggaggtgatggttgtagggctttggcaagaaagtgtcagtacctggtcaggcccctagggtgtgagacgctcagggccatcctggagggtatgggtgaaagcatgtaacaccgtgggtttccccccctctgtcaccccattctcttggccaccgctaccatttatatcaaggcaaaaccaggttaggtggcagatggatagtgttcgaggcagaagaagccccagagggcaaagacagggcaattccttctacccctcaccccacacacactttgctttggtcatggatgggttaatggaaggactcctgtgtatcagacttgggtcttttttagcaccatctggcagaagtcacctctcctcacacttgctgcttctacaaaacattgttcacttggcagtcagcagtgcaaaaggcagaagtgtggtgcgtgtgtgatttggattcagtggaccccagagacaattgtgttgtttgcattatgttgcgattgacagcccatagacactgctgtgttgtatgtggaaccacaaaagacgagaaaggcaacaaaagcagacgttccctctccttttaaaattatcttgtcgctgggcacggtgtctcatgcctgtaatcccagcactttgggaggccgaggcagacggatcacgaggtcaagatcgagaccatcctggcaaacataatgaaaccccgtctctactgaaaatacaaaaatcagctggacgtggtggcgcgtgcctgtagtcccagctattcaggaggctgaggcaggagaatcgcttgaaccagggaggcggagattacagtgagccgagattgcgccactgcactgcagcctggcaacagagcgagactctgtctccaaaaaaaaaaaaacaacttgcctgcaggattggatagagaaattcccaggagaaagcaaacaaataagggtgcaggcatttgtccttcaaaacaggcgggcagatcacaaggtcaggagccaagaccacgccattgccctccatcttgggcgagtgagactccgtctcaaataaaacaaacaaaaaatccccagggctttgtaggtagacgctttttggctttgaacaaggcaggtagcttcagtgtttcagatcaaggagtggatgtaggttgaagtgggcaaatcacttgaggtcagaagtttgagaccagcgtggccaacatggtgaaaccctgtctttactaagaataaaaacattagctgggtgtggtggcacacacttgtaatcccaactactccggaggctgaggtgggaggatggaggattgctcgaaccggaaggcgggggttgcagtgagccaagatcgcaccactgcactccagcctgagcaacagagcaggactccatctcagaaaaaaaaaaacaaaaacgagtggttgagcctgattgacccagggacacgttttgtttgtttgtttgttttttgttttgttttgttttgttttagatcaaggaccctctctgttgcccaggctaagtgcagtcgcacaattatagctcagttaacctcaaactcctggggtcaagccaccatcccacctcagcgtcctgagtagctaggaccacaacaagcacatgccacggcgcccggctaatttttaaaattttctgtagagatggggtctcgatacgctacccagcctggtctggaattcttggccttgagtgatcctctcgcctcagcctcccaaagcactaggatt

SEQ ID NO: 503 - DNA, 1167 bp, Homo Sapiens
gaatattctggtgttcctatagatcaggttttgctgatttgggaaaataaagactatggatcaactaggaatactgttcatattaatgagaaaatgcttctgttagaaccttgttgaaggcacaattttgagttgatccagttcttgaactctgtagactctgataattctgaatctgttgttttgtcttttgctgatattttgtgtgtggcaaatgtcgaggaagccagttttctcagatttcaaaatagtatatggaaaaatgaagagaaaatgcaatgtgtccatcctttgcaactagtttgggatccagtgtcatctgctctaaaacacaacaaaccagtgaaaaatgatctgcttgtaaatgaagctgcaattaaaaaaaaaataggtgcccttgaagatgagctaacttttcttcactctcagattcctgcaattttggaaatgcaggaactgaaaaacagtacaaattctagttcctttggcttgaatgatgggcccattagtttgggacaaatgccatcatcacgggctgttcagctgagtggggagtcacacatatatatttgttctttactacatttatactctgttcctttgtagagtgtataataagccttaacataataaaaatcagtttccaagttcaatgctttcttctcctcctccactaccacttcctcctcagttttcttctctctagcttccatgttttcttcccatacaactaggatctaataatatttgtgactcagataatccagctactgaaatgaacaaacagcacccaggtgctagtatagtcatcatccaaaaagccacagaaataaagatgttctaaacatgttggatgttctagaggacataaataaagtgaagctctgtgcaattgaacagtcacctggtggcagatccattcataagaggaaaataaaaaattcatattgggatccgatgtctttaacgtctcatgcacttaagcagaaatttgcatttcaaaaagatgattcatttgagaaagaaaatagatcttaggagccttctccattttcttgtccagaaacttcaacatttggacatcacatttctcagtcagaaggacagtgaactaaggaagaactgataagcacaaaggctgttgaccaaggtatcagcaacaaaagc

SEQ ID NO: 504 - DNA, 1340 bp, Homo Sapiens
agtcctgcttccaccccaaccagctaggtgctcatgaaagtgttctttgggcctcagttcccccatctgtaaaagaaggatgggtatgttagattttaaggtgggttctctgtgatttatttatttatttatttatttatttatttatttatttattttgagacggagtttcgctcttgttgcccaggctagagtacaatggcgaggtctcagctcactgcaacctccacctcccaggttcaagcaattctcctgcctcagcctcccaagtagctgggattacaggcacgtgccaccacactcaggtaatttttgtattttcagtacagacggggtttcaccatgttggccaggctggtctcaaactcttgacctcatgtgatccgcctgcctcggcctcccaaagtgctgggattataggtgtgagccaccgcgcctggccttctctgtaattcttgagttgtctttgttaattagcaggagagggaggcaggaacggagggaggagagacagattttaacagctgttctgcgtgagcccattttggcccccagattccctccatcccctagtctgttctcctttatggagttcactcccctctaatcccgtttctacctaggctaacccacccaggagagctttgaaatttcagtggagtcaaccacaattctacagcctttgaggaaaaggcctaataatgacgatagcctacagatgcaaagctcctcctgggagcacaaggtcttgcacctcttcgtgtcccttgaggtcccattcacagggaccggctgcaggcccaggagtgatttgcccgagggactgggctgggagtcaaaccaacatgtgtggactccagaacttttgactcttcagctagctttgtctttggcaccttccatctgtgtcctgggccacatcttcctggcttcagttgtttctttctctatctggcactcagggctcccaagctgaaggtcctgatgcttcagcatgagccaaagcattcccacctgagagagaccaggaaggaaggacaaaacgaggacccatggaggacaccaggcagtgtggcccctgcacccaccccactagctggacaggctactcagcattggtgacccctgcctgcctccaggtccctttccattcttggtgaccccaggcagagcccccaaagccagtatgctcgccaaagccccatgcagttggctagagcccaagccctccttttctgcagcgactccaccgggctgggctggggctcgagcttggccactttcctgggccgctgctgtatcgattattttggctccctttttgctggggatatcaattt

SEQ ID NO: 505 - DNA, 3337 bp, Homo Sapiens
agagcgagctacgctgcaggagcgcagttaccagccggctgcgatcacgtgcctgggaggaggagctgagacctcaggggaggggcgcgcggtagcgtcccgggtcccctagcagggctctagagaccacgtgaagtctcctcgacagctgctttgcctcaggcataaatcagaagaggaaaaccagcttctggacctggagagaggatgaaagggaataggaattgagggaagcggaagggaagaataagggacccctggagagtccctaccaagccagacataacaaacaaaagtcctctactactgaggaagacagaacagggaagccagcaggggaagaaaaagatgctgctgctcttgatgcctcaaaaacagcaaggaagaacccaagcaactgatgtacacacccttggaacaaatctgccccagaagtacaagacacactcttcgaattcatggaataaatgggaggagctggtgtagtgaaggatgaagagaaggcaatgcattggtttagacaagcctcccagcaggaccatcctggtgctgcctttaaccttgcagtaggaacactgaaaaacatgactgcctccatggaagcaggggatgtagaaatgctccttaatgttgctgcaaaatgggggatccaagaagcccaagaacttctggagaatgttatttggactaaaagcaagctcttgccaactgaaagaaccaggagttcttataaaccataatgtgtgcctgcatgctcttcctggaacatgggatgttctgctctcacttgtccactgtggccttgcaatgctttgtggcattttcaatggaagctccttttacttatagtctcatatgctgctgcagcattaatttgctggttaaaatcctttaaatgaagtgttacttatatgttttcctgggatctgagtttgatctcttctggatagaggaatattttatttgggtttcattactgctcacttcagctaaagtttcattcaagccagtgagcattctataacgtggtaagtggaaaataacgaagaaacctgtcataccagagattggcttcttggatgtgttagctggcactcacagatccactgaaagagctagactcatcattagcctaatctatgacatgtgatgttctgcctaaaataagcctgttttcatttctctccatttcaattttctgctctattaggtttctatagtattttattacactcactttttgtattatagaaagtcctttataggggtaaaaaggctgttattgttgtcaattaaagggaaaaggataaagtataagacctaacaattattgaccatctgccacatgcaagatattttcttagctgtttaacatatatatatatatttgagactgagtttcgctcttgttgctcaggctggagtacaatggcatgatctctactcactgcaacctcagcctctcaggttcaggatgttatcctgcctcagcctcctgagtagctgggattacatgcgtgcaccatcacatccggctagttttttcatttttagtagagacggggtttcaccatgttggtcaggctggtcttgaacttctgacctcaggtgatctacctgccctgccctcccaaaatgctgggattacaggagtgagccaccacgtctggcctgcttaacaaatattttaacattcactagttataaaagtcttataaggtggatcttataactcctattttacagagtgaaaacaggtgtagagaagttgtgatatgtgcaaagtcacagagtgagtgatagagtggggtttttagtgctggcagtctgattctagagtcaacattcttaaccagttctaccaacattactctcccaagtcattaacatctctttcctaacaacaaagatgttctaagaacagataactgggtttattactggcatatggtgaacacttatcttagcaaataactcagccccattttctgactatgatttttttaaggacaaaccacgtagtcctattcttcaaaagtgatgtttttaaccttaattataattagctgtatttatctcatttagattatagcgcaattttctccttggaatatacatacagaaacacaaattgagggtgacaaaagtgtcaaactggaattcaatatgatgattaagctgtgtttaaaatatttgtttcccttttgattgccttgtttacactgtatacatatggaatatgactgtaagccttcagcaatcttctctttgtccaacgtgaacacataaacctttaaagatgtacatgaaatggtcacatgcaattttaaattctttaatgtagaaaatcccaaattcataaactaaattcttcacgtgaacctttggtaatagtatttttatcttctctagaagcactttatttttcttacatttttcccagagaaaccagtcttcatttcagtttatgttgttcaagatacaactctggaaattttattctgtgccacaaacacttataaaatactaggacaataatttcaatcatcgtgttagtgtgcatttttttaaccttcacagtaatatcctcttaactgtcttgtaatttaaatgcttgtttacagtaacaacccaaacttacaagtatgaaaatataccataggaatatgatcactaaatagtgtttttttattttaaaaaattcctttaggtgtcttctataaacatctccaactaacattgatttaggttgttttagggttctaatgtcttctaacagttctttgttgttgaaataaagtaatagagtagttgaaaaagcataacaacaattagaaagactttgtaaagcctcacatataaaaccccttcacttttaacttcggtaatacttgggtttaagatcgggaataacctaccagtccatcagggttgaaaaataatgcttcatgcaaaaccagaaaatgtgatggatgaggattcccctgaatccaaagctctgcttctacttcctttgctgtatctgggcaaaaattcaggggaaaagcaagacataagaaagaaattggatcataaagagagtgagagcatgagagaatgagaatggatttgcatgtgtttggccggttcagataccccaggttctgcttgctttcttccttccctgtgctccttctgggccacagaggttgagaacctctgcactcttttagatgccccaggtttcctatttagccatttgatgtcttgatcctttttctcaaggtctgccttaatgttaatataaaaatattttacattaaatatgacatatatttacagtacacatatcttaaat

SEQ ID NO: 506 - DNA, 3090 bp, Homo Sapiens
gattctgattcagtaggcctttgccagggcagaggtatgtaggtgatgctcacgctcagctaggtttgggagcaaccagactagaacccattcacatacagactcttagtaaatgttttctgctctcatcttgcaaagtgaaagtgcccagcacaggcaatggtgttagtacgttgtagtcattcacaaactagggctgcccagaagagagacaggctgggactttcgagagagaaacagctgtttcatttgaatgcctggtgtgggaagaagaaggacagcctagcttcatggaaccttcttgcaccaaacaaagcctccagatccctccacagtgctccattcaatccctgtccattggtggtggaccaaagaagaaaccaatttgccttggccacatgtctttgagaaaaaaagccactctcccttctgggactcagagcatctgtacctgtaatataagaggggaatgtggaaaattctaactggatgatcacttttctgtggagggaaaaacacattttttgttttaaggggctagccagcatcaaacctttttttgagatggagtctcgctctgtcacccaggctagagtgcaatggcactatctccgatcacttgaacccaggaggaggaggtttcagtcagtagagattgaactactatactctagcctggatgacaaagtaagaccttgtcaaaaaaaaaaaaaaaaaaaaaaaaaaaaaaagaaggataatcaagacaatgagctaacacagaagccatagtggactttcttcaatattttaagaaaggtgaaaaatagcaggaatttaacctctcaaaaatgctattcccattatctattcttcctcagctacaaagcccctgatttcacctaggcacatggctgcccaaaaaagacaaccctgtctggccccccttaaacctgattgtagctatctaagttgtagccaatgaggtgtcagaggaagtaccatgcagtgcaacttcttaagtagcctagaaagatggggtcacatccccctgggttgtttccttctttgtgtcattttgatctctctcgctggaaaacagaaatgatgtctggagtgtaagcagccatcttgggctaggagactacatgctgacatggtgacacaccacccagaaagaatctgagtagtcgatgatcacagagctaccatatcagcactagactctctacctccacattttatttgtgtgacatagaaataaagtttaagctttgttttttctggggtgtatgtgtgtacacatgtgcgtctctgtctgtctcacatgcagtgagacctaattctaactgatatgccggtaggatggggggaccttgccacaaggtataattgtggtgggatggctgtgtcttgctcccattcaggatccatggaaagctcctcctccttcctgttcccctggatgccaagcgatgggcctgagaccctggctttgccatgtggatgctccccctcaggactttggatgtgcagtgattgctacaaaaagggcaatgaagatgcctggaccacagccacacagtctccatcacagcagtggtattctgtggaatgagtactaattttctggccacattttctgttaaaaactggttgttgagctgcccacttgtcttggtcaagggatgctggagtggcctgggaaggcagtgttgtttgcttttcttaggatggaacacacttaggcatatttttggtcaaagcaaaagaagaattcaaaggtgagagaagttgaagataaaaaggggaaaatgagggtagcagatgaagcaaagtcacacagaaagctggcaggcgagtagtagaatcagagtacaggctgagcatcccaaatctgaaaatccaaaatcggaagtgctccaaaacctgaaacttttggagcaccaacacaatgctcaaagtaaatgctcagtgaagcattttggatttcatattttcagatttgggtttgcccaaccggtgtaatacaaatattccaaaatcaaaaaaaaaaaaaaaaaaaaatctaaagtctgaaacactcctggtcccaagcattttgaatacaggatactcaacctgtatgacactttcctattggaccctctttcctaccccaaataatacttaataagtttttgtttcaaaagtgccactctgagcatctttggctataaggagcagagtcacattctagctcccctggcacctgcttcacaggagcccatgtgagaagaccaggttctggtcaggacaggcatacctgagagctgttggggtctgtgatctgctgaaaaatgacttctcaatgttcttcacatcctaatcctcagaaactgtgaatatattactttatatgacaacagggattttaaagatgtgattaagtaaatagtttggagatggacagattatcctggattatccagatgggcccaatgtaaacacaagggccctcatgagagggaggcaagagggtcagagaagatgctgtgacagcagaagcagaggacagagagtcgcagagagatttgaagatactacacagctggctttgaaaatgcaggaaagggccatatctgttgcttcacaccactaagtttgtgataatttgttacagcagcagtgggaaactaatagagcatctttcctttttttctagttaaaggactcacttgtacgtgtacacatttctcaggagtcctgtcaaccactgggaagaaagaggctggacttctgcattgaacccaggaacggggtttcacagcaatggaaacctggggttaaatatcaatggaaccttacatgacttgaagaatctttaatacaagctaggttttgaccccaaattagacatttggcagcctctcattacagtctatcttgcaaacctcagtgtggcaaggaatcagattcacccacactccctagtctaaaggattgtcctctgatccttccaggtggattaagccctttctaatctgtcatggacagagcaatgtacctgcctttgtttgttttccttaattctttcaagtgcctttgggtaataaatggttgcgtactcag

SEQ ID NO: 507 - DNA, 2132 bp, Homo Sapiens
actaaccagctgcatgaccttaaaaaagatatatcactggggctttatttttcttacctttaaaatgaaaaagttagactacatttggcgtagtccaaaagtatgtttttttaaaaaagcaacaaaatcctttcttcaaacaaaattgtataaggaacatcaatatgggggaaaaatgaagaaaagcttttctgattaacatgcgggagggggcagaataactttttcaccttcaagaatccctaatgaatgctgggagcaatagagctcctggcatgcacaactggaaaatctttggcctggatgatctttgaagtcttttctatttggtccaaccagtctcctccaggaaatttctaaatgacatgaattcattggataagtgataatatcagatatagaaatatgactaaatgtgctattatgaatgaggattgttatatacatataacctgctccgagaaaggactttttgaaagagaaaggttaagagatcagagtaacttttgagctaatgaggacactaggtgacatcaagcccaaacactttctgaacaagtggctggtcctgagaggtgatcgaggtcacacaactataagatataagcaggaactgaaaaatcacatctccagactcatcacttggactagctatgtctcatgattttcacatatattatacagaagaagaggaaatgctcaaagatgatgcttagctcaacttatttcctttttgcaataaataatattccatcatctggatgtaccacagtttatttatccattcactactgaagatcgtcttgcttccaagttttgacagttaccagtaaagctgctgtaaacatctatgtgcaggtttttgtgtagatataagtgttcagttcatttgggtaaataccaaggagcacaactgctggattatatgagacaggatctccctatattgtctaggctggtatagaactgggctcaagtgatccacctacctcgacctcagaaagtggcttttaaattttgaggcaactcaaatatggatgatgattgttttctcaaatttgctagcatctttttataagatacctgcttgggcataactatttgtattcaactggtaacagactaacttcacttttgatcctatcggagtagacagtctggaatgtggtgatactctgtagctatcaaatctgcagggcttggccatggacttgcatatcattgctgagagaagtctcaacagcagcttaagtactattgaagacctcaagatgacaaattttctccatcacttctaaggctgaattgtcatatccaatgtgctttatgactatgctttgagagatggtgatagaagacaaatacatcgcatcatcatccactcagtgagaaatggcttttgcagatttgtgctgatggatctaaggtgtgcacctctggaggctttgaggtggctatacttcagttgtggataaagaggtgaagaaggacatctatggtgatgctcagtaatatctgcgaagaactgtggagacagacaaatagtcaaaggagaatacagatgactttcagaagaagtgtgaacatcaagctgaggagcttttttgaagagcaggatctttctatcaacatgggatagtggaagattaaagtagtgatgactacatatagaaatacaaagttgaagtgagagacgcaagtctgatactgcaaaagaaaaatgtaagaaacttaggactcaactttatcaatgagttcgttcaactatagaaatgcactagggactgaatggtgtccccccaaaatttatatgtcaaagctctaatcctcaatatgatgatctccagagatggaactttggggtggtaattgggtttagatgaggttatgaggatggggtcctcatgaagggattagtgcccttataaggagaggccagagtgctcacttgttcgcatatgctcttgtattctctctctctcctcaacccccaccatgtgaggacacaacaagaagatggttgtctacaagccaggaagagaaccttcacaaggaaccaaatcagcgggcaccgtgatcacgagactcccagcctccagaactgtgagaaataaatgtctgctgttgaagcc

SEQ ID NO: 508 - DNA, 2607 bp, Homo Sapiens
aatacccagctagttgcaaaaccttcttttattgctgcaataggaccttttcatgtgtctaaagcataatttattcagtgagtaccctgctgttggccatggaagatagtagtctttttcactattgcaaacaatgtttcaataaataacaaaatttttttcacacctaaaacagcaggtattttatatagcatttataattgtaaataagatcactattttcttctctctttctctctttttcctccttctctcactaattattgctgatattaaaagattaattcttgtagtctgcctgtgaatagccactgcactccagcctgggcaacatagcaagctatgcctctgtttaaaaacaaaactaaaaactactcataatcttactcaaaatgactagtttacattttggtctttatttgcatatatacctacatttttagaataagattctactttacacagtattcctgttgtgaattctgtcattgccaaccttcttgaagattcttactagtttccattttcttccactgattctcttgagttttctagatctatattcttatcatctgataacgaggatgatcttgcctctttcttttaagtagtcttactttttatttctttttcttgtttaactgcactggctgacccgaaatgaggctaaatgatactgaggacagttggtatcagtgtctcacttctttctagagtggaaatggttctttgtgtggtttatttttgcctgatggtgactgttggtttgtaattgatcttaactgaggagtaacaaacatggtaaaacatttaacacagaatctttcaaataataaatacacaacaaatgtttttgttattattatatttttgtcatggtaaagaggtatactttaatttcctgtcattaagatttatttttaaattgagaatggatgttgaattttgactcctgcctttcttaaggggatatctatttaaataattacttatatttttctttaaactgttaatagaatgatatattagcattgatatagttgtctttcttggactgcaaaaccaattttgtcaaaagtttgttacccttttgaaataatgctaggttttattttctagtattttattagagtatgtgcatctattttcatgagttaaactgtcctctatcatgatttttcagagatagctttgttaagatttgaaatcaaggttatgctagctttgcaaaatgaattggaagttttctttttccatcctccatctcccttaccaccccttccccagtatgttctgttccaagaaattttgaaggagcttacatgtgaaattgccctggaaaagaatcttttaaaatataaatatacatacaaatatatatatatgtatatatatatacacacacacacaatattttccatttattctataattagtacaacttttagactttcttctcagtttgaattaattttggcaattgtactttcaaagaaaatcattctgattccattgagtttattggcatagagctgcaaacagcctctgattctgaaatagctcttctggatcagtgattatataccttttttgttttgtatcactgagtgcttgtgctctctctcttatttctgactgaagttgctaaaaatttaattagttgatagaaccagttagtgtacaaattagtgttggattactaattattttaatttattatttccttttaaatataaaagaacttgcagctgtaagttcttctctaacagtaggtataactgaatcctagatgtgttcatatgtaatatttttgttactggtgtgttctaaatatctgtggtggttgttttgaattatgcttttgcccaaaggttactcggtgaagactgtttcttaaatttcaattggattggctctttgttcatattttgttattaaagtctaattttattgcattttaggtagattttgtgacctaaattatacccaattttggaaatttgtagtttttgtgtgtgtatgcatggcatatgtacaactaatttttgtaactattatatgggcacttaagagtatcttcacaatgtataattaatatatcatgattaggagaaagtgtgtttatgatgttattcaaatattttctttctttttttttttttttgagatggaatctcactctgttgcccaggctggagtgcagtggcgcaatctcggctcaccacaacctccgcctcctgggttcatgccattctcctgcctcagcctcccaagtagctgggactacaggcgcccgccaccacacctggctaagtttttgtgtttttagtagagacggggtttcaccgtgttagccaggatggtctggatctcctgacctcgtgatatgcctgcctcggcctcctaaagtgctgggattacaggcgtgaaccactgtgccgggcctcaaatattttctctctctatatatttatttttgttctcttgattaaagttgttaggaatgtgttaatttcttccactgtgattgtgttttgtattttcttgcattatgccatggaaattgctggtttcctaggtcaaaacaattaaatattgtcagttaca

SEQ ID NO: 509 - DNA, 1272 bp, Homo Sapiens
gtttggggcagtgccaaggctcccaccagccctggagcacttcacatccgctgtcccatcccaaaaccttggtgggcagagaaatagaggcgaaaaatgactcttggagaagttaagtcacttgatctggaccacatagcaagtacagaattggggtcagagttccaaaggcaccttgcacacagccctaggaggaggtgacctcctgtggtcatctgacgctgacccttggtgatggctcactggttcccaaccacttccaaccttcctgctgtcctcactgctctagtctggtggggcagtttccgggttagctggctgcctcctctactaactcccagccactgacttcccatcagaggaccttctctgagttgagactgtgtggaaaaggctaacattccctccaaaatgtgtgctccctcttccataggccagagtgagccctgtgaagtagctgcatttcccagccctctgcagtatagagagatgggggcatgtcattattcttgccaatgattctgcctgggtgcacagactcaattcctgggggacagtggagccacgggatgtaaagggcctgcacccctgaatgccagaatggaggtgcactgcccccaaccagggacatggactgttaggtgagcaaaaaataaattttgattaggataagccactaaaatgctcacctgttacagcagatagcattgccctaacccagtagtgaggtgccaacaatgggacacattccgtgatgttccccattcaatcctttgatccccgcaacagccccacaaggtatatattagtactgtcatcctcattttcaggtaaggctcagggagattaagggatgcacccaaggtcaaacacaaccagtaggcagtaggccaggattgaatctggatgtctgactccagagacttctggaggttcagttaccagcacacggtggagatcttcctccaccaccaccacctagagagaatgagcaggaaacctcagaagaaatggcacccaaaagagccagaagtgtcgcctcagccagctaaggttggaaccacttaccaacgcccagaatcacgtctttccaatcaaacccaatgactgttcatctctgggtttcagtttcctggtttgtaaactcccatgagtaaacaatctctgattatcccgaccacagagagggttcaatcaggtgtgctggtggtcttcaatcaaacatggatttacctcccctattctattcttcaaagagggtgacaaatctgc

SEQ ID NO: 510 - DNA, 2488 bp, Homo Sapiens
aagtcaggaaacaacaggtgctggagaggatgtggagaaataggaacacttttacactgttggtgggactgtaaactagttcagtcattgtggaagtcagtgtggcgattcctcagggatctagaactagaaataccatttgacccagccatcccattactgggtatatacccaaaggactataaatcatgctgctataaagacacatgcacacgtatgtttactgcggcattattcacaatagcaaagacttggaaccaaccgaaatgtccaacaatgatagactggattaagaaaatgtggcacatatacaccatggaatattatgcagccataaaaaatgatgagttcatgtccttcatagggacatggatgaaattggaaatcatcattctcagtaaactcttgcaagaacaaaaaaccaaacaccgcatattctcactcataggtgggagttgaacaatgagaacacatggacacaggaaggggaacatcacactctggggactgttgtggggtgggggtagtggggagggatagcactgggagatacacctaatgctagatgacgagttaatgggtgcagcgcaccagcatggcacatgtatacatatgtaactaacctgcacattgtgcacatgtaccctcaaacttaaagtataataaaaaaaaagaaaagtcatacttaaaaaaaaaaaaagaactgcttctattgggtgaaaacagtgatttttctgagattctaaggcattacagtttttcctgccactgagcagtttaatactagataattgcattttggtatgcaatcattggcctaaatatagtataactatagggaaaaaaagcccctttatctttgctattatttacttatttatttatttattgtagaatatttggagttttttttatcttattggatgtggctctcatccttgctaacctaattttcactgatagcaaagtttatattcctttggattatcattctattttttctagctattgccttattttttctcatgaatggtcttcttcgagtatttgtagaagggtaagtttgattattttcataatgcataaagctattttgtacttttataagaagcactttgtgagactgaggcaggaggatcaggaggtcaggagttcaagaccactgcacccagcctaaatcattgtcttataaagatacatgcatgcatgcatagacatggaatcaatctaaatgccatcaatgatagattggataatgaaaatgtggtacatagagagaatgggacatctggcttccgagcagaaacctttgtagtgccagcgatgaaagagataattaaatacgggtgatgttgagaaaggcaagaagatttttgttcagaagtgtgcccagtgccacaccgtggaaagggaggcaagcacaagactgggcctaatctccatggtctcttcaggcaggagacaggtcaggccattggattctcttacacagatgccaataagaacaaaggcatcacctggggggaggatacactgatggagtatgtggagaatcccaagaagtacatccctggaacaaaaatgatctttgccggcattaagaaggcagaaaggcagacttgatagcttatctcaaaaaagctattagtgggtaacaattttccactgccttatttattaaaaaacagaaatgtctcctgacttttttgtgtgtaccataatttaatagatctcatacaccagacttcagatcatgaatgactgagagcatattttgttggacagtcctgatttaaaactaagactggcttgtgattaaatgaataagtttggtagtttggtttttgaattttaataagtaattttaattcagtaaatgctatcactgtttaccccttctaaagatatgattagactttgttaataatgttcaacttttcacaaagatggtgagtgccatcttaaaacttattggagagtggttttatatttagatttatataactggttatgtgaatatatttaaatactggggaaattccttcactgtctcaaaaccatgcaagattcacatatattttgtgtttatttgcttcttaaaggccagggttgaagataaggtagcaatgtttactttatatttttggccttaactatgccaatctaattagaattccctgtatttaaaatggttccttttacttattgaatggtattttagtgtggtttatgtgtaatatcaaataaagattatttaacacttaaaaaaataaaaaaataaaatgtggtacataaacaccatggaaaactatgcagccataaaaaggaacgagattacatcctttgcagggacatggatggagctggaagctgtcatcctcagcaaactaacacaggaacagaaaaccaaacactgcatgttctcacttgtatgtgggagttgacgatgagaacacatggccacatggtggggaacaacacacactgg

SEQ ID NO: 511 - DNA, 1112 bp, Homo Sapiens
cctgcgtctgttctctcccaaagaagctggtccttagcctgtgttaaggagcaatctttcggtggccagatggagccggggcatccttcttcaaataatggcttttaattcgcagactagaatgtttcggattacaaaagaaaccggttctcttcacatccttatccttgtgatgcagcattccgcttgcatttggaagccgtttaatatcagagagaagccatatttatgaaagtaaagaggctgctcagatgactgcaaaccagccttccttactggttttatcactggtaatgttataaagacagttgtccagtttcatgaatcttgtaggttttttttttttgatgttgtttttttttcaaaaatccgtattgtagaaaaatatgctgtcccagaagagatgattggacactctcaagcgtggtgctggactttgtcatctcttgcacagccatctccacaccttagtgcttacctcatgttagttttttatattctgcaaagacgaaaccaaaataatccaaatttgacacaaatacctgggctacatcttatttgagatgtttaacaaatgtctggatcatcttttcttatatattacgcaggaaacactgtgaagtaagcaaagttggaatgcccaagtgaaagaccatttgaatatttacaagtagatttcagacaggaatactacagggtggtcacaggataacaaattctaggcagcagatttacatgacttgaggctgtgggctgttaagacgctgaaaaaccagggtgtggaccaagctggctaaggctgagtggacccaacgtggtgctggattggatggaggttttacctaggccctcattatatgctcattaacatactaaatcacacacccgccagtgccatgacagttctgagaccagtgtttgatgtaaaaatggcaccacagttccaagaaatctccacctttacccaggaattttcgtgaacattccactccttggttaaagaaacccatcaagatgaaaccccagaacccattattctctcttgggtatgcccaagctcccctttcttgagagtgtactttttgctttgcaataaatctcttctttcacta

SEQ ID NO: 512 - DNA, 1110 bp, Homo Sapiens
tgcgtctgttctctcccaaagaagctggtccttagcctgtgttaaggagcaatctttcggtggccagatggagccggggcatccttcttcaaataatggcttttaattcgcagactagaatgtttcggattacaaaagaaaccggttctcttcacatccttatccttgtgatgcagcattccgcttgcatttggaagccgtttaatatcagagagaagccatatttatgaaagtaaagaggctgctcagatgactgcaaaccagccttccttactggttttatcactggtaatgttataaagacagttgtccagtttcatgaatcttgtaggttttttttttttgatgttgtttttttttcaaaaatccgtattgtagaaaaatatgctgtcccagaagagatgattggacactctcaagcgtggtgctggactttgtcatctcttgcacagccatctccacaccttagtgcttacctcatgttagttttttatattctgcaaagacgaaaccaaaataatccaaatttgacacaaatacctgggctacatcttatttgagatgtttaacaaatgtctggatcatcttttcttatatattacgcaggaaacactgtgaagtaagcaaagttggaatgcccaagtgaaagaccatttgaatatttacaagtagatttcagacaggaatactacagggtggtcacaggataacaaattctaggcagcagatttacatgacttgaggctgtgggctgttaagacgctgaaaaaccagggtgtggaccaagctggctaaggctgagtggacccaacgtggtgctggattggatggaggttttacctaggccctcattatatgctcattaacatactaaatcacacacccgccagtgccatgacagttctgagaccagtgtttgatgtaaaaatggcaccacagttccaagaaatctccacctttacccaggaattttcgtgaacattccactccttggttaaagaaacccatcaagatgaaaccccagaacccattattctctcttgggtatgcccaagctcccctttcttgagagtgtactttttgctttgcaataaatctcttctttcacta

SEQ ID NO: 513 - DNA, 4924 bp, Homo Sapiens
actttctgtcccgctgttttatggggaaggcgggggaagacacgcagacatcaattcgactaaacaaagtttatcaataatattaaaaataaaaagtaaagcccctttctgaacattatggcttattccttgattatccttcttaatgccacagcgtggctatctcagaacaaaattagagactaacagtaaatttactttaatttttacgaataattctctatcaatgtaaaaatttttcatatacgcgtgtatgaaagaaaaacactactatttttccacattcgtgaaaactgcttaactgggacagtaaccgagcggccagtgaatatttaaaatactgtaaccgacgaatacgtatgcttctaggaccacgtggaatctttcccatggtagagacaggatttcaccatgttgcccaggctggtctcaaaacttctgaattcaagcagtccgcccgcctctgcctcccaaactgttgagattacaggcgtgagccaccgcacccagcctcaagaatgtcttaaataatgtatgtactattttatcagtttacaccctcactagcattgatgagttctctttgttccacattctctccaacacaagatatggtcagactcttaccatttttaccgctgtgaaaattgcaatttacatttccctaacaaagtggtgcattcttccatacttatgaaaccttatttcctcttctgtgaactgtccactcttaccttttataaagtttgctatggagttttctttcacaaatgatgtgtacgtcattagatagcctgctctattcattcacctgtataaagtaaaactaaactcctaagtccgccaccaacagaataggcccccttgtggccaaggggatcctagaaaaccttaaaactgagttctagaccacgatgggacaggttagacacaccttgttatactccctcccttttgtagtttaacacaacaactggccagcattaatgttaaaacagagatgataagactgacagaacagactctggcaataagatgccaaattataaaaaagacctaaagccattccaggcaaggttttagtcccacacccctatacttaaagaataaactgtgttctaactgccacaagattcttctctagcagctaaacaagtactggcctaaagataaacaatattaaaataatgtgcagctccacgagatgctgacttactgacccccagtccccgttccaccagccatagctacagctttcattggacaactttttgttgatttcagtaactttctccaggtaagaagaccactggccatggactggttctggctggtctacagaggtcgcacatttgcatggcttcatgtcctgaaagaccttttgacgtatagggctcgtaatacatttaaatgttaagtcttggctgggtgtggtggctcacgcctgtaatcccagcactttgggaggcccaggtgggaagatcacgaggtcaggagcttgagaccagcctggccaacatggggaaaccccatctctactaaaaatacgaaaattagccaggcgtgggggcaggttcctgtaatcccagctactcaggaggctgaggcaggagtatcgcttgaaaccgggaagtggaggttacagtgagctgagatcacatcgttgcagtccagcctgggtgacagagcaagactccgtctgaacaacaacaacaaaaaagttaagtctccatcccaaagtgaatatgggtcatatgttacatgagtttttgttcaatacgcatgtgtcaggaccactttcatgaatattcatagctcttcctgtaacctggtgaaaatgtaggtttagccaacctgttcagcctgaactacactccaagccctcctccttcaaagcgcctgtttctggaggcacgcttcccagcctgcaggatggccaccttgcaggccataaagtctccccttcttttctaaatttattcattgtggggctttttaatatatacatttttaaaagagagagagagacagagtctcgctttgttgcccgggctggtctcaaactcctaggctcaagctatccttctgcctcagcctcccaaagtgctgggattacaggcatgagccaccgcacccagcccattgttgggcttttttaagttaacgcttggtatatgttataaataccttctcccaggttgacacttgtcgtctttgtttacggtgatttgttctctagattttaatttcaatgtagtcaaatttatcaatctgttgttatgatagctgacttgtagctttcttaagaaatccttccctctcctgaggtcactaagattttcattttcattttcatagttttatagttttgtttttcacatctttttttttctatttggctattattggggtatagcaacactgtggatttttgtacagcaatcttgtaccaaaaaccttgttgaattctgttattctagtattttgtctgtgccaggaacagtggtacacacctgtaatcccagcttcttgagaggctgaggcaggaggattgcttgaacccaggtgttcaaggctagcctgggcaatatagcaagattctgtctctaaaaaaaaaaatcatattatggtagatggaaactagtatgtgataaaataaaaatgactttaaaaaaatttgtctaaagttctttaggattttttatttagcagaacattatgcaaacaccaaccttttaaattctattttatttaatgttttaatttgtaaaataaacttagtatgaaaattttcaaacaaatacaagagatgatataataaatccctgtgttcctatcatccagcttcagcttaaacaatttgccattcttgttttatctatcctacctctcctctccacaacttttttcattttgttctgtgtttttcccagaatttttttttttttttgagacggagtctctctctgtcacccaggctggagtgcaatggcgtgagctcggctcactgcaacttctgcctcccacaatcaagcgattctcctgcctcagcctcccaagtagctggaattacaggtgcctgccaccatgcccagctaatttttgtatttttagtagagatagggtttcaccaagctggccaggctagtcttgaactcctgacctaaggtgatccacctgcctcggcctcccaaagtgctgggattacaggcgtgagccaccttgcccagccttcctggagtattttaaagcatatctagatatattatttcacccataaatacttcaatgtatatctctaagagacaaggccttttttttttttttgagatggagtcttgctctgtcgccaggctggagtgcagtggcgtgatcactgcaacctctgcctcctgggttcaagcgattcttctgcctcagcctcccgagtagctgggactacaggcgcgcgccaccacgcccagctactttttgtatttttttagtagagatggggtttcaccatgttggccaggatggtctcgatctcttgaccttgtgatccatccgtttcagcctcccaaaatgctgggattacaggcatgagccactgcacctagcctgccttttcttatttttaaaaaacatactgataatcccattatcatacccaacaaaattaataattccttaatatcatctgatacctgttccatgttcagttttctgtctcaaaaatgcccttccttccacagttagttaaaatcaggatccaacaagattgtcacattgcatttagttcacatgacaattccctctccatttcttcccccctgccatttgttgaagaatctaagtcattggtcctatagaatttcccacttcatgattctgctgattacatcttcatggtgatgcttaatttgttccagaaactgccagtgacatctagaggcttgattagtttttggttttttgtttgcttttgcaagaatacttcataggtacttccttgcatcatagcagaaggcatatacatactgtcccacttttagagatgtcgagatttattagtgagttcagatttttttcctacgtcttaaactgtttagccccttgttttactgcaatggttaggccctctaatacgatacagaaggtaggggctagacatcttttaacttacttctaaattttaatgtgaatgtttgaaaagttttaccactaaataagattttttcccatatatttttcacagctgctctgattaaggaagcttccttccactctagttaccaggcttttctttttaaatcattaaatgttggatgttatggaattctttttcttgaatctactcattcattttcaacttaaacccttggaatagaaatacaatttgaaaaagaaccttatgtctagagacaataccactctttggtctaggtaagaggagcccctaccctggaccgacactttagaagactttactctgacctctggctctgccccacaggataagaatccatactgccaacgtgatgtgcccagctagaacagatgcccccttctagaagtgcatctaacacccaaatagcccaaatagctccaagccggcttccagggcttgctctggcctcatacctcttacgagtgaaatgggctaatggtatacaccagggctgtagccagatcttatacatataggtgggggacccacatatatatatatgcaccaggctcttcatgatgcagaacaaatcaaggggtggggaaataaaggaggcacccagtgggcgggggccacctctccctgcattgccatgctttgtcatggaatctgataaaatcagagaattctgaattcaaacctggtctgacaggtcattatgaagggatatttgtcaagataatagaataaaacattttatttaacagatagctt

SEQ ID NO: 514 - DNA, 4920 bp, Homo Sapiens
actttctgtcccgctgttttatggggaaggcgggggaagacacgcagacatcaattcgactaaacaaagtttatcaataatattaaaaataaaaagtaaagcccctttctgaacattatggcttattccttgattatccttcttaatgccacagcgtggctatctcagaacaaaattagagactaacagtaaatttactttaatttttacgaataattctctatcaatgtaaaaatttttcatatacgcgtgtatgaaagaaaaacactactatttttccacattcgtgaaaactgcttaactgggacagtaaccgagcggccagtgaatatttaaaatactgtaaccgacgaatacgtatgcttctaggaccacgtggaatctttcccatgagacaggatttcaccatgttgcccaggctggtctcaaaacttctgaattcaagcagtccgcccgcctctgcctcccaaactgttgagattacaggcgtgagccaccgcacccagcctcaagaatgtcttaaataatgtatgtactattttatcagtttacaccctcactagcattgatgagttctctttgttccacattctctccaacacaagatatggtcagactcttaccatttttaccgctgtgaaaattgcaatttacatttccctaacaaagtggtgcattcttccatacttatgaaaccttatttcctcttctgtgaactgtccactcttaccttttataaagtttgctatggagttttctttcacaaatgatgtgtacgtcattagatagcctgctctattcattcacctgtataaagtaaaactaaactcctaagtccgccaccaacagaataggcccccttgtggccaaggggatcctagaaaaccttaaaactgagttctagaccacgatgggacaggttagacacaccttgttatactccctcccttttgtagtttaacacaacaactggccagcattaatgttaaaacagagatgataagactgacagaacagactctggcaataagatgccaaattataaaaaagacctaaagccattccaggcaaggttttagtcccacacccctatacttaaagaataaactgtgttctaactgccacaagattcttctctagcagctaaacaagtactggcctaaagataaacaatattaaaataatgtgcagctccacgagatgctgacttactgacccccagtccccgttccaccagccatagctacagctttcattggacaactttttgttgatttcagtaactttctccaggtaagaagaccactggccatggactggttctggctggtctacagaggtcgcacatttgcatggcttcatgtcctgaaagaccttttgacgtatagggctcgtaatacatttaaatgttaagtcttggctgggtgtggtggctcacgcctgtaatcccagcactttgggaggcccaggtgggaagatcacgaggtcaggagcttgagaccagcctggccaacatggggaaaccccatctctactaaaaatacgaaaattagccaggcgtgggggcaggttcctgtaatcccagctactcaggaggctgaggcaggagtatcgcttgaaaccgggaagtggaggttacagtgagctgagatcacatcgttgcagtccagcctgggtgacagagcaagactccgtctgaacaacaacaacaaaaaagttaagtctccatcccaaagtgaatatgggtcatatgttacatgagtttttgttcaatacgcatgtgtcaggaccactttcatgaatattcatagctcttcctgtaacctggtgaaaatgtaggtttagccaacctgttcagcctgaactacactccaagccctcctccttcaaagcgcctgtttctggaggcacgcttcccagcctgcaggatggccaccttgcaggccataaagtctccccttcttttctaaatttattcattgtggggctttttaatatatacatttttaaaagagagagagagacagagtctcgctttgttgcccgggctggtctcaaactcctaggctcaagctatccttctgcctcagcctcccaaagtgctgggattacaggcatgagccaccgcacccagcccattgttgggcttttttaagttaacgcttggtatatgttataaataccttctcccaggttgacacttgtcgtctttgtttacggtgatttgttctctagattttaatttcaatgtagtcaaatttatcaatctgttgttatgatagctgacttgtagctttcttaagaaatccttccctctcctgaggtcactaagattttcattttcattttcatagttttatagttttgtttttcacatctttttttttctatttggctattattggggtatagcaacactgtggatttttgtacagcaatcttgtaccaaaaaccttgttgaattctgttattctagtattttgtctgtgccaggaacagtggtacacacctgtaatcccagcttcttgagaggctgaggcaggaggattgcttgaacccaggtgttcaaggctagcctgggcaatatagcaagattctgtctctaaaaaaaaaaatcatattatggtagatggaaactagtatgtgataaaataaaaatgactttaaaaaaatttgtctaaagttctttaggattttttatttagcagaacattatgcaaacaccaaccttttaaattctattttatttaatgttttaatttgtaaaataaacttagtatgaaaattttcaaacaaatacaagagatgatataataaatccctgtgttcctatcatccagcttcagcttaaacaatttgccattcttgttttatctatcctacctctcctctccacaacttttttcattttgttctgtgtttttcccagaatttttttttttttttgagacggagtctctctctgtcacccaggctggagtgcaatggcgtgagctcggctcactgcaacttctgcctcccacaatcaagcgattctcctgcctcagcctcccaagtagctggaattacaggtgcctgccaccatgcccagctaatttttgtatttttagtagagatagggtttcaccaagctggccaggctagtcttgaactcctgacctaaggtgatccacctgcctcggcctcccaaagtgctgggattacaggcgtgagccaccttgcccagccttcctggagtattttaaagcatatctagatatattatttcacccataaatacttcaatgtatatctctaagagacaaggccttttttttttttttgagatggagtcttgctctgtcgccaggctggagtgcagtggcgtgatcactgcaacctctgcctcctgggttcaagcgattcttctgcctcagcctcccgagtagctgggactacaggcgcgcgccaccacgcccagctactttttgtatttttttagtagagatggggtttcaccatgttggccaggatggtctcgatctcttgaccttgtgatccatccgtttcagcctcccaaaatgctgggattacaggcatgagccactgcacctagcctgccttttcttatttttaaaaaacatactgataatcccattatcatacccaacaaaattaataattccttaatatcatctgatacctgttccatgttcagttttctgtctcaaaaatgcccttccttccacagttagttaaaatcaggatccaacaagattgtcacattgcatttagttcacatgacaattccctctccatttcttcccccctgccatttgttgaagaatctaagtcattggtcctatagaatttcccacttcatgattctgctgattacatcttcatggtgatgcttaatttgttccagaaactgccagtgacatctagaggcttgattagtttttggttttttgtttgcttttgcaagaatacttcataggtacttccttgcatcatagcagaaggcatatacatactgtcccacttttagagatgtcgagatttattagtgagttcagatttttttcctacgtcttaaactgtttagccccttgttttactgcaatggttaggccctctaatacgatacagaaggtaggggctagacatcttttaacttacttctaaattttaatgtgaatgtttgaaaagttttaccactaaataagattttttcccatatatttttcacagctgctctgattaaggaagcttccttccactctagttaccaggcttttctttttaaatcattaaatgttggatgttatggaattctttttcttgaatctactcattcattttcaacttaaacccttggaatagaaatacaatttgaaaaagaaccttatgtctagagacaataccactctttggtctaggtaagaggagcccctaccctggaccgacactttagaagactttactctgacctctggctctgccccacaggataagaatccatactgccaacgtgatgtgcccagctagaacagatgcccccttctagaagtgcatctaacacccaaatagcccaaatagctccaagccggcttccagggcttgctctggcctcatacctcttacgagtgaaatgggctaatggtatacaccagggctgtagccagatcttatacatataggtgggggacccacatatatatatatgcaccaggctcttcatgatgcagaacaaatcaaggggtggggaaataaaggaggcacccagtgggcgggggccacctctccctgcattgccatgctttgtcatggaatctgataaaatcagagaattctgaattcaaacctggtctgacaggtcattatgaagggatatttgtcaagataatagaataaaacattttatttaacagatagctt

SEQ ID NO: 515 - DNA, 1456 bp, Homo Sapiens
ctggaggggctctgctcggccctcaaagatggacaaaatgttggaatcaagcacattcctgcaatccagtatgacatttggattcaaaccagcaatgaggtcattttgcttcaccaaattatcctgtctcatatccaccaaacaaggagcgtatctacattttggacgctgctccacgtgaaagaatcgagcttcgatgaacattattatatagagccatcatttgagtgtcggtttgatcccttggaagttccagatgggccatttggtttctctccccttatagattattactgcggcatgaaaaaccctccattaatcagatcaacagggagattcatgtggattaagtttagttctgatgaaaagaactaatattcatttattccagatccagactttacttacctaggagattgtgggtttcagctcttgggagccgatggaatagtgcactctagtcaggtacaacaagaagagaaaacaaaacctggccaagccgttgattgcatctggaccatgaaagccactccaaaagctaggatttgaggttcctagattatccaatggagcactcaaatgaatccaagagagacattgttgcagtctacgatgaaagcagttctattgaaaacctgaaggccaagtttcgcagcactgtggccaatgatggaatgcttaaaacaggaataggcgtgatacaaatgtgggcagatgaaggtagtcggcttagctcaaattctctttacttcctttgttgagccctgcacaggcagcactgtcttttgccatagcaacatgtgcatcaataatcctttagtctgtaatggtgtccaaaattgtgtatacccttgggatgaaaatcattgtaaagaaaagagaaaaggcaggactatctgaacaaatcactgaaactcatgggacagttattggcattacttcagagattgtcttggtctttctcattatttctgttttagtacaagtgaaacagcctcaagaaaaggtcatggcttgcaaaactgcttttcataaaaccgggttccaagaaatgtttgatcctccttattatgaactgttttcgctaagggacaaagacatttctgcagatctggcagacttgtcagaagaactgaacaaccactagaagacgcggcactcctccaccacctcccagtgcatccatgaccaccactgtgggtcgctgacctccagcgtcaaacaaagcaggaccaacctcagttccacggagcttcctttccaaaatgactttgcacaaccacagccaatgaaaacatttaatagcaccttcaagaaaagtagttacactttcaaacggggacacaagtgccctgaacagcccctagaagatcaagtaatggaggagattccttgtgaaatttatgtcggggggagagaagattctgcataagcattcatatccattgaattctaa

SEQ ID NO: 516 - DNA, 4622 bp, Homo Sapiens
cattttgtttactcattcatctgtcaatggacatgggttgtttccacctcttggctatcgtgaataacactgctataaacatggcaggtaagcagctgttcgagcccctgctttcagttcttttgagtatcctgagctcccgggttcacgccattctcctgcctcagcctcccaagtagctgggactacaggcgcccgccaccacacctggctaattttttgtatttttagtagagacggggtttcaccatgttagccaggatggtcttgatctcctgacctcatgatctgctcttggctttccactgcatttagaatgcaatcggtctccttctctggttactagctacctccaaaccacctctcagcacttccctgctggctccctgagcaacccctagggctcctttctcttcagaggcaccaagctcctgcccagctctccctcccagccctgaccatcgcagcacaaagaggtcttccctgactgcctgagctatccgccagaggtcacctttaaactgtccgttgtggaaacctctggaaacaaatgcttacacctgtgaggacagctttccactgtgcctccctgtgtccccctcccttactcaactcatctgaccctcttcctcccagctcaagccccgcctcctcctccaagaagcccacccagcctgtgggttccctctcagcccacagtgcttcctccctccttggagtcccctgaacccccaagccagagctgcctggcttgtctcagcatggtccccgtctgctgaccccagatttgcctggacgacctctccaacagacttgcgctcggttgaaacttcctcactggtctgtgcacaccatggaatgttattctgctttaggaaggaaatccgtcaaaagcccccgcgggatgtgggtggggaaatagccactacagtccggagtctccccaccctcacatggtgggaggggccgaggatccctccgggtctcttttataagtccatcaatcccattcaggaggactctgccccaccacctgtttgtattgtctcccaaaggccccacctcctaagactatcactttgggggtcaggatgtcaacatgtgactttgtggaaaagggggtgcggcatgaacattcagtccgttgcactgcagtagtcagactcgtggagacaggaggtagaatggtggtgacgggctgcaggaagggggaatggggagctagtgtttcctggggacagagtttcagttttgcaagatgaaatgttctgaatatggatggtggtgacggctgtgcaccattgtgagtatacttaatgccacactgaactgcacacttaaaaatgtttaagggctgggtgcggtggctcacgcctgtaatcccaacactctgggaggctggggctgggggtggatcacttgaggtcaggagtttgggaccagcctggtcaacatggtgaaaccccgtctctactaaaaatacaaaaattagctgggtgtggtggcacaagcctgtaatcctggctactgcggaagctgaggcacgagaatcacttgaacccaagaggcggaggttgcaatgaggtgagattgcaccacagcactccagcctgggcaacataatgagactccatctcaaaaaaaaaaaaaaaaaagttaagatggtagattttatgttatgtgtattttaacacaataaaaaatcaaaggtagctaattcccattctgccccaatttcagagaaacacgtgggcgaagacagggaggggtgactgtcggtgctgcccgggccctgctgccttccagatctctggcaccagggctctttctagctccctccccagaagaggacatcagcgacttgcacaggccccttcctgggcctgcctgaactgctgggggcaatggttgtggagagaacccagtgtgtgggcagagagcaggcagcgtgcccccttcccattctgctccagcatatcactcttgttgcaacacaggatgagtgttcccacattttgtttaatattcacacgctatagagtgcttcctccagctcctcagtcttcaggacagcctggactccgggactggtggtgagaagcagcagaaataacaagcatccctggcccagctcgctggcccctggttgctttagggagtcctgtgccttctctgagcaggaagtccctcattgaaaatgagagggttggacaagacgatccctgagaagccttggagtgccagctttctgagaactggcctggcacaaatgccccatttagtacacacgaagccaaaacagagaggaacagggccccagcaggaggagtcagcgagccggcccagagcacgcttcttagaaaaggacacgctcagggacaagggcaccatgaccttcccaaaggcacaaagggcacagggctctgcatctcctgtttgttcccggtagaacatctcgctgtcccgggagaatatatgaggagtgcataaatatacagccccgcactgcttcctgggctcttgtgtgattccagggcctgttctccagcagctgtgagcacccacccagaccccactggcctggggacggccattgagccagtcccacctgtgagcccttcagcgattctctggcccccagccccacctgtctgtccacttttcctggcaggctggttaggggataaagcagatgcacgggacactttacttgcccctttcccgtccaccccagttcaaccctccaggttaccctccggcagcagagccacccctgcccaggacgcgcactgccttccattaggcaacagtttcatgaggcatttgccgtcctcaagaggctgacgtgacagtgcctgattcacagaggcttccctctgacccaggtctagctggctccccagtgggacaccccagggcctttcctggcccagatctgccgctctgggctgtcctgagtgaggaacacctgaataagccacaacatcaaggaaaggaccatgaggatgggagcacccgggagcaagcccctccctgagccttggaaaccccgtgactcctattttccatgtcattttctccatcatggaatgaacacttagaaactggaagctcgtgagcagaatgattctgtcctagagcctgaaggcgtgcatcagggctgggtccttccctgcagcatagcttctaaaccaacgattgatatcttcatttaccagcacgataaaaaaggaattcgttttcttagaagctgtgcctgtcactctgctcagaaacagtccaagcagccgttccaagtgtggccttcagcccatgccaaacttagatcaactgcaggcttggagctttctgaggcgagaatggaagtatgtgtgctgcagtggtgtgtgtgggtgtgcactcgtgtttgtaggtagcatttacacacacccaccgtgggcatgtacatgtgtctccctgtgccagtatgctgagagcttcaggacatggcaggcactccacatgcaggggatggaaaagccatcacatttattgtctgtccttgtgcggtatttaaaatacaactgagaatgtgtgcagatttttaaatgttactggaccacttgggttttttttgagaccgggctgactctgagccagactgcatctgtctgcgttgaaagggaccattctttccctcctgctcccgccctgccccctccacacacaccctccttcatgtgaaacccgagcatttcctttcccgtaagccttcttctagaagcctgtgctcagcacaggggccaagccctgcggctcaggcaggcccacgtgactcttgaactgcagactcaagtcccaaggtgggaaaccgtttgtcaacggcccccagatttacaaccacgaggccaggctggtcttggggtgcaaagccattgttcaaaccatcagtcatgcaaggagttcctaggattttttattttcccctccaaaaagctctcttcagctttgaagaaatgctgtttcctcctctggttacttctgcctgatgagaatgctgatctggggatccaagtaaagggtggaccacagagcaccttgtctctgtgtaaaaggacacccctgttactcagcgtgcctgaaagtgcctgagtgtttcccagtcctcatcagtgtaatcttaagctagaagttccccttgggcaatgcatcaggtcttccactttttttccaatagacaccatgggccatacttcctaaaatacatgtttctaaatcttctactttttttgaaaaacaattttgaatcattaaagaaatttttgaaaatagctttctataacccacaacacctctttgtgaaccccatgattttcatttgttgaaattttccgattctgaccatgggaatgtgtgtcttaccaaatttcaaccagacatccagtgtttccacctaacatgccatttaaagccacttccatattcaattcagtctgcgcaattctagttccaaacgctcggtttctgttccattcagagaatgtgctgagatttcttctgtcattcccttattcctggacatttaggtgcaacaagtgtagacgggttgttttttccactgaatcatttccttcagatgaatt

SEQ ID NO: 517 - DNA, 3210 bp, Homo Sapiens
ctcattttttctcttgctgccaccatgtgagaagtgcatttcacctcctgccgtgaatgtgaggcctcctcagccatgtggaactgtaagtccagtgaaacctctttttcttctcagtctcgggtctttatcagcagcgtgaaagcggactaatacactggtcatcctgataaggttttagggagcccgatcttttcataatgtaaagcagaagacaccttctaatgagaggctgagtaggataacactagtgggagtttggagatcttatgttaaggattcccctgacctctacaacaagtttggttgtctcatattctctccagttccttaggccagctcaagttttatcagtatcttttggacccaatgagtccttcctggcctcactccagaagaagactggcctcagtccagagaaacaaaaaatgtgaaattcacccactggaactctccttctccaagtatcagtctccttccagaatttccggcttctggtctcttttcaaggaatttagaagcttctgggagccttctgcattccgtggtttgggtccctttcctccatcttcaaaaccagtctaacagcattttcatatctctatgatactaatttcctcttttttgaggcataaacatattttcattgaaaatcgtgaagaattgagaaggaaaggagtctgaaattttaaatggtgagattctacaagtcatcaggttctttcttgctggctaagccctaacctctggaattcataatcggaggacctcataaggattatggaaacagaatttcatggtaaaataagtggaagtgctaaattctcaaggaaacattaacctttaacagtggttgcttctaaagttccaaacataaggttataattctgagaggaatagaaggaagaaaaacttttgtccctaaattttccacttttctcctcgttctcttgtccacaccatatggctagacatgaccactttgaaatgaaggtgatgttgtctttcttggattccatttcccacatgttgaactcatttggtgcaactaaatgctgcatgcagagacttaatgaatactttggatgattatgatgacaaggcactaacatggcagactgaattttccctcatgggagaagaatcagatactgtataatggattgaaatgcttaagttcatggccagcttcaaaagtaagctgaaggaaggactacttttcaaatgaagaagctaattatttgtgctcgattagatgatgtgggaaatagtgtttctagtttcacttttaaatatcaacaagcaagtcaactgattatagattacgagttgctctttagaaatctggacaaaatgatattccttgtcattgccaatagctcttgtttgcacaaggttcatttatcatctcttcttgttttcaggtttgagcatgagtcattgtggtaaggttcttgtatgtggctgatcatattgaatgctaattcagaacatattgtacaatagacataccaaacttcaataatgattaattttatttagtctattgcttgaattacttgtaaaatatggtttattgttctttaaaagatcaaatattctatcgaaatccaaaccacattaatcatctgtttctaaatactatatatccatgctttgtgtaaatacaacttgatatctaaagctattaaactaaattttaaaattcctattttatgtctgatataaatcagcagtgcaaactcaaaaatgcattcacataagccattttttagatgcctctcattttattgaatatcactcttttatgtctattgaaacccttttttgttgttggcatttaaaaatatactttcattctgagaacacgtcttagttctagatacttgaggtcagataatatgatagcacaagagctttaaaaaattttcgcaaactagttaatctctgagtagcttgtcctgtttttttcctcagttatgattaaatatttatggcctctatcactcacttgctcctgaacagatttttccttattgatataaaatgtcctcatattttgcctatatgtgctccatatgtcagctacatattgaatcacaaatactcattagctttctttgtgtattactcagagcaagaagatgaaacatatgactagggcaaaactcatgaacactccagtaattatcataaaaggcacattcttcacgagtagctgattattgtatacaaatttctacttgcaaaatagaaattaactatgctttgttattttatttttagaattaatccttcttaaatgtattagagtgaaacattaatagaattatgtcagaggataattttgcataagatattgaggcattataccagtacagaaaggttagaaagtatattgactacttttagacttttgtcttatgtatattataatttactatgtcagacatagcaaatttttttctgaaggaactcttggaatggaaatgatcttaaaagacctgaaaaaaaaaatgcttctttgctgggtttaggtcaaaagtcatcatctgggagcaccatgaaattcaaaccaaggaagggaattttcccagtaatggtcccagcaaaatgggtggtcttatgccagaataatgtgtttagaatgactatgtgcactctttaaaagttaggataataaagaagtgggtcaaccagtacactcattatttacaactggaatgataatgtagcagcaaaagctcctacgagaatgtattgaaagactattatacttcaacccctgtacatatctccttccatatgatttcttattgtcacaattctattacattgtagaaataaaatctgagcaatattttgaacctcattgataatgtatagaagggatgaactctttctacccgataatattttttaaactttaccacttggtgattagaataacatcaacaacaaataaataatatagaataaaactcaagcaaacactgagtagaatagagaagcattattagatatagggatagattatggtaaaagaatagttgcttccagataaagttgaggctttctgaagcatttttaaaaatctggtcaatttggctgctgttccaagtcccaatcacaccacaccgtaagaagacaacttattcaagcctcgaagaacattccatgctcatgggtaggaagaatcaatatcatgaa

SEQ ID NO: 518 - DNA, 4432 bp, Homo Sapiens
ccaaaagttgggagtcttatgactcttaaggccctgttccggttgctatggctacataacaaacccctccagactgagtgctttacatcttactatgctcatgggctccacgatcaggaatttggaaagtgcacagaaaagatgggctgtctctgctccctgatccctggacctcagctgggaaaactgaaaaacagggaaggttggaatcatctgactcccatctggactgaatctggcagccaacatggatgttggctgggacctcggtgaggactgctggcaggaacacctacacgtggccttttcctttggctgctggccttgctcacagaatggtgaccgggttccaagtgtgaacccaggtacaggaagagacaggaaacggaaactgccagtttccttaaaatctgggcccactaactagcatggcatcatttctatcatcttctattagtcaagcatcacaaagcccatattcaagaggagacaacctagacccagcctctcaataaacagtgtcaaaggctttagagagcatggtgtcaagctcccagattctaaggctgtgactcaacccagtgcactgggctgcctggctgtacacaggtgtccatattgatgcaaagcccccaagctgctcttatcctcttgtgaagcacccttagcttggttagtatttaaataattcaggaatctttcccctcctggattttgagagacctccacatcttctcctcagttctcccactctgttccctcatcccacaaaacaggctcctttccccagaactattctacctgaatacaggcgaaagatcgctcaatgagttagccttcccccacaccccagctctgactccccgagggctacctttccaaaaggagactcaacccaatttcttatagctttcatctgggaggggcaggtgggggcggggagggagaatgaaaggggcgaggtggtcttggatgagtgacctgattgcagggagtcacggctttttctgcacacatcactagctggatggctgtgtctgacctaggagaccacagtgagaacctgtcactaaagcaggtgcccatgatgggaagaactggaaattttatctaaagagagaggctgaagcattccttaaaccacagaagaaaacagtgaaagtacaaaatgacaacagccgtcttcaaatactgcttgtcagagggacaagagagaacagaggtgctgtgctgctccacaaggcaaaacaagagcaaacaagtctgtctgagtttcaagaggctggccctgaggctgcactgtggcagtctaggtgaggatacaactagaagccagcagtctacaggctggaagaaggccctcaccagaacccaacccttggacttcagcctccagaactattcattcagcttttccagaccaggcatcaccgagcggagagaggggaaacaccctggcttctctttggcacatcagcccctagttcttgagagagaagggcagggtggtctactcaccatgtctgtatcctgccgttcttcatttgactcatcctggatttctaactcttcttcctcgtcctcttccataaggctgagtctgatgtaggggcaaagagactggcttttcaaactgttctttgaggacccctgagagtttctcagacacccggggtgggggaagtggggagcagtaagtacagcatagtagtttcccgattgtgctgacaggaagtgctctgtggctaaaacaagtccaaaaagcacccacagagaggcaatgggtgagacaggaatcccctcacagtgggcgacagatctgaagtgaagacaggagatgatgagaaaagctcaccgcatcagctggttgcccaggccaggacctgaagggttgtgtggagtctggaaatattgtggacccaagaaccttgacctctcggtgcctgcgacgggctgactgctgggaatgaagcaggatcaatgatgggataaaaatcaagggtaagaagaggatgtaaggcagctggtgttaatggggagaaaagctcagagagatgcattttaaagctaaacaatggagaagggtttgagaagaacccaacaatgtgggagtgctacagcagggaaccatgaaacagaaacagcaagatggaggcagccagacaccaaactgggaactcagacacccagattccctccatggcctcacccctgggcaaaatccaactctgagccatcttcttcctccatctctttcaacccccacaggggctgcctgctcttcacagctgtggaggtgagggtgggcgtgggcgggatgctgttcagctgcagactttcttcctgggacgaggagacgtcctctctgttaggcttggcaggccctgccaagcagatgcatacattaaccacagcccagggcctgcgacaggtgtgctctctttccaagacctgcccaggatttagtaagggaaagtcaatcaggaagagaatggaaaacttatacagcttcattctgttgccctcaaatgggcatagccctatgtactaaatacatagccctatgtaccaaaaagtaaggcttagagaattgtagctaggccttgtccaagaagaacttgctacacagcctagaaaacaagatggaaagatatataaatatacatttcacagataaactgtaacaggtgaacaggtgaacacaaacatgagggagggttggagtctctaagattgagaggtctgagttagccaatgaagacatctgagatcctatccaagatttctgtggtcagaaaaagctgtaaatggcaatagagttttggtaccagaggctagagtggacaaatgagggccagggaggaaccggaaaatgggagacaggattttctaaaagctagaaaaaaatgaagtgattgcaatgccagtataactgatatgatatgaagggggacttatctcctgcagagattggagaaggtagaggaggagaaagaatccaaagattctcactgcctgagaaaacccaggcaatactattttaaagcatcagtcaaattgacattaacatctgttaactgtaaacagtcacactcccattaccccccttctccactaaaaacaataatcccaaagtgagcgctcagcctatgggtttaagcagagggctacagaaaacagggaagagacatacccctgggcttggattcccagagaggaaaccttggggccccagatgtgtcctcctgatctccctgagctattaatggtgtgatgcccgagggctgggcccttgagtctctcctcttctccatcttcactggcttccccagccactcacgttcatgtccttaaatatcacctatactctgccacatcccaaagggatctcaagccttcagctctcccctgaactccatcttaacagcccccatggtttgttcaacatctccacctgtaatcctgtggccaacaccaatgccccaaccttcccccacagctatcttcactctctgccttccccatctcagatactgtcaactccatccttctgtcaggccaaaatccttggagccatcctcaactgctctttttgtcttacatcccacatccagtttgtcagaaaagcctattagagataccttgaaaatgcacccagaatctggccgtttctcggcacctccaccattgcccccggcctaagaagctctcttatcttgcatcttgggctggactcctacaacagccacaacctccctgctggtctcccagcttctagccttcccccatctcctgtcgttttcgacacagcagccagaaggatcctttaaaaacagaggttgatcctgtcgttcctcaaaatcctccaatggttttcctactgcactcagagtaaaagccagtctctgccttagatgctctgggatcctgtaccctctttggtctcatgtcctacaatctgcattctggccataatggtcttctctgctgttccttgaacattccaggaacattccccccatcccctcgtggcctcaggactggctgcttcctttggtatgctattctgatacacactaagcaccctccctcacctgttataaaaaattcgctgggaggccaataggctgaaatggctcctgcactttgggttcctaagtcagcaaactgaaactcaactcagagtgaaagtgttgtgtgtaacctaggagcaggaaacttcagcttaaccagtcagaaactaccgactaacctctaacaagagatttatggtcagttaacctctaaatatgaactttccactctaaccaatcaaatagtttctttgtcttgctcccagagacaccttgtaagtgtcccctctggtttcctcggtggtggcgccctgaactgctggcggtctgccactgcctgattgataaaattgctgaat

SEQ ID NO: 519 - DNA, 16176 bp, Homo Sapiens
ttggggatattatataaatcctcaagtggggtcatggggatcaaaatgcttgggatttattgctatacaggaaaaaaagtgtattttctgtttaattcttcaaaaaggtcacacatgggatctcagcaggtttagtaaatcatatatcctgggggaggaacccagatggtgtggagctactgacctagcacagagactgaggcatgctgctggaggcataaagcttggctggcctctgtgggcttgggttgtggctgtgtcacggtctaccactttgccatttgtctctgtggatcctgaaagctgcagataaaaattttaaaggcttagctgcctgtaatttaagaaagaacttggttagaagtcagatcaagtgaaagaaaatgaaatgtcattgcacaaaaggaaaatgaccaatctggtggaaatggagcattttttaaaatagttttttgtttgtttgttttccattagttatttttatctactttttgtcttagcttttgacgccaatacttctttttttggctgaaatctagtaacttttaatgtttaggacaaaaagaagacagctaatctgagaccaatgaaagaaaggaatgcagaagcctgatgcctgggcatcatcagctatgcagtagcatttcctccttgggaaaaatattgacagtttgaaggagacttgagatgttaacataattacttaagacaaaggctgagcagggagagagagtggtcatttcaaattatatggtcaaaaataggtaaatcaaagttacatgctttcaatttgatgtatgtgcttttcattttggtttatgattcagaccacttacagttgatctctgtagaagtgcttttaagtcaaagtttcaaaaatgttagggaatagtgctttttagttattttttagtataataaaaaaaattccttgcttctatgtgtgactatgcactttacgtatcaaaaagtaatcttaaaaattcccagagttgagtctatttattaactcttgttgagatagtttctgggtttggatttaaagtctaaaatgtgaaactttatgaaaagtagagcccagggccaggtgtcgtggttcagatctgtaatccaagcactttggaaggccaaggtgggagctttgcttgagctcaagagtttgagaccactctgggcaacatagtgagactccatctctacaaaaaataaaaataaaaaaaaacttagccagttatggtagtgtgcacgtgtagtcttagccacttgggaagctggggtgggaggatcacctgagcctaggagttcaaggctgtagagaggtatgattgtgccactgtactccaaactggatgaaagagcaagagccaaaaaaaaaaaaaaaaaaaaaaaaaaaaatgctcagctctagaactgactatagtaataaaaagaagacattctttagtgacataaaacttgggtgttatatcttacattggctattattcttacgtgcaacaacataacaatgagaaaaacaagccagatacaaaaaagtatgtattgtttgattcccatttatataaacttaaaaatgggcaaaactaatctatggtgttgaaagtcagaattgtggtgtacctcagggagaggtaaacactgagaaggggcaccatggggtctgccagcttctggtagtgtgccagttcctaatctagggactgataacttgagtgtgttcattttgtgttcatcatactcttcacctaatcatttgtacacttttctgtaacctttatgttacattttaaaagaagttaaagagttatgttatagaacttaatgtgcattctttagaaaaattttatcctaaagaaatgtaaatttatagtcagttctagagcttatgatgtgtctttttgaaagtttgacctgcacctgtaccctaaaacttaaagtataataataataaaaaaaaagaaaaaaaagaaatgcagaaaatgatttgacaaaaaaaaaaaaagtttgacctaatcttaatcatggcagatttgggaatgctaatgtttatatatatactttcataattacaccaaaattgatgaatctttctctgggagctatccattgatgttccttgtaattagcaacctgcttctgtttccgaaattgtattttcaatcatataagtgtgttcaaaggcctcagcggggaccagaattagctacaatttatattcagttcagaacatagaattcgtttctcaaatttctcattagcttggcagtttataaacttggatgtgtgtatgtgagttttaggaatctgaggattggacaaaaaagagagacagagaatattaaggcagtaaagaagagtttggaagagtagagataagtagaaataatgacattagaaggcagaagtcttcagatagtcattcagaagcaagatgatgaaatactcttttggccagacacatcatacttactcaacctttgtatttagcttcaattgttggttgaatggactcagctgttcacactgtagaagtagtggtagtggtagtagcataaggagtgtagattttgctttaaatatcactcatttaaaatacttttgttctttgccaggtgatatgatatgatatgatatacatgtcacatttcttgtcatgcatgaacctaccctttagttggagaaacaaggcatttggaggtgaaatgttcaaatgaaaatatatgtacaagataagtggtgtaaatacacacacagtaacagtaacaatatttgatacattttgcatttgtttgtatgccagccaaataataaagaccagctttctaacagaaaaatgacaaaggactggattggacagtctgtgaggagcgatatataaatcaccaatacatacatgaaaatatgttcagtatcactggtaatcaaaggatcacaaattaaaatttcacctatcaaattggccaaattgagaaaaactgataatagccaatgttggttaagttttaaggaaatcaggagtggcaatgggcataatctttccaatgggaaattaagcgatgcatgtcaaaatttaaaatctacatactctgtgaccaaaggcagatacagggtttgtggagcccaagcctatgcaactggggaagggagagagttcttttaaaaaaggatcccaaagttataaatacaaatttaggtatgacattaaatatttagttcgaatgagaaaaaatcacaacaaatttttatgaaattggtaaataccataaacatcacaaaatccatctctatgaggcaaacttgggaatcagtctggctccagggcatggctcttaacagctgtgctctgactgcctcagaatgtatcattcatctgtgtccattgactactacagaccaaaacacatttgcaacttcttgtcacctctgctgctagtgccttggtccaaacctccatcgtgtctctcttggatcatgggaacactctcctaactggtctctgtattttgcccttgaacagaatgcatgtattatgtttttaacattttttagtaattgactttctgacactcctctattttatttattatattattttggttactctttgattgccttttcatgtgacgatggttttgtactattttctacaaaaagacaggaaagataagtcctctatcatggtaggtggaaatctattttttattgttaatagttgcataaaacctgaaaattctcacgcacacaaatttgctatttgtagcactgccacaggtttgttgcatttgtaattgcatatactgcattattgaatatgtttctgacaggagagagccttcgtttagtctagccactgatggaaactgaatcctttgtttacaattttagatacctgatgattggaagaattttctacagactagcttgtggctctatacattttacatgctgtttctccttcactactcatatatttctggtgccaggcttggcaagaggtgttttcattgtgatgtgacctctgaccttgcagggtgagatggaatgaggggcagtaggaatattcctgcctttttttctagtctggaacagctatcaatacctatccctggaggtgaccccaaatccatataaaaaagccactaaaccaaaataaagtataattccaaagtcagtttgaccccccagattccaaaaatgtccatgtctccttcagtgcagtcaatttaaaggaatgtttgatgagaggaaaattgcagtggatggcaacagcagtcataacagatccagttgaaatattttatttttacaaattttacaaaagcagagccattgaacacatttcgaggatcccttttacgtcttggaagaagctttaggaaatgagggaccctgaaaattacacttaattaggcacttaatatatgtgcctctgtctatgacctggatacttctaagaatttatcataaggaaaatgtgcagtaaaaatcaataatagcaaacatttgttgaacgcttactgtacaccagacaccttgctaagaacttcattttgactttttataatgagcgttttatttttatatcttatttaaaaattccagagaacaatatccgtgtttaaatgggaattttagtttagacaatgtcaaaattatgttcatttttacttcatcttttcacttcaacttttatatggatttatgcagtttatacaacaactacatagtgaatgctaggcagtgttctagatgttgaaattcctgccttcatgaagcttatattctagttggacaagatactcaataaataagttaacaaataagataaataagtctgttatcgcatgttggatgggtataagtactaaggagaaacaagatagcaagcaaggaggtaagaaatatgtatgtgtatggagtgggggttgagattttagatggatcatttcacagagaaggtaatacttaagtaaagaccaggccaggtgcggtggctcatgcctgtaatcccagcactttgggaggctgaggtgggaggatcacctgaggtcaggagttcaagaccagcctggccaacatgagaaaccccatctctactaaaaatacaaaaattagttgggcgtgttggcaggcgcctgtaatccccacctactcaggaggctagggcaggcagaatggcttgaaccagggaggcggaggttgcagtgagccgagatcacgccattacactactccagtctgggcgacaaagtgagactctgactcaaaaaaaaaaaaaaaaaagaaaagaaaagaaaagccttctaactgtgtattctaggaaaactctagagttcaatattcaatatgctgaagggtcttcttatataattttaatgcctggattacattaggatggtagtaaagagaagctacaaccatcacatagctgatgcacttgtacctgatatgtactcttggtaaaggcaatatggtacctacaaaattactttagggtcatgttatatgtggtcttttactggatggcattggaatgaattaccatttgaggtaacagaattatctttcctagagttctttaaaaataggataaatactggcagagttgtgatgctttgatttaagccaatagaggtcagattttttgatatacataggtcttttgatttagtaagatgaatttattcagaattcaaagatcttttcaaaatacactctcctatatggaggcggtaggatctgaaccaggggaattacaaatggttttaacaggctgaaagaggggttttgaagtacattttccttcaaaaaaaaaaaaaaaaaagaatgaaaaaggaaaaaagggaaaaaataaccattttcctgtcaaaagagaaaaaagttaaagaaaaaaacctaccccaaacccctgaataacctacataatgtgggttttttttgtttgtattaaggagtgtttttaatatttaaaaaatacttttcaacaatggttctactgaaaaaataacagttttacatgacatatagatttataaaaattacatgttactgtgtttatagaaaaaaatggtggctgtgttttaaaaagacattgaagcaactcttgtgtgaaaatacacaggtggtgttgaaatagaaacaagcctaggcactagggttcctaaggtctgctttcatctcagcctctcatttgttatgttacatttcagggctatcattaatactgccattgtatcccatttttctttcatcttctcttttcaccccggaccctgtttgggggccaggagttcctttgagaatgtgaaggcggccctaaaagctctcctctaaataatgtgcaaatacacaacagatttgcatgtaagtttaggggtttcatggtttctggaaagcatctttggaccttagctgagtgtgcatgaattagaatgcattagtaagaacatggggctgcaaaatataccatatgaacaatagttagagcatttcactgtgatgagctagaaaaagaaaagcttgaggacaggtcgttaatgaactgtcacacatatctgaagagctgttatgtggaaggaagaagtttatttggggttgttttagagctaggtggtccaccactgtagccactggtcacatgtgactatttaaatgaaaattaaataaaataaaaaattcagctttccactcatagtaggcacatttcaagtgctcagtggtcacatggctgctgaattggactgttatatctttgtaagaagttctgttgggcagagctgctctgaagttttgaactttcaacagagtgaattatggcaaggcagatttcagctcatttctaacaaaactgttctattaattttaactgttcagtgccagagctgttgaactggctgcctcaaagaatagtaagctttctgtcatttgaagtactcagacagagactagattcctactttttggagtgatgtagaagagtttcctacccagaaccttagggtgtttaagtgggaagaagactcagcaattcaatgtttcttttactgcagatgaagacacagactcagagtcagacagttttgcccaaagacccacaactggttaatggcaaatgctagctgtcctcatgaatcctagcttagtacttttcccattccacccattggctaatgttttaacaacaaggtcctcgcggttcttgttgagcaacacatttccgcttctggcattcaccagcttttccacttattctctcccactcttctgcagtgaaaactacactgcagccaagctgaactggctatattgaaatacgttattctgattcctgcctctgcgtctttgctattgctttgccctttatcaaagtgacatttcttcacaaacttaattctacttattttctaacttctcctcaggtctcagaatattcaaacccataccatctcttctctttgctaaactaccttgttacaatgcactcagacatttatactctctgtgatgattatattttgtcttatccctttgatgagcttcttaaagactgtgattactattttcatgcatatatcctttttctgtctccctcactagaatataagttcctcaagggcagggactatagctgtctttttcaccataccttactatccagttgctatccagcaagtgtcttagcaccataataggtgctcaacaaatatttattgaatgagtgaatcaatttttctcttcccaagcatgctattattctccttaagtttgccatgaattctcaataaatacttttctaagcaaacatttctgtttctataaagtaagtattgaaaataggaatatgaaaaaaacaaagtaaggcactccagcatgtaaagtgcttgggagtcctcactcccttccaaacctgagcaagtaaaacttggtaagttttcctggaactgtcagcaatctcagggcaaatcacttgccaccccaaaatctgaagaaataggtacattcagacagtcacagctaagatttgcttacctacagcagaagcaactggaaccatagactagaagggccatttaaatagtaattttgatgaattgctggaggctaagtgttgactagcttgagagtggaactcctaggcgcaggagtctgagaaagggtctcacacgtacatggattttacctcccggaaacccgtcaggttttcacagcaaagagccaagatagaccctgtcctggctctggcaaagggaaggggaaagtaatgactttgaagtgcgctcagaatgttctctatgataaagacttactctccaaggaaaagggctttaccagagtcttatcccatctggggagaagatagttctctgactcgaggcacctctagattcctgtgtcaactaaggaaggaggaaaaaggttaagaaacatttgtaaaggtcacagtacagcaacataggcccaccaaaagattgagatgtaatcctaagaaaatggaatgtttcccttccccactccttaccaccacagcaacagggctccttataataacagtggattacagctgaaagagctgcaagatgcagacagacactggctggccaaggagagggggtctcaggaaagtccaaagacaacaggagagatgaaaaaaaaaaaaaaaaaagacactagaggactttgaaacctctgacaaccacatttatagcaaacattatatacaacccaatcttagacagataagcctcaagctgaagtcctttttgcctcatttcctgttatctgatacatcatgtctagctttcaacagaaaattacacagatgaggctgggcacatggctcatgcctataattctagcactttgggaagccaaggtggacagatgacttgaggctagaagttcaagagcatcctgggcaacatggtaaaaccccatctatacaaaaaataagaagattagcctggcatggtggtgcatggctgtagtcccagctacttaggaggctgaggtgggaggatcacttgagcccaggaggtcaagactgcagtaagctgtgatcacatcattgcattccagcttgggcaacagagtaagtaagaccctgtctcaacaaagcatgctaacaggcaaggaaaaacagcctgtagatacaaagcaagcgtcagaaccagactcagatgtgacgcagattttggaattatcacacagggaatttcggtagctatgattcatatgttaagggctctaatagaaaaagtagataacatgcaagaacagaggggtgatgtaagtggagcgatgaaagagctaagaaaagatcaaaaggaaaagctagacattagaaacacagtaacagaaatgaagaatgcctctgaagggtcactcagaagacttaacacgatttttaaaagtctcagtaatcttgaagataggtcaatagaaacttcccaaactgaaatgcaaaaataaaagaatgggaaaaaaaagagccaggcatggtggctcacacctgtgatcccagcactttgggaggccgaggcaggaggattgcttgagcccaagagttccagaccagcctgggcaacatagtgagaccctgtttctaaaaaaataaaaaaaattagccaggcgtggtggcatatgcccgtggtcccagctacttgagatggtaaaaggctaaggtgggaggattgggaggatcacttgaccctgggaggtggaggctgcagttagctattaactgcactctggctgcttgatagagtgagactgtgtctcaaaaaccaaccaaacaaacaacagaagatgcaagaactcagaactttggcacaatttcaaaaggtgaaacatacatatacaggtaattggaagatcagaaggagaaataagaatggaacaagagaaatatttgaagtaataatgactgataattttccaaaattaatgacagacatctaacctaaattcagatccaggaagctcagagaacacaaagtagaataaattccacaaagtctatacttagatatatgacattcaacttcggaatgtgaaaaaatcttgaaagaagccctggggttgtggggatcaccatatctatagagaaacaagaataagaattacagtggacttctcatcataaactatgcaagtgaagaaaaatacttaaagagttgaaagaaaaataaaccctcatcaactttgaattctaaatccataaaaattatccttcacatgtgaaggagaaataaagactttctcacataagcaaaaccgaggggatttattattagcacagcatacctattctttataaaatgttaaaagaagttcttcagagaaaagaataatgatagttcagcaacttagatcaacattaaggaaagaacatcagagaaggaataaatttaaggtaaagtaaaatcttttgcttttctcattaattgagctaaaagaaaactttgtttaaactaataattgtaacggtgtattagataattatagcatatggttaagtgaaatgaatgacaacaatgtcataagagattggagggaggaattggaaatactttaagttatctgaactacacatgaaatggcatagtattagttgaaactgaacttagattagtttaaaatgcatattgcaaactctagaaccaccactaaaaaagttaaaagaaatataattgagatgctcagagagtagataacatgttatataaaacgctcaattaaaacgggagaaagaagaacaagaggggagaattaaagcaagagaaggcaaaataagaaaaaaatatataaaacataggaaacctagagtcgtaggcaaatccttattgtctacaagaagcccactttaaatataaagcatcaagttaagagtaaagggatggagaattatacagtatgttaacaccaatcaaaagaaagctggagtcactatcttaattttagacaaagcagacttcagtacaagggaaattatcagggataaatagggacattaagactgataaaagtatcagttctccaggaagacataatcataaaaacatatgcaccaaacaacagagaatcagaatacatgaggcaaaaactgatgaacttgcaaagaggcacaatttcaaaataacaaattgactattgtagctgtggacttcaacacccctctttcactagttgatagatcaagccagcagaaaatcagtaaggacgtagttgacttgaatagcattatcagtcagcttgatctaattgacatgtataaaacactccatccaacaatagcagaatccacattttcaagcttgcatggaaattcaccaagatagatcacatcctgggccataaaacataccttaacaaattttaaagaatagaaattatacaaagtatgtactcagactgcagtgaaattaaactataagtcaataacagaaagatatttggaaaatgccaaaatatttacagattaaacagcacccttcacaataacacatgactgaagaggtcacaagataaatttaagagtattttgaatagcctgtagtctcagctacttgggaggctgaggcaggaggatttcttgagcccaggagtttgagtctagcctgaacaacatagtgagacccaggcacttgaaaaattttttgaataaaataaaatttaaaatataacttataaaaaattgtgagtttaactcctgtcttgccatatactagcagtagcagtacaactgtgaataacatacttaaatggctgtgcttattttcgtaaaataattttagtatttaaaacttcacctaaaataagttctaatgttctattgcatagtatggtgactagagttaacaataacatgttgcatatattttgaagtagctagaaagaaatgacacatatttgaggtgatagatatgctaattaccctggttttattgttacacaatgtatacatgtatcaaaacatcacactgtaccacataaatgtgtacagttattatttgtcaattaaaagcaaaataaaacaaaaacaaacacaaaaaattgtgggatgcaaggaaagcaatgcttagagaacaactgataccactaaatgcttacattagaaaagaagaaacaatgaaacaacaaaaatatctttcaataggtaaatgaataaacaaattgtggtgtatctatacaaaaaataaataaatggaggagaagaagcagtatctcctacagaattccaaacaattgatgcagatacttcactctcaagaaagtggtaattttccactccttaaagtgtaggttatgcatagtgactttgtttcagagtatagtgtggaaagggcaaggaagcgactttatggtagttactcacagccagatgatcaagacatcagcagtgataagcactattgctattatgtatgatgtgataaagataacacttcacctctgtggtcttccttcccaaaatacataactccagtctcataatgagaaaaacgtcagacaaattttaattgatggcattttacaaagataaatactcctcaaatctgttaaggtcattaaaaccaacggaaatctcagaaattgttagagccaagaggaccgtaaggaaacatgacagctaatgaaatatgttttcttggatggggtcctagaacagaaaataatattaggtaaaatgaagacaattgaataaagtatggactttagttaataatgatgtatcaatattggtcctttagttgtagcaaatgtgcacttagaacgtgtagtaataggggaaactctctgggttgatataagtggagcgatgaaacaaataggtgaaactgtaatatttgtaatttttgcaatttttgtaatttttctataaatctaaaactgctgaaatacattttattttagaaaaatcaatgtaagtatacctactcatgtgttcatttgtagaattattagccgaaccattttttccagtttcaataatttctgctgaataaaacttttggtattcatgctactcagtttatttctggaatacagcaattctttgatttctccttataaatatatgcaagaacaacagtgtcctttagttgttagaatcttatatagtccatatattcttcagcacccatgttattcattgtctttttacaacctgctatttaaggacaaaatacatagagtcacaaatggaaagtaaagaagaaccatctctttcatctcctcctcattttgtcatcacagtgtgaagtgtcagtatggagaaggcattactttgaaagcagactgtctggcagaaactgcaaaactgcattttgcaatagtgtcatccaaactctggggaattctgttattcagaagcctctgtggttcattcatgcattaagaggatgagtcttgctgctttctcatctgacagaggagaatgttgccatgacagctgttaggaggtgaggagatgtgtaaagggcatccataatgaaaagagaaaatagcctggcttcttaggtctcactgatgatgcatggagtggcttgtgtggattctcaaaatgaaccttgaaaatccgttagtcccattttagtaataatatctcacacacacacacacacacacacacacacacacacacacacacacacaatgtttcttttccagtagcctaagaagcatgtagaaaaattaaacctcaactaaaaccccctcatagatacctccttttccatctttggagtgtagactgaagatctaccatattgaaggtttaaaacatttgttttgttagtgattattatgagggaaaatattttccaaaaaggcagaatctttttagaaaatgtcctaaaaccagaaaaggtgttagagagtaatcagagagcttaagtagatttcatctctttagtcccagagagtaaaatatattttctttatctaaagatgttgaaggagtatttactgattgaaggatatggtatcttgcattttcttcaaaataatatgggaatggggagttttttagggccacaggcaaaaaaaagattggtaatgaatcgattatagaatattattagggactgacttgtgccccctgcccctgctcccaaaattcatgttaaactaacccccagtacctcagaatgtgactgtatttgaagacagggtctttaaagaggtgcttaagttaaaaatgaagcctttagggtattctctaatttggtctgttatcctcatgagaagaggaaatttggacacacaaagagacaccagaaacatccgtgtaaagaggaaagaccatatgaggacatattgagaaggcattcatctgcacaccaagaaaagaggcctcagaggaaaccacccctgcctgccaatcccttgatcttaggcttatagcatccagaactgtgagaaaataaatttctgtggtttaagccaccagtctgtggtaatttgttatggcaaccagagcaaactcatacaaatacctatcacataatcggagtatgtgttatctactctctggggaaggtttagttgctttgggagcctcatgatggagagcaaaataagaactggggggatcagggaaaactggccgggagagggtaggtgttagcctggtgaaaagccagtgggaagagaactttaagtagaaggaggagaatgtacacaggcctgaatataggggcatggcatgcttgggaaagtaaaagtagctcaatagggatgaattctagggtgtgggtgaatgggggactagtgagattaggcattagggcagtaagcttttattaccattcatatgcacacccacacatcacacatctatacacacacatgtgtttatactcattttgtttactgtcagtatctctcctctagaacataagtcctttgatgccctttctgtctcttttgttaactggtatatttctggctacttagaatagtacctggcacacagaaggtattcaacaaaaaaattgctgaataaataaatgagtaaactgcatgatttattctttagaaaaatcactttggcagcactgcgggaaacatttggaatgtggcctcaagcaggactgttaggagattgttgcaatagtcccgctgaagttgacggtggaggtgtagatgagaagactcagctaacgggtgagttactcaggaggtagaactaagagaacttgtaatgtgattgtctatagggcttaaaggagaatggtcactcccaggttcctggtgtaggcactgacagaaagatagggttattttctgaggtaagaaacatacaaagaaaagtagactttgggtctgggttggaggtactgagttcagtgttggtcatgtttagcttcaggtagcagaatgacatccaaatcaagatgtctacttggtggtgactgagagggggctgtctaggctggatcttcaacttagacgtgaacctaaagctgtagaaatggatggtgttgttcaagtagaaggtgtagacgcagaagatgagaacaaggagtattgagagaagaaaatagaaacaggaaatcaaaataagcagtgaaaagtttactgcacttccaaaaaactcttgaattccttattgttatgtttgtcattacattacagaactttaaaacaaatatgtagttcagattctagctctgaagctgtagtcttggtaacttaacctccttattccttctttttcttcatctctaagatgggtccaattataatccctacctttattatagatatgttgtgagggctagatgaaatacatgtaaagcctttagtattagaatgtgcattcaataattgttcactcatttttaattattaagtttaaactttcattatttttatttatttatttttttgagacagcgtctcactcttgctcaggctggagtacagtggtgcaatcatggctcactgcagccttgacttgctgggctcaggtgatcctcccatctcagcctcccaagtagctgggactacaggtgcatgccaccacacctggctaatgtttttttttgtttgtttgtggaggtggggtcccaccatgttgctcacgctgatctcaaactctgggctcaagcagctcgcccaccttggcctcccaaagtgctaggattacatgtgtgagccactgtgcctggccta

SEQ ID NO: 520 - DNA, 2615 bp, Homo Sapiens
ttgaatctttgatacatatttgttgaggagcttgtcagatcactacctttcactgaacagtaaaacatggatcatttatttcacctcattttgcacttcaatgcaatttcactctttaggtggttgtacttggacagttaaatgaagactgtctttaagggtgcagggatggagaacacagcatatatgagaggtgggagggcagagacgccttgcgattcctgtgaggagggacttaccgtctcctccaaaacagaaattcagtgctgcagagacggtagcaaagtgcagttctcttgttaaaacacaggctaaaagcagtgactgcttaacttattaagcagagaaaaccaaaatgtcattttcaaccaaaattgagtgttagagtttatggtctctgttatgatacttttcaagacctgggaaatatttgtatcctttagtgaaaaggggaagaatcaattactgaaagccataagcttacagtaacggagccaattaatcctttgtcatctttgttgagtttagttttcttctgttcttagcacgtcagctagtagatctttgatgaactgttgctcctctttaaatgtttcttttattatattgatgatgtgcactcattcagtattcttattttaagctgcagtaatcactgtacatttgattgccatctgtacttcccttgaagcagctttgcttattacagccacacctgcatctgttttgactagcccacataacctacacatttttcatccaaagctatcccattaccttatttatgtccatttattttcatatatagtatctgccaaaatagtagcaaaagttttatcaatgtgtagatttcaatcagaaaaacctaagcaaaaggaaaaaaaagtgatattctaaaagccacacttcttttatcaccagtgcagttttttccatcatcataaacttagttttatgaaaatgttaatatcttggatttaaacattggggtagaaatcaggacaaaatttaaatgtcatatccaggacttaatctcagatattctggtagaagatatttagataaggttgtggctgcctgtcaagttttttaattttttaaattatataatgtcagaaaattaaatcacaaatgagccttccagattgtgaggaaaattacttggctgaaaatgactttgcataatgcccaaatcttgaagtatctgctcagatgtttgttccatctgaaatgctgccaaatccatctgtattgaggaaagagctatgaggtagtttcagagaaagtgaaaacaaaacaaagcaaaacaaaaatgctattacagaagttggacagcccaatgtgttaagtattatacacctggaacaagagcagcaaaactgaagctctttggaaagttatggcaacagtggtctgggaattctgggcctttagaaataatcattcccagtgatacagggatgtgcagcatccagacactgcttaatcacagtgagctgccgtcttccctgaataagttgtatcttataacattgaagtgaatgaaaatgtattagtatttgagaatttactattccttcacctccttgcacatgtaaattaaagatgttttggaaaatatgagaacttgatgttcactgccctagagcactattctccaaccttttagattcctgcaatctgttaataaaatattgtaggacaacaactctatagactgatacatgctgctctcaatccatatactacatattaggacagcttttcttttctaaatgagcatgaatataaatagaaattctagtattttcttcacctaccccagtgaatcatctttatattttacttgggaaactgctacagttggctagtgggtcttcacttttattgctttgagaaatggataaaagacatagactatcacccctccaaaaatgtgcatatggccccatacaagacacatgtactgccagagcttggggaactccctagaatctactcctagaccaccctagtgaagtaccatagaccatattgtctagatgggacaaaataataaattttgactaagaacttactgtttagagagaaaaaatagtaaataatgttcaaaatgagaagacaataactgacaagtctgtgatttttgggttagatgagaccacttttgatttttgaggaataaaaggagttagttttttggtcctgatgtgtaaaatgattcatggggtttcacatacagacaagtagttttcttttcagcaaatatttaacatatctctcaatatatttttcaccagtttttggtaaatatgcattgctataggtataccaagttttttttgttatgtttagtaactaatttcattttttctgtatatgtaaatatagctattggaccctgcattgaaaaccttcttagtactaacaacactccttttattattaccttcatagttactttaaatgacatatttatttcgagttttacttctggctgagttgcaaagtctatgagaatgttacctcctgtctcagaagcttgttagttattgtgccacctaaatattgtaataaaagtgtttaaataaaaatcttcttaaaatttaaaatga

SEQ ID NO: 521 - DNA, 8209 bp, Homo Sapiens
tacattctttgagcctggtggagcacgtttgctgaggtgatgtggtctcctcagtgtcactgtgaagagctcagtcaggaaaagccagcagcatctaccctgccaccctccaaaccttctgactttggggagactccagtcccccaggtctttacccagcctgcagatctcattctagcttaacaagggcatgcgtgtgcatgaagttgaactaagagtggaggaaggccagaggtagggttgggtgtgatactaggtagcagatattacagacttctgaatgcattcagatttccaaagggtttcctgagacctctcaaccaatctttctaggacaatagctagtgtaggggtctcctgactcaataggggacccaggccttcagataccagccactcactggctgctctgtgacgtgctatcttaagaccgtgaatggaagacaagccctatgtaaacacaaatcttaaagccactgttggctactcgagggcctccttgtgctaatatcttttgttggatattatttcaaaatatgtgaattttagacccttttgtggttgcctttgctgccgcttgttaagggcaaaataaaaacgcaagaaattcttttagcatgaagaaatacatttaatgagctccagaactcaaaataaatggcttcagctccttgaacagtcatctgtatgccattgacaatattttattagataggcgtttaattagaggaagtctgtgggccagattcttccctgcatgtgtgattcatatttggaaatttctgatttatctccccccaattgtgccatgtggcctgcacttaaaatgtaagtaattctgattttattctcaagaacttatttgaagattcaagccaagcaatgctgaaaaaagctaggcctgcaaaactaaaacatagcacgagcctctcaaaatttccaccaaatatacaaaatccagtctgctctgaatgtgcatcagaaactcaactttggttattagccctggaatttggtgccaaaaacaaaaatttggttttgttgtcaagcaatttctaaaggaagaaacaatgtaaatattaatctgtcattttaaatgttgttgaaactgccatgagtgtgcacacagctctctgtttcatacctgtaatcagtattcgcatgctttcagtccactgtttctacttaaagcattattccgtatttcagcacagaatgactttggtgaaactgtagctgttagtgagtaattgcgttacaggcagacccagtcttaaattaacaaatctgggttcccttaactatcaggtttatgttggttttatttgcttctatctggatcccttctctttgcctgggaccttattctgattagctagatttttaagagcttttaaagttacattccccagaaagactttttttctctggactttctcttttatggtctgtaaacatttctcctctgatggtcatggacttagttctaagactggccttcctctagtgtgatggtatgagtctattctattgctgctaaattttacaaattgaactgcagaagagtctttctaggtaatccctgtaacagagcaagtttctttgaaccctagccatgtatgtgtagtgttccattattggaacgctaagcatgtgggagttatttatatcttactgctcacggtcatcatcaaggtctgattacaaaaattcaaaaaattacaacctcaggcataaatttaaagaggtggccatttaaaaataatccgttgctaccatttccacttaaaatggtagctctctgatgagttttatattggctctctgttagccaagcccgtaagagcatatggagagaaaggtacgattgaatgaacttctgtgagcggcataaagacatttactctgacaacattaaagaatttactggtactgttttttttccttgttagtttaattccatctgtttctgtttaattgagtgaaacttaataaaaatggtgtctctagtgagcacatgtacacacctctcccagttgttgggatttaaaatgaagctgtgacttttaggccaaaattagcgtgacacttaatataacagttttctttctattaaaaaataatgacaaaacacacacacacacacacacacaatctgtatgatgatttggcctggagttgtagacatcacagatcaaaagtggcctggtgctagctgtttgggtatatccttgaaaagggcaactttgtcatttcctagagtaacctagagagagatttccaagcatttccccatgaacagaagtggtaaatgctgatttattgtgccatatgtgtgtttgggaggaggggagatagcgtcttgttttgaaaaaagttctcacttcataaaataaactgcacaccactccaaaaaaaaaaaaaaagatgaaacctcaagcaggaggaacttttttatttaacccctagtgaaagcaattaaacgtcttggtagatgctagggaagaattagaaaatcttcttttcctgaaagctttaaacattgaatagactctgatttattcaggatcatttcggtgtagattggccactcgacacagacatcacagcatggtagcctcgaaaccaagccttcagcatcttctcggcgcccggtgttggagtgttacttggagtggaggcagtgcatttgcatcttcatgtagtctccagatcaggttactctgatttgtcttggagtggctttctgtttgaaagtagggaagattaaaaatcaacttgccacgggatatctgatctccatgagtagttgaaagccagtctaaaaggttaactctacagggccggcgccgccagtgcggtcatggaaaatcgtgctgtgagatactggagtgtgctgctggggccaggtgcagcaattgcagaatgttgaggagtgaggagtagttagaaatcactgcaacatggaaaagcacacagaccaaggacgctaaggagggagcgaggactaccgggcaggtgtgcgtgtgtggagtaaaatgcatcggacagtgattgactccacttttgagtgagatgtggaggcggtagtggtgtgggggttgtgagggagtgagtctgctttattatgaatcaggattgatagctggccttaaagtgggaaatgatagaagggtcacttaggagcctgcagtggcatggtgaccagtctgttattactcatagatgaccttttctggctcttgaaaccaagctaacgactcctttttcttctgggcctcaaagtttctttgtaggaagtaaagcatttgtcactttccctgcagtgatttattgaaagactgaagataggtcttccttagttaaggacgcacactggctgctcgctccagaagcaccaagaatggctgatggataaatcccttacccatactcctgtttctgcctcctaaggttgctgtgaaaacctaactaaccaaacctcaccagcttggcctatattattaatcaaattcccttctgttctctctgtgtgtatatttaatactgtagataatatgttttatttaaaatttctaatacaccaaattaatttgaaatagaaaaggctggggacttcattctcatttttgtcatttgtttaatcagtttgggaaaacattttccgttgttccattgtatgcagtgtcttgtcagcatgtacctatctaggagaaaacgctttgttttcagcgttctgtctttaccctcaaagcatggtgtagcttctgttcttacactgttggagcactgtctgatgtctttttttttttttttaacactgctgaataccaatttgtacttggaatacctctttcctctagaatacagtgatcctattccccaaagtgcaagctttcatgtggaagcatcctaagtgatcgtcctgggtgatgccatatttcactaaagtgggaaaagaagaggtgaactttgctcttccaacaaggcttgcactttatactttgggcagtgcatgggagaaggggggcccttagaggtgagcaggatcactgtagctagaggagaggtctcactgaaacagaacgcatctgtgactgtagcttgcatggagagcctagacagccaaccatggatttgcctttatgttttgaatggaaacatctatttcaattgggatagaaacctttacctatgtcatatctgtaagagaatttagcttatagatatgtagatacgtgtgtgtgttgctgggtggggaagtgggtgggaatgtagaaaaggcctcacctgacttggtcccagttggcttctgatggccaaggagctgtttttcattttggtgggcacccaacatgtaggttctcacagatgctgtctggtttcttcttctctccatggcggaacaatgaagtacgtcaataaagcatggactcataccactgggaagaatgctggcttctccagtaacaatgagcttggtggttctttgagcatggaaggccaagctcatgtcacagtgtatgcacggtattaatatatctcttgttgatctaaactgaaggggcttttacttgtcctaacaggtatcatgctgtaaaaactgtccattgtaactgttctttcccactgatggctgaagctttgtcctgagtacaagatggtatttttcattggtacgaagcaccatgttcccaacccaaacactgcctccaccaccaccaccaccaccatcaccaccaccactgctactaccaacatcaccaccaccatcaccaccaccgtgttcaaacaaagcagcattctcctgtgtcttttcctcataagtaagaacaaggtagcacattcatttttccattagtgcatttcaattcttttcctgcaagttgcattgctattgcttttctgaattgcttgatgatgaactgtgaagctgatgcttagctgcttgtgaaacttttcttaaaggaactgggtctaagaagcacacatacattaccctcaacaacctcaggtatcaagaagaggaccacactgctaacatgggtaatcctataacctggcttttcttgtggaactttgtaatttctataaaataccgccagctttgcgtattccactgagccccaacttagatatcagacgctagtgagtcctgcctattcaggaagctacgtattattcagcataatactgcccttttttttgataactggctttcaaatgggataatctcaagagaggtttcattgtatcctcttagagcgtatggatttaaatagagcctttcaaaaaaatagatgaaaacctacatctctaatatatttcctacttgggccttttgagcatattctgggcacatagagagaaaatctcctatgttttagaacagaataaaagaagacaaattatggtagataagtggcacccagaagattgcaaaataaataattttatgtgggggaatattgaagaaaaagcatagaaacttttttataattgcactttaaaattttggaaaagaaaaattgagaatgcaatcagtagtctcatttttgtcagtattctgtcagatattagctattcaataagcatatcttggattactatttttttagttgtcagtttttctagtttccccctttataggaaaaaataatacctatgtggttaaaaactgagacccatttaaaaaacaggacaggtacagttaagtactagaaatgccgtttttatcacttgaaaaatagattagaaatgtttttcttttcccagaattgtgtgagtttgttttgaagccttgaataccggtacatggttaacaggcagcttgtgcccaatcccaaagcgggaagaaaggcctggctttggctcactgatgataaagtctcctcccactgcctttcagcagctctgccgaagagctgatcaagatgctgcaaacccagcttccccagaccggccaagagggaagaatgatgagcgtgttttaaattacaaagagagagcagcgcaggcagtttctggtctgggtgataaattgaaatccataaatatagcagtgctaatttgaagttccgtaattgtttgtgccatgagaatgtgtacatttgaaaggattttataaagcaattactagaaatgcctcccttgagagctgtatgactggaggtgttttcagtctgaggggggcagcataaacccaaacctcttctagatgaatggcagggtggcgggaggggtcatgaaatcatggggaagaggtgaaggatttgagagctactaacctgacatctaactgaatgcctaagaaattgcagggcaatttcaggaaataggaaaaataattttgaaaacattcaaagcctccagactttcggtgtgtgactgatcttttttctaatctctttaaacttctttccacctattgccttaatagcaggtgcttcctcttagggtccccccaaattatttacctcgagttccctaatgaaattactttgcattaatttgtcataaagggagaagtgctagaaataccgaggcattgataatttcatggagtagcaatgaatgtcagtcacagtttcctctccccgttgcccggggctgtgccttcaaagcaggtgacagactgcaaggtgtaaacaagctttataatgccatataaatcaaaccgggctcattttacctaacaacagaaccatgtttgtttgcttttttgtaaaatggactacttcagtgaaaaattgattccacgtagttctaataactctgtgaccttggacattggctttttatagacacagctcttcccacctgctggtatggacaccagtttgtacagactgttgtcacacaccctggctcaaagtcaaaagagaattttaattactcatcaagctgccaaattctactaattgcccccttgtcagcatatttcattaattgctgaaaggtaaatgagttacatattttgtttggaccacgtcacctgtacattttcaaagcctcggattgtttatcttgcaaagagagaaggggcctcttctccacagatgcagctcaaattagcaaaactgaactgtagagtttcaggcctttcccttccttaaaatgctgatagatttctagaccagactttgatatttattggcttcttggtcttgctgtttaaacacacccattgccctttctttcttaggccctataagcaaagctggagtagcgtcttgggaaaaggccaactgaccaccctaattttgtcgttccaagtctgcagagcgcacatattaagtagttgttactgacatctttaggctccgtgagtgaaatgcagcaagcctgcccccagcagcctgtgggctaatcctgagctgttccttcgtttaggtacacaggtgaccctgaagttcccactcggccctctgttttctgagtcctgtctcctctgtagcacagtggggattgttctgaaccgtggcacgccttcttggcgaggcaggctctcttatggaaccatagtctgttacctcatttcttccaactgctctgtcccctaaatgtgtgttcccaggtgcagtgcagcaagggtgctcgctgttggcctttgagagtggaggtggctgtatcggagtgtgctccccctactttttcccttgccccgagtggcagttcttttcctctctgttgccggatgctgtctagggcctgttagttgctatttccttgcctccgctccccttcccactagccttctaactaccttttattctcggctccaactctttcaatgatgaggtgaatgctttttctgttccacgtcactgcaaagtcaaggtgtccagcatgctctcacttataactgcctcacccgatctcacgcacagtgcgagagctgaaggtaagccccggatgttgccagattacggtggacaaataaaaaacaactctccaacagcaactcacaaatgcatgaaatgttttaacctctagacagactgccagaatttctctcttctaattcctacttgtagtgataacatttttctttttgtgatttttttttttttaaataatagtgtagtaccttgaaacaactgcagttctaactcattgtcaccatttctgtttgacacgttccacttcctttgcaattattgtatttagttgtgcactagtgtcaataaaattgacatttgtgaagcaa

SEQ ID NO: 522 - DNA, 7186 bp, Homo Sapiens
agtttcccaaagatctgactgagctgaaaatggaccatgctcaccaagaccactggtaaaaactttgggtatattaaccagaattatttttaaatttctggccacactgccaaaatcttgctgaactttgggttttcttgactttgtggaagtgtttctttcatggaactgctgggatcaaaactgcatctgtcttagggatgcagattgtggctgggaaatgagatgtgtcttaacttaaagaatgtctgagcttcttcagagtagctcagtttaaaatgttttcttattgactgattgagatgtgcaagcggctgccacctgacttgtaaaaatggattttcaagtgtatttgttttttagatagcttcatactgagtgaaggaatacatagcctggaatttcctctaattataagcctaatccagttagtgcacaaatctggcagatattttagtgtaatacaaattaatgttttcgtttgcttcacctgatttgtttagttgaaacttaaatgtgttttaaatgtgaatttttagtaactatgtatcaattgcaacgatcaacaattttttggagaaatctggtagctttactctcctataaccttgcatgtttttgaaatattttctactatgattgcaaaatgatactactcttcaactgacaaatcaccttcatcctttatcaaaaacatcttcctctaagaagcctagtttcagtttggcagaagagagaggctatacgtttttaaggggtgacaatatgcttttagctcagccaagcctggtttattagaccttcaattaaaataatgagttcaatggctatttagtttattagtgtttgtagtagtagtgatggtagtagtggtagtagtactactaattacatttattgggcactgggtaagactaagtaaaattagctaggtcatctcatttaatcctcatagcaattctgtgaggcaggcattattattatccccattctaagatgaggaaactgaggcacagtgaagtcagatgacttctccaggtggtaaatctagaaaacagaacagttcaggcccaaacagtgtcatttgactcaaaactcacagttgtcccaaaatactataccagcatactgtctcttacctaaatagattgtctcgctgtaataaaacatgaatggctagtggcaactctttttgagcaggcaaaatggatgcttaaaacttaatgtcagtcattctaactctggtttaagcaccattgtaggtggggtcctggaacaggttatgaagaatggttatgaagaatgatgtcaagtctgccatctctactggatcatgctctgaaagatcttttagagtttagacccattcatggcaaaatggaataccctagaagtaggggagagaggcaaaaagaaagggagagagactgagagaaagggaaaggaaaagagagagagcatgctccatctttaccactatcaaggaatcattgaccatcctacatctctccaggtccttctcagtgacccaggacatctcagtacaacgtagtatttcagtctcactgcctgaaatattaaaggtcaaaacacattttaaggtgttatctctttcctgtctcattctaatcaattttgtacatagctggtttcatttgaactcaatcattgtgatttgccccttatgggcagctacaattaatcaagtgcatgttagtcaacatagtttgtgtacaccacataatgaaaatcccatgaaatttaggcattttgaatgttttaagagcaagcctcagtgagacttcccttgcagaaccgacttcccagctggagggagatgcatggcccatgcctttcccaaacaaatgtgtttgtgacatttccctgtgtaaacgctgactttgttggggggaaatctgtggtgcctggagagatgggagaaatagatttcggaaatgctaatctaggggagcaatccgcagtattgcagcctgctggggctgtgttctgcatgctccccacagctgcctctgagcgaacttattgacaaaggcgaaggaagcttacagtgcaccaggatgactcactccacgtttactgggtggttcacacggctgcctgcttgccggaacaggaaggcccttattgtgctcaattgttttcctgaatgcctttctcaacaacagcaaaaggaaacattactttttggcttccagccatcctggccacttggtacttccagtgcttagaatgcaaaagttgggctcagccaagacatgcagaggcacaaggctgcagttatttctgtctgtgtttcagattaaccactgccttttgcagtaaacaatccagggtgatttaagacaacgggaactccctttactagcaacagccccgacccgagtttgaccgtttgttttatggacttgtttcatgtacagtaaccccatggggggccttgacaccaccacccactgagttgcctgaataaaatagaaaaggccctgcctgtcagttacctccttcttgaatctgattgttccagagatactgtgagggaggggaaagtgcagcctggagaaaaagggaaggaggaaaccagaaagttaacagcaaagggaatagagtcagagtgctgggggctccccagcctctggatgtaatcacaggcacagtaagggctaatggtggtggttttacccttccatgctcttgcatttgatgtctttcctgtgctcagtgacaagtctgaatctgtcttcccctctggacaccttggcctggtcctttactggttcttcagctgctgctgccctggaaaggctgttattttttagctcaaggggccaaagttatgctgcagtttgtggccagaaaatggggatgggagatgaagtggcaaaacagagtatcagcagagtaaacagacaacctaccaaatggaggaagatattcacaaactatgcatctgacaaaggcgaaatatgcagaatctatagggaacttgagcaaatcaacaggtaaaaaacaacctcattaaaaatgggcaaaagacatgaacagacacttctcaaaaaggacatacaagtggtcaaaaaacatgaaaaattgctcagcatcggtaatcatcacgtgtccggaattggtgggttcttggtctcactgatttcaagaatgaggccgtggaccctcgaggtattacagttcttaaaggcggcgggcgtgtccggagtttgttccttctgatgtttggatgtgttccttctgctgtttgggtgtgttcggagttttttccttctggtgggttcatggtcttgctggcttcagaagtgaagctgtaaaccttcatgatgagtgttacagctcctaaaggcagtgtggacccaaagagtgagcagcaacaagatttattgcaaagagtgaaaaaacaaagccttcacagtgtagaaggggacccaagcaggttgccactgctggcaggggcagcctgcttttattctcttatctggccccacccacatcctgctgattggtccattttacagagagccaattggtctgttttacagagagctgattggtccgttttgacagggtgctgataggtgtgtttacaatccctgagctagacacaaaagttctccccctccccactagattagccagatacagagtgctgattggtgtagttacaaaccctgagctagacacagagtgctgattggtgcatttacaaaccttgagctagatacagagtgccgattaatgtatttacaatccctcggctagacataaagattttccaagtccccaccagattagctagatacagagtgccgattggtgcatccacaaaccctgagctagacacaaggtgctgattggtgtgtttacaaaccttgagctagatagagtgtgctgattggtgtatttacaacccttagctagacataaaggttctccaagtccctactagactcaggagcccagctggcttcacccagtggatctcacacctgggcagcaggtggagttgcctgccagtctggcgccgtttgcttgcactcctcagcccttgggcggttgatgggatcagcaccgtggagcagggggcggcactcattggggaggctcaggccgtgcaggagcccatggtggggtggggaggggaggctcaggcatggcaggctgcaggtcctgagccctgcccctttgggaggcagctaaggcctggtgagaaatcgagtgcagtgccagtgggctggcactgctgggggacccggcacaccctccgcagctgctggcctgggtgctaagcccttcactgcccggggccggcagggctggccagccactcggagtgtggggcccgccaagcccatgcccacccagaactctagctggccggcaagtgccatgcgcagccccagttcccgcccgtgccactccctccacaactccctgcaagcggagagagccggctctggcctcggccagcccagagaagggcccccacagtgcagcagcaggctgaagggctcctcaagcgtggccagaatgggtgccgaggctgaggaggcaccgagagcgagcaagggctgcgagggctgccagcacgctgtcacctctcaatcagagaaatacaaagcaaaaccacagtgaaataccacctcacacgagtcagcatggctatcacttgaaagtccaaaaacaacagatgccaatgagactgcaaaaagaagggaacacttatacgctgctggtgggaatgtaagttagttcagccactgtggaaaacagtctgaagatttctcaaagaacttaaaacagagctaccatttgacccagcaatctcattattgggcatatactcaaaggaaactaaatcattctacctaaaagacacatacacttatatgttcatcgctccactattcacaatagtaaagacatggaatcaacccacgtgcccatcagcggtagattgtataaagaaaatgtggcacatatacatgacggaatactaaacaaccataaaaaggaaagaaatcatgtcctttatagcaacatggatacagctggaggccataatcttaagtgaattaacacaggaacagaaaaccaaataccctatgttctcacttgtaagtgggagctaaatatttagcacacatggacataaatataggaagaatagacacgtggactactggagggaggaggaaaaaaggggggtgtgggtgggtaactccctactgggtactatgctcactacttgggtggtgggatccatacccaaacctcagcatcacataatattcccatgtaacaaacctgcacatgtaccccctgtatctaaaataaaagttgaaatttaaaaaaaaatgtttcggcccagcatggtggctcatgcctgtaatcccagcatgatttgggaggccgaggcaggtggatcacaaggtcagaagattgagaccatacactgtgttaaccataacagggttaacagagtaaaaccctgtctctactaaaaatacaaaaattagccaggcgtggtgggcacttatagtcccagctcctctggaggctgaggcaggagaatggcgtgaacccgggaggcggagcttgcaatgaactgagatcgtgccactgcactccagcctgggcaacagaatgtttctcttttcaactcagtattgctctgggcctcaagtggcccccactgtgttcacagtcttatgcacctaccgtgtcatggttttcagagctactctgagctttctctgtccaggtgttcaagctggaggccacggaaggtgcgtaggaagggtaggggtggcaggaggaggcagattccacactgttccttctggcctctctgctcccttttcccttcctcctttcaggttctcctgcaccaactccacctacgttaccagcacaggatctggagctcacatgcagattatttcatgccaaggtacacaagtaacccttcctaggccacctgttctgacccacctgaaagcttaaatcagtctgggctcacccagagcatcctgctgcatgagctccttccaaagcccccaggacttttgccagtctttagcaacatggatccctaaaaatcaggttgttcaaaagtgttccatgttcaaaatagtttgagaaactagattaaaggaaagcaagcaggttcttggcagcaggactcctcagatacatggctgtgttgctgcatgctgtggctctgcaatgaggctcaagtatgtagggttctcttgtgctttagactggttaagcgccaatgccaaagagggaacaaaggattggtacttttccttcaactgattgggcctctctcagagaatacaaactcacaaaatgagaggaaaagtacagcaaactttgtggctgcctttagcacccctacgcctactggtggtaaagggaaagtccactctggagaggggaagggtcactgctttcagaccctgggcagggtgacatgcatggtgctggtgggtggagccagccacatctgcatttaatgtataatacttcaccgggtgtagggtggggatagccagtatggtggcaggtcccattggagcagcagcaataggttggttgtgggtcctgctacatcaggctgtttttgggaaaggacctgaggcctcgtcctttggcaggacaaactggtagagtcagggctgccaatgaaaatagccaagctcatacaagctagggtgcatagactcatctagctcatgattcgctccggtacatcaaaaagccagcaagcccgacagcagcaaaaaacaagtcaccgtcttaaattcaaacatcatatttgtacacaaattatactgtcagtgtgttctaagcagatggaatcatcttgttcatttcttggggccagagtgataatcccatttggtggccgggcatggtggctcatgcctgtaaaccccagcactttgggaggccaaggcaggtagattgcttgagcccaggaatttaagaccagcctgggaagcatggcaaaactctgtctctgcaaaaacaacaaaaattagccaggcgtggtggctcactcctgcagttccagctactcaggaggctgaggtgggaggatcgctggagcccaggaggtcaaggctgcagtgagttgtgatcgtgctac

SEQ ID NO: 523 - DNA, 976 bp, Homo Sapiens
gggcccaggctgtacagctggcagtgcctgacagcctacctgacgctgaattggatgggatacagcatagggagcagtagctgggtgaggtaggagaagggagtcggggttatcacttacaaatggtactgaagcctaaactctgaagtgagtaggtgctgtgcttttatgggcctctttatgaagcaaattatgtaaaagttgccatcgaggacaaacaagtgaaatactttacacattacggtggattggatgaaaattggaatgaatgggctccaaaaagtagagtactcaggtacatgaacaccaatctgtagaaaccgggagaacttcgagaagcaaatcaggaacaaaattcatgggggaagaggagagaggctgccccagcaaagaagacatctggtctgcaagggaaaaatgttgaaatcatgtggaaatggaaatggagcagtaccaatgagatacctcagcctcctcagaagagccccagtagatgccgctgttgaaaacattcatgaagagagttgaagttaaagatttctgaagaattaaaaccatgttttgttgatgagtgagacataatgaccaaacaaaaacagctttatcttcgtgccaggaaaaatgtggattctattgtagagaattatgtaaattacaagaaaacttgagggaccacagataataaggagtatgtttttaatatggttgtggcaaaaatggaaaatatttgaatataatgttaggcactcagatactttacaaatctgaaagactccagcatgctgaaatccttgaagattacccagaggcactcaagttccaggggtatggaagaccacatctgttgatataatttgtatgaattggaccaatgttgacccaaacacctctagaggagaagaaccttgctttatgactgaactatcttcataatgacttcctggtaaagaattctgcaattttatttaaagccaac

SEQ ID NO: 524 - DNA, 2653 bp, Homo Sapiens
ctctattggtccctcttttctattggcacccctcttcctgtttgtctctcattcttacatctcattaccatcgtccctgcctcctaattggtccctctttctatcattcttcccccccattggctgtcttcctcattaatagtctcttctccaggagtcctcatttcctattggttttccttttctcttaggtccctcctccacttttctctcttccactggtcccaccttcttcagtagtttcagttgacctggaggactcttcctctgttacgccctcctctactgtacccctcctgatcagtagtccattcttcattggacacttcctgcccattgattcatcttgattggtcactctgtgaccattggtcttttcctaactggccatgccctctcccattggttcttcctttctattggttcttcatccaatggtccacctccatcattggtccttttctaactgtccccaccctccctcatggatcctccctttctattggcccttcctccaatggtctaccttcctcattggtcctttcctaactggccctgccctccctcattggctctctcttcctattggtctgcttccctccttggtccttttctaactggcctcaccatcccccactggctctcccttcctattagcccttcatccaatggtccacctccctcattggtccttttctaacttgccgcatcctcccccattgtctctgccttcccactggcccttcatccaatggttcacctttcttattggcccttcacacacaggcccaccttcatggatcctgctgatctattggacctgttttttcctctagtgactcctctggaccattgatcctttccccttagtccctcttccatcagctatacccccattcactgtctcaattcacatccttcagttggcttttgtgctttattggtttctcttcttccatcagttccttctccattattccttcctgctgttcaatgaatcctgatcagtcccctttgacctttgacatccttcctgattagcatctccccactgaccttccctctttattgaaccttcatcttatgttccatctctcccatgctattcacccattggtctacattttccattggctgttcactcactggcccagctcccaaattcactctccctcccccttgacctttctcccattgaaaccctgtcccattggtcctcaccattagcccatcttcccatggcccctcaccaattttcccactccccatcctttggcacacttccccaagtagccagtagcctgctccccaccagcctcccactactgaccatctgctgtcttgccccagcccaggatgtggcagctggtggtgttggctgagcagtccctctccaggggaaggggctggatgagttcagagagtttggctgggcgtgccaggcgcaacagcatgatgtcctggtcatggctggcggcatcatagtcagggtggatcacagcccggacaacagaactctgctcctgggaactctccctttgccgaaggttatgcttccccaggaagacctgaagattcctgggaaggaagagggctgggtctcacctggagcccttgggctgcagttgaggcttcagagagggctgggaagtcatgaatcgctggcctgctcctcccacagtcttccccagctgggtaaatggcaattccatcctttcagaataatcttgggggctattcttcactctctttatttcatgccctacatccaagctgtccagaattccttttgcctctctgaagcatatccagaatctggccacatctcacctttcccacggctaccatcttggtttgagctgccttttcacttcctacctgaactagagcagtagcctcctcactgggctccctgctctgtctctggtcccccacagtccatcctccacaaagcaaccagagatattttaacaatgtaagttggtcctgtgcctcctctgctcagcccctcctatgactcccatctcactcagaatcaaagccaaagttctcaacgtggcacaccaggccttgcaagcactgccccatcatctcacagacatcttctcctcccactctccccttctctccctctgctccagccaaacgctggcttccctgtcttgccttgaacacaatagtgatcttcccacctcagggcctttgcactgctgttccctctgccagcaagtctgtcctccaagtatctgcatagctcactccctcacttcctttaaatgtcgcctctcagggaagccttccttagttgcccaattaaaatacaaatacctgttagtaggcaattcctatctccctcccctgctttctgttccaccagagaacctatcacaatcatccgacctgctatatatttattgttaaatatttactcattgtgttatttctcctccttgcagagcaatgctgtccactaaatgctacgatgccatgatctcgatctgcactgtccagaggtggctgggggaaccacaagctacaggctgagggagagaagatctgagtcagagaggagttctggagaaaccaagcgcatccccctcaacatgaactccagtcaagattggtcaggtgcagtggcttatgcctgtaatcc

SEQ ID NO: 525 - DNA, 1669 bp, Homo Sapiens
gaagaccccaaatgacatagaaggtcttggagaagagtccaacagagacatatattcacagacacgtgtacatctttatgcccacacagaagggtaacagcagccttgcttcagaggccacaccttccaggaaacccttcagcctgccgtgtcttagctgatccctctgccatccccttgcagaaggagcttggagtctctcagctcagctggactagatgaatcttctcagggtcgtcttctcccacctctggctcccagttccttcccccagtctctccctccctgctctgtgtgatcagggaagctgcaaacccaacccttacatcaaaagggaacttgaaaaatacttggagcaaaaactgctaactgtgcatccttgctgtatgctggcgctgatattaaatcaggaaatggcactgaacagccgctccgaacacagaaacaggggttgtcaacacagcaaccaaaagcaatctctaacgggcagaggtgaaagggacctggcacagggccaggaggggggctgcaacccaggaaagaattcctgagctgagtgtgtctgtgccacctctccagtgtccagaatgaagcctggatctcagtccctggcatggaatgcaccttgtctctctccatgagggatgaaagataattagataattaagcatgttgcttaaatacctttgaaattctcctttttatttccatacatgtttaccgagcacccactatgtgcctgacagtccaataaaaaagatgccttcccatgtggagatgaccttctagccctcaggacagaactctgaccctttgacatggcattcaaggtccttcgagtgttggctcctgcagaagctttcatctctgtttccagcctccctgaaatagctccccaagggcacgaggcagtacctttgctccatgcctttgcttggactagtcctaccaccagcaattcctgcatttctgtgtttggcaagtttctgctcagcctccaaagccttaaccaagtgtcaccttttctctgcagcattttctgccaccctccccatttcttccaatagaaccagggatcttttacttgggatccagaagcactgtggacatattgccatcacaacacctttcatgtcacaatggcaaggtttgcactgtcttggaggagaggaaggaagccatattcatccctgaaccctcatctcccagcactggttgtaaaactgaaacaaaaatggaaaaccttgatgaaattcattgttggtgtggctatggggaaacagattttccatttctgatagtaaatgaaataggcaccatcttgttagaggctaatttgacattattaacactgaaaatgcacacatctttcaacccagcaattttatttcttgctttctagaggaatgtttgcccatgtgcagaaaggcgcatgtaaaaagctgagttgcagcattgtttgcaatagtaaaagatttgaaattgcttaaatgtcggtcaatatggcctggataaaaaactatagggcatccattggatagaatgctatgcattagttaaaaagaagtagatttccatgtattgaccaagcatttgctgagtaaaaatcaaaagcaagctgtagctctagacatagatgttaaaattacattgctgcattttttcacaa

SEQ ID NO: 526 - DNA, 2707 bp, Homo Sapiens
agtcacacaagtgcttttccttgaaacaacatttatacttttgaatatactacaaatatttaataagcacagcctgccctccatattcgtgggttgcacatccatggattcaaccaaccacagatcaaaaatattcaagaggccaggtgcagtgtctcatacttgtaaccccaacactttgtgaggccaaggcggaaggatcacttgagtccaggagtttgagaccagcctgggcaacatggcaagacctcatctctttaggcagggcagggaggagggaagaaagaaaaatattcagggggacaaaaatggatggttatgtctgtatggaacacatacagacttttttcttgtcattattccttaagcaatacaatataacaactatttacatagcatttatgttgtattaggtattataactaatctagagataatataaaatatatgggaggatgttcataggccatatgcaaatactacatcattttatataagggacttaagcatctgtggattttggaatccttagggagtcctgcaaccaatgtctgatggatactgggggacaactatattatgtacttcctatgtcatgacattgaatattaaaaatatatatacttaagattttgaggtttaataaaatttatgaattttactgcttcatcaaggatattcttaagggaatttggcatttttaaaaatttcaattgcatggcagtgaagaatctaagaactagtatactttggtgcactagttttggtacactaccttgatttattctaaagcactagcatttttactttccattgcttttacaccgtcagtgcaaatgacagcatggtgagaaaggcaaatgatgtcctgttaccaccatgaaaatagtttttaactcacagactcctgaaatagtttcaggtatccccaggagtctgtagaccggactttgagaaccactgccctacatgattatccaaaacaatatgtcccttgagttctgaatggtaggagaggagaggggaaggcagaaaaattgtcaaactaggctgttttttctctagttctgaaagagagtaatagggaaggaggaggttatattgagtttcacagaatagattgggcacctgagggtttatctcactcatttagttgcagtcttccttgtgacaattagaattatgtctgcttggccttaatgggtcatatattccacagaattctgtacaaaatgtaaatataatattgtcaaatgtcttttttttttttttttgagacggggtcttgctctgttacccaggctggagtgcagtggcatgctcacagctcactacagctttgaactcttgggctcaagcaatcctcacgcctcagcctcctgagtggctgggaccacaggtgtgcaccactatgcccagcttttttgtagagatggggtcttgctatgttgctggggctggtctcgaacaccagacctcaatcagtcctcccgcctcagcctcccaaagtgctaggattacaggcatgagccaccacacccagccaaaagtcttttctaaacagaaaactgctgatttattgtgaaaacccagtcacccattctcagaacgattgtaacttttattttgaatttagatcttttgtagaaaccagaatatataaggtgggataaaagctattagggtttcaagtctggggaaaaggcacacggtttccagtttcaaggttttttccatatcctaccataacacagcccacagctttttgttgttgttgttgttctgacttctcgtctatagactaaagatagatattagtgacataatctttaataataagtaacagctcattgtcttgaataaggtatgtttaccttgacttaatatcgtttgtatttctaaacacatttataaattgaatcatatttgaaatgtattaggaagatttgttctttgttgtttatgtttttttaaagcaaacaattgcccattaacttctatttttaaaattggtaatgtgccttggttgtttaaagcaagatatatctatttagtctagcttcctagaatttgtttcaactttaaacctttctttaaacttttaaccctttccttcattcctattcaatcttctgcaaaacgctcaacctttattgcgcaattgctgtattgaacccattgtctaaaactaaactttctcctcgtaaagtaatgttgatttttcacagtgagatgacttttcatacgtgttactagcctactatctcctacttctgttcactttggactactgcagtggtgacctagttagtggtctctgcctgactagtcacttctgtatttaattcatccaaaagactgttgcaaaatttattttctttgcatgttcctaccccattcaagaatattcattatgaggccaggtgcggtggctcacgcctgtaatcccagcactttgggaggccgaggtgcgtggatcacttgaggtcaggagtttgagaccagcctggccaacatgatgaaaccctgtctctactaaaaatacaaaaattatccgggcatggcggtgggcgcctgtaatcccagcttctcgggaggctgaggcaggagaattgcttgagctgggaagtggaagttgcagtgagctgagattgtgctgctgcactccagcctaggcaaaagaataagactcctatctcaaacaaac

SEQ ID NO: 527 - DNA, 7209 bp, Homo Sapiens
gagtgcaacagctgatccctttcggagtggagtttcctagctggtgcctgtcctctcttgagcctttgtttcttgagtgagcactcactggggctgtggctccatgaactggatttcaggaaaccagccaaggcattctctctctctctccattcctagaaaggcagaaagcctgggaatgggttcggcaggaagatctctgtacctcaatctccattgctttcagcaccactggctttctccccagctcaagtgcaaaacctgccatcgttgctacctggggtgcctcagactcacccaagtcccccaggccagaggacatgctctcaagccttgtttcagaaagagggacccaaaggctgttagggaagagaaccagggtcctcaaacccagggttttctcacccactgcctctgctctggctgtggcctgccagacctctcctctgattttcgctttccttcctgccagtgcctttgtttatccgaggcgccaagatcccactgtgaagtctgaaaggaagaccagtggttctcgcttttcctctagatgctgtgtctcccaatgtcatcttctttcctctcaaagacaattggacgttgttacagattttcttggaatgagtaaatacctagcagtgggattgctggatcatatgaaaatgccagactatatttcatcagcaacatcggagagttccagttgctctacaccctcactagcacttaatattgttgatcgctgcctggattcacagaaggacaaattacaatgcattttgaaagactcgtctacagtcaactaaaataccagttatcacagacttcactggccttaatgaggaggctgagagggatttaattactgggacatgcaacgcttacaccaaactctgttcgattcacgacttggaaaagcaaatgtggatacagatgagtgtggacatggcttcagtaggaaatgtcgagtttgttcatcactctgaagtttcttcagctgcaacggaaactgcaccctccctcccgacttgttggttatcttgctgtgctcccaagaaggtattttctgctgacctgatagatcaggtaagagaatagcaatgtgtcttttgtcatctgcctccagttccctggctgcctgcattgctgtgtttgttatctgtggattgaaggtgacaccactctcaaggagggtgaaggcagaggtgtatgcacagctagtaccagtaacacccctagagtgagccaagagaagatgaggtaaggaggaaagggagacttagtcatgggcctaggaaaaagcgtggggggttacctatgtagaaggtatggatggtgaagctggatctctttttacctgtggtgagcacaccataccggacaacccagggcctacattatagagggtgcactctgcacatgcaatgcattttgtcaacagaaagctctgtgtaaaagtcttaaagcaactctttagaaatcctgtttcattattaatttagaaggattcaaataggaaatgtggcaacagctgtaatgggtattaaaagcccccactggcagtgctgggtcttagctgcctccagtggtgatcctcttcaaataaggaatcttgagccaaaaatccacccttcctgttaaataagtgttcatactcattattttattataaaagtcataatagcttgacagtacggcaaaggacagtgaaagataaatgcacataagtagtataatgcagtaattaagagcctggtaaaaatctcaactctgtcacttaataacctaaatcacttaatagctttgtgcctcaatctaaaatactgataataataacagtaataatgtttgccttcgtgatgttgttgtggagaagaaacaagttaatatagataaagtacttaacatagtatcaggccaacataggatcatagcaagaggaagcattcaataattagttgtggttgggttatcattattgttgttgctattgttgttattatgacactaacatctacaactttctgtatttcatctgtcaacaaatatttcaatatcaaatctgatcctgctccttgactcagacctttgtcattttgattgaaaagatgtttacctgttggtccccagcctcactcttctgaacctcagatccactgagtgtgtatccagaggtaagtatgtggtaagtatgcttgtcatttacattatctgtcagcatgagtattggtttcctagaaacctaatattgaaaacacttagcattgctaaaagcattaaatgaaataaagactcaatatagctgcactaatctgtgctttctaaatttactgatggacgtgaagaaagtaggttggcatggagtttatacaatttatggatcacactgatctgaattcagacagtgtgtgctcagataaaaatattgtttcctcccatgaggtttccaattttgcagagaagaatacctctgtttagctcattacttaacacaatgggtagctgggtggccttgcattctggaagtgaaatgacacaagaatgtctccactgcattctccagaggtaaagattctctggcacaaaatcacaaccaaggtggggttccaaaactatagaacaaatggcagcagccatgcagccagccttggttcgggtgggctgtaaaagcagaggttgtcctcgtgttatcagcactgacttcctgttgtggccacactgacagagatgagatggcagaaagcaggaaagagaccagagctgcaattgacagatggctggccaaagttgaagggtcagagactacaccaaagacttctcagaaaatacttgcctaggaggctctcacttggaaagatattcagggttgttaaacatatcctgttattaggaaaacgagagttttatctttctcttactcagaaagaaaaaacaaaaagaaaattagtgctcttaagaaaagctattttaatgttatccattataaaattagaaaaccttgaaaggcaaatgtttcttctgaccatttacactgagcttctttcattatctcatatgcaaccttgtggattgaaggtggagagtccttaggattacccaggaacatccctgtctgctccccctgctaggcaggaggagatttgaaaccacatgtgtctacttcatttctgtcacgggtaggacagtgtcatatactttgtaggtaactcaaagatattataggtaactcatagatattgattgaattaatgtttaataaaatgagaacaccagctctgctgttatcatcatcctcatttcgattcgctgaactctgcaccaaggccaaatacattatactttaggctttgttaaagccatctatgtaaagctggctgaagtcgaactgtacagtaaacaagagatggtaatagtctctgcatgtgttatttctttcaactccaaacctcaaagcattttaggaagaaatactatttcatctttaaaaaaaaatagaaaaaagaaacttctgaaaaattaatgcaatctaaataatagtcattaaaaagtaaattatggtaaaatggcatactatgcagtcattaaagagacgatgttgctctatacttatttacatagaacattatccttgggaaaaaaacttatttaaaaaatagaaacagtttaaaatatgtttaatataatgcctttcgtaaaaaaaaatgtatgggtatatgtgtaaaaatgtgtatgggtgtgtgtgtgtttgtaaataggaaataattggaagatattcaacacaagtttccatggatgagatgggaggcagatgataagtgatatttgtttctatattgtatgtattactacattttctgtttttatagtaatgaaaaagtattagtttacattctgaaataaatgtaactagcttaaaataatatgtagcagcaatcttaaaaaatttttatttactaaaaatctcatcatccaataattatttaaataccttttcatactatctgtataagttagctaatgttttataacaaagccttgaagtagtaatttattattatggcccatgaatctgtgggacacctgaggactaagtattgactgacttaggttgagcttcactgacattatagactgaattatggccttcaaaattcatatgttgaaatccaaatccccagtacctcagaatgtgattgtattcagagatggggtctttaaagaggtaattaaggtaaagtgaggtcataagggtgggttctaatccaataagattggtatccttataaaaagaggagatttggacacaaacctgagcatagagaaaacaccatgtgaacataaagacagccatctacaaggcacagagagaggcctcagaagaaatcagacctgctgacaccttgatcttagatctccagcctgcagaactgttaggaaataaatgtctgttgttttaatttacatagtctctgatactttgttatggcagccctagcaaactcacaagctgctatcaactggggtcacattataggttgactaggagacctgctctaagctagatctgtgtagggtactttagctgggggaactcatctccaaatgtctaaatttcttcttcaagcacctgtgaacttcaagctctggcatatccttctcatggatggcaagaacacaagagagaaagtggaaacatgcaaaatttcttgagacctaatcttggagctagcacactgtcacttctgtctcattctgttggtttaagcaattcacatgactaagcctaagatagagaattatgctgtgtctactatgggaaagcattgcaaagtggcatggtaaagagtgtagatgccggggagggagagtagggcagagcaatcagggccaatgatataatctaccatgataccttagtgttcacatatctgtttatattgcagcattcttagtccacatactgtaactatatatttccaatttcactcaatatttaatcttatatcacatttttaacataattcattttttattttatcgaatgcataatatatatattaattgagacttcagaggtacatggtcaattgcacagtaggatagtgaggaactagaataaggaaaatcacattgaaaatttgttccaaaaaattagtcagtaaaattagcacataaataaaccaatataaaagtttaattcaaatggaaaatttcataacagcacagtatagtgttttgcacatagcaagcactcaatcatgtttgttgactagactctatgtgaatttgttttgaatgtgggaactgttgctaaaacaacacattcaaaatgtggaaaacctcattttttgaaataaagaacaacagcaacaataaaaaatacatacaaaatactgatgacagtataaactgtaaaatgtcacaatttagtatccatcctcagctttctgcttagaaacatgtggaagcattttacaggcctgttaaaactttttgatctacttggatgaaagattagctaaaatttagccattctgttaccactttaaaactatgattttatttttgcactccaaacacttttaagttactgaaaaatgaataatcaaagaattttgttttctgaagagagatagcctcatttttctaagaggatcaaaggatgagaaagctttgttgaaggtttccttctaagagaaagtaaatcttggctccaaattcattttccaaatcaggaagtagaaaattttttcaggaaaggattgaactagggaagcagaaaaaaaaaattttccactggttaattattttgataatttggttctaaaaacattaccagtatatatattgctaaaaaaatattttagtgtcttatatggtaagtaattccatcatttaaaaagcatgtggaaattgcaaagctaaatagcagacatatatttattatatttggttcatgcacatactctagggatagctaaatgtgtgtatagtactcttttgtatcctctatgaaacctctccaaagctattatgaattatattgtttaaatatgtcctcactcagcttcatgagagttattcccaactcagtttcaaactgaacacatgttgcatctgttttctgtttgtgaatattgaatgtttggcactttcattgggatatttttctttggaatgaaataatttcaaatattcacttaatcaaaacatcagtttccttttccagtttccattgtggattgttggtaggtttcccagaccagctctcttgtgctgtgcagagggaccctcctcctcttggtgcataggaaggaacagaggggaaaggaaacaacatctggaccatgggcttgtcccttctccacatcttgttcctctctagatttcacctgacttgaggtctcattcaagtactcttgaagattttaactgttttgtcctcttctgattatttataacttcctttttttctttttgaaaatgttactgggagcagaataattgaagttctgtgaagccactggaaactcactgctccctctcctgccagtttcaataaaaagctttttttttttttttgaggacctatatctttgggatatacatgtttaagcaaaattaacctggcaggggagatacattgagaagggttgattgaagcagtaagagattggaagggggaaagacaaactcagaggctctggccaccatgcatggaggaaatgaggaagattactgctgtaaaattcagtgaaaaaaatccatgtgctactaggaaaagcatggacttcaaaatcagaaaaattggagttgaatcccagcccaacaactcataaactctgtgacttcaagcaagcttttcttgagtgaaattcagtttgaccagctaatacgtgcagttcctagactcccttggaatctctccaagagacagatggagtttcactcttgttgcccaggctagagtgcaacggcatgatctcaactctctgcaaactctgcctcttgggttcaaatgattctcctgcctcagcctccctagtagctgggatgcttgactggcctagcctcccagcctacatcattctcctgtgcgggatgcttcctgcttcaagcatcggactccaagttcttcagttttgagactcagactggctcttcttgctcctcaagtttgcagacagtctgttgtgggaccttgtgatc

SEQ ID NO: 528 - DNA, 4523 bp, Homo Sapiens
gttatgttagttctagtttggcagggggaagatagcaaagaagtttgagccaaagactcagtgatatttgtgaacttgattcgtgtcctctaaaatgtgtaagtgcatactttctctgtcatttagagacttatagctggagaaatgggctaagatttcagatttccaaatgttggatttctttatacttaaataattattatcaataagtttttatttggactagttttgtttggagtagtaatttaaaataaaataaatatattttcaaagaatgaaatctgaagttataaacaggagtgttatttacatttttgtacattaagttagcatttaagaacgtttagccatttgcataagaattcagtatttgaaagcattaaataatacaaaattttcaaaccctccatgctaatttttcatatttgaactttctggaatgccttttctgcccacttgttgtccatgtccaagtagaatcttttaaaattctgaactatggtgataggttttgtgtagaagagatccacagataggtttatttatcttaaaatgtaactcaatattctgaagtcatactgaaaaattctgtggacagtaagtagtttcagatgctaacgattttcagggatgaatcacatgacagctgaaaaaataccatggaaacatcatagactagaagtaggcatgtgagttccatattactgcatgagaaagcatatatagatatagatatagatatagatatagatatagatatagatatagatatacacatatatatggatatatatatagatacacatatatatatgggggattcattttataactttttcaaaatccacacacatatatatatatgtatgtattttagaagttaagaggaaaagaaaggtgtaataaaagtactttatatgttttggtatacttaaatccatatacattatgtttataattataaatatgttctctaacattttcttaatatttggccagacaattgctgtgatgatggcacatacccgatcacagaattaaactgcattgtgagtttgtgccacagcccatggtgatggaaaaggagattgaacctaaagattctccaggactggagctctgtctactatttgctaatgaactttagaggctgcctgtgggagtgaaattgttatagtgtatcatattggtggttaatcagaatttataaccacaggaaatagttttataattctggacttcttgtataaaattctgttggggtagagtgtgtttttcgtacttctctgacaaagatgcatctggtacttcccaggccatttatctgacctgagttttccagtttaatcggattgagggagaagggagggattcccatgatccgtcaaggaaagagtattttagcaataattttgcctttaaaaacgctaaaatctaaagagagtaaagatcaaatctggaataaatatttgaaataaagaagtgccgaagaacactgtgtgcttaggaggttttgaaaagacacttaagaatgcgaggaggatatctgcgttggcctggttctagtacagatttccagccccagctttttccagcaatgcttggtggttattttactcaaccttccttacatttcctataattgctattaaaaatctcacccatttccaacttgagcccttttattaccacaaacctaagtaaaatctccttgcctctgaagccattaagaaaacaatttccactgggtgtgaagtcattctacacattttttttttttttgtcttctttcttccctgctgcagagaaatttccattctccttcactagggagaattagcagtgtttgaagccacgtcctcaggacattttttcaatacgtgtccccaccccaccccctcgcctctgccacattgcatgtatttttgaacccttatcttttttgctagctcgtttttcgtcaaaacttcctcaccctaaacagatactttctcatatgactgcttttctttactagctacactgtgtttctttctcttgttacctagattcttttaaaaagcaatggtcctactgtctcttttttcttatcgcttactgatttacttttttatttgtttgttttaaagtttatagacttatttgtccctcttccaactagccatcttccagtcactcatctgaatcttcagcctgcttgtcatatttgcacattcccactcttaacacttcttgcaattcttgttttctggcttccagatagcattctctcctgggcttcttattatttttatacttgtttttcctaagacttctttgctggcttttcttctgttaaatgatacttttcaaaaggtaaaaacataactctgacgtaagtataaaatggacacataaagaattttattcaactcattaatgaaggagagagatgctaaatcttgttcaaaaagctttgtaaagggtagggtgtgtgagtatgtgtgtgatgtcaatttaataaacattaggacaaaactgctgagttagatgattaatcaagtctcaaatatctcataggacaataagtcatatttttgtcgttaattttttatcttacagcccaattgagttttcacacatccactttcttcctcaacatttcattcttgtttatggtgcttgagcattgtgttagcttcctattgctgccattaaaaattaccacaaacttgtggctgaaagcatcacaaatttattatcttacagacctggaggtcagaagttcaaaatgggtttcactggactaaaatcaaggtgtcagcatgactgtgttgcttctggaggctctaggagacaatccatttccttgctctttgccgttacaggaggttgcccatattccttgattcatgcttcctttctttcctctcgaaagccagcaactgcaggttgaatgtcaaatcgttggaatatctttaaggggccattattctgcctaacacagccacgttagatttttcatgaaggaatttttattaggtgttccactgaccatacaatttactatattattattatacattctatgcttagccttatttttggtaacaaaacactgaaagtgatattggattattggatcatttgcttggttctttgctatcaacactgaaatgtttgtgattcatttgagaaaaagatgaaaaactaaaagaaaagaaagcttctatagccatttcttcctgatagtctttgcaagatctcactcatttgatcctcactaccagatattgagtgtccttcactctactaaaaccttctgggtagtcaagaaattgtttatttgaaattagttttaattgtacccataagccatgcagtttttgtttttattttcctagagacagagtctcactctgttgcccaggctggagtgtagtgggtcattcatagctcactgtagccttgaacttctgtactcatggggtcctatagcctcagcatccaagtagctaggactacaggattgtaccaccatatacagctaatattttttatttttttgtagaaataggggtctcacttgttgcccatgctggttttgaaatcctgacctcaagcgattgtcctgcctcagcctccaaaactactggcattacaggcgtgagccactgcacctggctgccatgcagttttgatgctcacttaggagaagtaatcagttggactacaaattttagaaaaataaagagaaaagagctctctggttagcatatgtctcttgcttacagacctgattcttcagaagaagtcagcaacacctcattttattgcttcagagataattaattctgatggacaagtgacatggtgtgataacaatatgtattatgtattcttaaaattgaagcttttttcagtgcttttaatttgactttggattttctaaatgctacaaagctaaacttggaggagaatgtataaacatgactaatgggaatgtgcaaaggagaatgaaataacattttaattaaaaagaaagtggacttgaaatttgctaataaaatagattttaagtattcttaccactcatatatacacacgtcaaaaaccacgtgaaatgatgtagatgttatttagcatgattttggtaatcatttcacaatgtatatgtatagtaaaacatcacactgtataccgtataccttaaatatatacaattttatttgtcagttgtaccttaataaagctgaaaggaaagcaaaagtgaattataggcatattctagagcactatagaaaaataacatttggccattatattgaaggcatatttataatctctacaataattaagatattttattcttcttttctctcgtggacagtgtaaaccaatacaaaaaataatttcattttaaggttctagaattttaggtgtttgaaatcaagcagttattaatagatgcttatgttacaaatcaacattaaacatgtatgtattggtttgaattaattcatgtattagaaagtaggaattta

SEQ ID NO: 529 - DNA, 2298 bp, Homo Sapiens
aagacccagccccagaccaggccctagcagttcatagtctgatacggtggttctcagccaggggtgattttgatccccaggtaatatttaacaatgtctggagatgcttctggctgtcgcacttgtgggggctgggaggtatgctattatcatctagcgggtagtggccacggatgctgctaaacatcctactctgctgaggacagtccttcaacaaggagttccccatcccaattgtcaaaagtgccacggttgagaaactgtggtctaatgaaagtgtcagaaacatatacagacaccaacagcacagcaggtcagcatgcgggcttcagcgtccagaggaggtacatagaccagcaggcggtgaggtgtcagataaggcttctgagggaagaaactcccctgcagggggtttggaaagaacatgtatggaagggagcaggacacatggaaccaaggaacaactgcagtccttcagtgcacacagcccagagagagaggggagaggagttccaggctagagccacggaagccttggaggctgtgttaaggagggagacttcatccagataggagtggtaaggcattgtgggatgctaagcaggggagggatgtagacagatgcctgctttagaaggcacctcctcctggggatacaggaaccctcaggcactgctggtaagatggtaaattggtgccgctcttctggaatctgtagaaatctgtcattattcggtcacttcagtcttattaagttcatgcatacccacgactgagcagttccactcatggatacatagctcgggggaatattccacaggtccataaagagagatgcatgaggaagttgatcagtgttctttgtggtggtggggagaggaggcagcctgggtatccaccccttgggagagtatgtgtgccgtggagccctgcacagcagttcggggctgccagatgggacctaaaacccagtgctgaggggaaaaagtgtatcaagaatgtatacacaaaagttggccaggcgcggtggcttacttctgtaatgccagcactttgggagcctgaagcgggtggatcacctgagtcaggagttcgagaccagcctgacaaacatggttaaaccccgtctctactagaaatacaaaattagccaggcgtggtggcgcatacctgtaatcccagctactcaggaggctgaggcaggagaatcgcttgaacctgggaggcggaggttgcagtgagccaaggtcgcgccattgcactcctgcctaggcaataagagtgaaactccatctcaaaaaaaaaaaaaaaaaaaaaaaagaatgtacacacaaaagaattcacattttggaagaacacttagaaactgagaagacacagtaaacacactagaggccaggtgtggtggctcatgcctgtaatcccaacactttaagaggccaaggtgggaggatcacttgaggccaggagttcaagaccagcctgggcaacatagtgagacctccatctctataaaacaaaacaaaaaaatgctaataaaacatgctagaatgattgattagggtaaggaggagggctttggggtataaaagggagtaaataaaaaaggaagcagaagaagctcactatgtcatggagtgaaagggctggatggcagggtggacaagagcaccatcagggagacttagccagaaactgctgagagaacagtgaccagaccttgcagcacaaaatggagaggatggccaggcctgcaggagactgaggaaggggattttcagagcctagtggttgacagaatggaggagggaggagggagagggaggagctgagtttggcacccagatttctgggtggatgactaagccaatggagcccacactaagtggtgaacccaggaccaggagcaggttgtggggcaggggatgagttcaatatgggcatggtaagcttgagggactgtgcagcaagctagtggagatatccacagggcagttggctgccgctgtggtctgaatgctgtgtccctgcaaattcatatgaaatccgaacccccaaggtcattatattaggaggtgggggcctttgagaggtgattagggattagtgaatgggattagtgcccttataaaaaagagccttcagagagctccctcactactcacaccatgggaggacactgagaagatggcatctgtgaaccagaaagcaggccctcaccagacaccgaatctgccaggccttgatctcggacttcccagcctccacaactgtgagaaataaatgtttgctgtttac

SEQ ID NO: 530 - DNA, 949 bp, Homo Sapiens
gtccataactaaccttctacttcttattgtacctatcctaatcgccatggcattcttcatgctaactgaatgaaaaatcctaggctacatgcaactacgcaaagggcccaatattgtaggcccctatggactattacaaccttttgccgatgccataaaactctttaccaaagaatccttaaaaccctcaacgtcaactgttaccctctacatcactgccccaaccttagccctctctattgcccttctactatgaactcccctccctatacctaaccccctagttaatcttaacttaggccttctattcattctggctacatccagcctagctgtctactctatcctatgatcaggatgagcatcaaactcaaactatgccctgatcggcgcattatgagcagttgcccaaacaatttcatacgaagttaccctagctatcatcctattatcgatcctactaataagtggccaattcaatctctgcaccctcattagaacacaagaacacctctgactactcctaacatcatgacccctagctataatatgatttatttccacactagcagaaaccaatcgagctgcttttgaccttactgaaggagaatcagaactagtctcaggcttcaacattgaatatgctgcaggcccattcgccctattctttatagccgaatacataaatatcattaaaataaatgccctaactgccataatcttcctaggtacaatatataatattcacctaccagaactctacacaatatgcttcaccattaaaaccctattcctaacctctctatttttatgaatccgaacagcatacccccgattccactacgatcaactcatgtatctcttatgaaaaaatttcttaccatttacactagcactacttatatgatacatctcaatatccgctacaatttccaacattcccccctaa

SEQ ID NO: 531 - DNA, 2627 bp, Homo Sapiens
ttgatccaggatttctaggaggattctaggtgacagaaaaaggggtaccacgtcatctcagtttgctatttgctatattgacctcctaatttctttttttaaatttatcaaaatagataaattgtggtatattcacacatttaaatattatacaaaaatgcaaataagcaaattacaaaagggtctgatatcgtagaaccttggagagacttggcctcaaagacgccatgtgtaagggaaagtggaagtggcacatggggcttaaaacaagggggttgactgaaggctggtggataatgctatctactcctagacctcctaaccctactcctacacacagaacacccagaactctagtgtctagccacaaggcaagaggtcagagggttcctcattggagaaagccccagcaaaaaagactacctcattctagccctacctcatttggggtctttggctcaactactcatgtatgcaaggctcccagtcagcttttcattgcctgcctcttaaatataaacagataaccaagataaaatagagaaatcaagtgtataaacagaaaacgtgaacccagaggaaatcaagataacatgcaaagtagaagagtatttcaaaagaatcaaattagtgtgctcagaaaaagatgaaaaacttgtaactagacggtactatactgtctatgagaaaggaactatcaataagaaaggactctgagaaattaaaaattgaaatgctgaagtgaacaattcaatagaattaaaagataaatttaagggattttcccaggaggtaagataaagataaaggaggcagaaaacacaagaagaaaataagaaacaaaatatttatttaagggtttcaatagttgactaatggtagatccagaaaaattaattttaaaagggggcgtggaggaagaattaacaaagatataatacaagaaattttctcacagctgaagaatacaagtctacagaatagacagaaccactgaatgctcaacaaagataaatgcaaagtaatcaacatatagatacactgccatgaaatgtcagaacactaaaaataggcaatataaaaagcttcaagaaagaaaaatatgtcatacataaaggattaagtaccaaaatgccatcacatttttcaatagtagcattggatgcaatattttcaatatcatcaaaattctgagagaaatcattttcaactgaatttatatgcccagccaaactgttgatcaatgtgagattaaaagaaatagtctcacaaagtttacctccagtgcactctttttaaaggaaattatttgagaatgtgctccagcaaaatgagggagtaaaccaaggaaaaggatacatggtatccaagaaacaatgggccaacccagaaaaacagcaaagagaaatctcagaagagaagcaatgcacagagccaaggaggagccagaccacattggagatggagtctctggaaagggagagtataataaaatatggaattggatgggaaggctggaaaccaatgaaaatgtgataatggtaaatagcacaaggggaaaagggcaggtagaaattccaggttggggttgggggtgcggaatgatattaaaaaaataaaatacaatcataatacactacttggctctccaaaggaacagtatttaaatagtgtttttggcgtggaggggtataagctaaaacctcacctatcacagcaggaatacaatgactaatgaaagatacataataaatcaagaaacagaaattgaagcatattattgcaagtgatcagacatactgtaactaggagctgtaaaggagctgaaattctgggatgagaactagggattcggggtggatgtgggcagagatctatttttttaaccaacgtatgtaatacactgatgtcttttttaaatggcctttaactctggtagcagggtagaactctgattacaggtggttaagaatggattcagggaaactggttaggagagtattgcagcagtaccggcaggaaacaaaggtttattggactacatttgtggttggtggagatggggacaagacgatggaaaaaatgccattaggagatcaaattgacaggcctagctggtgggttgggtgaagggatagtgagaaagctggggatccagggaggatgcctagtttcctgcttgtgcatgtgggtggacagtgaggcccctcaatgagaatcctagtcaagaatcaagttgttaggaggaagtagtgggctcagatggagacaggtagagtttaaggtgcttgggaggcatggaggacaagacactaggcaggaggttataaacacagctctgagctcccatcacatatccagggctaggcaacaagcctgttaatgcaggtgagctctcctagggagggactgaggacaccagagagaagtagttgatggtgtaagggtgacactggtctcacatcagatatatccagcacagagacccggactggtacagatctcaacatagtcacacagtcacagcatccttacaggcacacttataactcagaccccccaaggattagccattactttaatttttttttttcaagacagggtctcactctgtcacccaggttgga

SEQ ID NO: 532 - DNA, 2846 bp, Homo Sapiens
gaaacacccatcagctagatttcacagttaacattttgctatatatatttcatctacttgttttttgccaaaatatctttaagtaaattaaaaactcatgaaatcctcaagcctaaatactttataacatatctttaaaagtaataataatgacatttttctgcataaccacaacactattattacacctaataaaatctttgtcatatcttagaaaataatttttactatctgtttttttttttttttttttggagaatagtgaatatatttacataaatcaaaatccaaaaggaacgaaagtgcacccggttaaggggaagtcttcctgccattcctgagcctggtcccaggccctgccctagtttcccgtgtagctttctagaatagtccatgcacagaatcatttatatataaagaaaatataagcacagtgaagtcagagacttgttcaccactgaatccttagacctaaaataatgcccagcactcacatatttttttgaataaataatttttttttttttttttgagacagagtctcacactgtcgcccaggctggagtgcagtggcgccatcttggctcactgcaacctccacctcctgggttcaagcgattctcctgcctcagccttccgagtagctgggattacaggtgtgcaccaccatgcctggctaatttttgtatttctagtagagacagtgtttcaacatgttggccaggctggtctcgaactcctgacctccagtcatccacccgcgtcaacctcccaaagtgctggaattacaggcatgagccactgggcctggccagaataaatgaatttttaatcagtggttatatgctataatactgtttgtacttcactattttttttacttgtttccaaatcagttcttgtgagctgcctcattctttttagtagctgcaaaatactcttatgtgagactgaactatgatttatgtaacaagtctcctacggatacacatttgtgtttttccaacattctgctattaacaacgctgtaataaatatccttgtacaaggccaggcatggtggctcacacctgtaatcccagcactctgggaggcagacacgagttcaagaccagactgggcaacatggtgaaaccccgtctctacaaaaaatataaaaaattagccaggaatagtggagtgtgcctgtaggcccagctactcaggaggcttgggtgggaggatcaccagagcccaggaagtcaaggctgcagtgagtcgtgattgcgccactgcattccagtctgggcgacagagtgagatcctgtctcaaaaaaaaaaaaaagaaaaaaaagaaagaaaagaaagaagaaaaggaaggaaggaaggaagggagggagggaaggaaggaaaggaaggtacatttcggggcacggtggctcacacctgtaatcccaacaacttgtaagactgagatgggaattcaagaccaagaccagcctgggcaacacagcaagaccccatctctaaaaataaacacataaatgctgctgctgctttttttttttttttaaggtgcatttggctcataaacgtcacaggctttgtccgtaaaaaaggagaaatgtttgttccctgtctgctttctcttttcacttaggggttctcaagtgtgggtgtggaccctccaccaaaatacctaacactgggtgcactataaatgcttgtttgatgaatgatgttgttggcagtgcaccccagaggtcccatttttcacatatgaggaaccactcctaattatttagcccaggatatgattcatctaggtgaaaaccctttccaaacagattgccacacctgtgattcttcgctcttgggaaaagacagagtaaaagagcaaagttttgtgagaggttgggaggtggcggtggtagcagggacggagccgtggaggagcaggtgcagaggtgcagagagaagccccgttcacccaacctgggtgagttccctgcacagaagaggcctcgtgggcagcttagcttttgacagtaaagatgcctacagcaggaaaaaaacggggatgagctgtgggcagagaggcgtgaagtcaggaaacacaggatctagcccagctctgacggtgacgagccagtgagcccttgatctccctagcctcaggctcctcatctgatctgtggaggtcgaacctggatgttttccaaagttggttttaggtaaaacagtttgaaattgtatggccagcttcaattatataaatattttaaatttctatatgaagatagcaccaacaaagttacagggcaagcaaagatccaaagattggaaacagtgtctccctcaaatggggaacagttaaataaatgatggtgtccctgtagctacccactggaatatcatgcagtggtaaaaagaaagcagaggctctttacatactgataaggaacaatcttcaactcacaggtaaataagatagtaaggtgcaggctgggggcagtggctcatgcctgtaatcccagcactttgagaggctgaggctggcagatcacctgaggtcaggagtttgagaccagcctggccaacatggcaaaaccccgtctctactaaaaatacaaaaatcagccgggcgtggtggcgggcacctgtagtcccagctactcaggaggctgaggcaggagaatctcttgaacccaggaggtggaggttgcagtgagctgagattgcgccactgcactccagcctgggtgacagtaatatcggctgctttcagagaggaaagctggtgactagagaacagaaggtgggcgaggggaaacttcttattggatactcctttgtacctttcacac

SEQ ID NO: 533 - DNA, 1595 bp, Homo Sapiens
gcaggcgtgagccaccgtgcccggccgagttgaagtactttttctggaacaaagaaacttagcataaatagttaaaatagtaagaattgtaattaagggaaatttcagctcaatatgacttcaacagttttaaaaatgtattatttcacataagaccatggagagaggaattggaagccccagaattgattgggtcagaaattgaaaatgatattatcagtgacccaggtttgaatgtctctccccacagcattgacttcactaatggatgtgacctggttggcagcagcagcttgcacaacatgcttgtttgcagtgagtagtagagagaaggttttgctttcccagaaactctgaaaaaggtcatcaaacctaaatttccttagcctttttcttccatgagcaaatcactagcagatgactgctagcaaggtgttactattacaatgaacccctaagtgtcagagaaagagttagtttggggaaatatcctctccaccacaatcttagtcattgaagtcaatttaacaatatattgaaatatttttcttagaagtttaaagttccattaaagagtagcaattacagaaattataggtagcctttagttctacaagtgacatttcaaaagggagatgattcatcaatttcaaactttgcctgcaaataatactggatgaaaattaacttggcaaacataattaataatcatgggttattaattacttctgcaaggtgggtgtgctgattttaaaaggcttgaataaaacataaatttccttaatttatactgtaaatggagtaatttggtgatgtaaatggtaatatgtaagtgacttctgcttcagatcttacaacttaaaatatttttctaaaattagtttttgtaccatctctccagcatgttccagcctttatcagtcagtccaggcttctataacaaaatatcatggactgaattgcttacacaacagacatttctcacaattgtagaagctggaaagtgcaagattaaggtgctagcaaatttgtttcctggtgagggtcctcttcccggcttgctgtatcctcacatagcagatagagagagaaagagagagagagagagcactctatagactctcttcctgttcttctaaggacactaattccattgatgagggccctacgctcatgacttagtctaaacctaattaattctcaaaggcctcacttcccaacactgtcacattgtggggtagggctttaacatatgaaatttgagggaaaaggaatgttcagtctagaacaaagccccatacatttcaaaaagctgtgggacaggagggaatggggatggtattcaatggtaccacatccaagcaagtcttgtatggttaaaacaaatcaatataataacatgaaattttacacagaaacctatctgattataaactgtatgcttaccataatcaacactgatgtacattgttttaaaaatacttaatagtgttctttgtttaaccaaataatagaggtattaactagtttcctagtgctgccaaaagaaattgctacaaaatttgtggcttaaaatagtaaaaaaaaaaaaaaaa

SEQ ID NO: 534 - DNA, 8243 bp, Homo Sapiens
atagtaggcgttgataggatagggtgcccgggagaactaaggagaggagttcggggtcggggcgcgggaaggcgggaggtgcccggcaaccctaggagcccggcgcggggcacgatgggacgcccccgggaagaggcggagctgggttcgagcgctggggctgcggttgggaaactactggaggatgtggtgcaccagaataagagaataaaccaagaaacaggaagacgtgatccaggcaacaggatattccagtatagatgtgaaggagcaaagagaaggagccagaagctagagggggctgcttggtaagagctgtggtctttgctaaagggacacagacaacccatgtgacctggcaatgagaaagccagagtactctgaccatctcttccttatatcttctcatcttctttggatattaataattggataaacagaagctgaagtcagagggcaagggagccattcatgctgcagtccatgtgggtcagcacccgctggggtccagagtgggatgaagaggggttctgaaaggcaaatggaagacatctagtataacctctccctgaacgtaattcaaactacttaactattattacagacaaaaatcacatgtatgctgaaagtaaaataacctgtttccagaatttctgattgcaaaattctgagttcttcaattaaacctgcatttttctcagtctttttggtgcccctgcttcactggtgccttaagaacatttgagagcctaagggcagccctgagcatggtgcctgaactagggtgcctcaaaactagggactgaggaagtctcaagttcattcctgaatgctgactataagagtctctgagagagttttgagaatgtagaactgatttagaatgaatctcaggatttttctgttaagatctataaattaggaattaaggaactggattttttttgaatttgaaaaatcctatgatagtataactttgcataagcctactgaatgataggaaagtttttagtttcttatcaaagaaagagaataaagtgaatcaggacatcagtttcacattgacatttttattaacgccaactgttttttaattatttttttaaaacaatagcacaaaaatgtttcaaggaagcagtctcacaatctgatgaccttctgaaataccgttaagccacaccaaatatgaatttctgttaataacacaaaatatttttttaagaaaaaaagaaaaaaaaggtagggaaagaagaagggaatgagatttagatttaaaactcattggattaaataggtgaggcttattaggatatactgttgaagcaaacagtggcacacacaggcttacagtctttgttttttaaaccagttaccactaatgtattaagccctgcagcagttaccactgacttctcgcacgcataaaatgaaccgggagaagccagtgttgatactgttgtgaagaggttcaagagctggcttttcagacaactaagaccatttttagcagaataactccttcagaaaggcctggctgaagatctttttatttctattgtctcacctatataaatttcagggttcttataagtcatctttaaaaagaaaaaaataatgtatatcagtttctcttatttaatgtggctatgaaagatgtttccttattatttcttcatctctaagaaggacaccagggaatgggggttgggggtggaactaaagggaggaaaaaaaccagaacagggtaggtttttgttttttgctttttgtttttttttggccaaggggtcggtcacacagaagggaaggcaaggaggaaaactaaactacaatccttggttcagattgagttatgcaggaatatatcttcctgatcagtccccgtgccaaaaaaaaaaaaagccacttggaattatgcactgactccaactatgtgataccagctatcagccttttgtgtttaaccattcccagaaatggacaccacccttggctttataggctccttgcagaacccacttcacaaaaatgctcttcaccaagaagcctctagtttccttttggtaggttataaaaacagaacatctgtcattaacagtagagtgttaaatacttttaaccactgacaaggcttcagaaagtttcacagtttcgttatgctctattttattactatcatatttacatttttattttttatttattttttgctgaattgctgattttcctttttcaatagaatttaattctggagtgtgagcaggaaccagttaactacattcattgtccaacccccactggtttgaaagaagactccaaattcttggcatatgaatcagctgttcggtagctccaccttatccctgcagcgaagcagcagaaccgccaatggcggcacctcaggattcacactgtgggtggtgaggccttccgctgaaggaggtactggtggatgctctcagcatctcgctttagccaggcagcattcagcagaatattttcacaacactgctggatggtacgctcagctgaaggagctgggtgactctcgaagaaagcctggtataaaacaacccagaatgcaggatcattactagcaataagaagttaatattacaggttatgaaaaaatacccactggtctatatgaaggatgcataatcttcaggcatgagaatttaccactgccaccctcaggctaaaagaaaacaagcaactccttggacctgcatataggaattctccccttaattatatgcttaacaacctaatcaaaagttaataaagagacagaacctactgcctttcttttaggctaattgtgtagtggtaaatatagtctttggaatgaagacttggaacctgaatccaggcttagtcatgtactagcttgtgactgtgagaaaattaactgctctaagtctcagttttctcaactatgagaaaatatctactccagaagattaaagagacaatccatataaacatttgacaaaatacctagcacagagtacttaaggattcaacacattttggctgcttcaaataaagattaatttgtaagggatgataatacaaagaagtttaaattgctgctatgccctaataatttaacaccccatggtcttttttttttttttttttttgagacagggtctcactctgttgcccaggctagagtgcaatgaaacgatcatggctcatcacagcctcaaccttctgggctcaagtaaacctcccaccttaacttcctgggtagctgggaccacaagcgtgcactcccaggccaaattgttttttcctttttgtagagatggggtcctaccatgttgcccagactggtcttgaactcttgaactcaagcaatcctcccacctcagcctcccaaaatgctggaattacaggaatccaacatttttaatacagtaaaccaaacaatttctaagtttacaatttatcacaatgcttaatgattaaaagttgaataaacttttctaatgcagtacacctggtttcacagaaaacaaagcaactcttaaacaccagctggcaaaatgatagggcttttcctttgaattagtcaccacaggtgtgaaagacagaatgactaatccatctgattaaacatagaccttttagaaatcaataaccttatttacacagatgacaattgctactgttccaaggctcctaatcatggttcagttctcagggcctcaagtctttttccattccatcgcagagtagtaccaacatttatacaccagaaacctggggattatcctggcttgtttttcttcctctcccagatatgctcacaacagagaagccaatcaataaatattgttgaactaaatggttaacaaattcaagcccctgaatctccattattccatctcctccactactgccactaccctactgtaagctattctatcattcttgctaggagagttagcttcccaacatcttctcttccccattccaaactattatccacattgcagccagactgaaatttttataacacaaatcagatcaaggcactgccttgtttataaaccattcgaaggctttccatttttaggacttttttttttttttttttttttgagacaggagtctcgctctgtcacccaggctggagtgcaatggcacgatctcagctcactgcaacctccacctcccgggctcaagcaattctcctgcctcagcctcccgagtagctgggattagaggcgtgcaccaccatgtccagctaatttggggtttcaccatgttgcccgggctggtcttgaagtcctgacctcaggtgatccacccacctcggcctcccaaagtgctgagattacagatgtgagctaccatgcctggccatttttaggaaattcttaatatggcctatacagccctgcatgatgtctttctctaaacaaaaacacagagatgctacagtacattatcccaacactataattacaaccaggttattgtttttacttactagactgaaaagtgaagagtaaacagtattttccttaccttaacctctccagccattttatcaactgcaaatccctcaactgatagctgcaaaacaatggttttaaacagtaagtgaaaccaagaggctgagaacaaacttccatttaccctaaaaataaatcattctgttctctgccaacttcagtctgttataaaggatgtgtgatgggagatggagaagtccttaaataaagccagtaactatttaaggaaacttttttttttttgagacggagtttcacacttgttgcccaggctggagtgcaatgacctcatctcggctcaccacaacctctgcctcccaggttcaagcgattctcctgcctcagcctcccaagtagctgggattacaggcacacaccaccacgctcagctaatttttgtatttttagtagggacaggatttcaccatgttggccaggatagtctcgaactcccgacctcaggtgatctgcccacctcggcgtcccaaagtgctggtattacaggcgtgagccactgcacctggccacaggaaacatttaaagagcaaagaccacaatgtatgggtgtagtgaatcatggatgtcactaaataatatccatgattagcaagctactcaaagtttttcacatacctttattagtctggatattaagaatcctccctggtatcggttataaagttcttcccagttgtcctttatgaatttccaagcagctttcctaccatgcttgctgcctccagctactccaccaattaccgatacagtgtcctgtggacgtacctcttcctaaaaaaagaaagagagctaaaagtctagtgtatcaaaaacatattctggtaccagaaagtgcaccatactgtgacactgaagtaatcacactgaagacacttattccttgttttaggaataactggaaccagaagttctcagcaaagaagataatgtttaagctaaagataaccaaaatgagaatgaggtactgagacaggttcagacagacagactgctcaacagatacttgcttaggagcctataggtttaagaaaggaagagacacaaagtaagcaaaggcataagccagtttcccagttttcaagagtccctgtcctcatagtttccattctggagagacaatttgtttactctcccaactattctgattctcgccactagtgggagaaaaacagaagtcagtaacaaaaactcaagccagttactctggaaaaggaagctttagttagggttaaggcagctcaagaggatcagagctgaatcagagacacttctcagagatgggtaacgattcacttctaaatgcagttttcaccgtaacttactgaaagtgcaaacgtgaggactttttgaatcaggtcaggcaaaagagtagcgccaaggactctttcgattcggtttttctcttcttgcatatctgcttgtttatgaagctacaggaaaaaagataaagataggaatagttaactctcccttggatgttctgcatatgattatatgagcttcttccccagtaaggtaaaacttaggttctatattctcactaggtaagaatggcagggcattatattaaagaaagagaatacttttcaagatgctttgggccaggtgcggtggttcacacctgtaatcccagcactttgggaggccgaggcgggtggatcacctgaggtcaagagttcgagatcagcctggccaacatggtgaaaccctgtttctactaaaaatacaaaaaaaaaaaattagccgggcgtggtggtgcccacctgtaatcccagctacttgggaggccgaggcgggagaatcgcttgaacctgggaggttgcagtgagctgagatcgtgccactgcactccagtttgggcaagagagcgagactctgtctcaaaaataaaagaaaaaaaaaatgatgctttggcactaaatttgtcatctgctgttacagtaagtaaatcactagatgtaaatgctaccagatgaacagcctgtcattagttcagaccagtttaacatcaagatctaagaggtaaaatctatcatagccaaattctttacatcattgatatctggctaatgttctgttttagaagaacaaactaatcattagtgttcttataccagatcatcaaattaatttataatagtgaaaaattgaaaatgaatactgtacttataaaaatgcattattgaaagttatattttaagaatatatcataaacatgttcttatatttaagtgaagaaagcagacaaagcagaattatcctaaaaaatatatatatatatatggctgggcacagtggttcacgcctgtaatcctagcactttggaaggctgaggtggaggttgcagtgagcccatatcgtaccactgcactccagtctggacaacagagcaagactgtgtttccaaaaaaagggggtgggggagaacccctggaaatacatcaaaatggtagtattaattaatgatggtttctgatcagtgggattatgcatcttcacactttttaactgcaaaagcagcacatactgaatgcagaatatctgaaagacagagaagcataaagaaaaaaataaaattactactatatgtacattaacaaatctggaaagagagcatgttatacatgctgtttttgctacctgctttctaaactataggtaagttttattttcctctttatacttttctagtctctaaatcttccatagtatatatgtatataaaatcttttcatagaaacaaaatgttgtaattcttaaaaattagaactataaatgtataagagctatgtctccaagacaatttagactcttttgatcttttctaccccttaagatttaacactgaccagagtgtctggagacctcatcaaagctctcagtttcctcttcctttcgacacttttttttttttcaataaacaattttaatttataagaagtagagatggggtctcgctgtgttgaccaggctggtctcttttttttttttttttgagatggagtctcgctctgttgcccatgctggagtgcaatggtgttacctcagctcactacaaccacgcctagctaatttttcttttctttttttttttttgagacggagtcttactctgtcacccaggctggagtgcaatggcacaatatcggctcaccacaacctccacctcccaggttcaagcaatgctcctgcctcagcctcctgagtagctgggactacaggcgcccgccaccacacccggcgaatttttgtatatttagtagagacagggtttcaccatttgggccaggctggtcttgaactcctgaccttgtgatccacacccgcctcggcctcccaaagtgctgggattgcaggcgtgagccaccgcgcctggcctaatttttctatttttagtagagccggagtttctccatgttgcccaggctggtcttgaactcctggcctcaagtgatcctcccatccaaagtgctgggattacaggcatgaaccaccacgcctggcccctttggactctaagcagcagtgcagtaaaatagacaggaccttgggagatctgggttctagtcccagttttgcctctaactagctgtgtgatcttgactaagtccttcatccctctgggtctcagtttccccatgtgtaaaatgagatgggtggacagataatttctaaggcccttttcagctccaatat

SEQ ID NO: 535 - DNA, 8324 bp, Homo Sapiens
atagtaggcgttgataggatagggtgcccgggagaactaaggagaggagttcggggtcggggcgcgggaaggcgggaggtgcccggcaaccctaggagcccggcgcggggcacgatgggacgcccccgggaagaggcggagctgggttcgagcgctggggctgcggttgggaaactactggaggatgtggtgcaccagaataagagaataaaccaagaaacaggaagacgtgatccaggcaacaggatattccagtatagtgttggaaacagaagcccagtagtgaaagctacagctgccatatacttgcagtggaatcacaggagcaatcacaggtctttatgtgaaggagcaaagagaaggagccagaagctagagggggctgcttggtaagagctgtggtctttgctaaagggacacagacaacccatgtgacctggcaatgagaaagccagagtactctgaccatctcttccttatatcttctcatcttctttggatattaataattggataaacagaagctgaagtcagagggcaagggagccattcatgctgcagtccatgtgggtcagcacccgctggggtccagagtgggatgaagaggggttctgaaaggcaaatggaagacatctagtataacctctccctgaacgtaattcaaactacttaactattattacagacaaaaatcacatgtatgctgaaagtaaaataacctgtttccagaatttctgattgcaaaattctgagttcttcaattaaacctgcatttttctcagtctttttggtgcccctgcttcactggtgccttaagaacatttgagagcctaagggcagccctgagcatggtgcctgaactagggtgcctcaaaactagggactgaggaagtctcaagttcattcctgaatgctgactataagagtctctgagagagttttgagaatgtagaactgatttagaatgaatctcaggatttttctgttaagatctataaattaggaattaaggaactggattttttttgaatttgaaaaatcctatgatagtataactttgcataagcctactgaatgataggaaagtttttagtttcttatcaaagaaagagaataaagtgaatcaggacatcagtttcacattgacatttttattaacgccaactgttttttaattatttttttaaaacaatagcacaaaaatgtttcaaggaagcagtctcacaatctgatgaccttctgaaataccgttaagccacaccaaatatgaatttctgttaataacacaaaatatttttttaagaaaaaaagaaaaaaaaggtagggaaagaagaagggaatgagatttagatttaaaactcattggattaaataggtgaggcttattaggatatactgttgaagcaaacagtggcacacacaggcttacagtctttgttttttaaaccagttaccactaatgtattaagccctgcagcagttaccactgacttctcgcacgcataaaatgaaccgggagaagccagtgttgatactgttgtgaagaggttcaagagctggcttttcagacaactaagaccatttttagcagaataactccttcagaaaggcctggctgaagatctttttatttctattgtctcacctatataaatttcagggttcttataagtcatctttaaaaagaaaaaaataatgtatatcagtttctcttatttaatgtggctatgaaagatgtttccttattatttcttcatctctaagaaggacaccagggaatgggggttgggggtggaactaaagggaggaaaaaaaccagaacagggtaggtttttgttttttgctttttgtttttttttggccaaggggtcggtcacacagaagggaaggcaaggaggaaaactaaactacaatccttggttcagattgagttatgcaggaatatatcttcctgatcagtccccgtgccaaaaaaaaaaaaagccacttggaattatgcactgactccaactatgtgataccagctatcagccttttgtgtttaaccattcccagaaatggacaccacccttggctttataggctccttgcagaacccacttcacaaaaatgctcttcaccaagaagcctctagtttccttttggtaggttataaaaacagaacatctgtcattaacagtagagtgttaaatacttttaaccactgacaaggcttcagaaagtttcacagtttcgttatgctctattttattactatcatatttacatttttattttttatttattttttgctgaattgctgattttcctttttcaatagaatttaattctggagtgtgagcaggaaccagttaactacattcattgtccaacccccactggtttgaaagaagactccaaattcttggcatatgaatcagctgttcggtagctccaccttatccctgcagcgaagcagcagaaccgccaatggcggcacctcaggattcacactgtgggtggtgaggccttccgctgaaggaggtactggtggatgctctcagcatctcgctttagccaggcagcattcagcagaatattttcacaacactgctggatggtacgctcagctgaaggagctgggtgactctcgaagaaagcctggtataaaacaacccagaatgcaggatcattactagcaataagaagttaatattacaggttatgaaaaaatacccactggtctatatgaaggatgcataatcttcaggcatgagaatttaccactgccaccctcaggctaaaagaaaacaagcaactccttggacctgcatataggaattctccccttaattatatgcttaacaacctaatcaaaagttaataaagagacagaacctactgcctttcttttaggctaattgtgtagtggtaaatatagtctttggaatgaagacttggaacctgaatccaggcttagtcatgtactagcttgtgactgtgagaaaattaactgctctaagtctcagttttctcaactatgagaaaatatctactccagaagattaaagagacaatccatataaacatttgacaaaatacctagcacagagtacttaaggattcaacacattttggctgcttcaaataaagattaatttgtaagggatgataatacaaagaagtttaaattgctgctatgccctaataatttaacaccccatggtcttttttttttttttttttttgagacagggtctcactctgttgcccaggctagagtgcaatgaaacgatcatggctcatcacagcctcaaccttctgggctcaagtaaacctcccaccttaacttcctgggtagctgggaccacaagcgtgcactcccaggccaaattgttttttcctttttgtagagatggggtcctaccatgttgcccagactggtcttgaactcttgaactcaagcaatcctcccacctcagcctcccaaaatgctggaattacaggaatccaacatttttaatacagtaaaccaaacaatttctaagtttacaatttatcacaatgcttaatgattaaaagttgaataaacttttctaatgcagtacacctggtttcacagaaaacaaagcaactcttaaacaccagctggcaaaatgatagggcttttcctttgaattagtcaccacaggtgtgaaagacagaatgactaatccatctgattaaacatagaccttttagaaatcaataaccttatttacacagatgacaattgctactgttccaaggctcctaatcatggttcagttctcagggcctcaagtctttttccattccatcgcagagtagtaccaacatttatacaccagaaacctggggattatcctggcttgtttttcttcctctcccagatatgctcacaacagagaagccaatcaataaatattgttgaactaaatggttaacaaattcaagcccctgaatctccattattccatctcctccactactgccactaccctactgtaagctattctatcattcttgctaggagagttagcttcccaacatcttctcttccccattccaaactattatccacattgcagccagactgaaatttttataacacaaatcagatcaaggcactgccttgtttataaaccattcgaaggctttccatttttaggacttttttttttttttttttttttgagacaggagtctcgctctgtcacccaggctggagtgcaatggcacgatctcagctcactgcaacctccacctcccgggctcaagcaattctcctgcctcagcctcccgagtagctgggattagaggcgtgcaccaccatgtccagctaatttggggtttcaccatgttgcccgggctggtcttgaagtcctgacctcaggtgatccacccacctcggcctcccaaagtgctgagattacagatgtgagctaccatgcctggccatttttaggaaattcttaatatggcctatacagccctgcatgatgtctttctctaaacaaaaacacagagatgctacagtacattatcccaacactataattacaaccaggttattgtttttacttactagactgaaaagtgaagagtaaacagtattttccttaccttaacctctccagccattttatcaactgcaaatccctcaactgatagctgcaaaacaatggttttaaacagtaagtgaaaccaagaggctgagaacaaacttccatttaccctaaaaataaatcattctgttctctgccaacttcagtctgttataaaggatgtgtgatgggagatggagaagtccttaaataaagccagtaactatttaaggaaacttttttttttttgagacggagtttcacacttgttgcccaggctggagtgcaatgacctcatctcggctcaccacaacctctgcctcccaggttcaagcgattctcctgcctcagcctcccaagtagctgggattacaggcacacaccaccacgctcagctaatttttgtatttttagtagggacaggatttcaccatgttggccaggatagtctcgaactcccgacctcaggtgatctgcccacctcggcgtcccaaagtgctggtattacaggcgtgagccactgcacctggccacaggaaacatttaaagagcaaagaccacaatgtatgggtgtagtgaatcatggatgtcactaaataatatccatgattagcaagctactcaaagtttttcacatacctttattagtctggatattaagaatcctccctggtatcggttataaagttcttcccagttgtcctttatgaatttccaagcagctttcctaccatgcttgctgcctccagctactccaccaattaccgatacagtgtcctgtggacgtacctcttcctaaaaaaagaaagagagctaaaagtctagtgtatcaaaaacatattctggtaccagaaagtgcaccatactgtgacactgaagtaatcacactgaagacacttattccttgttttaggaataactggaaccagaagttctcagcaaagaagataatgtttaagctaaagataaccaaaatgagaatgaggtactgagacaggttcagacagacagactgctcaacagatacttgcttaggagcctataggtttaagaaaggaagagacacaaagtaagcaaaggcataagccagtttcccagttttcaagagtccctgtcctcatagtttccattctggagagacaatttgtttactctcccaactattctgattctcgccactagtgggagaaaaacagaagtcagtaacaaaaactcaagccagttactctggaaaaggaagctttagttagggttaaggcagctcaagaggatcagagctgaatcagagacacttctcagagatgggtaacgattcacttctaaatgcagttttcaccgtaacttactgaaagtgcaaacgtgaggactttttgaatcaggtcaggcaaaagagtagcgccaaggactctttcgattcggtttttctcttcttgcatatctgcttgtttatgaagctacaggaaaaaagataaagataggaatagttaactctcccttggatgttctgcatatgattatatgagcttcttccccagtaaggtaaaacttaggttctatattctcactaggtaagaatggcagggcattatattaaagaaagagaatacttttcaagatgctttgggccaggtgcggtggttcacacctgtaatcccagcactttgggaggccgaggcgggtggatcacctgaggtcaagagttcgagatcagcctggccaacatggtgaaaccctgtttctactaaaaatacaaaaaaaaaaaattagccgggcgtggtggtgcccacctgtaatcccagctacttgggaggccgaggcgggagaatcgcttgaacctgggaggttgcagtgagctgagatcgtgccactgcactccagtttgggcaagagagcgagactctgtctcaaaaataaaagaaaaaaaaaatgatgctttggcactaaatttgtcatctgctgttacagtaagtaaatcactagatgtaaatgctaccagatgaacagcctgtcattagttcagaccagtttaacatcaagatctaagaggtaaaatctatcatagccaaattctttacatcattgatatctggctaatgttctgttttagaagaacaaactaatcattagtgttcttataccagatcatcaaattaatttataatagtgaaaaattgaaaatgaatactgtacttataaaaatgcattattgaaagttatattttaagaatatatcataaacatgttcttatatttaagtgaagaaagcagacaaagcagaattatcctaaaaaatatatatatatatatggctgggcacagtggttcacgcctgtaatcctagcactttggaaggctgaggtggaggttgcagtgagcccatatcgtaccactgcactccagtctggacaacagagcaagactgtgtttccaaaaaaagggggtgggggagaacccctggaaatacatcaaaatggtagtattaattaatgatggtttctgatcagtgggattatgcatcttcacactttttaactgcaaaagcagcacatactgaatgcagaatatctgaaagacagagaagcataaagaaaaaaataaaattactactatatgtacattaacaaatctggaaagagagcatgttatacatgctgtttttgctacctgctttctaaactataggtaagttttattttcctctttatacttttctagtctctaaatcttccatagtatatatgtatataaaatcttttcatagaaacaaaatgttgtaattcttaaaaattagaactataaatgtataagagctatgtctccaagacaatttagactcttttgatcttttctaccccttaagatttaacactgaccagagtgtctggagacctcatcaaagctctcagtttcctcttcctttcgacacttttttttttttcaataaacaattttaatttataagaagtagagatggggtctcgctgtgttgaccaggctggtctcttttttttttttttttgagatggagtctcgctctgttgcccatgctggagtgcaatggtgttacctcagctcactacaaccacgcctagctaatttttcttttctttttttttttttgagacggagtcttactctgtcacccaggctggagtgcaatggcacaatatcggctcaccacaacctccacctcccaggttcaagcaatgctcctgcctcagcctcctgagtagctgggactacaggcgcccgccaccacacccggcgaatttttgtatatttagtagagacagggtttcaccatttgggccaggctggtcttgaactcctgaccttgtgatccacacccgcctcggcctcccaaagtgctgggattgcaggcgtgagccaccgcgcctggcctaatttttctatttttagtagagccggagtttctccatgttgcccaggctggtcttgaactcctggcctcaagtgatcctcccatccaaagtgctgggattacaggcatgaaccaccacgcctggcccctttggactctaagcagcagtgcagtaaaatagacaggaccttgggagatctgggttctagtcccagttttgcctctaactagctgtgtgatcttgactaagtccttcatccctctgggtctcagtttccccatgtgtaaaatgagatgggtggacagataatttctaaggcccttttcagctccaatat

SEQ ID NO: 536 - DNA, 8157 bp, Homo Sapiens
atagaaactactggaggatgtggtgcaccagaataagagaataaaccaagaaacaggaagacgtgatccaggcaacaggatattccagtatagtgttggaaacagaagcccagtagtgaaagctacagctgccatatacttgcagtggaatcacaggagcaatcacaggtctttatgtgaaggagcaaagagaaggagccagaagctagagggggctgcttggtaagagctgtggtctttgctaaagggacacagacaacccatgtgacctggcaatgagaaagccagagtactctgaccatctcttccttatatcttctcatcttctttggatattaataattggataaacagaagctgaagtcagagggcaagggagccattcatgctgcagtccatgtgggtcagcacccgctggggtccagagtgggatgaagaggggttctgaaaggcaaatggaagacatctagtataacctctccctgaacgtaattcaaactacttaactattattacagacaaaaatcacatgtatgctgaaagtaaaataacctgtttccagaatttctgattgcaaaattctgagttcttcaattaaacctgcatttttctcagtctttttggtgcccctgcttcactggtgccttaagaacatttgagagcctaagggcagccctgagcatggtgcctgaactagggtgcctcaaaactagggactgaggaagtctcaagttcattcctgaatgctgactataagagtctctgagagagttttgagaatgtagaactgatttagaatgaatctcaggatttttctgttaagatctataaattaggaattaaggaactggattttttttgaatttgaaaaatcctatgatagtataactttgcataagcctactgaatgataggaaagtttttagtttcttatcaaagaaagagaataaagtgaatcaggacatcagtttcacattgacatttttattaacgccaactgttttttaattatttttttaaaacaatagcacaaaaatgtttcaaggaagcagtctcacaatctgatgaccttctgaaataccgttaagccacaccaaatatgaatttctgttaataacacaaaatatttttttaagaaaaaaagaaaaaaaaggtagggaaagaagaagggaatgagatttagatttaaaactcattggattaaataggtgaggcttattaggatatactgttgaagcaaacagtggcacacacaggcttacagtctttgttttttaaaccagttaccactaatgtattaagccctgcagcagttaccactgacttctcgcacgcataaaatgaaccgggagaagccagtgttgatactgttgtgaagaggttcaagagctggcttttcagacaactaagaccatttttagcagaataactccttcagaaaggcctggctgaagatctttttatttctattgtctcacctatataaatttcagggttcttataagtcatctttaaaaagaaaaaaataatgtatatcagtttctcttatttaatgtggctatgaaagatgtttccttattatttcttcatctctaagaaggacaccagggaatgggggttgggggtggaactaaagggaggaaaaaaaccagaacagggtaggtttttgttttttgctttttgtttttttttggccaaggggtcggtcacacagaagggaaggcaaggaggaaaactaaactacaatccttggttcagattgagttatgcaggaatatatcttcctgatcagtccccgtgccaaaaaaaaaaaaagccacttggaattatgcactgactccaactatgtgataccagctatcagccttttgtgtttaaccattcccagaaatggacaccacccttggctttataggctccttgcagaacccacttcacaaaaatgctcttcaccaagaagcctctagtttccttttggtaggttataaaaacagaacatctgtcattaacagtagagtgttaaatacttttaaccactgacaaggcttcagaaagtttcacagtttcgttatgctctattttattactatcatatttacatttttattttttatttattttttgctgaattgctgattttcctttttcaatagaatttaattctggagtgtgagcaggaaccagttaactacattcattgtccaacccccactggtttgaaagaagactccaaattcttggcatatgaatcagctgttcggtagctccaccttatccctgcagcgaagcagcagaaccgccaatggcggcacctcaggattcacactgtgggtggtgaggccttccgctgaaggaggtactggtggatgctctcagcatctcgctttagccaggcagcattcagcagaatattttcacaacactgctggatggtacgctcagctgaaggagctgggtgactctcgaagaaagcctggtataaaacaacccagaatgcaggatcattactagcaataagaagttaatattacaggttatgaaaaaatacccactggtctatatgaaggatgcataatcttcaggcatgagaatttaccactgccaccctcaggctaaaagaaaacaagcaactccttggacctgcatataggaattctccccttaattatatgcttaacaacctaatcaaaagttaataaagagacagaacctactgcctttcttttaggctaattgtgtagtggtaaatatagtctttggaatgaagacttggaacctgaatccaggcttagtcatgtactagcttgtgactgtgagaaaattaactgctctaagtctcagttttctcaactatgagaaaatatctactccagaagattaaagagacaatccatataaacatttgacaaaatacctagcacagagtacttaaggattcaacacattttggctgcttcaaataaagattaatttgtaagggatgataatacaaagaagtttaaattgctgctatgccctaataatttaacaccccatggtcttttttttttttttttttttgagacagggtctcactctgttgcccaggctagagtgcaatgaaacgatcatggctcatcacagcctcaaccttctgggctcaagtaaacctcccaccttaacttcctgggtagctgggaccacaagcgtgcactcccaggccaaattgttttttcctttttgtagagatggggtcctaccatgttgcccagactggtcttgaactcttgaactcaagcaatcctcccacctcagcctcccaaaatgctggaattacaggaatccaacatttttaatacagtaaaccaaacaatttctaagtttacaatttatcacaatgcttaatgattaaaagttgaataaacttttctaatgcagtacacctggtttcacagaaaacaaagcaactcttaaacaccagctggcaaaatgatagggcttttcctttgaattagtcaccacaggtgtgaaagacagaatgactaatccatctgattaaacatagaccttttagaaatcaataaccttatttacacagatgacaattgctactgttccaaggctcctaatcatggttcagttctcagggcctcaagtctttttccattccatcgcagagtagtaccaacatttatacaccagaaacctggggattatcctggcttgtttttcttcctctcccagatatgctcacaacagagaagccaatcaataaatattgttgaactaaatggttaacaaattcaagcccctgaatctccattattccatctcctccactactgccactaccctactgtaagctattctatcattcttgctaggagagttagcttcccaacatcttctcttccccattccaaactattatccacattgcagccagactgaaatttttataacacaaatcagatcaaggcactgccttgtttataaaccattcgaaggctttccatttttaggacttttttttttttttttttttttgagacaggagtctcgctctgtcacccaggctggagtgcaatggcacgatctcagctcactgcaacctccacctcccgggctcaagcaattctcctgcctcagcctcccgagtagctgggattagaggcgtgcaccaccatgtccagctaatttggggtttcaccatgttgcccgggctggtcttgaagtcctgacctcaggtgatccacccacctcggcctcccaaagtgctgagattacagatgtgagctaccatgcctggccatttttaggaaattcttaatatggcctatacagccctgcatgatgtctttctctaaacaaaaacacagagatgctacagtacattatcccaacactataattacaaccaggttattgtttttacttactagactgaaaagtgaagagtaaacagtattttccttaccttaacctctccagccattttatcaactgcaaatccctcaactgatagctgcaaaacaatggttttaaacagtaagtgaaaccaagaggctgagaacaaacttccatttaccctaaaaataaatcattctgttctctgccaacttcagtctgttataaaggatgtgtgatgggagatggagaagtccttaaataaagccagtaactatttaaggaaacttttttttttttgagacggagtttcacacttgttgcccaggctggagtgcaatgacctcatctcggctcaccacaacctctgcctcccaggttcaagcgattctcctgcctcagcctcccaagtagctgggattacaggcacacaccaccacgctcagctaatttttgtatttttagtagggacaggatttcaccatgttggccaggatagtctcgaactcccgacctcaggtgatctgcccacctcggcgtcccaaagtgctggtattacaggcgtgagccactgcacctggccacaggaaacatttaaagagcaaagaccacaatgtatgggtgtagtgaatcatggatgtcactaaataatatccatgattagcaagctactcaaagtttttcacatacctttattagtctggatattaagaatcctccctggtatcggttataaagttcttcccagttgtcctttatgaatttccaagcagctttcctaccatgcttgctgcctccagctactccaccaattaccgatacagtgtcctgtggacgtacctcttcctaaaaaaagaaagagagctaaaagtctagtgtatcaaaaacatattctggtaccagaaagtgcaccatactgtgacactgaagtaatcacactgaagacacttattccttgttttaggaataactggaaccagaagttctcagcaaagaagataatgtttaagctaaagataaccaaaatgagaatgaggtactgagacaggttcagacagacagactgctcaacagatacttgcttaggagcctataggtttaagaaaggaagagacacaaagtaagcaaaggcataagccagtttcccagttttcaagagtccctgtcctcatagtttccattctggagagacaatttgtttactctcccaactattctgattctcgccactagtgggagaaaaacagaagtcagtaacaaaaactcaagccagttactctggaaaaggaagctttagttagggttaaggcagctcaagaggatcagagctgaatcagagacacttctcagagatgggtaacgattcacttctaaatgcagttttcaccgtaacttactgaaagtgcaaacgtgaggactttttgaatcaggtcaggcaaaagagtagcgccaaggactctttcgattcggtttttctcttcttgcatatctgcttgtttatgaagctacaggaaaaaagataaagataggaatagttaactctcccttggatgttctgcatatgattatatgagcttcttccccagtaaggtaaaacttaggttctatattctcactaggtaagaatggcagggcattatattaaagaaagagaatacttttcaagatgctttgggccaggtgcggtggttcacacctgtaatcccagcactttgggaggccgaggcgggtggatcacctgaggtcaagagttcgagatcagcctggccaacatggtgaaaccctgtttctactaaaaatacaaaaaaaaaaaattagccgggcgtggtggtgcccacctgtaatcccagctacttgggaggccgaggcgggagaatcgcttgaacctgggaggttgcagtgagctgagatcgtgccactgcactccagtttgggcaagagagcgagactctgtctcaaaaataaaagaaaaaaaaaatgatgctttggcactaaatttgtcatctgctgttacagtaagtaaatcactagatgtaaatgctaccagatgaacagcctgtcattagttcagaccagtttaacatcaagatctaagaggtaaaatctatcatagccaaattctttacatcattgatatctggctaatgttctgttttagaagaacaaactaatcattagtgttcttataccagatcatcaaattaatttataatagtgaaaaattgaaaatgaatactgtacttataaaaatgcattattgaaagttatattttaagaatatatcataaacatgttcttatatttaagtgaagaaagcagacaaagcagaattatcctaaaaaatatatatatatatatggctgggcacagtggttcacgcctgtaatcctagcactttggaaggctgaggtggaggttgcagtgagcccatatcgtaccactgcactccagtctggacaacagagcaagactgtgtttccaaaaaaagggggtgggggagaacccctggaaatacatcaaaatggtagtattaattaatgatggtttctgatcagtgggattatgcatcttcacactttttaactgcaaaagcagcacatactgaatgcagaatatctgaaagacagagaagcataaagaaaaaaataaaattactactatatgtacattaacaaatctggaaagagagcatgttatacatgctgtttttgctacctgctttctaaactataggtaagttttattttcctctttatacttttctagtctctaaatcttccatagtatatatgtatataaaatcttttcatagaaacaaaatgttgtaattcttaaaaattagaactataaatgtataagagctatgtctccaagacaatttagactcttttgatcttttctaccccttaagatttaacactgaccagagtgtctggagacctcatcaaagctctcagtttcctcttcctttcgacacttttttttttttcaataaacaattttaatttataagaagtagagatggggtctcgctgtgttgaccaggctggtctcttttttttttttttttgagatggagtctcgctctgttgcccatgctggagtgcaatggtgttacctcagctcactacaaccacgcctagctaatttttcttttctttttttttttttgagacggagtcttactctgtcacccaggctggagtgcaatggcacaatatcggctcaccacaacctccacctcccaggttcaagcaatgctcctgcctcagcctcctgagtagctgggactacaggcgcccgccaccacacccggcgaatttttgtatatttagtagagacagggtttcaccatttgggccaggctggtcttgaactcctgaccttgtgatccacacccgcctcggcctcccaaagtgctgggattgcaggcgtgagccaccgcgcctggcctaatttttctatttttagtagagccggagtttctccatgttgcccaggctggtcttgaactcctggcctcaagtgatcctcccatccaaagtgctgggattacaggcatgaaccaccacgcctggcccctttggactctaagcagcagtgcagtaaaatagacaggaccttgggagatctgggttctagtcccagttttgcctctaactagctgtgtgatcttgactaagtccttcatccctctgggtctcagtttccccatgtgtaaaatgagatgggtggacagataatttctaaggcccttttcagctccaatat

SEQ ID NO: 537 - DNA, 2813 bp, Homo Sapiens
ctcaggtctaggacagcatctgggagaggatagggggaaggactctggcatagctggtcacaaaccagccccagggcaactgagcattgatttgatcaatggctttttcctcttcccttgaattcccctatgatggccttttaattgggtccatttgttccaaggccgtgggctgagctgagcagacgccaaatgatatgcctattattaaatagattaggaaatggccctacatcttgggcggccagaaaaaccagagtgactgaacagtgtccctgaggagtaacacgtgtattgtggaatactggatgtattgcagaatcccttccaggcaccttgcctttcctatgctgtccctgcgtctacagaatccttctgacttccttgctcacctgaaatgtgtctcctcctccaagattcacttcaaatcccctcctcggtgaaggagctgaaggagcgcgctaatcgccacccctccctcagcctgcctgagctactgccacagagaactcacacatctgcctggcaagagatccaacctgaattggagggtctgccctaggggacactgtccaagtcagggttgtccagggaacaggattacccaaagaacatttaaataacaatcccacttcagtaaaaaaaaaaaaaaagatgtctccatttcctgagctggagtcaaaaagggtggctgggaggcagcagagaagaggagtgagtgtaaattccgtgtgatggaaatgagtggcaatttaaattcgactggagaaaaagaaaactttcatgtcagtatcaaactcagaccatttttaaaaatcggtttcttccattttagacattatatactggtttccttttgtgaaatgaggctttagttctcttccttctctcattctcccattgcaatttttgattaaatattcagtgcttccatttttatgatgtcaaaaatgttgctcacagtgacatcttagggcattctatgtttatattttctttcttgcataactttttgtttttcctggaattaataactgcctcactgtacattcctaagaaggacatattctaaggacaaagagaactaactctaaagaaatctgaagcagtctttgtaatcatattacaagtacggttacccctgaacatcatgggcttgaactgcatgggtccacatatatgcagattttcttctgcctctgccactccggagatagcaagaccaatccccaccttccaccttttcctcagcctactcaatatgaagatgagagggatgaagaactttatgatgatccacctccacttaatgagcagtaaatatattttctcttccttatgttttcttaataacattttcttttctctagcttaatttattataagaatacagtatatgatatatgcaacatacaaaatatgtgttaatcaactatttatattttcggtaaggctttggtcaacagtagaatattggtagttaagttttgggggagtcaaaagttatatgtggattttcaactgcgtgaggggttgacatccctaacccctgcactgttcaagggtcaactttaatactattgatggtgttagtttgaaactattacatgtagtaggatataatgaaaatctaattatgttaatgtcactggaaaccaacattttcaacataagagaaaagagatacgaatataaaatcaaagaagaaaaaactactatcagtatagtcttggatttggaaacatctgtataaactcatgatgcttttttctctttaaaaagtattctctatttctaacttctaaaaaggcctgggaacaataactagccctgtgatgctgagcacctctagtacccgcttcaaaggttctaaatgtatttcctattaaaaggaacaagggcttcttggagaaatggctgattctgggttcgtggcaggaaatgcataagatgggttcagaatattttgtcatacaaaaagcaagttgtcagcactactaacgttgtgtttaaaggacataaaaaccaacttgaggactgtgctgcacaaagatggggtattttaagtatcaaaaagaataatgcctacgatggattgaaacatacaaatctgaaacttgtgtttcaatctatgagtttataatgatactaagagcaaacaaacaagcaaacgtgtaggtctgttctgtaggttggtagcttatcaatgtattattctgaaaggcaggttaaaaggaaaagaatctgtctttcctatacaaactgtatttcagagtaactaaatagacaccgaggaaaattcttctttactgaactccagccaataaatgaagaaggtatcacagaattaaatatcatcattttgcatgccctaatcaattaatgcctgtaggcctggggtgtccaatgtggcagccactacccacaagtgcctactgaacatttgaaatgtggcttatcggaattgatatgtggtataagtgtaaaatacacactagatttttgaagacttaatacagaaaagaaagattgtaaaatatcttggtttttatataatatttttgatataacagattaaataaaatatattatttaaattaatctcagtatttctgattacttttttaatgtgcttactttaacattaaaaaatatacctatatgctttgctttctatttctacaggcaagtctgagcagtaatcatcccaatggttgctagtctgataacaccagaacccaatggccaatattaacatcacaaaaaagagagagaactagacattatgtcctgctttatggggtacaaagaag

SEQ ID NO: 538 - DNA, 1753 bp, Homo Sapiens
aggttggtcttgaactcttgacctcaagtgatctacacgcctcggcctcccaaagtgctgggattacgggtgtgagccactgcgcccagctatccagtattttatttaaaagttgtcactagggtgttcactattgtgaatttataatcttaaaagttggggatgctaaaagtaccagactaaaatactacgaggttttctcatcttttaattccattttgttagaaaaaaataatcacaaccggggttcttttacctttccccagccatctagactgctttactgcaatgttgggaagattgcatacaataaaaactgtagctagttgattgggatttgggaaaattgaatcaagcatttgcattcatccagaatggtcttaaactgctgactgtggggtgcccacaggatgagcactggtggcatgggtgggaggaatttccttggatactgcaattgcatttgaaagatctattttccaaaacctgagcagagagaggctaggaggaatgcagacaggacattgaaaatgcgaattccctttactagtagaacatgaaatatctgataatggtttaaaaaaaataagtgccaggatacattgtagtataaaggttcaactagtataatttaaaatgagtctttatattcaggccaggtgcggtggctcacacctgtaatcccagcactttgggagtccgaggcgggtggatcacctgagattaggagttcaaaaccagtgtgaccaacatggagaaaccccttctctactaaaaatacaaaaaattagccaggcatggtggtgcacgcctgtagtcccagctacttgtgaggctgaggtaggagaatcgcttgaacccaagaggcagaggttgcagtgagctgagatcacaccactgcactccagcctgggtgacagagcgagaccctgtttcaaaaaaataagaaataaaaagtgagtcttcatattcaaattagtatatgaggttaggcaacaattcttatatgggaccaggtatatttaatttgcctttctttgcagtcatcctagtaaatccttgtaaagggttattttatatacaattttgtagtatattctaaatcccctttggcaaataaagctgaagttatctagtgtcagcatactgtgatttgtatatttatataagacaagattgcatcattctgattaagttgcagcattttagttttatctgataggcctgtattgagtaatcagtagctatgtgcaaatattaagtcaacttaattaccagacccagaaggccagaggtaatcaaagagtactttcggaagatgaaatatttataatgagttatggaaacaatgttttagaaatgtttttcttggtgtaatttaatgcagatttttacctcaattttgttaaaaaacttgataatttgatccctccatctatttaatatttaatattttcagattctagagtatttaaaatttaaacacaattataaaattaattataattcctacttatgttagctatgatttagggccaaaactaccctggttttgtcttgcaacttgaaacattgtgtattttaaactatataatttgggaacattattttatagactgtggataaccaaatataagatttgtgatttttaatgcttcatttgtgtaaaatcatttgtatattctatttatagtatgcattttctagctcattaaaagtacagaaaaacctcaaatctgtccttatacaaata

SEQ ID NO: 539 - DNA, 1913 bp, Homo Sapiens
tatcatttttagttagttaaattcaatgtttatggctctttttataaaatgttgcttaggaaaatgactccattttaaactagagctataatttgtagcagacaatattagacacttacctgtactcaaatacagtcagaagtgcctgcaaatttactttcctctgaagcagcccttgaccaattagtgacaaatgtagagtatgaagttccagctcccttgtctgggagtaagagtaagagctagtgacagtcacatcaccagaattaacttaacttctatggttcccaacaagatcaagtcgaagcttccccctgtgggactttgcatgaaatcatatccttttttttttttttttttttttttttttttgagacggagtctcgctctgtcgcccaggccggactgcggactgcagtggcgcaatctcggctcactgcaagctccgcttcccgggttcacgccattctcctgcctcagcctcccgagtagctgggactacaggcgcccgccaccgcgcccggctaattttttgtatttttagtagagacggggtttcaccttgttagccaggatgctctcgatctcctgacctcatgatccacccgcctcggcctcccaaagtgctgggattacaggcgtgagccaccgtgcccggccgaaatcatatccttaattggttcccatccttccctgtccttctttccccacttccctgccagtgtcccctgggagaacttgtacaataaattacttgcacacaaaccctgcccctgagtcagctcctagagaaccctatctaagaccattgtatcccaaatgtcctgggcctcactagcttatagatcataaaataaaattacattctttttataccacaaaaattatagcatatgcctccttttattctgttattcattcaaaagataaactgtgctaagagctggggatagaaaggtaaacataatttctatctttgcagagattaaactccaggtctgagagccagataacagccctcctcaagataaccagctgaatatggattggatattaaatattatagaactattgtcattttagataacaatattgtgtatgtacagaacattcttatttttaaagtgatcatgctggtacacataggagtgatttatgatagccgcaacctactttcaaatggttccaccaaatattagatgtagaaagggataaagcaaatatggcaaaatgttaacaactgttcaatataggtggacggtatacaaatattcactgcacaatttttttcatttttctggtgcctaaaatttttcaaactaaagagatcggaatgaacaagatcatgggaccccatgatgggtataggccctcaccaaggagtaatatcaacaattcccagatgcccatttatcatccctttgtagttattataaatacaagatacaccactgatgactaaaagaacttacatttagatggatgtatgcttcagaccttaattatgaagattttagaaaaacatatcacttttctcaagtagctcctaaagttatgtcactcaagaaatatatggctttctttaaacttgagccacttccagatattcctttgttcataaaattggcttaagcatttgtgaaggcttgaggcgtcatttgcctcttgccagtatcaaatgaggtattgcagctgtgatgaacacttctgtgagagttcactctgtggaagttcacttctgtgggagttcaaggtcaccttatgctaacagctctccacctcaagcattcactgcctgtcccttccatccattccccctccctcttcatcttcttcatctgaagggaaaaggaggggctctcagaagtcaagcaagagctggtcacttacctccttgaggtttattataaaat

SEQ ID NO: 540 - DNA, 3109 bp, Homo Sapiens
agagctggatgcctcccacggagagcgtcccttccaagcggccccggagtggagtggagtggagtggataggggtagacttttcacacggggacaaattattacaggatatctgcgccccctgttccgagtcactcggggccatcggttacttcagcaggttctctgcatcacggacccttttgaggctcaggtaaaagtttggatcctctccccacaaacgagcaaaattatctgtacattgaaaattatgcattgagaaaattcacattactctagaaacccttagactgcagttcctaacccaagttaagaacccgcggtccaggaactaggggtaacgatagaagagagacttgtttttctttgtataaccatttgcaccgttgtaactttttgaccatgtttctttatccaaatgaaatttccgaaaaaagaaaactcctgccccagaacttcgtaggaaaactagcttgattatggaattacaaataatagtaagagaaaaaaggctaagtggtggccgtgataggacttaatggtatttcaattcccagagttacagtggcggcttcaagggattgttgaataattgggagtacttgtttcagcttctttccttcctcagcctgaacatctgctgtttatgtaacttaatttcctaagtctgcgatttcaagaatttgatgcaacatctttctgttctaggaatttaccatggaaattattggccataattgttggtgacactatcaaactcatagtcactctataacgatatggagccttgctctgtcacccaggctggtgtgcaatggcacaatctcgactcactgcaacctccatctccaaggttcaagttattctcctgcctcaacctcctgagtagctggagttcaatggcacaatctcgactcactgcaacctccatctccaaggttcaagttattctcctgcctcaacctcctgagtagctgggattacagacgtgcacaaccatgcccacctaatttttatttttagtagagaccatgttggccaggcttgtctcgaactcctgacttcaggtgatcctcctgcctcggcctcccaaagtgctatgattacaggcgtgagccaccaccactgtgcccagtgttagcaattatttacaacaactgatactcttacctttcttcctatagatctaattatatggaaagatacaatcatttttgaccaaatttttatcttactatgttgtactctactcatctacatttcttccagtagtggcagtaattttcctatatacaaatacatccatatataagcacacagtatatatacaatatatataaaacatatagacaagttaaaaatatggaaggaaagattataaaagcaataaaaacataaaatatggaagaataaagtaaaaaaaaatgcgatggacctgtgtggaaaagctacaggacaatagggggaggtgaaagaggattttaatgaaaggagggacatgctttgttcccggaaagacaatattgtgaaattttgacttctattgagaatagaattgtttctactctcaacaattccactcatttttgtggtcaaaacagcatatagttgtatctttttttggtaaatgctaaatctgacagttgttgccctttaataaaagaaactctttcatatattaataattggtatacccgattttgcttcagccatcatgtttacactttcagccatcatggtttatactttccactcattgtatattcttgctttctttcttttccttggaaagaaaagtcttcggctaaatggatttttttttctttttttaaagagaaagggtcttgctcttgtcgcccatgctagattgctatgccactatcaaagctcacttcaaggccaggcatgatggctcacgcctgtaatcccagcactttgagaggccaaggcaggcggatcgcttgagctcaggagttcaagaccagcctgggcaacatggcaaaaccccatctctacaaaaaaataccaaaaaatttagccaggtgtggtggcatatgcctctagtcccagctactcgggaggcagagatgggaggaacacttgagcccagaaggcaaaggttgcagtgaaccaagattgtgcctttgccctccagccttggtgacagagggagactctgtctcaaggaaaaaaaaaaaaaaagctcactgcagcctggaactcctgacctcaagtgatcctcttgcctcagcctcccaaaatgctgggattagaagtactgtatccccccttttttttttttttttgtcagagtctcgcactgtcgcccaggctggagtgcagtggcgcaatcttggctcactgcaacctccgcctcccaggttcaagtgattctccttgcttcagcctcctgagtagctgggattacaggtgcacgctaccatgcccagccaatttttgtttttgctttgttttgtttttttaagacagagtcttgctctgttgcccaggctggagagcagtggcgtgatctctgctcactgcaacctctgcttcctggattcaagtgattctcctgcctcagcctcttgagtagctgggactacaggcacgtgccaccatgcctggctaatgttttgtatttttagtagagacgtggtttcaccatgttagccaggatggtcttgatctcctgacctcatgatctgcccgccttggcctctcaaagtgctgggattacaggcatgagccactgcgcccggcctaatttttgtatttttagtagagaaagtgtttcatcatgttggccagggtggtctcgaacttctgacctcaggtgatctgcctgccttggcctcccaaagtattgggattacagacatgagccaccacacctggccagaagtactgtatcctgtttccactttcatggtggtgaattttaccttttagaaaacaatagttatttttattttctgattataaaagtaatacatactcatgaacagaaatttggaataaatagcaaactagaaggaaagtgccatgcagagataatcactattaatatctttaatttttcgtattattaaattttttcgaccgcagcc

SEQ ID NO: 541 - DNA, 2964 bp, Homo Sapiens
aaacctgatacccttccttcctccatctctaaaaaatgggggaagacagagaaatggaatgaaaaatcttcaaagctggaaggacaaagggagtttcctgttctaggatgtgatgtgaagggaaattagaagatggactgtcctgaagcatagacatgaccctctccaactcatcatctgagatcagctgtcctgcttataaatggggaaataaagactggaaaatgtatgtgatttgctcaacatcaaacagtcatcaagagcctgtgttaacatctggcgtggatccaaaacccatgttctttaccgtggtaagttgttgcaaagcattctttgaaaaagatggaagccttcttcactcaaaattgattaatttcttcaaacacttgacctcccatgaataccaagtccatgttatactcatggtatattttagtgtacttaaggtacacacagtaaaagaaatttaaatttcacaatttagcacagatagttggttgctgtgaatgaaaatgtttctttttgtgcgaatgagtttatatgtgttatcctaggttccttaaaaaaaggtaggtcagattccaaagaaactgtgttctagaaaataatagtttaatgaaaatctaggttgtggcccacagaattgtgactctatacttatcagaccagagaatgatgattcaggcttataactaaagatccttgagtgtttttgagggatttacacctgggttcttatatcgtgtctcctctgtaaatctagcaggaagacaaggaaattgttctgtaccatttcaccactgaggaaactgagtctagaggagttacattttctgctgaagatcacataactaggggaacttgtttctacctccagacaattttctgctgtgaccctaaggtagtaggcataaagggctgggggctattcctcaagctaatttgtggataaagatttatttttcttctaggccttaggattataatgggaaagctttctcctcctgtattcatctttaatgtaattagtataaactgtgagtcagaaggctgggtttcagtcctgctctgtcacataccaactgataaactaggtcacttaacctatctggggctgtgtttcctcttgtgaaaaatgaagataatagtgcttatcattcttgtcctatggggctgtggagagcatctaaccagagactgtaggtggtaagaaagtggtctcagcattcaagtcctggacaagctctagccacccagcataacctcttctttcttaatcataccataattttcttttgaagaattgcttatcttctgttatgtgtgatcttggaggggctgtgaatcagggtctttctgccttcctactacagtcgtcaaaaatgttctggaggccattgcaagcttctccctccacacccctcctcaccctctggcatagtcacagggcaaacactggatctaagccaatcagatgggctctttcttctggaactgaatcctcagcagaatgacaaagaaagactaaacaatgatgactcaaatgaattgatcctttgattccacatcagctccttcatgagactgggaagcagttcctttaccttctttgttgtcccattgtggagctggctcctccagctctcccagcaattctatgggaatcattctccagtgatttctctttttggatggcctaagttggattatgttgattgcaatcacagaattgtattacatatgtcagtttttaacgtatttccttaaccttaaaatgccacaaatttaatatgcatcattaagtttttcagggaaaaaggaagaagcagtcacactatattcaatatatacaccgataggcaagaggcatactggtttgagaaatgtgaaacatgagaagtagaatgtaaaaaaaaaaatgtgtgtgttagaattgaggaattatggtacccatattatcattattaataaattatattagaatagtagttatgacaactgagtattttatgtacctagaacccacaaggagtcagggaagtaggccaaaggacaaaggagttgattctaaaattctcttgattgcttctctgagaacttctcaatttattccccttttggtataagaaatatctggttttgactgccagctaatttccagaagttgaaggcagttatggtttattgtgagtgggaggtttgtaagaaaatagcagtgcagcagtaaggagaagctctctgaagttgttctgaatgtacagctaatgggcagttatctatgagagagatttttatagcttcctccatatagctggtgaaaagttagcctggatgttgggggaggagcctgtcaatttggcttcttatcaaactcaactttgttaagcagttaattctaaggtgttttatccacttattactaaggcatgtaagtctgagctggcagccttgattaatagattaatgatcactgctccctacaatgtaattgtcattgtgtccctagaagaactacaaatatacctccggggttaggattaggtgagggtgactgtcaagcagccatagaaggtgtgaggatttgggactgtttaaatgaagacaaagacatgccctcaagaagcaattttccaagctgctgttttgacttgacagtggcagatacttcattggaagatgttgtgaaaatgaaatgcagcaggatcaagaggagagggtctattagtcactcaaaactgacttgtgcagatcttgcaattccatttgtatttctgtctccctatctgtaaagcaagagaaattattcataatttgactgtcattcatatcatgctaagtgatttagggctgcatcttcacatgacccagcttataacagatgggctgtagatttaatgaggtggtgtatccctgctctatcatttcccagctccataagcaagggcagttatgcaactctttatg

SEQ ID NO: 542 - DNA, 2979 bp, Homo Sapiens
attcacctcctgctgactcgggaagctgttccaccatccatcacgcaaggtaagaaaggcgaatggcagcacctggctggaaaaggagtgaggggaagtatgggtggctgattgtgacggaaacacaaggctgtacagcactggccatgttccttgagtcaaaatgatccaggtggctttcaaaaatcttagtacatgagaaataccccatggcccactctcttatttcccctttcaccatggaaactcgccaagctgagtttcttgactgggctacctgcacgaccaaaccaaacaggcacctaatctctaatcttactgctgggctctgtctcagaccagatgagcagagttcaggctggatatcccacaggaggaaggctgaatacccctctcctcaccaaagttggttaaggtctgggtgagttatgtctcatgttcctgttgtgaaatggaatgaacaaacaggggatgtgattcatgtctgtagacacgtagtattcctgagagctaatcaggaaatgccatttcatgtctggtcttataaagcctcttcaaaaatttgatagaggctaaaggggagcaatcattttaaagtgagctcttgttatctcttcaaccacctacgccacacgcccaccactaagttctgagaaaactttacacccccctcttcttcctctgccctagtccctctccccaacccgtaccgccaacacacacacctgcatacacatgcacatgcaaattgtttgaaagaaacatcatatggccaggtacggcggctcacgcctgcaatctcaggactttggatggctgaggcggaaggatctcttgaaccggccatagtggctcatacctgtggtcccagccactcaggaggctgaagtgggaggatagcttgagcctgggaattccaggctgggtgagccgagatcgcgccattggcctccagatcaagtgacagagccagaccccgtctcaaaaaaaaaaaaaagaaaggaaacatcatacaacatgaggcatactttacactgaagtaagttgttgttttcaaggcaaaatgagtttcccttaatttataggaaataaaaagaaatatttaaaagactagtaagaacaaataaatccagttctcagctggtgatcgataaataagaaaaagaaagacagataaggagaagattcacctataaattaagtgcatttaacaacttaaattattacttcccccaaaggaaatgaaaatggaccctctgatcagagagataaagtatgttttattttagttttttaattaattttgcagggagacacctaaatttaccaaaaaagggagctaatatcagggaaatacaagatcttaatggaaagattatggaattcacaagttactggtggcaacagtttggacacaattagacatcttaacgataatgaaagtatatagtttaatgaatctatgtcaagggaagccttgagtataaaacctttacagggtccgacgagatgaggacttttgctcaatgagtaaatagtgtttgaccagttgattagtaaggatgtgtttttgaattcctcgagatttaacaagatgacaaatcggacttgtttagatttctttttcgggctagcaagaacactttgacacactaagtaggaggagtcccctcaaccctctgtgagactcctaagcccactaaccctgaagtcacacacagctcaagacacacagagggggcctctaagctgagagacgtttattcaaagacttctctgatctatcagaactggtgatctaggagctttttgtaaagctaggtattcttcctctccagaaaacaaaagcaaaaacaaaacactttgcttctctatcagagggatccttttcatttcttttcggggaagtcttctttcacgtttaaatgagctcaatttatagatgactcttctccctgtctgttctccttgtcccctttatcaagcatggtgaaaactgtggagtcatccttgtctcatctgctctgactaatttgtttaccatatctggccagttcttcttttgaagggtggctgcaattttctctttcttatctcagttgttgttgctttgcattagcatgttttcatagcctctcctcctctcagtcccttcccttcctcctgaaatctaaacctttctgacactctttcatctggcactgccccctcacaactgttatgagttcctttttctcccacattgagtctgaattcctctctatggctttcaaagactttcttattcttcctcaaccctcttcattatctgctactccctagtgctcccttctctagtgaggtcaatattctcttccacttactgggcttgtttctcttcttccttctctttacccatcaattgccctgtccattggcttatttttttttttttttttgagaaagggtcttgctctgtcacccagggcagagtgcagtggtgtgatcttgaactcctgggatcaagcaattctcctgcctcagcctcagccttccaagtagctagagttatagacgcatggcaccatgcccagctaattgtttttatttatttatttatttatttatttttgagataggatctcactttgttgcccaggctgggttgaactcctgggctcaagtggtcctccctccttcacttcccaaagcgttgggattatagccttgagccaccgcgctggggccggcatttctcacttctgtctgcagagcatgtctcctcatcagagaccaacttcttacaaagtcccactcaatgactgagattcttccctttctctaagctcccacagcatgtaaagtttgtggcacctggcttgatacaggtctggatcattttcaaaccgctctatttgtgtgaatcttgtctcccacaaaaatgatacacttttcaaacaaaaagtccattttctctgcttacatgcattttgtgtctat

SEQ ID NO: 543 - DNA, 3983 bp, Homo Sapiens
agcaaccctttgggtccccttctgcactgtggaagctttgttcttttgctctttacaatatatcttgctactactcagtttttgggtccgcactgcttttataagctgtaacactcaccgtgaagacctgcagctttgctcctgagcccagcgagaccatgagcccacggggaggaatgaacaactccagacgtgctgccttaaaagttgtaacattcaccatgaaggtctgtagcttcactcccgagccagcgagaccacgaacccaccagaaggaagaaactccgaacacatttgaacatcagaaggaacaaactccagacgcgctgccttaagagctgtaacactcactgcgagggtgcgcagcttcattcttgaagtcagtgagaccaagaacccaccaattccggacacaccaggaggtggaggttaaactgagctgagattgtgccattgcactccagcctggataacaagagtgaaactcttaaaataatacatatatgtatatgtatacgtatatatgtatgtatatgcacaaattaaacttgtcattataaaatgtttcttgttgttgttctcatgctatatcttttcccatccttttcttggacacctctaataacatacccttttatgttgacctttctgtatcattttgtttcaatgtgtctcaattgaatgatttatctagtttgttcacacttactgatttacttggttttaaaaaatctaccttttgtgccttttttcttgctttttatacatttccttgtctctcgtttctttaaattttgtttacttatttgagacaggagtcttgctctgtcacccaggctggagtgcagtggcacaatctcactgcaacctctgccccggggttcaagtgattctcctgcctcaacctcctgggaagctgggattataggcatgcaccaccatgcacgcctaatttttgtatttttagttgggggcgggagggagtctgaccacgtcagccaggctggtctcaaactcctgacctcaggtgatctgcccgcctcagcctcccaaggtgctggggttacaggtgtgagccatcgcacccagctggaagtcctttttttcccaaagtgaaaaatcatttaattttgtgatcataagttacacgtgaaattttaaatactagacagtaagaggtatttaaaagttacctcaaatcctccctaaagatgctagcgttctgcggtatatatttagacatatctacagacaaggatataactttcccagttctatttgtgggacctgggcggtccacctctctgaaactgtttccctagctaagaagtaggggtgcgatcaacatgggtaggctatagtacccagttactttgtcaaacactaatctaggtgttcccataaggtattttgtacatgggttgagtcaacatctacagctgacttcaagtaaagattacccttggctgggcttggtggctcacacctgtaattccaacactttgggagcccgaggtgggtggatcacttgaggtcaggagttcgagaacagcctggccaacatggtgaaacatctgtctctgctaaaaatacaaaaaaattagccagatgtggcagtgcacgcctgtagtcccagctacttaggaggctgaggcacgagaatcgcttgaacctgggagacggaggttgcagtaaaccgagatcataccatttcactccagcctgggcaatagagtgaaactccgtcttgaaaaaaaaaagggggggggccaggcctggtggctcactcctgtaattctagccctttgagaggccaagatgagcggatcacctgagttcaggagtttgagaccagtctgggcaacacagtgaaaccctgtctttattaaaaatacaaaaaattagctgggcatggtagtgcatgcctgtaatcctagctactcaggagacaggcacaagaatcacttgaacccaggaggcggaggttgttgtaagccaagatcacaccacttcactccagtctgggtgacagagtgagactctgtctcaaaaaaaaaaattacccttgatgtgtgggtggtgggcctcatccaatcagttgaaggctttaagagcaaaaacgcatttgccagagaagacattctgcctcaaaactgcaacatcaaatcctgcctgagtttccaacctgctggcccaccctacacattttggacctgccagcgcccataatcacatgagccatatccttaaaataaggtataggccacacataaacacacactctctctctttccctctctctctctatatgtgtgtgtgtgtgtgtatatatatgtgcgtgtatatatatatgtgtgtgtatatatacacacacgtatatatagatacacacacacacatatatatatatgttgtattccctatctaagacccaggggaggcagagcagcattcatctccactgtcggaaggtagtccaaggtcaccccaaggaggcagaacccagggctacagactctcaaaccagtgttcttcccacaaaatcaaaggcagtgcagtccctgagaaagggtcatctggtgccaggctgcccaagcgggatccccactgtgtgaggctgggtggggaacttgacatctgctctcctaggagtgggatcatggaccccagctcacagggtccttgtgcattttctatgcaagtagagtgtagttcagcccggcacacagtaaatgcaagatattgttgctattaataaaactctagaacaaattccccagaggtcaaagtctggctgtgtgccagcctccaacaggcttctgtggctggcggggagccaggctacagggaaaactccccgtacacccagacctggagcctggggcctggtgaggaacgtgggatgattctgaaaccagttggcggaggaagggtttatggtgtgtctcagcgagtggtcagcacggcaccagggtggcgtacagaaggggcctgggagggcagcctcacctacaggggcccctctacagtgccactggcaccagggccgtgtccatccctaggctggaaaacgtgcttcccacttagggccccggggaagctgcttgggtctgctctgcgtcggagggagctcaggagggaaggccaagatgccaggctcaggaggtcccctgccctctggcactgcctgggactctgtctcaggtgcagtcaggtggctccgtaagtagcttctcccctacacctggccgggcctccagattctcttaacagccttattagtgcaagtgttctttgagtcatcggatgtgtcattggccccatttgacagatgaaagtgtggctcagaggggcagggactcgcctgagctcatggctggattggaaccctgcccccatcccacccagctcagattccaggctctcacaccctgccccaccctcagcctcggcagtctgccccttcccagcccagtgccccagccccacaagtaacacgctcccagcctggtcctctcctgtggctccctgctgcccggttccagcctctgcagcagaacaagctgctgtctagtccctgcctggttccctgtcgctgtgcccatcaaatgccacttacaaaggctctcacagctcctcaaagctactgctccccctccatctggaaattgagtttagtttgtttgttttgtttttgagacagagtctcactctggtgcccaggctgcagtgcctggcgcaatcatggctcactgcggcctcgacctcctggctcgggtgattctctcgcctcagcctcctgagtagctgggaccacaaatgcacatcaccatgcctggctactttttaaattttttttgtagagatggggtctcaccacattgcccaggctggtcttgaactttggaactcaagccagccttccaccttggcctcccaaaatgctgggattacaggcgtgagccactgtgcctggccaattt

SEQ ID NO: 544 - DNA, 9058 bp, Homo Sapiens
accacaccgctagcgcctctgaacctcgccaggcacgtccggttctgcggcccccactccgcccccgcctgccgggagccgcgcagtgagttactgactccgccggcgcgcacttcatttattcaatagctctgggcctgaaaaacaccggggaaattgcatcccattttccccaagcccattagcaaccagcggtctcattctcgatgattccgctgagccaccccggctctaggggagggggttttattctgcctctgccgccacccccacccaccctcagaagggcaccagcttttccaatctgtgaaccccaaagaactgcagggcagggacccctggggacccctcaacccccctcacccccgcagccttcagtacctcccgccggcattcctctaccccctctccatgtccacccagcctggccccaagggcggatttcttctggctctgggctctattctcgggaggggggcactggggtgggggcgcccagatttggagtggcagcaccccctccgcctccacctcgggctgtgggaccgcaggcaggtggcttctctggcctgcgtttacttttttttggctgaaaaggggaaaggtggaaccactggctggctgccaggaaagggcattgggggagataaggggtgtaaaggccttgacgaacggggtcctcttggccaggaagcatcttggggctgcactgggcacacggcattttccccaacccagaggtgggcgcccagtgccagtaactggtccaggcttctaaaggtcccattcctttgtctctgcagcctggtgcgccctgccaggcagttgcggggaggtggtggtctctctgtggggtcatagttcagagcacgcgtgctcggagacatagttaaatagaagctgaatgcgtgaaatatgaatacatcctcacggtcctcgtctcgttataggttacaaagtgccgggagccgtgcagggccagtgaacccctcgctgagactcagtttgctgccatcacaagtgctctgagaatcctggagagggaggatattggagacaaacgggactgctgcccgccttttaggcgaccgttggaggctgctctgtgccggacacaggcagggaggtggaggccagatacaagaaaaccacagtaccagtaaatgacaaaggctggatcttaacccaagtcctccgactctgaaggccatacccaacaggtcccattttatttgttttacttttttttaattgaagaaaaaaaaactagcattcccctacagtgccccccacctggtggggacatcttgggttggcaaggccaccactttcaagagtagaagtgtttttcagcaggaggagttggctgcaccaaaggagctcaggagaagctggagtctcaggcccagcaggaacagccagaggttttgcagctttgcccagcggctgggttcgccgaagggtctccctgggggttcccagcatgagccgaagccaccctcccctgtgggatctgtgaggccaggcattgggcctctttaggcctcagtttcctcccctgtcataggcaactgacagtccctctggagcgccactggggctgcagagggaggccggagagatggtgccccccctcctccccgccacccccacacacagccctcagcaggatggtggctgcctggccgattgcttttgcatttgcagcagagcgggggagtgaggccaagctgagtgccccctccccctgcccagccagctcagacccaggcggtggagcaggaaggctctggggaaaacagtgtgagtcaccgggcggccagagtgtgtccttccctgctagcgcactacacggcaggtttcatagcttgacagcaaagtgtttgaaaacgaagagcaggaattccgcggttcctgcccggcctcgccatccagctgggagaagagcatggtcatttccttcacttagtccacggccactcggcgctcatccccagcacagccctccccaggctgcggcaaagactgttgctgtcctgctgagggatgtgcccccggggattcaatcgagattctgtaagatgtgggggatgtggcggggtggggggtggcttctccacatccccagggctctccttcttccccagtgaggtgggagaagccgcagattggggtctgctgaggagcgggcctacatgaggcccaggtcgtgacccatggctccggggaccagaaggtaaacagtttcggcacagggtgctcccactaggtcataggtggattcagccttctctgagaaccgagaagattctggagtcttttgaagcaggaaaggagatcagaggaggagatggtggcaaagcggggactgagactcttgaaatgtgtttatcccaggcagagcagccgctgaaaggggagatggagagagaatgtcaaaagcagcactgggtgttttcctggggtctctccacagtgccccatcatttccgaatcaccaggcccgctggcacaggggtctgcagcccaacctcgcagaatgaccccctctctgcaggcgggcatcaccctgacagccccctcccaggacagaaaacctatagacacctggctgctgggtgtcaggccacccgcccgtttctcttcctttccttccagcctttcctctcccaaccagccccctccccacccggtcccccttctatttttcctggctaaaaccagccacagataccaccacacccggaaagagataaataaataaaagaaaaacaacctcaactgtgaaaagcagtccaaatctgaattttttccggcctgagttaattacactttaaattggcatgtttactgatcggggaatttcaagttaacagagacagcgccccctccccaactgtttgtacagtagaactcagcaggctggcgggctcccccaggccttggcaggtcctgccgctcccctgccaacgagagagcataacagaaacatctatttttgagtgttagagaaaacgaagatctcacagatggcgggaagcagcattctggatggtttcctgcacccaggctctgtgcaccttctcagcagcctcttgccccaggaaagaccagggcctttggcctctcgggaccctgcaagctagctgccttgcacagggggctgtctgcctatcccatcgtcgagggccgagcctggtcgaggctccccatgctgtagcactgtccagttggctctgaccccttctccttggagcaaggctgtgtggggtgcggagggggctctgggcaggaagcaggagtccctgatgcattcattcactcagcacacaccaatggagcgaggagctacaccaaataaagtggtggcctgatctctgccttctcaagaccgaccctaataatgggcctgggtctcccctagaccccatgtaccttggaaaaatcccatccctgctccaggcccaaatagaggcaaccagtggatcttctgatggatgcaaacccaaggaatgcctccggggacaggccagacccccagctcacagccacatctctcctggcagaagtggcctgatgtggccacccccgccccaggccttggttcatggtcgggatcaaccgcaggctctgccgtgggatgtccacaccctcaggacccgccgggtgccctgtgctgcccacagaggagagacaaggccaacaagcatcactgagcactttctctggactcagtcctgtgctaggtacagggatgccattgtgcacaagtcagaaacagccgcggccccagcagagcctgcagtctgggtagggagatacttgctgatctaagaatcagagcagtggatatctgactgcaaattgagactgcctgtgaaggatgaatcagggaaggcttcctggaggaggtggcctcccagagctcagcttgtccttccttgaggtcctttccattcccagtccccctctggtcactcacttggcccagggcctagggccttcgggcaggcagtgcagctgcacaggcaggtgctgtacctgctcccctgcacgctgctgggataacgggaaaatgatgaatgaggccccatcatgccctgcttcccggccctcaagcccattcccatccatgacaaattgtccctctacctccacagggtcttttcagcagcctcgcctgggaagccttggcagcacttggtggagatttatgcccatcttccccagattcttctttgtttttctgcttctttattccctcaaaatatgcttttatttattcattccacaaacgttctctgagtgcctcccgtgtgcttcctcctggtgatagagagatcgggttcagtacaccctcctgtgttgaacacctgctttgcactggtgtctatggtcagatttcatccaaggagacaggcatgaactaagcacctactatgagccagcactgccgagccaagggccctggcttctaaaagctctgccacagggtggccgaaaccccagccccttgggtattgaggtcctggcttggtgattttgcagcccttcttggtctgggtcgcctcaatttttacaaagaaggaagccgctcgttcatcagaggtgggtcttgaccccagagtctcaaccccaaagctggggagacagtgctcagaacaaaagccacagcaatgcaccctgccctctgtggacctcagttttcttacctgtccaagggtgtgagcagagaggcaggacaagaagggagcagccctgacatttgggggttctctgaatccttgaggacccctgacgaccgtgagctccgtgggtctccaggactgcaccagccaacgtgtctgtgcagagtggtggtacacagacaagggtgggggtggtgaggggagcacctggtcccacccaggagagatcaaccagatggtctcagcgcacccaccaccttcactaggtcttgttcactccatgcaactgaggcagtgaatatagccctcaactgccatcaagcggagtgaaaaacacaggtcaacataggtctttggtatttggatgcccatcatgctttgagtcttctgacaaagcaagcagccctctccccaggccagacacgcaccaaagcatcccacttcatgggtgatggcaccaagttggagagatgacaggtgagtacagagaaaaaaccatgaatattctggcaagctaagtctgggggaaagtgagcctacctcatcatatgataccaagaaaagaggcccattcggtgagcgatctgtcttccaggacacaggggctattcctaaagcccgtgcaagcagggtgggtgagagcacacagcctggagccagaccctgccccacctccagctgggtgaccttggttgactcactcaacctctctgcgctccatttcctcaactatggaaaagaaactgtctcctcacagcagctgatggggcccaggaccaaggcaagcgccccaacacgacagctattacttctcctcttatctcccgctgaaacaacaaggaaatgggaacggaggtccaggttgttcaatttcccaaccacgtccaggagacatagtggggataaaccgggcccttgcactggagaagggagcacacctcgtgaacttggaccggcggcagggtttacacaccgcactgaagacgggacaagtcacagagcctctggttgaagggtccatggagactttcatcctggccacctgtggggcacacgttcttatttggcttatctgatgagaaaggccctttgtttattttttcttctccgcaaacaatagataaatcaatcatttttgcttttaatgaaattctgcatcaagtggcacagggtcactgtgtttgggttagaaatcggcggggaacatgcacgctgctgcatgccgggccgacgccggactcaccccctaattctcaagtggcgcgtgatgcacccagcactcttcctgagtggtggcctgggagactcggcgggggggccgtgcctgttaacgccgtggtgtgcggggatggttatattgaagctattaaataaggctaatgtcactcttcccctcacacacacatttaatatattccaaagatgtgtagatgcattaacagcaattttcatctccaaatgttcccatttagtcagccccatgcataaaatatgagccctaacaccacgctccagcccgttgcagatggagttccccagagcatttggctctcagcgctggggcgtttgctggaggggcgggggcgcgatcagtcggcatctgcaggggaacacagggcctgtcacttcctctggggctttggtgcccccaccccccgacaagtggaagagagaacccagacccaactgactcgtgcctcctgcagctaatctcagcctcatcctggaagggcagaaaaagctagaaaaccaaacagctttgaacaaatgggaagaatttctaaaaatcaattaacatattcatgtactccatcaccacatcttattgactgcctgctttgtgcccagcacctgcctgggaattcatctgatccggtccctgcctttggggactccattagtcaatcaacaaacactcactgttctgctactgaacacagcaggggatgagagagagagagagagagagagagagagagagagagagagagaaatttctgccaatgagaaatctcacagtctagggcacaaagaaggtagacattaacattaggcaatttcagagaactgtaagctaggaagaaaacagtaacggggcaactggtagaatgtgatagggaagaggcaaggggagctgcttttatagggttatcagggatgaccttgctgaacaagagccattccatccccttgggaattgtgaacccctgggaaaggaaaatgcaaaggatgtgggcctttaaggaaggaagggccagagcctggacaggaggcagccgagggcagagcagggcggcccaggacccagctccggaaggaggggcatgtgcaaggccagaatgaaggatgaaaacacgtgggggataggctgtggctccaaaagaagaggggggctgccactctgagggcctggggggtcctcggatcattttggtaccaagcccaagggaaggggcctgcagaggtgccctgggcagcggagttaaacagctggactctgcacttggaaatgctctccctggcagagggaggggcactggagggagacccaagtgccacaggctggagggacctagcctgtggggcggcctctccagcagggctgtggcccaggggctggggaagaggggtgctgagggagagtgggagcaggcagcccagagggatggtgccagggatccccactcccatgctaggcatggagaggagcggtcccgaggaggaggacaagggggagggcaggcacaggctgtgacttccaaggcagcgacgtctcaactaggggatgacgggagcccagctcaggaagatctcccgagcccaggagctcactgatcaacaatgagtgataaaggacagccttagctcattctttggggtcactcctgaggtgctccttgccttcagccctggaccctgggcatgggcagcatgttctggagtcactaagtctccaggtcagctgcaaacaggcctctggtcatcttcctgtagtctgggcaggccaggggtgcaaatatgacataagcatcgggtagctgagagccagcccagcctgggggatgtgccaaccggaagcaagggcatggcgggtgctcccgctgacactggaattggggatgccattctgtcacacttccaaagccccccagaacagagtggagctggaaaattaacaggccaagtgacacaggtcctacacaaagtccacagggtcaaccagcgcagagccagctgctgcctggagttgacagcaaagaggaaggcatccaaggtgggattcgatatcggaaagaggttgactgtataatattcatcatatagaaagtgaacacctcacaggcaacctatttcaggtaccactgagcagcactgactccagggaggaggcttcttccacagggaagggccctgccacccacccgcctccaggatggaggccagcacagggctgcaggtggaagtcaagcgcgtgctcggccaccagccatgcctctgggggcccacagggcgcgcaaccggacctccccgacatcagcaggtgcaggaatcatgcaggtgggatctgatactgaagagaggccgctcgtgtcttgtgtgtcatgatttctgtgaatgcaacacaggccacctctcctcaggcaccacaaggagcagcacacgcacacggccacccaaggcaccagctcccacccagggtctcacagcactgagatgagcagaaggcagcccaggtgcagggaatgcatgcagccgcccccaacatcctggcgaggggtgggtggccttccagcaggatgccttccagcgggactagctcccccgtgtcctctgcctcgatgacactggccatgaaaaacagactgagccccgtcaccattgctcatcagcttcatgaccgccccccaccacagtgcacaaccctagcatcttccccaaagtccacatggccccccgaaagctctcccaaaatgattcaatggcgggggtcaggggaaaggatgacaaatgtcacaccagcccatgcattcacgtaccctggaaagtcccgcctcaggcgtggcgcccgcacaccaccgggcggtagcggtactgaaaacaggccatctgtgttatattcgtcattaataaaagcgaactcatcacagacaacctcttctcaggtacccagagtgccatcggctcaagaacgtggctgccgcgtcccgtggtgccagcgctgcccccgggaagcagtcctgaggacggatgggacatcaaaggtgagaagacacagagacaggaaagagacccctgcccggcccactctcggtgaccaggccccactgaggcagcgactccaaagcacccgtcctgctcctaccctcaaa

SEQ ID NO: 545 - DNA, 8200 bp, Homo Sapiens
cccagctactcgggaggctaaggcaggagaattgcttgaaccaggacccaggaggcagaggtggcagtgagctgagattgtgccactgcactccagcctgggctacggagtgagactccgtctcaagaaaaaaaacaatggactagctgaatccatttttttttaaatttctgtaggttattggtgaacaggtgatgtttggttacattattaagttctttattggtgatttgtgagattttgatgcacccatcacccaagcagaatacactgcaccctatttgtagtcttttatccctcacccccttcccaccctttccccgtgagtccccaaagtccattgtgtcattcttatgcctttcatcctcatagcttagctcccacttacgagtgagaacatatggtgtttggttttccattcctgagttacttcacttagaatagtaagtctccaatctcatccagatcactgcaaatgccattagttcattcctttttatggctgagtagtattccatcatatatataatatatataaaacacacatatataatatatgtatatataaaacacagtttctttatccactcgttgattgatgggcatttgggttggtgccactgaatgcatttttaaaaataacccaactatatggtgccatcaagaaactcacttcacttgtaaagacacatacagactgaaagtgaaggatggaaaaagatattccacacatttcacacaaatggaaaccaaaagtgagcaggaatagctatagttatatctgataaaacagactttaagtcaaaaactataaaaagataaaaaggtcattatatatgacaaatggatcaattcagcaaggggatatattagattggtacaaaagtaattgtagtttttgacattaaaagcaagaactgcaattacttttgcaccaacctataacaatgcttgatatacatgtaccccacactcgagcacccagctgtataaggcaaatattacatctatagggagagatagacttcaatacaataatagttggggacttcaacaatctgctctcagcatttttaacagatcacctagacggaagaatcaacatagaaacattggattttaactggattttagtaagaacagaaaataaataagctggactttagatcaaatttgacttaacatttacaaaacattttattttatccaaaagctgcagaatacacattcttctcatcagcacatggaacattctccaggataggccatatgttaggccacaaaataaatctcaacacattttaaaattaagatcaaatcaagcatctttttaaactacaatggaataaaagtagaaataacaggagctttggaaactgtacaaatacatggaaattaaacaatatgctcctgaatgaccactgggtcgatgaagaaattgagaggaaatttttaaaaatatgtttttaaatatttaatatgaaaatagaaatgcaacatacccacacctatgggatacagaaaagcagtgctaaaagggaagtatatagcactaaatgcctatatcacaaaagcagaaatattttaaataaacagcctagtgatacacctcaaggaactagaaaaccaatgacaaaccaaacccaaaattagtagaaggaaaagtatagtaaatatcagaacaaaaacaaaatagagactaaaaaacaatacaaaggatcaagagacaaaaagtgcgtgttttaaaaaaaagatacacaaaattgataaacctcctagctagactaaccatgaaaaaaggaagaagagtcaaataaaatcagaaatgagaaagaagatattataactgataccacagaaacacaaaggatcatcagagattactatgaacaactatagccaacaaaatggaaaacctagaggaaatgggtaaattcctggacacatacaaccttccaagattgaacctggaagaaatagaaaacctgaacagaccaataactggtaatgagattgaatcagtaataagtctcccaacaaagagaagcccagtagtggatgactttattgctgaaccctaccaaacctatagagaaaaactaacaccaattcttcacaaactgtttaaaaacaattgaagaggagggaatttttcctaactcattctacaaggccagcacaaccctgacaccaaaaccagagaaggacacaacgaaaaagaaagctacaggccaatatccctgatgaacacaggcataaaaatcatcaacaaaatgctagcaagctgaattcaacagtacaccaaaaagataatatactatggtcaagtgtgatttacccaaagatgcaaggatggtttaacacatgcaaatcaataaatgtgatgacatcagtggaatgaaggaaaaaactttatgattatctcaatagatgcagaaaattgtttgataaattcagtatcccttcatgataaaaaaaaactctcaacaaattagacatacaaggaacatacctcaacataataaaggccatatatgacagattcacagctgacatcatactaaatggggaaaagctgaaagaccttcttctaaaaactggaaccagagcaggatgcccacattcaccactcttattcaacatagcactagaagttctagccagagcaatcaggcaagagaaataaataaaaagcatctaaattggaaaagagtaagtcaaattgtctctttctgtagatagcatgatcttatatatagacaacctaaagactttaccaagaaaaacccttacaactgataaattcagtaaaatatcagaatataatattagtagtattttgatgcatcaatgatgaaaaagctgaaaaagaaatcaggaagacaatcccatttacaataattaaaagataaaatacctcggatctaaccaaaaaggtgaaaggtctctacaagggaaactacaaaacactaatgaaagaaataaacaaatggaaagacattccatgtgcatgaatcagaagaattaatatcattaaaatgtttacccaaagtaaacttgattcaaagcaatctctatcaaaatactattgtcatttgtcacagaaattgaaaacaaaaataccaaagttcatatgaaatcaaaaaagaatcagaatagccaaagcaaccctgagcaaaaaagaaaaagctggaagcatcacactacttaacttcaaaacattacagggctatggtaacccaaagagcatagtattgatataaacagacacacagaccaatggaacagaatagaaaacccagaaataaatacatatatttaccaccaactgattttcaccaaaggtgccaagaatgtgtatcagggaagggataccctcttcgataaagggtactgagaaaactgaatattcatctgcaaaataatgaaactagacccctaatgtctcaccatacacaaaaattaaaatgattaaagacataaatataagacctgaaattatgaaactactggaagaaaccacaggggaaatgtttcaggacataggtcaaggcaaaaattttgtggctaagatctcaaaaacaaaaatagacaaatgggactatattaagctaaaaagattctgcaaaacaaaggaaacagtcaacagagtgaagagacaatctgtagaacaggaaaatatgtgcaaactatttatccaacaagggactaatattgagaatatacaaggaattcaacagcaaaaaaaaaatcccttttaaaaagtaggcaaaggacatgaagagacatttctcaaaagaagacatacaaatggccaagtatatgaaaaaatgtttaacatcactagccatcagggaaatgcatatcaaaaccacaatgagatatcaccttaccccacttagaatgactattattaaaaagaccaaaaaaaaaatgctggcaacaatatggagaaaagggaactcttacacactgttggtggatatataaatcactacagtcattatggaaaacagtatagaggtttctcaaaaaaactgaccactaaatcagactactaaatccccactactgggtatttacccaaaagacaggaaatcggtgtatcacagggacacttgacctccatgtttactgaagcactattcacaatagccaacatacggaatcatctaagtgtctatcaatgaatgaatgaagaaagaaaatgagacatacttacacaatggaatactgtttcgctattaaaaaaatgaaattccgtcatttgcagcaacattaaaaaatgaaattccatcatttgcagcaacatggattggaactcgaggtcattatgttaagtgaaataagccaggaaaacaaatatcacatgttgtcagcaatatatgggagctaaaaaaggtgatctcatgcgagtagaaggaagattgataattaccagaggctgggaagttgcaggggttggggcgacacggtgtcacgaagagaggttggttgatgggtacaaagttacagctcgaaagaaggaataatttatattgttcaacagcacagtagggtgactatagttaataatatattttataatagctagaagagaatattattatactttaagttctggggtacatgtgcagaacgtgcaggtttgtcacataggtatacaggtgccatggtggtttgctgcacccatcaacccatcatctacattaggtgtttctcctaatgccatccctcccctagacccccatcccccgacaggccctggtgtgtgatgttcccctccctgtgtccatgtgttttcattgttcaactcccacttatgagtgagaacatgcggtgttcggttttctgttcttgtgttagtttgctgagaatgatggtttccagcttcatccaagtgcctgcaaaggacatgaactcatcctttttttatggctgcatagtattacatggtgtatatgtgccacattttctttatccagtctaccattgatgggcatttgggttgattccaagtctttgccattgtgaacagtgctgcaataaacataggtgtgcatgagtctttatagtagaatgatttataatcctttggatatatacccagtaatgggattgctgggtcaaatggtatttctagttctagatccttgcggaatcaccacactgtcttccacaatggctgaactaatttacacttccaccaacagtgtaaaagcattcctatttctccacatcctctcaagcatctgttgtttcctgactttttaatgatcaccattctaactggcacgagttggtttctcaatgtggttttgatttgcatttctctaatgaccagtgatgatgagctttttttcatgtttgttggctgcataaatgtcttcttttgagaagtgtctgttcatatcctttgcccactttttgatggggttgtttttttcttataaatttgtttaagttctttgtagattctggatattagccctttgtcagatggatagattgtaaaaattttctcccgttctgtaggttgcctgttcactctgatgatagtttcttttgctgtgcagaagctctttagtttaattagatcccatttgtctattttggcttttgttgccattgcttttggagtttgagtcatgaagtctttgcccatgcctatgtcctgaatggtattgcctaggttttcttctagggtttttatggttttaggtcttacgtttaagtatttaatccatcttgagttaatttttgtataaggtgtaaggaaaggacccagtttcagctttctgcatatggctagccagttttctcaacaccatttattaaatagggaatcctttccccattgcttatttttgtcagatttgtgaaagatcagatggttgtagatgtgtggtgttatttctgaggtctctgttctgttccatttgtctatatatctgttttggtaccagtaccatgctgtttttgttactgtagccttgtagtatagtttgaagtcaggtagcatgatgcctctacctttgttctttttgcttagaattgtcttggctatgtgggctcttttttggttccatatgaaattgaaagtagtttttttccaattctgtgaagaaagtcaatggtagcttgatagggactgcattgaatctataaattactttgggcagtatggattttcacaatatttattcttcctatccatgagcatggaatgtttttccatttgtgtcctctcttatttccttgagcagtggtttgtagttctccttgaagagatccttcacttcccttgtaagttgtattcctaggtattttattttctttgtagcaattgtgaatgggagttcactcatgatatggctctctgtttgtctgtattggtgtgtaggaatgcttgtgatttttgcgtgttgattttgtatcctgagactttgctgaagttgcttatcagcttaaggagattgtgggctgagacaatggggttttctaaatatacaatcatgctgtctgcaaacagagacaatttgacttcctcttttcctaattgaatacgctttatttctttatttctttctcttgcctgattgccttggccagaacttccaatactgtgttgaataggagtgatgagagagggcatccttgtcttgtgctggttttcaagggaaatgcttccagcttttgcccattcagtatgatattggctgtgggtttgtcataaatagctcttattattttgagatatgttccatcaatacctagtttattgagagtttttatcatgaagggctattgaattttgtcgaagaccttttctgcatctattgagataatcatgtggtttttgtcattggttctctttatgtaatgtattatgtttattgatttgtgtatgttgaaccagcgttgcatcccagggatgaagccaacttgatcatggtacataagctttttgatgtgctgctggatttggtttgccagtattttattaagaatttttgcattgatgttcatcagggatattggcctgaaattttctttttttgttgtgtctctgccaggttttggtatcaggatgatgctggcttcataaaatgagttagggaggattccctctttttctattgtttggaatagtttcagaaggaatgttcccagctcctctttgtacctctggtagaattcggctgtgaatctctctggtcctggactttcattggttggtaggctattaattgctgcctcagtttcagaacttgttataggtctattcagggatttgacctctttctggtttagtcttgggagggtgtatgtgtccagaaatttatccatttagaagagaaaatttttaatgttcctagcacaagaaaaagataaatgactgaggtgagagctatcctaaataccctggtttgatcattacaccttgcataattgtctcaaaatatgacatataccccataaatgcatataattgttatatgtctattaacaaaattttaaaaataaggactggatgtgggtgatgaataaatgaggatttggtatactattttctctacttcttatgttcaaaatattttataataagttaaaatgaataataaaataaccaaaaaagatctcaaaaactactatattttgtacattcatattacaggcacactttattgtacttcgctttattgctctttgtaggtattgagttttttacaaattgaaagtttgtgacaaccctgtatcaaggaagtctatcagtgccatttttttccaacagcatgtgctcactttttatctctatgtctcatttggtaattcacataatatttcaaactttttcattaataaataactgttatggtgatctgtgatcagtgatatttgatgttagtgttgtactatagggtgccaataactctgcctatacaagatggtgtacttaatcaataaacgtgtattctgactgccttaccctccattccctcatctctttcccactctcttccctgacacacaacaaacaataatgaaattaggctagttagtaaccctacaatggcctataagtgttcaagtgaaaggaagagttgtatgtcactcattttaaatcaaaagctagaaatgattaagtctagtaaggaaggcatgtcaaaagctgaaacaggctgaaagctaggcctct

SEQ ID NO: 546 - DNA, 2114 bp, Homo Sapiens
tcatgatagacacaatgaaatccaccctcaaagaggtaaggcggggctcaggcagctggtgtccagccactgtcgcccactctggtcccacctcacccatctcttctcatgcactgggaaagacccctggtctgcccccaggcccaacaagtgaccaccaggatctatcaggcctcatgctccagtgatcagtccctagaggcctggggacacatgtaatcagaatttaagaaacagagacctttggtggggaggttctttaccatcctcaagtacccacccctccttcttggggccaggcacaattaggtgacccaactgccagagacagtcccacattttttgagagacagggtctcattctgttgctcaggctcagtcatagctcactgcagcctcaaactcctgggctcaaatgatcctcccacctcagccacctgagtaggtggcactacaggcgcatgccatcatgcccagctaatagtcacactttttttttttttttgagatggagtctcactctgtcgctcaggctggagtgcagtgggaagatctcagcttactgtaacctccacctcccgggttcaagcgactctcgtgcctcagcctcctgagtagctgggattacaggcacctgccaccatgcccagctaatttttatatttttaagagatgggggttcaccatgttggccaggctggtctcaaactcctgacctcaggcgatccgcccaccttggcctcccaaagtgctggttttgcagatgggagccaccatgcccagcctagtctcactttataggctcccaaaccacagcagaacacctggctgcctcatccctctgcacccatcacgccagtgggcatgctggctgtaggtggggatggcctttgcccgggttcctgggagcacctggtgttttatggtcacctacccacttacacctgaccctggggcctctgcagttttcttggcgttgtcaccacaaaaggaagaagcccacctgtggctggctggctggccgccaggtcagagccaaggcaggcagggccttcctgtctggcttcttgaaggcagacacaagtctgcaggctgctcacgtcatctcattatcttttctcacgaggactacttcggatacaatcacagcaaccctggcctcggccctgccctgtccctgccatgcaacttcacaactcagctggcctagacccctgggaggcctccaagtccctaagcggttccagtttgtggaagtcccaggcaatcactgtgtccacatgagcgaaccccagcacgtggccagtatcatcagctccttcttacagtgcacacacacgctcccagcccagctgtagctctgggcctggaactatgaagacctagtgctcccagactcaacactgggactctgagttcctgagccccacaacaaggccagggatggtggggacaggcctcactagtcttgaggcccagcctaggatggtagtcaggggaaggagcgagattccaacttcaacatctgtgacctcaagggggagacagagtctgggttccagggctgctgtctcctggctaataatctccagccagctggaggaaggaagggcgggctgggcccacctagcctttccctgctgcccaactggatggaaaataaaaggttcttgtattctcactgcttttgaggctttttcgttgccagcaagggcttttgcattgagggaaaaggaagcacagaacggattcatccagggtcctggagaggagggtgtggaggcaagaagcaggaaggacaagtcctcctctcggcacgcctgggtccccaggactgctgaagcacaagacccgaggggtggcctggtccttccctcctggcctgtgtggactctgatggggctgttggacgcggtggccttcaacctggggcccgttggccagagctcggcctctcagagaccgctgcaggccctgcctcgcctcctcctggccctgcacctccagccattcactgcggctctcacagctcagtacggtcggaatttgcgctgggcccgcagcagctcgatcctctgcttgtcctcctcgaacttcttgcgcagctgcgctag

SEQ ID NO: 547 - DNA, 2412 bp, Homo Sapiens
acatcttgttaaatggcgattgtgaaccagtagatctggagtagggtttgagagtctgcatttctaacaaacccaaaggtgatgttatgctctcagcaaggttctagactgctaaatttcctatatagacttagttgttgcgatgtctttattcaaaaagaactgctttgttcttggtcttataattgtaagatattttgttaggtgagtcccatatattttttctcacttaatcttcacaacacccctgcaagactgtaatacatgttcattatggaaaattcagataagcaaaaagaagaaaaataaaagttacgtagataccagaaattaaaataatatttatttataagtttaagactccaagtgaagattaaagttctaaaaggaactaaagttatagcttcgggagtattatatgcattttcccaccttaagtaaagaaaacaaaacattgtgggagtaatatgactgaaactaaaatgtatttacttagaaaagaccagaagaaaatgtcagagcatacagtagttgcattagggcagcactatcatcatgggcaccttaggctcagaatttgtcatgttttaactgtttctctgtctttgctcccatgtcatcttcagttgttgggtccaacttgcacatcttttccatatacctttattgttcttcctgtctttatcctagttcacttcatacctagattattatagtagcctgtgaagctggtctcttttcggcttaagtatttccagccgtggagagtatacctcaatgaaaatattgctgtagcaatttgtacctctttactctataatttattttttatcttacctttttttagtggtggagtaagaaggtaaaggtaaagggagatataggagctgatactattgtgtttcagtactggtgatctattgctaaataattatataagcttgcatactgacccaactcttctagaagggagagtgttaacaaaactaggagagagattgtagccaaggtttaaaatggatatatttatgggagaagcctgcttagtgaattgtgttttagggtaggaattctgaatgagtaagcatgtctgctctttttctaatatctgttaagtttggggctattttattccatgtcttttatcttcccttttagaaatccctcagttgaattaagaggaaaaaagatcatttaaaaaaatatctagactagcattgtatgaatgaagactgcagaaatctgtagaaacccgctagaaattggtcagttagtaaggtgtatccccttgatagcaatttctcatatggaggatgtagtagggaggtcatagcatctggagagctttttcctaagtgacagtcatcacattctgagatggcatcccacttatcacctttctccctttgagaatcagttttaatgagtcattattactaagggaatgtgttttatttctcatgtgcaggggcagaaaattaatttggaacagttaccttaaagaaagtgagttggcagtaacagtgattatttccttcactcccatgcccaaatctttcatactctttaaggctgaaaactgccacttcctgtaggaaatattccctgctttccttctggcctttcctatttaatttgtccctcttctgatcttacttgaatcttttttatgacccttgttattttctacattgtactataaattatgtgtgtgcttattaaaaaatctatattctatactagaaactcttcctagagcagagtacatgtctaacgcctcttgtattctcacagtacttaatagaacatcttgcacataatatagaggctcagcaaatatttcctgatcatattattaattgtgaagtttgctaggcaaaagttaatgaacttcaaatgtcattgctcttctacccctttaaaatgtcttttaccacagagaaaaattagcaaaaattataaagctgatatccaataactgaaattaggaaagcaatgtattgaagaaggagctagtgtaaatctagaagtgagtagagatgtagataagcagtgaattttataaaaccttgtgggtaatgcaaagagtttgacctttttccgtacttgaagagagccatttgaagacttttaagaggggagtcatttgatcaaattcgtgttttaaataaattagtgtgatacaatgaggaagctaactgtacagatagtaacaccagaagatgggaacccaattaggttattgcaagaatctaggaaagaataaatcctaaaatcttagagcagaggcagtatagtaggataaaagagaatagatttaagaaatacagataaaattgataggcttggtgccttatttgatgtgaagtaaggcagatggaagcatcttgatgaggctttagagattgaagt

SEQ ID NO: 548 - DNA, 4852 bp, Homo Sapiens
tttctttctttctatcactgtagattcatttgtatttcatagaattttatgtaaatgtctagcttttcactctgcaaagtcaatcagagttatctgtgttgttgcatgtctcaataatttattctttgttttgcagagtagtattcccttgtaggaacattccacagtatgagacaaggccctgcagagaaactctacatagaaagggtctccatggggctgggcactgtggctcacacctgtaatcccagcactttgggaggctgaggtgggcggatcacaaggtcaggagatggagaccatcctggccaacatggtgaaaccccatctctaataaaaacacaaaaattagctgggtgtggtggcacatgcctggaatcccagctacttgggaggctgaggcacgagagtcgcttgaacccaggaggtggaggttgcagtgagctgagattgcgccactgcatgccagcctgggtgacagagtgagactccacttaaaaaaaattaaaaaaaaaaaaataataataataaaaaaagaaagagtctccatggaacacttgatccctaattggcagaagaggtcaaggaaaaacactaatgtgaaacaagggcaaaaggtgcaagaaaattaaaaggcagttaataacttcaggaaaaattaaaaagctctaatataaacgaaatgtggctgggtgtggcggctcatgcctatataatcccagcactttgagaagctgaagtgggcagatcgcttgaggctaggagtttgagaccagccttggtaacgtagcaaaaccccatctgtacgaaaaatataaaaattagctgggcatggtggcctgtgcttgtagtcccagctattgaggggagagcagctaaggtgggaggattgcttgagcctgggaggtcaggctgcagtgagctgtgattgtgccactgcactccagcctgggcaacagagcgagaccctgtctcaaaaaaaaaaaaaaagaaatgtaattatagtgaacactagctcggcagtgaaaaatactgcaaagtcacatcatcaatgtgctttcaaaatcaaactgtaggcctaaatatagctatagaagaatgtaaacaaggaagcaaatgtaatcagaagctgagcagtaggagagaggaggtggggtgaaaagggaaggatgaggaaggtgggggtgtgcaaggctcttgcttacctgggtacccgacaggtgagatggctgtagcagacactggcagttccctgcccacacacctggccctgaccacggctgcacaaggcagctctgtgtgcaattgccagcatctgctttggtgttgctcttggtgctggagcttacttgctgcccatgtgacaggagcagctctaaaccagtggtcgtgagctctgtttcgcactggctcccatttctacactgggtctggtgcaggtgcctatggtggcagctggtgtgatgatttgccctttactgatggccttctcctcatcttactttcccatcctgtccttgaatcatccatttcaggatctgcctctgaaagaacccaaactaaggcagtcaatccaccacagacagacaaggaaatagaagcagagcgttttatttagagattatggaggaaaatacgaaaagaagcaactaacagaactgcaggtcattacctctagggaccaagactagaggtgggaaggggcggaagaggagaccatgcttttaaatatatgcatggcatgtgctactttaatataattaaaaacaatcacttaaagcaaattggaacagtgtaacaaatgaaatcaaatgaaatcaaaaggagagagcacaaatatatctgagtaacttggtctgtcccccagcccccttaatgttgttacctgaatatgtcaattgttgtcaaaagacaagcataaactgaaatcgattattgtatggatctgaaccgatggaaaatattctctgtacagcaattttaaaagtataatggtaatcactgtgttagggattaagtatacttcccaccctgtgtttttgccattgtataggaaaaatcatgcagaatacattgataatcactgtagaaatgagatgagatttattaactaaaacacttagcacttcacctggcactactttatgaagaagcactttgtatagggcactatgtgtagtttatatatataaagaaacatttgtgtattgggtttgaatgttacttgttgttgttgaatattcttctgctagtccaccctgtccctgatggaagctatgcccccggatcagaaacgcttgatgctcaagcggtcctgggaaaccactattgcaagtaactgtcagtgccctctactttccactagatggcagacttcccccagctctgtggacggcagatacccaggagaggaggacagagcttcagatctttgctttctccctttcccttgacctggaaaatcactgggctgcctctgaggccagatttagatttcctgcacaagccatcattaccttgtttagaggagtgaaattagggtcgacctgtcctgtcattccaggacagaaggtgacaaataaggtcctttatgtgtagcactgaggagaagggcttgttcttaatttttaagatattttccaaaaatagaaaaattctgttttacaagtcaaataagaaatgattgaaaaacaagtatcactgttcatatacagagtcgtaggtaaatgttcagatacaaaaattgtgaccatagagcatatttttggatatttgttttcatagtgtgatgaatatttttgtttgcttaaaattatttcagaagtataatcataattcaagcttgaaatacaagagtggtaaaatgagagcaaaaataaacaagtaataaaacgcaccacaaaatttctgactccattcccttttagggatttctttttttacaagagttatttttattgatttgtgtgacacactggctgacacgttttaaaataaataaactttgggtttcagatgaacacagtttgcatgctgtctctctggaacaatacacatcagaggaagaagttaataggaaaatcaggcaacccaaactgtgttttttaggttaatcaggaatttccttcaattctagtaaacaggtggaaatagaaattttgagctgagaaaagtaggaatcaggacgtggaagggaaaagctgggttctgctgcggtgatgtgggtgacccttcatgatgagccagctgtctattctcccagctctctcccggcggtaggaactgagaagaggcgcccctcgctgcaggccctttgatgcctctcctctcccctgtcctttcacccccgactctgtgagttgcttttagatatcgttctttacttaccaattgtctctttctcccctgcttgttaacgtatcatgaaaaaactgtgacgtgatgaccccccatgaatgcctctggaggaaaagtgctagaaaatttaaaaagaaaattaaggtgataaaactggcctcattaatctgttaaactccttcaacattgccaaaaacagaggtgagcttctcagctcagtttccccaaaattcacagaaaaaattactgtgcttgaaaagaaaacacagcgggccaggcgcagtggctcatgcctatgactctagcactttagaaggccacggtcagagaactgcttgaacctaggagtttgagaccagcctgggaacatagtaagacctcatctctacaaaaaaaggagcaaaaattaaccaggtgtggtggtgcatgcctgtagtcccaagctacaggctgggaggcagaggcaggaggatcacttgagcccaggaggtagaggttacagtgagctgagagggcatcactgcactgcagcctgggcaacagagtgagaccccatcccctccccacaaaaagaaaagaaaaacacagaggatgtaaaatggagctgagatagtgatattctgcccaatattttaggcagtgctgggattttctcactaaatgatcaatattgaaaactaaaatattttattaaaatgagaaaaaattatcaaagtgaagattaaaattataaggctcattcaaagagacgagggtgtacttatataatctcccagttttaactgcaagatgtttcatgacttatgatggggtcatgtcacatcctgataaacccatagtaagtcgaaaatagcataagccaaaaacgcatttaataccccaataaaccaatcatgaagctgaaaatcgtaaatcaaaccgtcactaagttggggactgtctgtattgtttactttaatattttggaaagttttttagtgtgtgataccaaaatctacttgacatttaagcactgattaacgctaatgattttcactgggtcttttttaagccctagcacagctgtttgaaaacttggctgaacattagaaccacctgggcgggagctggggttagcttttaaaactctcaggtcatatcccagaccaattaaagcagaatctctggggtgggacacaggcaccagtatttttaaaattcccccaggtgattccaactgctgccaaggttgagaaccactgcagtctggcttcattctgaccactgtctacacatgatgttagtaatggttgggattgaaggactataaatacaaggacagtgtttcccagtgccctcccaagtggaggaggccaggagggagagatgacgggatttgctgaccaattaggtagaggtttaagagaagctgttaggccgaggcggacagatcacttgaggtcaggagtccaaggccagcctggccaatatggtgacacccccatctctactaaaa

SEQ ID NO: 549 - DNA, 2252 bp, Homo Sapiens
cattcgcctctaagctgatagctcttacggatctgctcctcagggaccccacccatctcctagttaaccaataagagcaccccacccccaccatcccagcaacaatgattggttcaggaatgagggcgtggccaaagctaagccaaccaaagccagtgatactggattctgggactaatttttaaatttcttaagaaaaactcttcgtactggattgctgagagaatgggatgtaaggtctgaactcatgtctgccttcatgctaccagcaaagagaaccttgaaaccaagtgccctgtatccagtaggtgcttaatagtagtttatcgagtgaaggaaataatggggaaaacatctgccaatgcaagtagtgccagtgcaatgattcaaagtggtactaagtgccccctggagagggctgcatacacatgcaattccaagtctaagaatgtatctcacagatacatttgcacatggacccatatcagtgttacggtgaaaggttggacaggttatgcactgcccaacattagtgtgcaccattcacatcaggcgggacagagtgggagaagataactttgctgtaaacctttgtgccctgtgtgattttttttttaccatgatcatatatagtttcttcagaagaaaaatttttatatcaaagccgaaactgtgcatttacatttctttatacattgcttggcacatcagtgctcaatatgtatcagctgtatcagcagccatcattattgttattttttaagctgttttgaaaaccttacggtgttattacaccatggagacacacgagggcgcgccaggcatctatttaaaaagtgttttcatagcagttcgtggaggctgtaattttgagtgtgtacaggagatgggggaaaaagtcttgggggtcccgtgtgggtgacaagggcaagtcttagttccaacttggtccagtctgccagccttgtcaatgaaataccaggactcccttcctgagtgctccatagtggaatcagggtgagcgtccactctttgcaagtccttagaggagagagctggctgagccggaggactggcccggggagcccctgctgcacccggacctgtgttctcatctgtgcagcagaaacaatcaaacccacctgcagggctatcgtgagattaagcagggtctctcagagatcaaaagaagcccgaactactttctagagtgaagaactggaaagaagagagagagagaaggaaaagaaagcctcaaacaatcaccaagattgaagtcactctcacaaggttaaattttacaactcacccctctgcctcatatacacggcaacctaacagtgccaggcagagatggtgggatttattttaaaacagtaacttatatggtctgatagaaggacccaagcttggccgggcgcggtggctcacgcctgtattcccagcactttgggaggctgaggcgggtggatcacgaggtcaggagtttgagaccagcctggccaacatggtgaaaccccgtctctactaaaaatacacaaattagccgggcgtggcggcgcgcgcctgtaatcccagctactcaggaggctgaggcaggagaattgcttgaaccctggaggcggaagctgcagtgagcggagatagcaccactgcactccagcctgggtgacagagcgagactccgtgtcaaaaaaaaaaaaaaaaagaaaagaaaaagaaggacccaagcttaataatttctttctgaccccttctgctatcagttctggcggtgcttctccgtgatttgggtataagcttattcgataaggttatacatatactcataagataatacacaaaagcatatgcagagggctgcggcagacagattgctggtctactggaaagccagctccccttcttggctaagagagtgcccaatgtgttccatgcacggcggatgacaatgtgcccaatggagagatgcttcagccccagccccagggcatccattgcgattgggctaagtcattcctttccgccagcaattgctttataggcaggcagatgccctggttctggccacagagacacaagtggatgtctcctgggagcttctgaaacagagtttttgtgtgtgtgtgataagatagagacacttgagaaacttctctcctgttggtcttatctttggatgttgtcagaacgtttggagctgcagcagccatcttgtgaccacaagggaaagaccaagggaattgtagaga

SEQ ID NO: 550 - DNA, 11880 bp, Homo Sapiens
gtcctggcgaggaaggaaggagggcgcgggacgccggagggagctgcgcggggccgaggctcccacgcttgcaatcccaagggacccagggccaagggcgcagtaagggtgtgggctgggaggagggaggggtcgggacgagacgtgcctgaggggagggaagacacggactccggtttattaataaacatctacggtttgtacggcattttaagatgtgcagtgtgcttttgtaggtacatcgccttatttaacacaaaacctctctgaggtagctattacatttcacagaagggtaaacgaggcgtaggtggtttgagtgatttgcttgagatcgttcggctaataaagcaaaattgggacacaaggcttttgtcatttttaaaaaacataatattgaaggcctggtatgttccgaaccctgtgctgaggctaggaatacaaaaaaggaccaggccggtgtggcctctgggctagaggagcaggggtactccggaggctagaggggagagaggggacgatagtgactacaaattaagtaaatgtgatcatgaccgacatatgttgggccctttgaattgcgttatcaacacagttctaagtgcttacatcctttatctcttttaatcttttcaataaccttacaagtacaatttacaggtgaagaaaccgagacatgaagggcttaaataaatatgcctaaggacatatttatgagtctagaatccatgctcattacactattctgtattgttcaaatataatgtaataaaacggccttatagtctgctgccacaggatggagacatcttagggaatctttggactgacagctaaaagataagagcgaactagtttggggtagtaggatatttaaaacaacattacgtgcagatctgcttgtgcaaaaacggaactggaaagaaggcctaagtctggctaaagttcagaaagtaaagtggagagtactgtgagatgaggttgtaagtagatggaggcaagtggtttttgttgttgtttttgtttgtttgttctaaataatgatagggtttagctatgttgcccaggtctgcgttgaactcctgggctcaagcgattctcctgctgcagccggctgagtaatgggaactacaggcgtgcatcatgggacctagctacaggttttttatgcagcctttgtaggcaagattaaggatgaggctttgtctttaaaaagccatcgaaggatttgagagaggaaaatgataaggccatatatgttatgtatatccactgccatggtcatacaactttgaagttccagatgttatgtgttctgccatgctgtcctttaggtgtcttctggtccttcacaatagccatgtttaatcctgagatttgagttggagtgtttcgtttgcatctttttttctttccgtcaattccacctgagaaattgtaaaactgcgaatcttttcttaaaaatcattttaacatttgctgattgctcacagttcaatgaatatgtattgaacatttgcttggtactagattctggagctataaagaagaaaagagcaattccctgtacctgagatgcttatatattttcctggggaaatagacatgcaaacagatatttaaaatgcagcatgggctgggtgcagtggctcacacctgtaatcctagcactttgggagctggaagcaggcagatcacttgaggtcagtagttcgacaccagcctggccaacatggcaaaagcccatctctactaaagatacaaaaaaaaaaattagccagacatcatggtgcatgcttgtagtcccagctattcaggagactgaggcacgagagtcgcttgaacctgagaggtagaggttgcagtgagcagagatcacgccactgcactccagcctaggtgacacagcaagactccatctcaaataataataataaaataataaaatgcagtgtgataaatgcttgatagagaaaggggctaaaccagaaagttgttgggagcaggagaaaacagcattcacggaagaggaacatgtaaaggcaagagatctgtgaaaagtcgtgttgttatctgagtaatggaaaacatttccctgtggctggagctctgggtgagcaggtgaagcaaaatgagatgaggttggagggacaggttggggccaaaacgaagggccttctatggtatgctgaggtttagggctttttcttatagacaacaggagataatggaggtcttttcacaaacatttggcattaaaaaaaaaaaattctggtggcagcatgaaggacagactaagattgggagaaagtaggaaccaggataccatttaagccactaatggtacgctaaggtagtgtcacatactggaaaggctttgaaaggaaggaaaaagtaggagtgaacctaagaaataccagaattcaaaagacagccagaagaaggggagcctgctttaaaggctatgccatcttcgaatcaaaagggcaaggaagtattgagaggttagaaagtagttcaaaagtagctaaaaagggatcataaagccctgaaaataggcttttggtgaccagtgtgaagagttgttttagtggctcagcaaggagaaaattccctttattttgagtcttacactcaagtttatgtcctattttaaatggtttgttacagtattaactaatacggggtacttttgagtatgctaaataagaagtaaattagatttgatgctggaatgatttaattatgtttacttaagctttatgttaaatagcttagaggatagaacattagtaatgatagctaacatttgttacatgtcaggccagggtttagttttttgcatatattgtttcaattaatcctgtgaggtagatactatcattatgcacatttcacagaaaatgctgaggcattgtatgagaacaagcaccctattttgttttactttttgtagtcgtctttgactttactcttaagtcagtctggtgacatagctaggtaaactgaggacaaattcagcttcattcacatctggcaagaaccctcctccctcctcctagctctttccccatttgttacctcatctgtctcctgtttgggtactattcttgtacttcatcttgtcagctgaatttgggtcttctgacctaaattttagtgctccctaacgatctaaaattacacttaactttgctcttttctgttatttgcctaagcttggccctgggcacccaaaccctattacccagcctgcttggttagccccctcttaaaagctgctttgtctccacagcacagtgccttgcatactttaggcaggtactcagcaggattttgaaatctagtatgtagtgagtgtctctttagaacttaagaagctggaagaggcatagagaagagaggtctgaaaatgtctcagagctaaggaagatacgatgttgagataagggaatgaccagtgatgtcagataatgattatgggaagatcgatggggtttggcaaatgggatgtcatttgcataatcttctggtgagcagtttaactataaaccagattgttaggaatgaagaatttataagaagaaaatggaggcagccaaattttatagatcattcttttcagaaagttgtccatttcaaaaaatagaatcaggattttggtttgaatgaaagttgggttttgtttttgtttcatgtgcatgattggacagaccaaagtttgttaggcagatgttagaaagagttggtgaaggggcaagagtgaagacagcagggaagagaagcagcaagaaggaatgattgagataatgatctctcagatgcccagaacagttgtgagagggaatcaaggacaaagatgcagctgttagaaaaaggaggcaggcccaggcgcagagactcactcctgtaatcctagcactttgggaggctgaggcaggtggatcacctgaggtcaggagttcaagaccagcctggccaacatggtgaaaccctgtgtctactaaaaatataaaattagctgggcatggtggtgcacgcctgtaatcccagctactcgggaggctgaggcaggagaatcacttgaacccaggaggtggaggttgcagtgagccgagatggtgccactgcactccagcctgggcgacagagcgagaccctgtctcaaaaaaaaaaaaaaaaaaaaaaaaaattatgcttccctacaaggctaggggtggaggagtagttcatataagggtagtggtattatacaaatcttaaacaataagaaaattactaggttttcgagggcctgaaaagaatctataagttataaaaaatatatccagatcttctttaaatgatttaaattcttacagtgttgggaagggttcaatatgcataatttaggataagtcatatttacaaatcttctctgcaagccccttcctatgtgttaagagatggagaaatatcaagttcatttgaccctttaaccctaagagatgagtgtttcatattttgaaatattttactagctataatttcagatgcagctgcttttaaaagagtgtctgctgattatgaaaagctgggttttgagaataagtactagagtagactatttggaatccaggagttttattttactactttacatctgcattgcatcagacatggcgcaagttagcattccatttttcatgcttttgtagccctattttaggtctgtctgtgctcagaattggtttatattttcaccataatctattcatttgcctgcacagcatacagctgatagattatatgcaatgagttttaaattctacacctatttcttttactatagccttctcccatcatttgccagcccacatgtgggagcatggagtaattttaatattagccaaataaaaatttaattcagaaagcatatctgccaaaagtatcatgtgcagagcctcacaaagcctaatatatacatgtatacatgatggtttcaattccattatatttttggatagtgtcagtattcccctccactggcatgaataattagtgggaatatctgtattttgaaaattcaaaaatttattccctgaagatacagacttgaggaaagaaatttagcctactcaaaacacaccagaatgttaccttgaaagcagtttacattaatcttattcagaattagaaagtcgatgcagaatcagagagctgaaaaagatggcctgcgacattctgattgtatggttggtatttgacttttttgttttttcttccagaagcaatgcatgttcactatagaaaatcagacaatgccaaaaggcaacaagaagaaaatagagaacacttaaacgcattacccagagataaccaacgtaaatgtattggtggatatccttagacgttcttctatgtgacagaatatatctatttatctttaagaaaataatagattgattccattttctaagtgagctcggaaattttcttttggcttttttatgaccatgttattatttaataaaacctgtcattgtggagacttagaaaacatccttcctttacttcttcgggaatgagaaattacacgtaggcaatttattcaacatttttcattatgtcagcatgattagatgccaaatggctgtttggaatttttgaaggtatgttttttggacactttgccagggaaatcataactcttaaaattctccagtaaccctaaccatacaattggagttatggatagatactatgttccatgttttgttgttttctcactgtttcagtatctgggattaatgccaaaaactattcagcctcactcatttattaaatgagggtgtccaactaagtttatacaatagagtttagaaaaaaaagaagaccttgtttgtttatcattctagttaggtgtttttacatgagcaagaaagaaaagtattgtttcttaaattccttgatgaacttgcctggttgagaagtagagtatcatggataacagaattaattacctgacacccgagccacaagcagacatccttgcttattccaaaccgtcctccacaccgctgccaaagttgttttctcaaattcaaattgattactttccttcttaaagccctgagtagctcctctttacccgccctacagatttaatttatgactctttagaatgtgaaacaggctttctgtaatctgtcaaccccactcttaaattctttactccagtcatattaaagtacttggaattctctgttaatgttgatttcatacccctatacattttttcctgttctcccctctttttggaatgtgctatcaaaccatgtcaggtcaagcatcgcttcctctacaaaacctttccttaccatctccgctgccctactttccctgcttggggaaaatagactctttatgcctcattgtttatgcatacatatgagtaattgtatctcaccagcagtaacacactgttgtacctcttgttttcacatgtgcttctccttattagactataaactccattcaccatctttctggagctgtcatctttcattaggaacatcgtaatagcctttcagctagtagcctgcccccctccactgttacctgcttttgaagtgattctccccatctccagagtaagtgggctcatcaaactatgcttctctgtgtgaaaggtgtggtggtgggaactgggtgaaattagctccaggacaccattagcacttggtctaatttatttactacagtaggtatccatgtgctgagaggttctcaagaaggatggggagtggggaagagtaggagtaagtggagaaagtaggggctgagaaactaggtgaagaatcagaatcaggtgtagacagccatacgagtcacagatctgaaaaggtcgagttagccagagttcaaccagggctgccagaacttgtgtggttagggtgtgccaggcagtgccgttaggagcttccatgtattcaagggttggagtggtcatgaaatgagaaaacgctgtgcagtgacaaaaagtagttgcaaaattctgagtttggagccgagaggaacatacactgtgggagatacaacgagcagcctaagtcagagtcttgtcaaaatccatttcatgaaaagctgaactttcaaaatagtgtagttatatttggtgcattgcaatgccacataatttcctccttgaccactatattaaagggttgctttcaaacgtcttccccaaatggtaaacatgattccaagtggtttaagttcacatttctgtcaacagaaatttaacttttgtggttctgatgggtgagaagtgataactcaggattactttagtttggatctttctgattactgttcagatcatgcattttttcatgtttactgtttagatttgcttttctgaaaatgcctattcacacattctttactcgtttttctgtggagttttttttttctttttcctgtaaatttttggtcactcatttcatactataggtattaacctttttctgatacatcccagatatttcttgaagtctactgtataataagattattcttttctttatggtatctttgacaatacacatgtttaaaaaattatcttttcctttgcaactccctggtttgctatttcagttgagaatgttttcctaacctgtagtgtataaattcattctcttaaattttattctaacatattaatttttttacatttttgtttttaatccatatggatttaactttggatatggattaaatagaggtctagttttttttcctctagatggctatattaaaatcccatgtatactaagatacattttggcactccccattttaaagatttatttttctgagtaatactagccaacacatatcagtgcatatactatagatgtcaaatcctgtcctgggtgctttacatactttacttcatttaatcctggcagcatcattgtgggtaaattctgttccacatgaactttaaaatgcctttatcaaattaaaaagaaaccattggaattatgattagaattacatgaaatttatatatggattttttggagaattgacatgctttatgtctttcaataatattttattttcttcatatgtcttaaacctgtcttgtcaaatttagccttaagcattctgtacttttatcactattacagaaagaatatagtcatacgtctcttaacaatagggatatgttccgagaaatgcagcattaggcgattttgtcgttgtgaaaaatgtcatcgtgtcgttacacaaacctaggtgggatagcctactaacacctaggctgtatggtctagcctattgcttctaggttacaaacctgcatggtatgttactgtatggaatcctgtaggccactgtaatacagtggtgtttgcttatttaaatatatctaaacatggagaaggaacagtaaaaataaagtgtttcattataatcttaagggaccaccatcatatgtgcagtccgttgttgactgaaacatcatcatgtggcatatgactgtgtttttccattctcacttctttttggttactgctgtaaccattcctacagatgcagtaaggatggtatgtgtattagtcaggtttgtctaaattacactgcaataacaagcaacctgaaaatatcagtggcttataacaacaaaaaatttcctgctcatactgcatgcccatcccaagctggctgcagctctgcttcacatcacccttactctggggcccaggctaatgaaaccattgctgtcgggcacattgcagtcttgtagtagagaggagtcaaagtatagcatctactggttctgaaagctcctgccaggaagtgtcacacatcacttcccccacactttataagccaaagcaagaagtgcccatatccgacattgaagcatccgggatgcctatgttctccacaaggaagggcccttcaagtcacaatgccaagcctgacacctaagaaataaccagtgagataggatcagtactctttcaacttgaagggcagcaaatattttgatcactaataccatgtatcgcaatatttttttgttaagttggcgagattgagaaatcctagaaaatgacacctatgcaatagatgtttatctccattcaaccataattggtttttctcttactttcaagtatgcaagaaggtgacgctttttcttgtctcttaaatatagccagccaggtgcagtgggtcatgcctgtaatcccagtactttgggaggtcaaggcaggtggatcacctgaagtcaggagtttgagaccagcctggccaacatggcaaaaccctgtctctactaaaaaatacaaaacaaaattagcctggcatggtggcagatgcctgtaatcccagctactagggaggttgaggcatgagaatcgcttgaacccgggaggcggaagttgcattgaaccgagatctcaccactgcactccagcctagaggatacaccgagactctatctccaaaaaaaaaaaaaaaaaaaaaaaattagatatagccatgtgactaatcctggccaatgaaaatgtgagtagaagtgatgtgtgtgtttcattcctgcacagaagcattgagaagttgaagcatgattctccatatcttccctgtcatagtgataatagaagtatatgctgatgtagaagtaccgaaagggtaaagtagctagaatgtcatcatatagaagacagtggctctggatgtcatccagataaagagtctgtggttttaagtcactgagacttaagggtttttttggttttacttctttattactgtaatataacctagcctagctttaatcaggataggctaggttatgctgtagtaataatacatatttaaaatattttaacataaaacatatgtgtgtgtgtatatatatatattcatttatccataatgtgatgtaggacaaggtccttctcttaagtatgggtctactgatttggagtaccatgatatctttcttgcataaactacatcaataatgcatcatatacagttttcagtttggatttctctaatgtggttcaataacttaataagacttgtagaaaaatgcaaatacaaaatcttaaaattttctccttatgctttacaattgttatgcccaaaccaacagcatttttttgcaacctgtctttattgaacctttctaaagcagacaacagcttccatgaaaacaaaaattcattcttatcacattattatgtgttggcttcagtagtatttgttcaagttacttggtttataataacagtacaactgtcataaaaatgtttaggagcaagcacaactagaaattggtaaacaaacaactcatctggtaaaagtggagtacatggttatgtaagcgagtagctcacaagttgagtgcattttttctgccataagcaatagtctgtaggtttcacagatgacattgagagcttgtgtaaaccccaagagttatttagatagaagcaaacgaagagaacatatggagaacaatgtacacacgtatgtatattcacatatttatgtatctttgtgtatttatcttgtgtccagccatgttaattaaacagatatgttctttttaaaagcatatcttagagcttctaagtatgttggcatattatcagcaaaaagataatttaatctcttctttcccaaatttatattattttctttccttatcttactgtacctgctaaaacctccaaaataatgttgaataaataatggtgatagtgaatgtcccagtttttttcctgatttcagtgtaagtatatttagtgtttcactctttgggacgatatatgttattagttttttggtaaggtctttaatattttaggtggtaactttctgtggcagagactggctagatgctcacccatacattttccttttctcctgagaacagagatcaactacattttccagtcttgcttatggttatgtagacccaacctaactgaattttgatcagaagaatgtgggtggaaaaaagagattatgtttccagtactaaccctgagcctcccacactctccacactgccttcctttctctaccagtcagatgcagaggacttgggacatctttctagaagatggaagaactactgatggaaagagcccaggtctttgaatgactgtgggtaggagagctccattgttgtcccacactggattatgacatgaggaaaaataacttactgtgtcaagccaataaagtttggggctctttgtaggacaagttagcttctgctgactaaaacatctagtcagatgttacagagagtttttaattgggatgactgctcaactttttcaaatgccttttaatcatctatttatataatcactatttttcccccgctaatttgctggcatgatgaattatgttgacaggtttcttaatattgaaatcatacctgtattcctagactaaccccacttgtttatatttttttattttgaaatattgtttcttaaaattgtatccagaatttttgcagttatagtcttaagtgaggtcattctatattttcctttgttatactatttttaatcagatattcagattaatattttgctgactttatacaattaaatgtggagctttctgtctttttctatggtctagaatgatttgattttaaaaacattgaaccaggtgtagtggcttagtctgtaatcccagctatttgggaagctgaggcagaaggatcaattgagtccaaaagttaaagaccagactgggcaacacagcacaaccccatctctaaaaaatatttttgttggatttatttctagatattttacattttgtgttattgtatccccttaaaat

SEQ ID NO: 551 - DNA, 565 bp, Homo Sapiens
aactcggtggtggccactgcgcagaccagacttcgctcgtactcgcgcgcctcgctccgcttttcctccgcaaccatgtctgacaaacccgatatggctgagatcgagaaattcgataagccgaaactgaagaagacagagacgcaagagaaaaatccactgccttccaaagaaacgattgaacaggagaagcaagcaggcgaatcgtaatgaggcgtgcgccgccaatatgcactgtacattccacaagcattgccttcttattttacttcttttagctgtttaactttgtaagatgcaaagaactactgacaacgaaggccgcgcctgcctttcccatctgtctgtctggctggcagggaaggaaagaacttgcatgttggtgaaggaagaagtggggtggaagaagtggggtgggacaacagtgaaatctagagtaaaaccaagctggcccaaggtgtcctgcaggctgtaatgcagtttaatcagagtgccattttttttttgttcaaatgattttaattattggaatgcacaatttttttaatatgcaaataaaaagttt

SEQ ID NO: 552 - DNA, 2264 bp, Homo Sapiens
atttgcctatttttgctcttacctaatttttaggaggaatgatagacaaacattaagcattggtttctctctagatcccgtcagtttcctcaaacacagtagtctcctctgttagaccctggtgtgctgctgggaattactgggactcactggccagctgctgtctcttctctgcggacctctttgcttttagggagcaggaaactaattcctctaagtgttatacacttggagaccctttagcatgaacaacggtgaagaaacagaagctctcgttgctttcctgcatcagacaaaaggctgtggccacttaaataccacatttttacttcctttttagttcagttgagggagcaggtgcaaccctgcagcaagataaagctgacctttccagaaattatggagtggagcacaaatataatcatgtccttgcctagcacgtagctatctctcaaccttcctttaattggggcttctttatccaacaatcttaacactccatgaaagagtctctgaatagccatatatcaaagcttataattttgcatatagaattgtatatagaaaagtacctagcacaaaagttttaaactcttattttacacaacttgcttattaggctctatgtccaaggcaaatcagaagtagaattaaagaggagtggtaagaaaggcaggcttgctgagcctggatggcatatgagtgtgagtgggtgtgtgattgagtgtgtgtgtgtgtgagagagtgtgtgtgtgggtgagtgcgtatgcgactgtgtgtgtgtatgcgagtgtgtgtgtatgcgagtgtgtgtgagtgtgtgagtgtgtgtgtgtgagtgtgtatgcgtgtgtgtgtctgtgagcgctcatgcgtgcacatcttcagtcatgtgcccactcctgtaccaaacatttatggtcctatgtgggagatagcctgcctctggggaaagaagccaagtctttcttcatagtcattatgctctatgcatgtgactctgccattcctatgactactactgagccagggggtctgtgcctgggccaaagggcagccatgtccatgagaaaggcccatgcagaggctctacaagagactgcccaatagcagggcaccatattagatggtatcaaatggatccagtttcctcctctctctcagtgagaataaatgtgagatacacagagcagttatcatggcactattaactcccatcaagcttggtcctggcttcagaaacctcaacacagtgctttgggtggctactacctgaaaatgcaacttatttgcaacctctgatctagaaggaatataaactcagaaaaagatagtctagaagtacacactcatcctcagagtttgtcaatatctgccacaactagagaaaataacccatgagatatttggttcattgacactactaatggtttcagtcttgagacacttatcaagatattaaagttaaagggaccaaagtcatcttgttctatgccctcattttatagatcaggaaactgcatcagacttatgtacattatcaaagcttagaacgtaggcttcctggtcttcctgctccgatgttcgtccatgctgaccctcttctgctctacttatcatatgctaggctcaacgaatctttatcatcttgattatatcatctgtgttcctacatatagacgtatggagtactgtatgaaatgttactacatgaaaatgattcactagtaaactaggacctttatcaatatgtagataaatggtacgaggctgatatgggagcatccatcactgactaccaggttgctactcccagctcctgtcttcacatctgcataccaaccagtaagaagaggagaaggagcaaggagagcacataactttccttttaaggacacaactaggcaagatgccatgttgtgagctgctctgtggagggggacctgtggcgaggaactgagggcagccagcaggcaacagccagctgccatgttgtgagtagccctatggaggggcccacatggcaaggaactgacatctttggtcaacagtcagtgaggacttaaggctgccaatagccacatgagggagcttggaagcagatcttcccccagtggagccttgagatgactgcagtctggctgacaccttgattgttgccttctgggagaccttgaggtgggggacccagctaagctgcccagcttcctgaccggcagaaactgggagacaataaatgttggtgttttaagccactacatttt

SEQ ID NO: 553 - DNA, 2787 bp, Homo Sapiens
ctttttgaggcagctaccagaagggagcaccaagcagatgcagctccccttccctcccattccaccatccactgtccccagcaagaacctgcgggagggtggcccaatggggagaaaactaaggattcggtgttgggaccactcctgccctgacctgccctgtgactccgtcatactctccaaaggccagaccctcctagaccagctggaaccaccatcaagatgtccccagccatgtcagactctggggccccaggcggagggcaaccagatgtcttcagctccaagtctggcctctcctcccagcaagcagccacctctgatggccaacaggtgctgctgtgtgcccagatcaagaatccacctctgcggaattcaaaaccgctgagggttctgggacagcagggaggagagaggtggagacgcaacatgggttttctgtgttcagactgcagagaccttggaaaggatcaaccatatacaatgtccatttcctgccctctaacctggcaggggagcaaggcccagccaaggagttacagaaactgaggcttggccaggcgtggtggctcacacctgcaatctcagcactgggaggccaaggtgggcagatcgcttgagcccaggagtttgagaccagcccgaggaacatggcgaaaccccatctctacaaaaaatacagaaattagccaagtgtggtggcacgtgtctgtagtttcagctactcaggaggcttaggtgggaggatcacctgagcctgggaggtagaggttgcaatgagcagagattgctctccagccagggagacagagtgagaccctgtcccaaaataaataaataaataagaataaaatttaaaaaagaaactgaggctcaaagagaacaagtgactagttcaaggactcattttcactaagctgggaccagatcccagggttctaaccgcttaccagatccttttccattaccctcttgtttaaccacatcttgagtacctgctgtgggccaggagctgagatactttggagagtctttcaggaatattgtcccagctcctgaaacctttagggatccccaagttctagactctggccaaagccggctgccttcacccccaccaagggagacccccacaaaccaagggagccctgctctcaggtgcacagggcctcttctctctgggaggtgacagttttttgagggtggggccagacacctcccaggctatccctcacaggagaggatggtctggactggaggagtagaagcaagtaggcactggggaaggggaggagagcgtcctgagtcccaagggtcagagataggagcaagaaggaaactgacgtgttgcagggcgtgtggttaaggaagtgagagaggggctcagggtcgattctgcctgcttttccttcctccagcttgctcagcactcttcccagaatgtgggccccaaactgccaggtgacaaacaatgcccccaccccaagagagtcatccagcatgtttgaagctccatctggtcctgtacaccagttgcacaccaccaaacgcagacccatgaccactccacaacctcgcacacagacagggcaaatcccaccacagatccgtgcatcccaggcatgcaggcaatgcgatactgacacatgcccgccccgcccacgcctgggcctctgaaccctgctccagtctcctcagtcaagggcggcggccccctcaggcctcttccacccttttgccccattcagatgcctggttcccagcattgcttgggtagagactcccgcctgacaagccccagcaggccaagttgatgagccggccaagcaagcctgtgtctccgcagcgccctccatgtacacataacccccatcaccgggaacctgggcaccccgcactggcactatgtctggcccacgggtaggggatggttcccagggtctccccagacccagtgctcttcccctgtagggccactcttgcccagggttaggatggactgtgctccctctccctcaaactaggccagagccacggaagcctgggaagggagatgaggaagcacttgtcactccagacatcccaccaccatcagggaggtgggctgagataatgccaaatgcacaaaatcctcaaaatctgtctgggcatgatgattcatgcctataatcccagcactctgggaggccaaggcaggaggatcgcttgagcccagaagttcaagaccagcctgggcaacacagcgaaaccccgtctctacaaaaaatataaaaattagccaggtgtggtagtgcatgcctgtggtctcaactactcaggaggctgaggtggggaggatcacctgaacccagggaggtcaaggctgcagtgtgagacccggtctcaaaaaaaaaaaaaaaaaggctgggcaacttggcaagaccccatctctacaaaaaatttaaaaattaatcggggatggtggcgtgcacctctggtcccagctattcaggaggctaaggtgggaagatcacttgagcccaggaagtcaagggtgcagtgagctgtgttcgcgccactgcactccagcctgggtgacggaccaagaccctgtctcaaaaaaaaaaaaaaaaaaaaaactccccaagttctttcagtggcagcacagctcaggggctgacacacgggatctggagtcctctggaggctgagtcagagccctatctctaccactttctagatatgagactttgggtgagttacttaacctctttaagccttggttcctcatcaataaaatggtaatga

SEQ ID NO: 554 - DNA, 1813 bp, Homo Sapiens
agagcctggttttgggtaggagtgaggcggcagcttgtcgtttcccggcccgcacccgcccttgcgctgacaccgcgggccttcctttgctctgggaacgagcgtggggagccctgttcaccctcacaccccggctccagagcggcgcggagcactccatgtttgctaaatgaaaatgaagtctcggcgcgagcgccacccaaacggcggcgtagttgcttgagaaccgcggaggcaaccgcttgggagggcgccccgaccccgaagctgcttctccaggcgcccgaggcggagagaaggcactggggtctccgtctccaccagtgatttctggtgaaacaggaaacaaaacccgggaaacaaatgggacgaaatgttggcggttttgatgctggatgatgggaatatgggcgtgtgttttgtacctttctgttatcttcagttttctcaaaacacgaaaaacagactaagaacagcgcatagaaaacattggggcacaactaaagctcataaatgcacacgttttcataacctgaccgaggtccatgctgctgtagcgcatacccccaagaacagagggccgcgtgttcttatggccccggtgccggcccccaagcggggttcccgcaggagatagggcctggctcccgcttcagcaccgcgtggcctggagtgcagttctggcggccaagatctgagggctgtagcccgtgccctcaccaggatcccagacttagagtccctgccctccccgggatcccagggctcgatcctgtgccctccccgggatcccagggctggagcccatgccctccccaggatcccagggcgcgagctggtggcttctcaagcggagttttgcctgcttgttacattagtgaatgtaggaccacttgagtaaaggaccaaacctttattcttttgcttttctgccattgaaaccattcaacccatgctgattaatacctactgtttgccaggtaatatgccccttgcagaaagacgcaaacagctaaaccccaaatgggatgttgtacaggacaaatgaccgtgtcaattaataccaataattaagataatagtataattatgatgataatataattaattcgagcctggaggaaacaaaagaaagtggaactgaactattagagaataaatgagcttaaaagacgtcattgaatggaatgtgtggaacttacttggatcatgatagaataaactagcttaaacggggcatttgagagataggtgggggaaattggaatataaagctgggtattagatgaaaactgggagtatcgatacttttggtagggagcagtaacggctggtgggtaaaatgtcctaacctttagagatgcaaacggaagtatttacagcaaattgcccctatgtctggtattcgctttgtaaattctccatgaaaaaaaattcaaggacaggtgaaacacaagtggcaaatgttagtaacggttgaagctgggtgatgaatgccataggagttatgacgattttcttttgcatatgtttgtagttttctgcgataaaatttattttattttatatatatattttgagacagagtctcattctgttgcccaggctggagtgcagtggcgcgatctcagctcactgcaaactctgcctcccggttcaagcgattctcatgcctcagcctccctagtagctggtattagaggtgtgtgccaccatgcttggctaatttttcgtctttttagtagagacggggtttcaccatgttacccaggctggtctcgaactgctgagttcaagcagtccggcctcctca

SEQ ID NO: 555 - DNA, 5393 bp, Homo Sapiens
gctgttcatatgacatactttatttccaatctacaaccattaaaaacgctttataagtttacactgtacagttattctcatgtctgaaataagacacaggggcagggagagctggtggattggactgcagttgtcctagcacccgatccatcctaggaaggagccttttgaagacagaagtggaaaggagagaatagtggacaagagaggtggacagttggcccaaggatgcccttggtcccttccctcccatgggccttgccctgggggtcccccagggcccatgactgcaggaccctcaccaggaaaccaggctgagtgggaagggggttcacagtattggcgggggctggggaggggccaggatgaggaggaagggcagcttctggctctcttcccagctgctgggggttggagctgttttttggcactgtctacaaggtatccctggggttgggaggaggaggaactggggatttaggatgctttctttgtggagttaagatttctttcagtttgaagaggcgctatctggcctatggtgaggttcccaagggagaaacagtcagggtcttctgcctcctgcctccccaggactcccaccccctccctggctggcaccatccacacagccttttgtaaaaccaagacaagtgagagaggtgagcaggagcagggaaacaaacaatgtgtgctttctccaggcccttcaacttctcttcctcttccaagaggagcgactatagggttggtttttgttggtggtggttcccaatctcaggagtccagataaggctggtgttttccacctgttcttggcctagccagtcccagtccctccccaggctctactaatggctagcccagatcagcagttggcatattcttatgcgtcagaatcatttggagggctccttaaaaccccagcttgtagggccccactccacaagctctaattcagtgggtcttgggtggggctgctaatctgcacttctatcaagttcccaggtgatattcctgctgctggaatgcaatacaagaaccactggctgagaatggtgcccgcagtcacctcattctgagcagcctggtgtctcctgggcagcactaaggagctgggccacagctggcaaagcccagccttggggcaccacatcacctgggaagctgctggaaatggtcttggggtgagtcccccgtgcagagaagtaaactaaggcacagagatcagtggcagagctgagagaggagccaggataccagggcccagtagagaaaggatggggctgcaggaccctacagcatgaggggtgctctagggaccacagggccatcctggtgctcatcacaggatcacaagactgggaaggtaggagaagtgaagacatctgcccagacctgggccaggtttccagattgccagctgaggtccctcttcttgggaatggtttgagtggcttccaaataaagagtgacaaggcagccagccctgactgcctcagcccttcaaagatgtttagagaaaaccaaaggtcccttcctcagggcatggtgtccagaaagctggtgaagggcaggaagggaggggagcagggccgttgggatagacaagcagcagaggaggctccaaggagggtgaggaaggagtggcagggctggcattggagagaagccctgagcaggagacttgggcccagcatcatgtcctcagtcccctcaggacttgggtctgtatattttgcaaactgcaaatgctgttgggttgggaggggtaaggcatagagttggggtgaactgtagattctgccaggacaagcagctctgagagtggtgaggtccagaggagaatggagaggatggttggatactgaatggacaaagagatggatcaatgaccagagacagggagagaagaacctgtcaggcagcacctgctttacagtcaaggccatctgggcctgggcagggcaggggaggaaaaaggagggatccaagccccccccacccaccaccacacacacgcccattgcaaagtgctggggctgctgctggcaggctgcttacagagaagacagtgtggcttaagggtggcaccggggggttgctggggcagggtgagcccagtgagaagggctggcagggctggtgcctcctgatgcattggaggaagaggcttttttttgtgtgtgtgagaaaacacaaaataaataaacacagaaccaggacaccaccacatttgagagcaaatatcagagttgggaaaccacagacgcggacaggaaggcttccctggtaggaagcagggggacaagaagccagttactgaggttacgggaaaatccgcacgaggcagcagtgctgggaagaacatcctgggaggactgagggctgaatactatagtgagctccggacccagaagaggaaaacctggcatggaccagggccactccatttgctggcaggaaccagccaaggagaagaggaggcaggaggacaagaggctttggagggagatgataaagaaagaatggccccacgtccagaggcttctgcaggaacagtgatgagtggccttgcacagtggcatgcaggaagtagaaactggggctttactgaaaaccaaggtctggctgagacaacaaagatggcaaggacaatcctggacggtacgatggtaaggctgagtggtccgtaggtcttggggctcaggtcccacggggatttctccccgaggctgagtacgcagcctccctggctgtcgctctgggaggtggcagaaggcctctggtggcttgtggcctgatgtgaatcccctcacctggagataaccttggagggcccccctgacctcatgggtgagagcagcagcatccaagagcggaactggcccacagctccactggctgcctgctctgcccacaccagtcactggggcatggaggaggcggctggcgggactggcatgaccctggtgttcagcctgcagggaagggagatgcaggacttggggtaactggtccaggtgatcccgaatgggtgggtctgggaactggcaggtgggaggtgggagtgcaggggcgcctccagagtcctgggggcagatcagcaaagctactggcttttggtcttcctgatgggcaattctgcagacaagctgatccatcctggtgtttccactctgggtccccagtcagttacaggaaggctgatgtctatgtgtgtgtggggagcatgtgtgcaaccaaaaggggttcaccggcaccaaggcgaggccatgggaggcgctgccccacatgctgcaatgagccacatcgaaatccaaccaatggctcaggcagctcacaggggacgtgaggaagggcgggcagcagagctggggcagggagaagagccgtgaaaggccataaggctaaggagagaggctggtgaaaaggctggcaggctggtgagaaccgaggcaggctgggagacactcaggtttatgtgcaaagctgcgataaacaacattctcaaagttcagtcctgttttcctgtgagttctcatttgggaaacttggagggatctccacactcttaatagagctttagtaatccacgttcgactcatgaagaaaggtgtcagagggagggagggaaatgagacaggcaatggagaacgtctggggagtggtgatggccgtccagccctccaccttgtcagtgagtatttatagactgaccgctggggctggccaagtaccaggcattgagtaataagtagtgttctgaggccacatggccagccgtgttggggtgcagggctccagctctgttgaggggccctccaaagctgaccaggaggccaggtctccaaacctggctgccaagcggcctcgtccacccaggggaccccatgcctgcccgtgctgttagaggcctcatgttgtcccagtggcaagaatgcatgtttcaacctccaataaattaccttagggactttggggtaaattaaattattaaaataaagtaaaccaccttaaatatttatagtaggaaaaattcaaataaacaatctaggcaagatacgtgtttccaggccccagtctactgctgtgtcctgggctctggcctcttggtgttctcctgggcctgacctggccaaccaagaatctcttactgggaatatctttgccccccgaccagctgcaggatgtaaacacagtggagatgtagtgcctgctgcctctcagggtgccagggaaagaggcctctgagatcacttgagatcaaggcagtgtatttaggcatttatctatgcaccaggtcttgagactgactctacctatttctgtcctcaaggggtctgctgggaacgttggggccccaagtcactttggcaaggaaggcaattgcaatcactccccaaccctgagccctgcatgtttccacttcgcctcccagctcttgctgcatccaggctatgggcagggagatccagggctccaggacactaagcaatggccctggctactgccctatcatactccctagtgtcccagcaatctagagcagtggggctgggaggaggaggtggtggagagaaggaggtgatggtgatgatgcccaacagggctccaccaggaaccaaacatggagccctagagcaaagcctgttcttctcagcagtgtctcctcccaaatgaaggggtggatggtcagcaggaaacatctctccgactccttttccccaaaggcatggccagacatgtatccttcttgggctcttccaagagggtggcatgggcagaaccaggcaaggctctctcttaggacccagggatcggctcttgacagatctctcagtggatgcttgggaagcccaggtttggtctctctcccactcactgccttcccctgggaagtcgaagctcaccacccaggggccagcaggagacccggctttaccttgatgtgaaagctgcattctggcagtggcatcactgctgtccctccagggccaggcaatgctgaggacacagcccctcgcctcacctcgtctcgtctctgctggttcccttctgctatccaggggctgggctggttgaggcggggagcttggctgctctgtcactcgctgggggggagtgccctctcctccccaccccagctggactctgaagggtgcagcctgcacttggaaggagagtggcggatggcagagcgggacgatcgggcgaagcaggaggtgagagactgggtactacagtcacaaacagcgtcctaggaagagggaggcagggaggcaggaagtcaagaggagccaggagacatggaccaccatgagctgtgtggtatgccaggcaaggaactgagactcggccataaaccagttcccaggggctgaagctcctca

SEQ ID NO: 556 - DNA, 1309 bp, Homo Sapiens
ttatttatttatttatttatttatttatttatttatttattttctgagatctaatttagaccatggagaagaaaaacaaaaaggtggtattaataaactgctttggggagtaaaagaacctcttagaatccacgacatcatggatggaagagatccttaaggagggaatgaagcacagctcagagtgggaaggttagcaatgttcaagaccaaagttaatcatctctacatgagtcaattgaaagaaaagaattaaaagcattaaaaaaaaaacaatatgagtaatgggaggagctgatgaagcctgctgcccagatgaggattggaaactatttaaactggataatacagtatgtgttttagctctgagaaaacagaagttgaacttttgagtagtaatcaagggcacggtctcaaagtatttgcaaatagtgctggtatggagaacagatgccgacattattgccaatgggaatcacaatgtgatagttggagtgagagactaaaagaaaccacagggaatttttgcagaaagcttggcattgaacatgatttatggttgatttaagaaggagacaaggaaaataaggctacagtgtataccatctgactgctgcggaccaaggatgtaaacagttagccatggctctccaacctcctggaaatcaggattctgctcatacagaaaggcgccagaatgtttgtctgagttaagtgcatacttcttttttagtatctaagaatagttatcctcctttcctctcccattactgcttgggtatccttaaaaatcctcaccagctattaagtatcatggagttacgcaaagaggtctgcagggaacttgatggcttcccaaagtggatcagagaacctcacaggaggccctaggcttgaaaggatgattgcagaaaggatgacctacaagtggatggtcagatctggctgcaaatggatgtctgaaagaaaacggggatcctaggaaacccatcacagccctctatgagcttcagaaaccagcaaggttaattatgtcattgcctctaagtgaatgcaggtgacattgttttgataatttgatgaacatgcctcctccaggaacagtgtgatccaagatgccaggtccatttcagggcctgaatcagatgtccggaatctcaaaaagactgggaattagaactgggttctcaaggggaaggacttcttaagggaaatttttttcttggctaaagagacactcaggaggaaatgtcttttcttttgctgccattgaatgactagatcatctatctatctctctctctgtcta

SEQ ID NO: 557 - DNA, 1405 bp, Homo Sapiens
gggtactactagccttgtaaaatgatttgggattgttccttagttaaatcagtcaaccacagatactgaatacctcattagcaccacagttacgaaaatgaagaaaccccgatacggttcatttatctatcctgtcacaataaccaaatttcctcaaagttaacatcactgctgctttcactgacacctcacgtaggagtcaggaaacccgcaagcagatctctgagtccccaaggcaggcaaagtgaaggcgtgatccctggagctgatctcgtgtcactccatttccccatgactcatacttttaagtcacattggcttgtttgtgactctgctacagtaacctgcctgcgtattccctttgaaataaggaaaattatgtgcttaaaatgggcctcttctattttcacacagaagtcttttcccctgcctctcttcattccttatttcttaacttatcacaaagctcctctcgccttagaacctgcaatattaatatcctcctgtaaggaaataaactgaacccacccacaaggtgaaagtgctttgtgaaactgtcaaaattctgttcatgtcattggcccaagtgtaggtgagagaatatgaccatagagggcctggacacacagggacctgaggcagagcagggcttcggagccacgtggaggatggagaatgaagacaccaagtttccaatagagaattaccagcggtcacctgcactcatgtttacacagcaatgtgcggaaatgcagaagaaaagatctcctcaactacaaatttgacttcactaatttcccttaccaatatatagccagctacacattgttgttaaattaaaacactttaaaaagtcaaatggtcgggcgcagtgccaaggggcttcactttgggaggccgaggcaggcggaggtcaggagattgagaccatcctggctaacacggtgaaaccccgactctactaaaaatataaaatattagccgggtgtggtggcaggtgcctgtagtcccagctactcgtgaggctgaggcaggagaatggcgtgaacccgggaggcggagattgcagtgagctgagattgtgccagtgcactccagcctgggcaacagagcaagactccgtctcaaaacaaacaaacaaacaaacaaaaagtcaaatcgacttttgttagattttcttccaatctacctgttctgattctcttttattaagcagactcttagctatttgatatgttctgcatggaagacacaacctgaatatttctgtatgtttctcttcaacttctgattttgcaatattctttccttagggacttcttgaagagagctcacagggaaaattactacccccaggactccatcagattttcatgtcagttaggaactttggcagtagttttaa

SEQ ID NO: 558 - DNA, 1052 bp, Homo Sapiens
ggcgcacatggaggttcaggacaagatggaagagaatgcttatcacaaagctggtgacagagcaggggctggggaggggccgctgcacaggtccatgatgaagtctttttgatgttgaaccattggcattcagcagtgatgaagaagacggtgtctcaagaagctctggatcttgacccgccatctgccagcgtccctgccctactttcttactcagaaatggaaacataagccctatagtgagccataatatgggatcaatgccacctcttccatgtgggtggcattgaccgtccctcatattatggttccttataggactctgttctttataggacatcctgcagtgatttaaaggtggctcatgcctgtaattccagcactttgggaggccgagacgggcagatcatgaggtcaggagatcaagaccatcctggctaacacggtgaaacctcgtctctactaaaaacacaaaaaattagccgggtgtggtggcgtgcgcctgtaatcccagctactcgggaggctgaggcaggagaattgcttgaacctgggaggtttcaacccgccactgcattccaacctaggcaacagagtaagactctatctcaaaaaaaaaaaaagcatctatttcttcattatctcattatcctcatcacatgaataagtaatatccattcccacaggaggtggatggcatctttcctgagaagtgggcactagaaaatagatcagccatgcagtggactcttaggatgggatcatccccagcagggcattggaggcattggaggcattgatttcaacaaggtaaggccaagttggattgacgcataccaggaaaaggacatgatttctgtttatgttttgagcatcttctcttttgaatggttttcctgctaaaaataacacatgctcattgcagaaaatctagaaggttcagaagggtgtgaagagacaccccatccagaaataaacactgttaatatttttcctattcaattattatttgaagtcatattgaagatatgatttattttggttttctttgc

SEQ ID NO: 559 - DNA, 1415 bp, Homo Sapiens
atgaggcccaagaagtcagctttggtatttctgctcctgcaactcttctgtgatggctgtggattctgggagaaggtcctggtgtggccctgtgacatgagccattggcttaatgtcaaggtcattctagaggagatcatagtgaggagccatgaggtaacagtattgactcactcaaagtctttgttaattgattacaggaagccttctgcactgaaatttgaggtggtccatatgccataggataaaacagaagaaaatgaaatatttgttgacctagctctgaatgtcttcccaggcttaccagcgtggcaatcagtcataaaattaaatgttttttgttgaaatgaggaacttcaaaaatgatgtgtgagagcattatctacaatcagacacttatgaagaagctacaggaaaccaactacgatgtagcactcatagaccctgtgattccccgtggagacctgatggctgagttgcttgcagtcccttttgtgctcacacttagaacttctctaagaggcaatatggaacaaagctgtgggaaacttccagctccactttcctatgtacctgtgcctatgacaggactaacagacagaatgacctttcaggaaagattgaaaaatccaatgctttcagttttcttccacttctggattcaggattatgaccatcatttttgggaagagttttagagtaaggcattggaaatggaaaatgttgtccagagttcaggggaagatgatattgggttgttttctctggggtcactgtttccaaatgttatagaagaaaaggctaatatcattgcttcagcccttgcccagatcccacagaagaaaaaaccatccacattaggaaccaatactcggctgtatgatgggataccccagaatgatcttcttgtactaggtgacctcaaaccaaagcttttatcgctcatggaggaatgaatgtgatctatgaagctatttaccatgaggtccctatggtgggagttcccctatttggtgatcagcttgatgccatagctcacatgaaggccaaaggagcagctgtagaaataaacttcaaaactatgacaagcaaagatttactcagggttttgagaacagtcattaacgattccttccagttataaagaggatgctatgagattatcaagaattcaccatgatcagcctgtgaagcccctggatcaggcagacttctggatcgagtttgtcatgtgccacaaaggagccaagcacctgtggtcagctgcccatgacctcacctggttccagcactactctatagatgtgattgggttcctgctggcctgtgtgtcaactgctatattcttggccacaagatgttgtttattttcctgtcaaaaatttaataaaactagaaagatagaaaagagggaa

SEQ ID NO: 560 - DNA, 7054 bp, Homo Sapiens
agtcctgcagggcggggcaaacttggagaggcgctgcgtcgggggacggggctacaagccgtcgctgggggcggggcttgcggcccacctgtaggtcccggtgccacctcgtcagtgtcccgagagatccccagaagaacgagagggctgaacaggggaccccactgacgtccggtgggccgactttacgatcctttaggatgaagaaactaagactcagagaagacaaatgacatgcccaaagacacattgataagaacgcatctggtagtggtgttcgagtccagcgttgcagcagagagatgggtaactgtatggccgaacagctgtcttctcgtggaagaaggaggccaatgtccaggagtggcaggcatactggaacttggacttctgtaggccaacctgggttccacttggtagatgggggtcttgctgtgttgcccaggctggtctcaaactcctggcctgaagcagtcctcctcccttagcctccagagtagctgggactacaggtacacaccactgcaacccctcagtggttgttatttaactgaagggggttttagctttcatgtatcagctcactctggagccagacagcctggccttcatggcagctctgccccttactacctgtgtgacatcgggcaacgttactgagtgtcagatttcttatttgtaaaacagggataaaaatgacattgctgtgcaaattaaaagaaagaatccatgtgagatatttagcacactggcatacaatgagagcttaataaacattgttagttttgtaaactgagggaaaaaaatagccacaggcctgggaacataaatgcttggtaagcttctcagttccctggaagtctgacacgcaatgtgtatgtatgaacaaggcaggaggaagcatgacaccaagccttccttttaacaaacactgtttaaatcagaggtcggaagtcatggactggagattcattctctccccactcatttctgcccagagacacctggtgatctggcatacacagtgctatgaacctcagaattatttgctagcatttacaaattgtgagtactcccacatacaaactgtggtagatggaataatgcctccccacaaaaatgtccacagcctaatccctggaacctgggaatatgttactttacacagcaaaggaatgttgcagctgtgattggagattgagatagggagagtgtattagtctgttgtcatgcggctatgaagaaatacctgagactgggtaatttacaaagaaaagaggtttaattcacttacagctcagcacggctggttgggggggcgccctcaggaaatttacaatcatggtaggaggcacctcttcacagggtggcaggagagaaaataagagcagagcgaagggggaaccccttataaaactgtcagatctcatgagaactcactgtcatgagaacagcatgggggaaaccgcccccatgatccatcacctccacctggtcccccccttgttacaattcaaggggattgtaacaattcaaggtgagatctgggtggggacacagagccaaaccatatcagagagtcttcctgcagtgtccgggtgggtgcggcatgttcatagggtcttagaagagggaagcaagaggtgagaggacagaaatgccacattgctggctttgagggtggggccagaggagggacctgcaggcagagatagagctggaaatggaaaggaaaccttctcccttagagtctccagaagaagtgcagccctacagacctgtgttaggcttcagacctccagaattgtaaaataataaaattgcattattttaagccactcgaggcccatgtcctcaacaaagagaaagacggtggggtgctgtcagccagggtaggtacctgcttggtggtctgggtcctttcccactgtgtccattcagttacattacctgcccatctgctgaggcctcgagtttgggacctcaggtttatataattccttgcacaagcatgatcgattgattccggagagtagcagaacactgatatgcaggggaatctcctagttccaagtgtgagttgtagtctagacacttcctgttccctacagtcttttttttttttttttttttttttgagacaaagttttgctctgttgcccaggctggagtgcagtggtgtgatctcggctcactgcaacctctgcctcctgggttcaagcaattctgcctcagcctcccgaatagctgggatcacaggcacatgccaccatgcccagctaatttttgtatttttagtagagttagggtttcgccatgttggccagggtgatctcaaactcttgacctcacatgatccgcccgccacagcctcccaaagtgctgggattacaggcgcaaaccaccgcccccagccctcttccctactgccttgatgtgttcatctgggcaatgtgtgttgagggggcatagggaggggagctctaaggcaaatgtgctgggattctgcattcgtcatcctcaaaacaaaattggtccctaggtagttctgcctgtgatcctgcataatgtgcaaagccagtaagatgcctttgcctcatccccagggaacatgcctcccagccactttcatctcacctagtgcctacacagaaaggcaaccgcctccctgctgaagggaccccacgcctgtctcctgtttccacacaattaccccgggaaatgcctggcttcccatttccagttgcagccatcttgacagtttcagcctctccccacagcccacgtccctcacttgagcagcgagatgtgaagacagacagccgcttgagaactgcacagactgtccttaatctaagccatttaaaaggcatttgtgttccataaaacccgtttctgtaattctgtgcccctacttctttgaaagatgataaccctagggaggagattagccagggaggagaagttcagatgtgctaatattttaatcgctcattctttcatcacattagtcacattcattaagtatgattaatttcaggctttgttgaaaaccctatcagtttccctatcagccacacatccatctcttgccaagcaggctggtgcagtagcaccaaaagtcccccagtgttttttacacctggattgtattatgtgccccctgaaaatgtgtggaattaattgagctcatttgtttcaaatactttgcaagagcctgggctcttgagtcaggcggcctaagtgtgatcctaagtcctcccattgctggagtcacctgggcaagtgactgacgccctctgagccctggtgtcctcgtctgaggatggagataagaatacctaactcgaaagttggttgtgaagatgaaagaaggctttcaaattgctaagttagttggttatgattgtaattaagggcccttggagatggatcattcatccattcattcatccattcagaagatttgtgtacagtgactactgtatgcaaccctgtgtgtccactgctgatgagagagacagcagcaaacacagcagtcaaatgcgtgtggcccccaggaccttatattttagtggtggaagctagacaaccaccaaacatgtaatataccagatggtggtacgttctatggaggaaagaaaggacgaggggcagggagtcctgggctggtgggacagggtgctatggctcagagggaactcagagatcacctaattcaggccctgacctggagggctcatgctttgcacactgtgctaagaatttggactttctttctccaagaataaggacaatgagagccagcaagcagggaagtggagcaaggatggtgccgtccggctgctcagctgctggctggaactcccggaggactctgtgaggatgcaggtagaaggtgtgtaagcatgtgactgcatggaagccctcggcatgtgatccactccgtgttccaaattgccatcctttctgcgtgctgttagggacttcccccagctctccctgcagagtgaggagtactctgagacagacgggtctaggatgaactgtgttgatggagaaatgaacattttttggagggaaggaagatttcggggtgtggggcataagttgaaggagtatggctctgaaagtccttgggcagtttgtagaggacagagaaggtggtaatgtcagtttctgcccctctcccacctccacctctggccttctcagtggtcctatggctccctaccttcagtcatcttgttctcaagcctgaagtgctggatccactcagctgcaacccagctcaacacctctgtggaagctttgcccatcaatcaggagaagctgagatccagagactgatgcccacgttctgtctttgcagagggaagcccaccagagccctcttctctctggggaggagctggctccctgaatctccaagacaaacccagacagccctggggaccttgaatgtgagcaaggggagcagaaaggaggctccagcccacccagggcccctgcagggtctgcacacacaattacaggtcctcatttccctctcctaatgatgccccaaaacattaagggaagttaaatcaaaccaccaggtgtccagcatgaacagctgaaataataaattcacgagatttgaatccaaataactgatgatttgttccatgaatgccagagctggaagggatggggttggcagaagagacaagactggaccatggacctggtggttctgtgcagaggccaaagctactctccttcccacctggccctgtgctgggcctaacctggagccccctctatcctctgcctcattcttctccgggtcaaggtccagcatgaactccatgtcctccaggaagccctggtggacttgggcagacctggggacacgtccagcctcctggcaagatgggggtaacaggagtgtgtataaaggggaaggcaagaatgtgcccttggtggagcagtgaaaagaagccctcatgtgacaagtgttttgctcctaacccacctcctctggtgacatcttctgggttaactgctcttgctgatctctgcacataaaccaagctaactgtgagaggcctttcatttctagtttaaagcaaggagaccacagttccttctgaacactcacccccaaggagataaggagggcgtcccatgagcaacactgtgtgttaaagatgtacacgagcactgggacctgaccaaggacaaacacgtctccagccccctcagacccttgctgctgctcagatgtccgctgtcatcggtcacatcctaacctcaaccccctctctcctcccacataaaaggaggctgaaattcatagtaacttcagatggttctttaggacactggcccaccaccttctcggttgctggctctccaaaacaaagccccctcccttgacccaattccttgtttcttgacgtactggctgttgtgcagtgcatggtaccggcttgaactcggttatgttggcatggcctctggcggtgctcagtttgtgtggatgagtattttacagctactgtcctatttccagtccccttcctctggacggctatgggatgtgctgtggatgccctctcttaggctggaataaaccaccctaccttctcctctgccttgtctccaccaaataaactccttaaggcagggatagagtcttgcactccacgaagaagtattgctgcatcctcagctgtgtaagagtgaccgggcttcttctattccacctgtaatggaactttaggcacgcagagagagatggcaaatttgtgctggctgaaggggtcagcaaatgcatataaggcttcttgtgctccagagagagaatggagtgcagtcagtgagaccctgaggggagaaggaaccaaaagcctgggcagaagggatcgtggaggtgcccagggtcaggagggatgggaagggtgaggaacacaagagatcacctggaggcattagaggagaaggcaggcactggggatggtgccgctgatccaggtggagcaacatcctaggacccgagtgctgggcaggtgcatccgtggagggaagcttctctcctctctcggctcctgctgagagaggcaatcattcccctggcttgccctgcaagagacaggagctctaggtagatctctgctatctagggaatagaatgtgaatatttgaaagttctagaggtcaagtcttaggttccctctcagctcagatcccaaatggtacactctaccctaacccccttttcttgtagctttgctacatggagaggaaaataccttgccagacaccaacagtcccttctcagcacttttgtgtgaagacaactcagaccctaagagaatggggtctaatttgcaggtgccactggaaggcagaggtcacgggagccctggacttcagacaaggtagagggatcctggagacagcacatctggccctggagccctgcccacccggggagtgagggcagctctcctgctctcctaggaggcctgcccgaggacccccatgtcctctatgtgtgggattctgcagtttgcactcacaacccagagccttttacccaactaccctgtttgtaggaatgtgtccaaaataagcatcagacaagtacatgaagatgaatgtgcaaagacgttcataacaggattgtttataatcatgaaaaatgatctgcagatttcctgtctgctgtgcaggatgagttagacggggatgcatccataaaatcactttgccctcatttaaaattatatcatagatctatgtttaatgacatagtaaacggtactcaatgcattaagtgaaaaaagcatatacatatcaggatgtatatgatcaagtttttgttaaatggatgcatgtatgcatgtcagtaactgtctgtgtttgcaaacaaaacgtctagcaagacgtgcatcaaatattaacaatcattatctttggattctggatttattgacttctatttttgactttgccctttgtttttctatgttatctgacacttttacactgagtttatattattttt

SEQ ID NO: 561 - DNA, 8304 bp, Homo Sapiens
caagtagctagggtcacaggcgccagccaccactccccgctaattttgtatttttagtagagacagggtttgccatgttggtcaggctggtctcgaactcctgacctcaagtgatccacccgccttcacctcccaaagtgctggaggttcaggatctctaaatgagaggtaaacaaactgaagcaggaggccagatcaaggagatgcccaccatgatgtcaggaggtgagttgggaaagggcctcaggagatagggattcttgcgtggcccccaaagggggtagtggggtagggaataagcttcctcctaccctaagcaccaataaattcaaaactttatttatgtatttatctatttatggtaaaaatataacataaaactcactatcttaaagtgtacagtagtgttaagtatatttgcatcatcatgccacagatctccagaagttttcatcttgcaaatggaaactctgtactcatcaaacaactccccattttcctctctccatatccccccactaactgccattctactttctgtttctatcagtttaactactttagatacctcgtatacgtggaatcataaagcatttatctgcattattttacttagcttaatgtcctccagtttcattcatgttatagtgtatgataggattttcttattttgaaggactgaataatattccattgtatgtatatatcacatttgctttatcattttttccatcactgaacatttaggttccatccacctcttggctattgtgaataatactgcaagcgacatagatgtgcaaatatctctgtgagatcttgttttcagttcttttggatatatatcaaggaatgggattgctggtcatatagttgctggtaattctatttttaattttttgaggaacctccattctgttttccatgggctctaccattttacattccacaaacagtgcacaagtgttttaatttctttatgtctttaccagcaagcacttgttatacagtctcccttctttcttttcatagtgggcatcctaatgggagtgaggtgatatctccttgtggttttcagttgcatttttctgatgattagtaatgcgaacatcttttcatgtgcttgttggccatttgtatatcacttttggagacatgtctgttcaagtactttgcccgttttttaattgggttatttgatttttgttgttgagttgagggaattctttatatattctagatattagtcccttctcagatgtattatatgagcatattttcttcaattccataagttgccttttcactatattgattgtatcttttggtgcacaaaagtttttaagtttgatataattccatttgtctacttttgctttttgttgcctatgcatttagtgtcataccaagaaatcattggaaatatgttttttcatttgtttaagcctgtaggaggaaatacggtttgagtgaactttaacatcttggaaaagtaagccttggtcaagcttacagacaagagactaggctggttattcatcctgtgaaacagccctacaaatttacctacaccatggaatccaagatcccactgataatgtgaacttactcctttttgtttgtcttctcccttctaatgttaatttttttaactgcaggaaaaataacaaaataacagaattcttcttttataagatagatttgggagcatgtactgatcttttgagtgaggtggagaggtcaaaataaaaatactaaaatgtgaataaaactttgagacttagatggagacctagttaaaccttttcttcaaatgccatcaatgccaaagagcagcagttgttttactaattcattcaccaaaagtgattatcaaacgtctactatgttctgggcactaactagccaaggcaatataggtgtgtataagaggcaagtctctgctgtctgtgagtctatgcagaatctcgtcttccgttagaagcatcaacaaacatgtattgcctgccctccctctgctagaagtttggggagacatgttatggactaaatgtttgtgtcccccaaaatgtacatgttgaagccttaacgcccaatgtgatggtatttggaagtgaggcttttgggaggtaattagatataaatgaggtcatgaaggtgtggtccccatgatgggattagtggccttataagaaaagagacaagagaggttcttctctttttctgccacatgaggacacagtaagaaggcagctatctacaagccaagaagagggtcctcactaggaactgaagcctgctggaccttgattttgaaatttccaggcttcagagctgggattcctgtgtttaagccaccacccagtctatggtattttgtatggcagccgaaacagactaatacaaggcataagggacagtgagatgctgttcatcctctcaagggttcgtgaacttgttaccgtggcctccgcagtccctgtgttcacttatctttgctaagggcaaatcactgatgagatggacgcattttataactggagaataaaagggatgaggccctacaggctgagggttacaaccaggtgtctgaaggagtcagtgtcccaaagagtgagaatagtggagtgtgtaagtggagaataaccaggtaggtgcttaaaagtgaacctgtgttgactgtattcacttatttcataagacaacttttggaggccagacacaccacctttaaaaagtaattgtataagtgtcctagtgctgtgcatgaagtcccataaactgggtgctttttaaacacccagttgtttttacaatagaagtttattttcccacagttctggaggctggaagtccaaaatcaaggtgtcatcaagcctatgcttcatttgaaaactagaggggagaatcctttcttgcctcttttagcttctggtgtttggtggtaatccttggtgtttcttggcttgtagatgcttcactcccatccctgcctccaaagtcatatcgtcatcctctccctgtgtgtttctccttccttttttcttttttttttttctttttttgagacaggatagcacgctgttgctcaggctggagtgcagtggcatgatcatagctcactgcaaccttgacttcctgggctcaggtgatcctcctgcctcagcctcccaagtagctgggactacaggcatgcaccaccatgcctggcaaattaaaaaaagattttttttttttggtagagacggggtcttgttatgttgcccaggctggtctcgaactgctgggctcaatcagtcctcctgccttggcctcccaaagtgctgagattactggtgtgagccaccatgccttgcctctgcttcctcttataaggacatcagtcataccaggttaaaggctcactctactccactgtgacctcatctcaaataaactaattacatctgcaacaacatgatttccaagtaaggtcacattctgtggtactgggtattaggactttgttgtagtcagggttctccagagaaacagagccaataggatggttccgtctctatagatagaaataaatttattataaggagttggctcacatgattatggaggctggaaagtcccaagatctgcatagtgaatcaacaagctggagacccagtggtttagttccaggctatgtccaaagacctgagatccaggagagctaatggtatagtttcagtctgaagtccagcaggcttgagacccagggagagctgatgtttcagttcaagtacaaagacaggaaaaaattaatgtcccagctcaaaggcagtcaaggagaaactctctcttactcaagggagaatgagctttttattctatttagaccttcaatgattggatgagggccacccacattagggagggtaatctggtttactctgtctaccaatataagtgttactctcatccaaaaacactctcacacaaacccccaggataatgtttgattaaatatctgggcaccccatgacccagttaagttgacacgtaaaattaaccatcacactttaaaatatctttttgggaagcacaattcaacccataaaagtaataatcatgcctagagaacttttttagttgaagagatagaaagtttaattcaaatctgtacctgttgctttgtactgttatttgataggggtcttaccccactcctatccatcaaggctggcagaggctattttccaggattttagggttgctggcagctgggcagtgactcaggagagttgtgagtggggacagaaaggaaggaagtatgccaaacagtgctaaaaaatatccaaagctaagaaatgtgtaattagccctgacctcctttgcccttcctccttactaaagcagagtgggtgaaatggctcatgggttattaattgccctctgctggtcactttacaggcatggcttcccatttgcttactttattttctagggatgtcagcaaattaccacaaacttgatgacttaaagcaacagtaatatattgtctcatagttctggaagttagaagtctaaaatcaaggtgtcacagggtccatgctccatctgaagttgtccagggactgaagtgtccaatccttccttgcctatccctagtttctggtggttcctggcaatcctggtgttccttggcttgcagctggctccccacaatatctgcctccattttacatggccttccctctgtttctctgtgtgccctctcttataaaaacagcagtcattggatttaaggtccaccataatccagcatgactttattttaagttaattacatttgcagaaaccctgtttccaaacatgtcacattctaaagttctggatagacatgcattttgagggagatgctattcaaccccctatactaaaactctttttctgtggaagagaaagaggcagggagagtaacttgtccagatcactgttaagtggttgagctgagctttcatgtgtactcattagccaaagtgtcttccttcttcccctctgccctcttccctctttcctttcatcgcctattttcttatccaaggatgccctggatattagtttaccttcatttgaatggagaaaaatgcccattgttaactgttaactgttggggtgaggggatgggaaggtgttcagtggaaggtctctcaatctccttgagagttagtttactttttttgcaaaaatggagaaaatgaaacttgtctcatttggtggttgcatgtattattaaatcacatacaaccgatcacaaaatcaatgtgtaagaaagtgtctgggaaaatcttccaaggcatacagccctgagggacttttgtagaaaatcatttagaaagtaaggcatccattactcacctagggtattaattaatttgtattcttgaaattctttttttttttttttgagatggagtcttgctctgttgcttaggctggagtgcagtggcgcgatcttggctcactgcaacttccgtgccctgggctcaaccaattctcctgcctcagcctcccaagtaactgggactacaggcacatgccaccacacctggctaatttttgtatttttagtagagacggtttcaccatgttgcctaggctggtctcgaactcctgacctcaactgatctggccttggcttcccaacgtgctgggattataggcatgagccaccatgcccggcctgtatttttgaatttctacattgttgacatgccttgaagtcttagacgatgagcaagaaacagaaatcatgtagcacatatattcaacattcccacgtaattttaggtttctatttggtctctttcaagcggtaagtaatttactttgatcttctctgctaggttataacaaaagttgacattgtagctctgccactcactagaaatatcatcttgtttatgttatttaactttatgacctctaattgtgaaggttaaaggaaagagcacatataaaagctcctggtacattatggttagtcaggaagtaaaagttttttttttaaattgcattgttattattattactgttattattaatatcattggtatgcaagacactgagttatacatatttgacttgtgaacatatttgttattttaaaaattgaaataatttgtcttaaaaaagttacaaaaatagtacagacaattcccatatatttcgtcacccagcttcccctactgtttaacatcttacataagcacagtatgatgatcaacactgggaaattaacattgctacaatactattaagtaaactatagatttgacttgaatttgcaggttttcccattaacggttttttctgatccaggatccaaaccttgatctccaattgaacttagttatgagaaggagacaaacttagtcttttataacttagtttttccttgtctttcatgattttgacacttctgaggaaagctggtcagtaaccttgtagaatgccctccaatttggctttgtctgtattttctctgattaaattgagataatacaattttggcaagaatacctcagaagtaatgttgtgtcctttctcatacaccatatccagaagtacacaatgctagtatatattattactggtgaaattaacattgatctctgggttaaagtggtgtcttccaggtttctccactaaattaccatttttccctcagtgactaacagatatcttggggaaatactttaaaactacgcaaatattgccaggcgtggtggcgtatgcctgtaatcctagcactgtgggaggccaaggtgggcggatcacttgaggtcaggagttcgagaccagcctggccaacatggtgaaaccttgtctctaccaaaaagtggtggtgtgcgcctataatcccagctacttgggaggctgaggcaggagaatagcttgaacccaggaggaggaggttgcagtgagccgagatcctgccattgcactctagcctgggggataagagcaaaactctgtctcaaaacaaaaacaaaaacaaaactatgcaaatatcctgtttcttgtaccttcacccactagttttagcatctatggatgattcttgcctgccacaattattactatggcatttgcctattagtgattttctgtttccttcatttcttctctattaataggaattcttctctaagagagagttattctcctccctcatttatttttttatatcaatatgggctgatgaatatttattttattttatgggttataatcgaacactgtcattatttattttgttgctccagtggttccagctctgggcattaggagcttaaacaggttggctcctgtatcctttcaacatgcctcattatttttagtgctttcttgctttttgatgcttactttttaatctaggctcatcttgtactttctttgccccaaccatggaattgatcttttctccaaagaactctgattccttttattggaaaatggacttaggaaccaagatcttggcattgagtagtctcattgctactggggtttcattgcttctgcgtcctctcagtggacagagtttggaaatatatgcaggtatgctaacacacatacatatgtttatatttgtaaattataaaattgtataattttaaatttctgtattataaaattatacatatgttataaatctatgtttatttcaacatatatctgtataactattaaggaccacaatgaatacattcaaaggtaaatgtgtgaatatctctaaggcatacttctacttatctcctaataataaagagagtaggtccattacactattgcagagtcattagtacttgtttactttcaagttttatgttgtaattcagatagctgaggttgtcagagaagagacctagccttatgtaattctggaaccagaaaaagaaatcatggaactatccaattcatgtttcctaaactggtgttccatggaatactattttaggagttgttaatagcattatcctgatcaaagggttttgcggttccataagtttgggaaacagcattgtagatcctccacacttgtgtgacactgccaatggattattttatttatatgtttatttatttttagggatggggtcttgccaggttgcccaggctggcctcaaactcctgggcccaagcagtcctcccacttcagtctcctgagttgcgagattacaggtgtgagacaccatgcccagcatgcctatggattattaaaggagtttttaaaaatttgttttccaggctgggtgcagtggctcacag

SEQ ID NO: 562 - DNA, 27380 bp, Homo Sapiens
gctctccctcagacacactggagggaaaggtcaaactaaaggcgagggagcagagagaccggagggagccgctgccgccgccgcgcgccatgacggacgcggcggaggctgctttctcagtgcggacgccgccgatccccagctctcgccgcgccccctgccccccgcccctcgcgcgcccctcaccctggcgctggcgcgtccccgcgccctctcccccggccgctccaggcgcgcctcgggctcggggcgcggggcgctgggagcgggagggtgggggccgcggcgggccggcggcctcctcgcccgacccccgaccccgggccaggtgagtgccttggggcgggagagggcgtccggagcggagaggacaccgggcgctcagccccccgcctgacccccttccggggcgctgacaggctctcgggacacggcctctggggggcgtcgtggggtcacttgtgtcggggggtgcttttttggcgcccccgtccctcagggtcgggcgtccgagtcgtggggggctcggggccgggaagtgggcgctgcggtgcggccctggagtgcagccgcggcgacagggtatggggcgggcggcgggaggcaggtgggcccctccccggggctcgtgaagtggggggaccgggcgtgggggccgcgggaagctttcgggaaatgtttatccggcagttgcaagaaactctgccctcgggacgaggcgccttgctttttgccggggccagcgaaagtggcggatttcacagcaaaactcgggtgaagccaggctggaccggccgggagtgagagaggccgggagcacccgtctggatggggaccagagatgaacgaatccgcctgtgtgtagcaccagggcatgatgtgtgcacgttgctatgccagtgtttaatgtttgttgcttatggttattttaggactaaatgataaaaaagttacttgggagagagggaactgcttgatttgacatgagttcttcacttgtgcatgcaggaaatacattaatcctgtacacacacaactgaatttatgtccagtggactttacaaataatatacacaaaattctaaagccccgaagcaaggtgatgtgtgtctgaagagtttcaggtgtcaggctccgtgttccgtgggaacaaaataggaggacaccgaagtacttgatatgcccaagcagtcatctttttgtaataagctttggataccatcaaagtggagtttagttgtaactgccagggttaagtaatcgcattgacccggtgccacccaccagtttggagcttctctgaaagtaatttacgagacagtcctgtgctgattgtgaataaccagtgcttttgctgatttttttcctgtttaattttacactgtcatcatgtatgtgtatgctacctgtttaccaaacgttagaatgaattatccatagttaaactctccactaaatcactaaatcaggtactagctgtggcatgtctttaaaaatatatatatttgaatgttacctggaaattaccgatataatggtttcaagctgatagggattttttgaacttaagtctagcataaacattatcccaagtggatgtgttttaaaatttaaatctcatctaagaaaacttcctggtttgtgaaaggtgcaggattgtgatgatagctgaggaaatgccagagagaatttttggtagagaataagagaacaacctgtgaatttggtgttaaccagcagtctcggcatatactcacttgctccttacctaagcatttctgatatgtgggtgctttttctgttgattatgtatctttggttatttgtcattttcaaaaagtttcctcaacagaggaccctcactttgaaattgagtccttgtggcatgtagccgggataccaaaagttttcagtaccagatgcagagagagatcagtccgtttgggatcttgttaattctttctgtgcagctacttttgtgctgtgaggtctcttttacatcttgctcctattggccatagctgacatatgtctgtatacagtcctgtagtggggtacttaattgttacaacctgaaaagattatttcttgtaatatataaataaatttttatgtttttctctcttctctctttttcaagggaactgtagaattggacaaatcaacacttagcatgtccccctcctgtaggtcttgttgaccttggtggcatcgtggaggtcatatgttcatggagataaacagttcttgaacggtttactccaggtggtaaaaacacatgggaaagtgatttgggctgtgcgtatcttggttttttaaaaaatcatttttatcgagcgtttattgtgatcatggccaaaaataaaataattctttgactttttttgaaatactatacacacatttctatattacatttttaagaattgcttatttttcaatttttctagtatttcttgtatattctaccacaggtgaacaactcattttttgggtgacatttttagagcttgcttgaggggcactagaaagaagggcagtaatgtgatgtgaatgtttcagcttatgaaaacagctgtgctctactttaagaaatttgacatttaaaagtgtaagattgcaaaacaaattaattactagttggttatattatgtgagaattttaaaaaagggattcactaaaagttgttttcaaatacttaatccctttaaatggtatttatctaatgtgatttgatttgtgaataatcagttggcatacaacaatttaggaacagatttttggcatatgtaagggttatcagtgtgttctttgagttctctctttaccaaaagtatttggggacaaagttaaattcagtgttgttccacttatatgccacctataatggtttaactgagtgggaaaattgtcatctgatttatcccatatcatttaaggcagcggtgtccaatcttttggcctccccgggccacgttggaagaagaagaattgtcttgggccacacatcaaatgcattaacaataactaatgagcttaaaaaattgcaacaaaaatttcatatttttagaaagtttacacatttgtgttgggcctcattcaaagctgtcctgggccatgggttggacaagcctgatttaaggagtacattgaagcctaattaaaatgcttttcaccattgagtaaaactttatgatcaggtttgtcaggaacctcatccaaggtagtttagttagtggagtatcaaaagcaccttgttgtcagacactctcactaggacagtggtcccccagcagaggccaacaagcagttatacccaaacttcagcaaaatcaaaataagtagatttggtctaaagtccacaagcagtaaaaaccgttaccttgaaattttctgtaggtgcaaattattcttcagaattaaaggcttgattttcctaagctgtaattctgtttgagtcacttgtgaaaaatgctattttggtaaaagaacaactatgtattctttcaaaggagttttttccctttgtgttaatgcatttgcgtttatttggaattgcaggagatgatgaatgaagtacttgggaagtttaattcagaaatcattttgctttgcttatgtagaaaaaaaaggaatgtgagttaataggagaacttatttgtgggttagttcgtacttcatgtggggataaggaggaaagggaggaagtagctgcaaactttattaaggataactaatcaagtttcatttgatttatactgttcatgcctggcttgggtaacagtgacgccttcaccttttcctagttttcgagaaattttattcttagagaaggggtttgaaggataagagctaagcatcagggcatacaagaagtaaaaaatatcttcagaatgcttaatagtattttgttttgtttttatacattagaaagcaagaaattattttaatactgaatatgggtcaaaagcccaacttcgggatactgggcacggtttcatacctcttagcataattgaatattataaaaatggaaggaacagcttgaatggtgccattgatttttttagtacaggctcttagttcctcaattgaacaaatgagtaaaaatgaagattaaagaagagatgatattaaaagaagtgttttccattttttaaaaaatcccaagggactgtctcaaatgactgttaatttcagaacatagattaaaaagtacattacattggatttatgattaatgaggacacaattacaatttttaaaaaatacatgtaaaaaaggtgagtatactactgcagtttacaaatatttgtgccaagatacgtgaggctagtggtaatgattagaaattataattggaagtgaagactgatttatgttctcaatttcattatttaagccaatgtcacttttaaaatgtcacttaatttttctattcccaatgttcttttcaataaaatgcagtcattagtgcaccatactttatgtaaactggggtttcaaaataatattaactagaatttttttttttttttttttagacagagtctcactctgtcacccaggctggagtgcagtggcgcgattttggctcaatgcaacctccgcctcccgggttcaagcaattctcctgcctcagcctcccaagtagctgagattacaggcacccaccaccacgcctgtctaatttttgtattttcagtagagacgggatttcaccatgttggccaggctggtctcaaactcctgacctcaggtgatccgccctcctgggccccccaaagtgctgggattacaggtgttagcccgtgcccagccaatttactagatttcttaagcataaaatattatctaataatatgtatatgtatgtccactacatgggatttttaaaaagtttagattttgtgatctgcagaactgtaggcaacagttcttaaaaataagaaaggctgagttcaggccaggcgtggtggctcatgcttgtaatcccagcactttgggaggccgagatgggcagattgcctgagctcaggaattcaagaccagcctggtgaaaccctgtctctacaaaaataacaaaacagttagctggatgtggtggcacacgcctgtagtcccagctacttgtggggctaaggtgggaggatcgcttgagcccaggaggttgaggctgcagtgagccgagatcacgccactacactccagtctgggatgacaaagcaagaccctgtctccctctccggacacccctaaaaaagaaaggctgagttcagagttttagtcatgggtgaccctataaattgcaatttctttttctccctaaagggttttctttcactattacatgtttgtgttttcctgattccactcatgctactgttaggtgttggatcatcttacctatagcgtcaatacaaagttcatttgtaaaaactgttccgtttattttctcccagctgtttcatctgagaattttgtttgaatttcagttgccaaatgtagtttaatcggttactctaaatagaaaggttattgcaattttcacaaactaggggaaatataaatttatcttaagtttatgaacatttttatattcctgtggggacaactaagcacagtatgtataatttaatatctctgttggcatttgttctaagttaaatttatttgctgtattgttaaaatcaatgtagtaaggtgtacagtcttttaaaaacaaatctgtttctctgtggaatatttttcaaaaggacctgaaaaacatgctcttaaatagatggagtggaaattttactattaaagtgaatgtatagttaaatgtgtgatactggtattgttttgattgtttttattttacatgtgaggattttttacatgtttctgtggaactacttttaagtaggttttaattttgatttataaacaagcttctctaaaagaaaaaagttgttttgttcttcgtgattatatggtagtcctcagacttttgtagttgaaagaagtagaaatgagtgatttattaagctgtttatgtaaaatgactagttggagcaggtgatgtaatttatttttactataatgtgcagagatgtctttatcccaaacaaatttatagctgaatcgtttgctattttttgcaaatttagggaatctggaatgtgcccagaaatgaactgattgccaagtgttcgattgagtaaatatcatatggaaatggttttttgcttgtaatgacatattgttactgattaaggaccatttcttttctttttttttttttttgagacagagtctcgctctgtcgcccaggctggagtgcagtggcgcaatctcggctcactgcaagctccgcctctcgggttcacgccattctcctgcctcagcctcctgagtagctgggactacaggcgcccgccaccacgcccggctaatttttttgtatttttagtagagaaggggtttcgccatgttagccaggatagtcttgatctcctgacctcgtgatccgcccgcctcgtcctcccaaagtgctgggattacaggcatgagccaccgcgcccagcctgaggaccatttcttaagtatgcctgtaagtaaatatactacacatattggtcaaatgatgtattgacagctttaatttgtagcgtatgcttctctcactcctttttccttttagtaattgtcaatagtttgtcttcagccgtattctgtgagtgaacttctaatgcgctgatagagtgctccagggttgttgttttctaatgttttatctgatggagtaaagaaataactatctgagatccttgtgtaactcttattgtgtgttaaacattgttttgaacatttcttttcaatctgttaattataaagcagatgattctttaaaaattcttaagactgagtgattgtgttccccacaaatgttagtactgggagggaagggggtaaaggtaaagagaaagatcatagggattagtttagattgtataaagtaagtgtaattgtttcgttctaaaacatgttgagctaatcattgtatgccttttccctgggattataaccttgatttttaattcacgcttctcactgtgaagagtcaggagtagtgaattgtaagagaggcatatgtacctctttaaccagttttacatgttattgctgggaatattagatggcaataaggaagacaaacagtttcacaatgatgatcatttttagtaatcacatttagatttccaaattttataaggtggaagaatagacaccatagttatagatggagaagggcttttagacagaaggtcattgttaggaaaattcaagtttaccaatcttggaaaaaaaattacacttatgccagttacattctatgccttacagcactgcactgtaccagttttgaatattctgtgtccataaatacactagtatttgtccaaccatgaattctgacttttaggttagaaaatgtgttcatttaaatgatagttttaacttgagtgaaaaagctggtaatttttatcttcttttttctgtattataattttttgtcattaattttgaagatctcatgctatatgattagttctgtatatgactacttctgtaattgatgaacaactactagaatgaattattgtacttgagcacttagaatcatgtcaggagaggcatgaagtaagtagaacatatttgtgtagagataataattttactttctaaagcagtgattttgaaactcttgctgagagtgtgctggaggaagtcaagcatttcatcccggtttcaaccagtgctgttttattttgattaattttaagcgtggaagtttgcatagtatttcagttgagcaaggttctgttgtttaaaaatacgatagcctctattgttaccatatttgctcttatcacttgcctgcttaaatccttgctatttttttattgttattacgactgataagacttttctttccctagctccaactttattctttatctctgatcactttttcctttccatgtaaaccctgcattctaattctacttaaattgtttgatgttccctgagaggaaaatgttatttttacatctgcatgccttcgcacatggaactgccaccattctcacttgagctaggcagcactcaattcccttggaaccttggtcatctttccataaaagcagttattacattgttttgtaaccgtggcctcccttgagagcagagaccatctaatttatcttgtattcatactacttggtgtttattcagtattcaaatgtctgttgaattattgcatttagaatttgagaagtagtaaaattactttaataaacactaatgtgaataaaatatcccagatctagttctgtgcaaaagagttttagtgacagtgtccgacattatgctaaatatataaaaggcacccatttgcacttatcatgaagtataataaatccaaaatatttttttaaattatattagattctaatggcttaagtgatatcttagattcagtgatctgatcttaaaagttgattgtgaaagcattttaataattctatacagccttggctgcctgtgataatatttcatatgcgattaaagctgatagacttaaaggggccttcaagtgtcaagatatgtaatacagcaataccaactctaaaggtagaatgaaacctggagctatcctgcctgaattcctatcactctcctgtctctcagtagctgtgttgtcttaggcaagttacttaaccattctatacctcctttttctcatcagtaaaatgaacacaatgataatattactttatatggctgtggggaagagtagccaggaattaatgtatataagcacttaaaagaatgcctgacatacagaaaatactcaatacatgttaactgtaattaatttgaagtggcttcttaaatcaatatttattgtgcatcattttcatcttttaaagataattgctttaatacttgagtatctaattttttttaaacttaagatttttagttagttactgtgttttagactggcaactgtttcagtactttccaaaactgctatctctactgaggtattgtcctgtctcccagtgaaatgtaggctgttcccgttggatggattgacatgggagatttgaaactagttctcctgatttctgagcttatcattgagttcccatgaccaggtgttggtagtgtccacaacagagcaggaagagaaatagtacagaattccagtggcaagttcttaagccttaacctgtactttaagtcagtcctaaactttcatattccttagtagagaacagatgttcccctttttttcccccacattttccttttttggcttgggggaatagattttttaaaaatctgaatttatattccaaaaaggcatgtgcaagttaattttcctaagtcaatgaagccgctttttaatcttactttgtaagatgcatacctgcagtgagagaagtaggtagggctttagtaatttgtgtcagggaccatgtcctattaaatcctgtgaaaatatgcacatgtagtacacaaagaaaaatttaagggaagaagagttttttccaagttattttataaagtattctttataaaagtatatttcttgtaataatcccccatctgtccttctagcccacctttactttctcacacttatgctctcataacaattaaaatataatcaaagttacttgggtaacttaaaaaattttcattataggaaggaaatgtgttttgaaaatcagaaatttttcaaattttaataaattttagtgttttttatgcaagctgtgagttgaagatgaggggctgggatataaagctaaatcgggtacttatctttattacttatgacctactagggtgtccagagtatgcagagaacatatgggaatttggaagctgggaatggagactggaaaagtgctggattttgaatagtgccaggaaataaaggaagacttagcaagggatcatttttcaatgccagtgacatgctgtgtaatagtctaccatgggaaatttgaatgcttatacgattggtcagtatactaatattgtcttgtaatttgaacactaactcttaatattaacaaatttttttctcaacagccatcgtaggaacttttaaaataggttttgcatttcccctgaaaatggtgagttaggtcatattaggaaaaataaattctagaataaatacaattttgattaaaccggttttctctataaaaacccaagacgctgtatctatctttaatgttatctattgttaaaatttcatttccctcaacagcatgcatttccatgtttattagaccaaacaacttcttgttttacttcttacctttgtttttccttgttgttgttatttaattagaaaagaaatgctgtttgggccttttcatatgcctcaaaaatgtttggttacacagaggagtgagttagatttataggactcacacccaatttgatctcctcaagtgcatttctaaccatgttttcatccacttttccttgttttaggtttctcatagaaacagcttttcattgagctaaatgtatttcctctcttactcgttcttggaaatctaggactatgtatgtgaaacttcttattcttgtacacaataactcttaagtatttgaaaatgactgttctacttcagtcttcttttttgccaaactgagggaaaaaattcttttttttttttttaaaccgcatgcatgtgacatggtttacagacctttccccatctatatcgctctactcatgacaaagtttttgtcagtttacctctgaaaatacagtggccagaactgaactgactacttccgatgtggtctgaccattgctgaatacagtgaagctattatctaggatactgtgtttctattaatgtagtctgaaatttgcattgcatttttttggcagccacattaccctttgatcacattcagcttataatcaactaaaaccttgtctttttttcatgtgaattactttaagtctaatctttgtcactctttacttgccagttgatgctttgaaagtaaatgtaggatattatgtattgcattactataaaactttaaatgaatttatatatctgaagatatcaccatttgtataaaatagcacagttttcatggtgttttcacatctatttaatcttcacaacaaccatctgagaatcagaaaaactgactttccactaagtctagaattggcacatgtagaacttcattgcaagctttttgattccagatctcatgctcatctcatcattattcattcacttaatatgcatttagtgtgtccattcatatatggtaggcaccatgtggtgctggtgtgtcaggggcgagacacattacagtctctatccttgtgtttatgatctggtgtataaatactaccaattactaggcacttttcataaggaaggcactgtggtagactattatttcaaaaatatttattgcttctctctatcagggttctttctgtagtcggattatacttcttattctgttgacatcaggtttgaccatttggctttccttgaccaataaaatgttaaagtgacatgtcccatgtttgagcagatatttttcatcctgtggttctgccagtggcccttgaccctctgtcatggaaccagcatgacttagctatggctggtcccagaataatggagcagagctgaagccaatctgtgataagcatataagtgtgagataaatactgtgctgtaaggcaccatgattttggacatttgttaccatagcagaatatagttcaagcgatgatactggcatcactcaaggtgctgtatgatgatgataagacttgggcattgtcctaaaggagcttacagtcttggtagatgtattacatttccacaggttattgggagttgaggaaaaggagagtaatattacataaggatctttgaagttgaggatctttcctgacctccatctcatccctaggctgaatcagtcaatatgttttaaaccctgggtttgtgatccactactcactgtcacaacctcttattgtccaaaatttgataggcatattttctatgccctcattcaaatcaccttttttaaaacaaacatttaagaggatgaacttctacagaattgtgattataagcttccttcataaatctattaatcagcatttaatagcaagctaagaatatacccagttaaactgtttctctattatccagaaagatatcatgatgtcctagattctatgtgaattttatttgtgagcatttaaatttcccattgtcatgtctatgtgtgcttctcactctgcatgggattttaaagaaacaaaaccttggctgggattccaaaaggaatctttttttttttcttccccccgtgagaagctaaggaatacatacatggccaaggttcagaagagttttgaaacctttgaaataattacatgtaaaattttatgtaaatatacattgttctggtccctagctttcatcatattatcaaaggaaatcaaaaactcccctggaaggttgtaaaccctgttgaagagtgagactagaagtagaacaaggatctgaagagcaccaatatttaagggacaagtggaataggagcccagaaagaagtcagagaaggtgtagttaattagaatattggaggagcgggagcaaatgtaatgtcagagaaaccagttccttattaatcagagcttttgtggtgtgttggggggcggggggggggggtggtaaatccggcagttctcatggcgtttcattgtgattccttggaaattaccaaatctgcagatacatttaatgtcttgggataatatttttcttgacctataaacatgaattaaaagtgattacttttcttttgctgtctccttcctatcttggactttgatttttcttttaatccgtatccttcacagattaaaagatcattcttttttttccttttttttttccttcacccccttcctcttccccttcccactcccagaccgattcaaggcaggagtaaaacaattatgtaggttatctgttagcagttttattgcaagtaagtaacctggcttttgtttgttgttgttgagaatgtatttaagtctttttattgtccttaacactttcggcaagtctctatttttattgaaacaattttattgacatatagttgttatacaataaatggcatatattacaatgtgcagtttgttaagttttgacgtgtttatccatgagaccatcaccacagtcaagacactaaacatatacccccaaaagttttctgatgtcccttgataaccctcccctgcattctctaggcaaccattatctgttttcttttactttacattggcatgcatgtcttagaatacaatatgcactccttttgtctggctactttcacccagcattatttggagattcatccgtgttgtaccatgcaccaatagttactctttcttattggtaagtagtattccattgtatggatataccacattttgtgtatccattcaccttttgataatctatttgggttgattccagtgtttgacttttaaagtaaagcttctatgaatatgtatgtacatgtctttgtatggacataaacttttcatttctctgggcatacacctaggagtagaatgactgaatcatatggtagctatatgttctatacctacctagtttcttcttaaactgccagtggttttccaaagtggcagtaccattttacattcccaccagcattatgctatcatttggtgcagtcagtctttttaattattgccattctaattagtgagtagtggtggttttaatttgcatttctctaatgactgctgatggttagcatccttgcatatgtttatttgccatccctttctcttttgggaagcatctgttcaaatcttttacccgttaaaaaaatctggttggttgttttcttactgcattctgagggttcttatgtataaatcctttatcagatttatgatttgcaaatatttttccagtctatggtttgtctcttcattctcttaacaatgtcttttgaagggcaaaggttttaattttgatatctaatttatcagttcttttatggattgtacttttggtactgtatctaaaaatgttttttttgcgtaattcaaggtcaacaaaggttttctcctgtgctttctccctgtagttttaggttttctatctaaatatagtgatccattttgagttaagttttgagtatagaaaacttttctatctggatgttcttaagacaccatttgttgaaaatttatcctttttctattgaattcccttttccccctgtgaataatcagttgactttatatatgtagtagttctattttggactcgattttgttccattgaggtatttgttgatcttgacaccagtgctgcactgcgttgattattcagtgttgaaatcatgtagtcttccaattttctttttttcaaagttatttttgctagtctaggtattttacatttccttatgaattttagaataagtgtcagtttttttaaaaagcttgcttgacgttttgattggaattgcagtgaatctgtaggtcaatttggaaagaattgacattttaaaattattgagtcttctgacccatgaacatggtatagcacttggtttagggcttcattaatttctctcagtaatgtttggtagtttataggatgcaagtcttttatattttggtctcgtatatgcctctgtaagttgggttctgcagagaaacaatcaataagggtgcgttgtgtgtgtgtgtgtgtgtgtgtgtgtgtgtgtgtgtgtgtgtagagagagagagacagagagattgattttaagaaattggctcgtgattgtggtgggtggcaagtccaaaattcatagaattggcaggcaggatggaaccttaggcaggatttctcttacagtcttgagatagaattccttcttccttaggttatctggttttgctctgaaggcctcatttgattggatgaggcccacccatgttatggaggagagctctttttcttaatgtcaactgattgttatcgttaatcacatctacagaatagcaatagctagactagtgtttgatcaactgggcagcatagcctagccaagttgacacattaaattaactattaatatcattgcaatccctgaatatttcatattttaaaatacttttgtaaatggtatactttttttttttttttttgagatggagtcttactctgtcacccaggcaggagtgcggtggcatgatctctgctcactgcaacctccgcctcccgggttcaagccattctcctgcctcggccttctgagtagctgggattataggcatgcaccaccatgcccagttaatttttgtatttttggtagagactgggttccaccatattggccaggctggtctcgaactcctgacctcctgatccacccactttggcctctcagtgttgggattacaggcgtgagccaccgtgcctggccagtggtatgcatttttaagctcagtttctgattgatgctagttcactattgctttttaaaaaatactttagccttcttttcattattaaactcatatgactagcagccttttcatttgaaattaggattaccctctatttttagacgtatcctttaaaaatacgaattttttaaagaaaagtcctaatgttgttacttaatctctcacttttttttttttctttttactggaatcatctgacagaaatggcaatttcatttcaagagtcttgtcttatttttctgggccatgttctggttgtttttttcatcacaggattgtaacagtccttaaatattttagagattaaaattctaggtcaatttagagcataattggcaaaatagacatgttaccaaaaacagagatataggaagtttgggagagaagttaaggttcatattttaggtatgacctttatgctagtctctttctttgataaagtcatttaatttctttgagtcctagttcctcatctgtaaagtagagtaatatccacctcctgtggaattgtcatgaagttaaatgagatgctttgtgtaaagagcctggactagtgctgctaaatagatgcagctccctttactatatttttatttattcagtaaatatttgacactcactatatgccagacactgttccagactctggaattagaggagtgaaaagataggcaacattcctattcttacagagcctctatgttggctgttctgacagaagaggaagataaacaaggaaaggaataaactaaacaatttcagattgtagtaagaagtgtaaagaaaatcaaagagtgcgtggtaataaagaattgctgtggtgaaagcccacttcagactaagtagtcagggaagacctctttaaaaaggtgacatttgagtagaaatgcccttaggattttggagaaactaggcatgtgaagatctgagtgaaaaagtttcctggcagagagaagagatagtgcaaagcctctaaagtgagaaaaatgtgacaaattgagagaattgaatgaagcctagaggtgctgattgcaagtagtggagaagtcagagaggaccagctagtgtagggtcttacaagccacaataagaagaatggattttattctaggtgcagagagaagccactggagggttttaaaacagaggtgttgtgatcattagatggaaatgttgctgtggactttcagaaatgtgaacttagctgtgaaacgttagcaaactaaatactagcaacttggatttctagttggccaagaaacatgagggtaaacaatttattttccctgattaaaaaaaatcccagcaagtctctagcaaaagcaagtctaggttatctagagcaaataccattttatatctttttaattttactaagacttgttatgcaattatagatgttacagatgttttcaaaaatagtgctttgtggattgttttccttttatgagtccatgtggcaattgactagcatagcagtaaaaagtacaactctggtttcagatacgagcatgatgattgatcacatagaagcattaagttaatattaacaaggatctattgccagaatatatttcattataggattttgaaattatttagctgaatggaccttaagagttggtcttttttcctttatagaagagggaacttagattcaaaggggttaagtgattcacattatttaaacatttaaaaaataaacctggattttactattcttctagttgtaggatgacaggttcttgaggcaaaatgtggaatgagagaagatagtgacatctgtttgctttgtatctgctgccttctctgttgctcatttattttacatctatgctgtttcacacttatctttggacttagggtattgggatgtgtcaaacagttgctcccttagtgtggaaacagacaagtaaacacagttgctacacaagttgcaggcatcatatgataaaggcaagcttagtgtgttgtggagggcatgatgggtgtgtctgttaagtgtccctgtttagagtctgtttacatacagagttgaatgtccttggcttctcatttcaatttaatatatattatattgccttggctgttaggcctttcttgcacttgtttgcctcccagccataagccagtttgaaggccatgatccatcaggtctagtgggttaatccatgtctgaccagtaagacctacctatcttgacagtcaccatgatgacagcatgtcttattttaaatagaaacctggttagagactaatataagaatagttggtcttgaatagatgtattccttctcttaagcgaggtaggttttattaagcgttgtattttgaaaaatcctgaaaggaaattgagaaacagctatcattttgttaattttggctccttttactgtattttattttgaagtatagccattcctaagaacgctagcacatgagttcattgttgatgttataacatattctgaatcttaaaacaaggtaccaaaaatacattcatagaacaagtagataaagtagcactactataattagggaaaaatggtagttttcttgtaagccctttctctttcaagagcttataattttctgtaaaaaccaaacattatcctttgggcacgtgtgttttattctttctcttgattctgtgttataaagtttgattaaaaaggaaagatattaactttttgtctcccacacaaagaatgttcataattgtaatttttgggtatgacttgttgccatacccttgagcctccctttgtttaaagagtaataatatatatattttttaatctataaagaagtatctttgacgtgtgtgtgtgtgtgtgtgtgtgtgtgtgtgtgtgtgtataaaatcaaaacggcatacctttttgagaatatttagtgattcctgaagactatattatagttgtataaagaattagatggcaggccaggcacggtggctcacgcctctaatcccagcactttgggaggcggctgaggcaggtggatcaactgaggtcaggagttggagaccagcctggccaacatggtgaaaccccgtctctactaaaaatacaaaaacattagctgggcgtggtggcccacacctgtaatcctagctacctgggaggctgaggcaggagaatcacttgaacggggaagcggaggttgcagtgaactgagattgcgccattgcactgcagcctaggcaacaacagtgaaactctgtttcaaaaaaaagaattagatggcaatagctttagcaatctaatgtggtaggtgatctggtattatctgtctctttggtcacatgaggataaggctgcccatctcggttatccatgtcctgggccttaggaagaaggcagccagaatcttagaaatttgaactgagaaaattgaacacaagttagcagcctaaaatataaaactgatataaaaatacaaccagattgtgtatgaattattgttttctcatctttattttgtgcagatcaagaaactgaactttgcaagtattttctgtgaaagggtgaataagctatccaaagtgagtgattttagcctgtgtagaaaacatctccagctgtgttaaatataaagctgtcagttctttgaatatctccttgcaataattaatcatccttctcagttaacagcacagacagtacagcacaggtaagagagtaggctctgaagccagtctaccaatgctcttgtgactctgggtacattgctttctgtctctcatttctcatttacaaaaagaggatagataacactagtacctacctaatagtgttgttatggggattaaattagttaatatatataaaacacttagaacattgcctcagagatagtaagcaccatgtatttactgtttgttgctgcatatctataatacgattgattgactgattgattgagacagagtcttgctctgttgcccaggctggagtacagtggcataatcttggctcactgcaacctctgcctctaggggttcaaatgattctcctgcctcagtcacctgagtatctgggattacaggtatgtgccaccatgcccaattaatttttgtatttttagtagagacagggtttcaccatgttggccaggcaggctggtctcgaactcctggactcaagtgatttgcccgccttggcctcccaaagtgctgggattacaggcatgagccactgcgcctggctgtataatacattttaagtggctggttttattagttaagttctctcagagagtttggcatttgaactggtccttgaaggataaataggatttgtaaaagtgaaacataaagaattaaaaatggtaaaagctatgtgaattaagttgttaagaggaagtaaagaatctttgtttccatttattgcatactagctatgtgcctgcctctgagcttagcatttgatgatcattacattatcttattcaatcctcataataaccctccaagataggtattttattttatttattttattttattttattgatacagagtcttgctcttgtcgcccaggctgcagtgcagtggtgcgatctcggctcactgcaacctctgcctcccaggttcaggctattctcctgtgtcagcttctcgagtagctgggattacaggcgcctgccatgatgcccagctaatttttgtatttttagtagagacagagtttcaccatgttggccagcctggtctcgaactcctgacctcaggtgatccacccgcctcagcctcccgaagtgctaggatcacaggcaagataggtattttaaattgtcatttaacagatggcaaatagccacagaaaagtaaagccactttttcaaactcacaaagtcaaatgtttggcctagttctgtcagactgtaaagcccatgcttttaattggtatctaatactgctttcctatcagtagactatcagattatcattcctaaagatatttaaaagaatgggtgctctagggttggagttcaaaacattaatagaattatactattaaggttgcatgtgatcactttgctgctgtgagagactctggatgctgtgtttgctggtcatttcaaaggctgaagagaaacagacatgcctgtccttgccaaatacattgtttcccctatcattctgtcactatggaagtacttgttttttctgacctgggaataatggtattgtggttattggcgtttttgttacctttcttactagaaattatgcagatatccccaattatatccagatgcacaccttatattccaaattttgttgcctgggattgactgagtacccttttgagttccctgcatcagagacgtgtttacagttgtgcttcccagtcttcagcatttatggtttcatgtttgtcaaatttgtttgaagtataaaaacgataatcttaattctgttactgatcattccttcattctctagctatttgtcacatcatctttcttttgaaacgtttagggaattaagaaattaataattttatactcattctttttccactcacatatctcactggctttgttcagaattaaattgtttttggtccctgtgtactatttccttctattaattaactgacggttgtttctctcttctgtgtttttgatgcttttttttttcttttactgtttaaaactttttcagaagatgtagcgagtgactcaggtgctagctagtgttactgatttcccccccatgttagttaataccatgtcaaatataactgaagaactctgttgtactcacagattatgcccctcatggtcagcagactattcagatacagactttcagggggaaggttttcaaaaaagtgtggctgcaatctgtaaatgcttttaacatctgcacattgcattactgttttcaaatgtttttgtaccacataattttatttaatattcacaactattctgtgagagctttattcttttatgttgtagggttttcttattttacagattgggaaactggtgtggagcggttaaatgacttactcaagattacatagctagttataagtggaaggacaaggatttgaaggaacaggtgtggcctcttccaggaaacagtataaatagtcagactttatgaaggataaattggtaggagagtcatttatctcacttgtctgtaaagaggattctttttctcaagtagagcgtgaagtagattatttactagaaaagcttgaaaatgcatttcagaaaattaaaactgctttgaaattaggtgcataataagaattgcttcagagcctggcatccgttggacattatacacatattctctgtcaatgaggtttacagttaaggtctcttcaatccttattttctgaaatctctttttgcttatatattgagactgaagttagcaattttcctccaggtgtggactttgaaaattaaatatacttattgaaacgtaggttgcgtttatatagtgctaccctccaggattcttggaaatttaaatgtattattgtatgtatgaatcatggaacgcactatagaatctatagtggttatcagttttgttttgggtgtagttcatggtgtttagttaagtctctaaagcagagtttaggatctctgcctttcagttatctgagtgctgtggggctacatacccactcagattctcttgttctaagtggtcttaacactcagttagctctatgtgttggtggtgacaaattttactatatttatgacctaggtctttgagtgggcactgtttcaagaatctaggaaggtactggctactattcaactcactgtcggtttcaattatggtcagagaattttgaaaacaaaaattctgaatgccctatagtttaataaaaagtagttgatccttttgttcaaagcactgtcccacttcacctcccctctaggtttgaagcattcctatgcagacagtttaccgacatgataaacaaaattatccattcatgcatcctaggattttaatgttaccatcgccctccactcaaaatgcaatatgcatttagtctgtaatagcatcactccattttaagtgaatagttgtttcagctttgatttgtaatcacaattaaggtaaattatccttgtttgcctaggactgtcctggttttaaaactcaaaatctcttgtccaaggaaccctcacagtcccggacaaaccagaacaatttcttaaaatactatttaggaaaactggtcacccgaacggcaaggctgtgttgttgattaggctttaggcatgttattgagactatagactaagctcagatcaatggttttgaagattctgtatgggtcaggattacctggagtacttgttaaacagactgctggctcccatccccctagtttggatggagtaggtctgtggtgggggtctgagaattactttagtaacagttgcctaagccatgctgacgctgctggttaggagagtgcattgagaaccactggcctagatcaggctgtgtgctgtgtgagtatatgatgatgcttggttcagaattgtggagaaaggggagctgtgtttctctgcctcacaggtctaagcaccaataacaccaaagggtatttgtatctgaactgtgctcatacagcacaagaagagacgtgctcctgttagaggtgacagaagtaggggaaggattaaaaacagtctagctgtcaaatccttcacagtatggatatattttgattgtttatagtatcttaggcaaactttgatttgataattaatttgagtcttatagtcacaacatctgaaatggatacttcagaaagcagatattcattattatagcagaactgattatagctgggtttagcagggataatggtacccatcttgcctacttctcagttatcactgtaaaaatctagttacataaaaggtgtgagcatgcggtacaaataagatgtcatggtgatgattaaagtgtactttgttgttggacagtatgtttcacagtgctttcatcttcatgttccatttggttgttttcaggtgtcttcagaattcggcaaagtagatgggactgcagacgttaccattccctgtgactcttgctacgatcttacagacttcattgtgctgggcttagatgtcttcagagtcaccaggtacttggttgttcctagatagtgggcctgcctgatcaggatttggtatttttcccactgaattaaaattgttttgcctaagcctcattttgtgtgtcaagaaaataaaggcaaaagagtaagtgctgtgctcctaatccacagctagctggtagtcagcagcctgggaggctgagtctctggtctcctagtctcaaccttctaggcagtgagcattgttaatcacagaacaggccctccttggactccttggcttgctcgtctttgtttctcccagggcctagcgttcacatccacacacatactacatacgtttctgcatgtgtgcatgtgcatgtcagggaaaccacaatttgttctcagctccttactcatgtgagcttagcgaaatcgtttctccaatctgtaccttcttcttcatctgtaaaatagaattatcatctgctctgctactacccttaaaagtagttactgcataaggatgagaaaatgtataaaaacactttgaagcttttgttacaaagggcagttagtaataatgagtaaatgataaataagccttatagaacaggaagccttttcatctttctgtcctaaacacccttctattttataaatttttcaagtagattaagtttattaatttagataatgttttctttttctttttgtctctgctctatttatttaacattggatatatagagaatggtaattattattgaatggattgaaaacaagaatagagtctctttgggagtatctgtgttttttgtttttttttttttccatgtaattgggggcattttctgctccatggtcggtttctggtggtttgtgaattcttgccttctgccaagtgttttctccctgtcaccaccctgctactactctttgtgtttaccttcccagctgccctgccttatttcagagttcagagtcaaattgtagccaaccatttctgacagccttcctagacatcactgaatttcagctaattaatagatttaagggatgcgaaatctaggccaattcagaattttacttcatttgagggttttttttccagaatatttatcttaagttacaaaatgttgtttcctgttaattgttttcttatgtattctggtaaaattttataaacccagtaaaactctcttacaacaatactcttgggagataatggcttgtattcgttctggattgtcacataggaagagatgtgtttaggtatctaacttggtttcagcattgtacttgagacatctgtggtaggacagaatctgtggcaaatgtggcatggcatacattatatatggatattcataaactgcttttgatagattgacaaacatttccagttactgaaccagtagcactgttccagtcagtagctcagtaatatccatttttttgtctgtacagcagattgtatgtatgcatgtgtgttttgcccatttttataaaaatgtgttaaaagtaaaatgctaatgctgatagaaaattgacccgcaaatatgtaatgtttttgacaaagatggaaatcataaagcatgccaaaaatggtaaacctttagcttcagctatcccctcattagactttaccttcttactgtgtattattacaaagattgtgtctagaagatactttataatgatagaaggtattttataatagggtttcttatcacatatacttaatattcaacttctgtacatttaattttcatgtttcctcaagaatatattatacaaagtcatagcatttgacaaaattccttcataactctgaagaaaatattctatgtattgtttgtgtgagttaaatacagtggctctgataaaaatgtcttttgatcagtctttaaaaaaattaaactgaggacaggaaggtaaattaaaggggagatttggagacttgtggtaactggtttattgcaacttaatgtgcagcatcctcattagtcaagtatcatgtgcctacctaggcatgaaatagctatttttttcctgatttaaatctggaaagtttcagttgtagtacagtttgaatagttgttgttgtaaatagccactggactttttaaaaaagtatttttcttcaaaaacagtgaaggtcatcttgtatccatagagaccacatgtactttcctcattatttccagcattatttatataatgggtagagttatttacaacattaaacaaaaagtatttcagagagcaaccgttaaatattatcacagggtaaatatcagcaactgaaatccttttctcatagtttctcaaaaaatttggtattaggaaattaatagtctctcagaatttgtatattggttttcttcagtagttattctgtagagtgtgtgtgtacatatgcatgctcatgtatgtatgtatgttcatttcttaaatcatttcataaatcactgtgacttaattgtggactttaattgttttcatagtttttttccccaaaagaaggttactttacatattttattttatttttatttttattttttttgagacagggtctcactctgtcgcccaggctgcagtgcagtggcatgagctcagctcactgcagcctccacctcccaagctcagggatcctcttacctcagcctcccgaatagctgggaccgcatgcaccaccacacccagctaatatgttgtatgtttttagaggtagggttttgccacttagcccaaggctggtcttgaactccgggactcaagcgatctacccatccacctgcctcggcctcccaaagtgctgtgattatagacatgagccactgtgcctggcaattttacatattttaaattaaagcaaatcttggtttttgatggaatgcagatttacttatatttcacttagtctttttcctttctttcagaaaagtggtgtggaaacaaaatggttttagtatattgccttataaacaaatttaagatcatgagtttcttttattatcctctttgttttgctcatttccttgaactgtacatccctaacctaaatcagctggagacaggggaagaaagtgttagattcttactcagtttagatcctctgccaggaaaacccactctattcattgtcaactaaattaacgcttttttaaataaaaggagtcatttttaacaataacgtcagggcagcaggcatccatgaaatgtatggtcactgatcattagggttatcattctaatgtgtttactattttgaaactctagggagaagaaaacttatttttgcatatgttggaaaaatgtatcctcatgtaggatatcagggtaatatctttaatgtttcatacttaccaagataaatttgtaatgcgtattttcttttaaaattagatttatttaggagaaattgcacttggtgaaccactttctctttaattattagcattaactttatcatttttgtttcaagatgtcacagctattgttcagcactagaaattatataaattattagctgaagatgatgactggcaacatttatgtctgttcctcctcttaaatttcttgttcagaaagtctgttgttgtaaacatcc

SEQ ID NO: 563 - DNA, 4383 bp, Homo Sapiens
agcaaagacgaccagccgaggatggctggcggaggcgtggggcaggccgcaggaccctcgaaggatcgtgtgagaccccgggcagcctcttgggaggccatttcgaggagaaaaccttgatttctgcctcaggaccctgggcctcagttttcctatctgagaagaagggcgaagagctgtgcccccgaccacacccgtcggtgatggggcaaaccgagggcaagcagaggagcgcttcacttttggtcatcccttgggccaccagggccttcccgtctccgtcttcccatcgcaggtcctggcctccttcacaccactccaggataccgcagcatctcccccagcgcagcagacggagggcgcttcacatgcccccggacctaagcccactctccccttcaagatctggactccacttttttgcaacactcttaacttctttggaagctgggaagcctcctactcccttgggcctctccaccctgccctcagctaactcgtcggcaagccccagcctagacattgcctgttttgtgaagacatctagatgctgggctgtctgttgagtgccccaccctgtgtttgagcagcaccctctacttcccctgttctacttgcatgtttatgtgctcgtcttcctcattataagatccacaggggaggggccatgtctatattattcatacttacagtccagtgtctagtatctggcacgtagtaggcactcactagctattgagatataaatatagatatttgttgaattgaaaatgaattgggccgggcgtggtggctcacgcctgtaatcccagaactttgggaggccgaggcaggtggatcactaggtcaggagttcgagacaagtctgaccaaaatggtgaaacccagtctctactaaaaatacaaaaattagctgggcgtggtggcacgtgcctgtaatcccagctattcaggaggctgaggcgggagaatcgcttgaaccccgggaggtggaggttgcagtgagtcgagattgcaccactacactccagcctggacaacagagtgagaccctgtctcaaaaaaaaaaaaaaaaaaagagaaaaagaataaaattaaaaaaaagaaaataaaggaacctcattcacatacacctccaaaactctgatttcctaaagttgggcatttctcattgctggaggtgttcagttagaggcatgccgcccccttgaagaaatgtttatttcatttgtacagtgggttgggattttacctgaatgctttgagtacccttttaatcctatgatgctagagattgatagacccatgcctattattcctgtcagttctccctgaaatgtcatcagttcttcatgttccgctatttctagctgttggccctactcgtttctgtgcctaaatgccctacctcccactccttttctgagaaagatcttctgccctgtcagttatgaagtaaagatgtcctaagattcctgctctttcttttttctttctttctttctctctcttttttttttttttcgacggagtttcgctcttgttgcctggagtgcaatggctggagtgcaatggcgcgatctcagctcactgcagcctctgccacctaggcccaccttggtctccccaagtgctggcattacaggtgtgagccactgtgcccggcctcctgctcttctttcaaccctctgctcagcatcttaggcctcattggtgatgtcccaccttgctaggtagcatctttcctgaatatttctccactaaacattctgatgttggctagatggcctagttaatctacacatttcattttatcaccttctccagatgtttttttgtgtatgtcagctgatacactctggggagaatgccttaatatatgggaataattaactcatggccaagaaggaaataaccaaggggacttttactctggacctaattcaaaccaaagagacagagcctgagagaaagcagctctgtcatccttgagttagtaacatccaggaagggaaggctagggtgggggagtgagtaaaacagatggcatttagggaagaaccaacaggactttaagaggcatggcagaggggctttgatcctggctaaaccatcagggaaggcaattggagctgggtgaacagatggggtcttattactgaagagaaaacggtaaggaggcagggggaaatgggacgtgtgctaaagcagagtgcctcattcagtggatgcagtgagagcagaggctgttggaaaagtggatcagggaggaccatgccaccaggtgggcatcagcagagtatcacccgagtattgcagagggataccaaataagtccacctgaagccagagctgaaaccctgtggaggtccgtttaccccttcagaagtagtgtaccaccatccatctaccactggaatccaatttcagttttggcaaattgttataaataggaaaaagtcagggttccacaattctggcagcacccagagactataacagcatctgcacagccaagtagagttaggaaacctggatcctaatcctgactttgcctctgattagatgtgtgatcctgggctggagctgttttttcagttgtaaaatgctgtttattggtgttaggtagcagctaataaggctggaggtggggctgggtgtagtggctcacacatgtaatctcagcagtttgacaggccaaggcaggaggattgctggaggccagggatttgagaccagcttgggctacatagtgagactctgcctgtactaaaaattaaaaaaaaaaaaaataactcagtgcagtggcgcatgcctgtagtcccagctactcaggaggttggggtgggagggttgcttgagcccaggagtttgaggctgcagtgaactatgatcaatcacaccactgcattctagtagcctgagtgacagagcaagacctgtctctaaaaaaaaagaaattttttttaagggtggaggtagggaaattcaaagctacttactagctgtgtgaccttgcctaaactacctccttggatttgcagtctgtttatttgaaaatgtcataagggataaatgagattccttatgtaaagtactttataaatattaagcacttaccaaatgttagtctgttttcacattattcttcttggattaccagaaattggtttgaccatgaataaacaggagataatttcttgggtaatctgagtttgaatcccctttctctctcttactaattgtatgactttgattaggttatttaatatttaattgttctgggtctcagttttctcatttgtgaaattaaaatgtgttcttcagaattgtgagggttaaatgtgataaaaggcctgactcatatgagaaaatgctcaatatatttgttttgtcatttttaaggggtggttttagggcacagaaccctaaaggaatgaatggaattctaaatacttcgaagctagagtagtgaaagattccaggggaacacagtgctggccttctcccttcttcttggggaagaaaagatctcagtgaagttccatgggtcttctcacaatgttgggagtcttcctggagtgagtcaccatgcattccacaaacaaggcagaaatgacagtggtgttattgccccacagttgggtggactcccccaagatccaggtgtgatcagccctggtcctagtgatagaccagcccttctcctactacccacggaagctgcctcatcattgccaccatccgctttctcaacaggagagacttgatacagaaggcatagtccctgctctcaaagaacctgggacaagttggggaggtgcagctgagttggtaaagaacccctgggtagcataggagagtgaattcatagattctatagacaaaccccatacccatacttggaagagttgaggagtgactggttgtccccctagggccaagagctgctgcctccctcccctcctccttcttttgcacagctttattgagcataattgatatacagtaaactgcacactttgatggatttttgacatacgtctgcccctgtgaaaccaccaccacaatcaacaatgaccatctccatcactcattgccttgtacccatggaaatccccccttgctgccctcctgccccactcccagtcaaccactgacctgctgtcagtgactatggattagttcacatattctagaattgtacacatgtagaatcatacagtatgtgcacttttttgggtctgtcttctttcactcagtgtcattgttttaaggctcatctacgtcattgtataaacagtttgttcctttctattgctgagtagtattccattatatgaatatactacaatttgtttatccattcgtcaatggactttg

SEQ ID NO: 564 - DNA, 4410 bp, Homo Sapiens
cgctaatgtgtttggtataatttcatatattagctttttaaattatattcatctaagtccagtaagttggataatatgttattttaatttttttcagctgtttcttctcatttcacccaagacctcttgccagagcatggtataaaagattcatttcaaaaagtgatactgagaagatatggaagctatggcattgagaatttacaattaaagaaagattgggaaagtgtgggtgaatctaaggtgcagaaagaatgttgtaatggacttaaccaatctttatcaactacacataccaaaatctttcaatttaataaatgtgtgaaagtctttagtaaatcgtcaaatctaaatagacataagataagacatactggagagatatcttccaactgtaaagaatgtgacaattccttttacatatcctcagttctaactccacttcagagaatccacactgcagagaaatcctacaagtgtaaacaatgtgggaaagcctttaggcactgctcatgctttcttgaacatgagacaattcataatgaagagaaacattacaaatgtaaagaatgtggaaaagtctttaaatccttcacaagcctttctaatcacattataattcatactggaaagaaactctataaatgtgaagaatgtggcaaagcttttaaccacagttcaaaccatgccaaacataagaaaattcacactggacagaaaccccataaatgtgaagaatgtggcaaagcctttaactggttctcatacctaactctacataaaagaattcatactggagagaaaccctacaaatgtgatgaatgtggcaaagcttttaaccagtgttcaaacctcactaaacataagagaattcatactggagagaaaccctacaaatgtgaagaatgtggcaaagcttttaaccggtgctcacaccttactgaacataaaagaattcatactggagagaagccctataaatgtgaagaatgtggtaaagtctttatatcttgttcaagcctttcaaaccataagagaattcatacaagagagaaatgctacaaatctgaagaatgtggcaaaacctttaaccactgctcagacctcaatgtacctgagaaaattcatacctgagaaaaatcctacaaatgtaaaaaatgtggcaaagcctttaatacctgctcatgtcttactcaggaccagagttcatattgaactaaagaattataaatataatgactgtcacaacacctttcacagaaaaaaataattttaccacagattaatttgttcattaatggaactttaattctgtggttttttttttttttttttggtctacataaatctgtccttatgccagtactatattgtttaattactgtaacattgtagtaagaatttatatcaggagtgtaagttactgaattttgttatttttcagaattcttgtgtgtttgattttctttatatgtttatatggattttaggaagagcttgtcaatttatattaaagaaaagctacattggaatttgcattgaatctgtagataaatttgttgggtattttgatcttcatattcagtattgctatatttgaatattgagtatatctcagtttattcagctctttgatttctttcagcattttaaataattttcagtgtatagtatgtgcagttattttgttaagttcatttctaatttttttttctaggatactattaatgaaattttaatttaattcttattttgtttattcctataatataaaagtactatctaaccttgtatgttgatcttgtggcattgatgaacttctatattagctcaagtaggtttttatttatttattactttattttattttattttattattatttttttttgagacagagtctcactctgtcacccaggctggagtgcagtggccggatctcggctcactacaagctctgcctcctgggttcacgccattctcctgcctcaacctcccgagtagctgggactacaggcgcctgccactgtgcccggctaattttttgtatttttagtagagacagggtttcaccatattagccaggatggtctcgatctcctgaccttgttatctgcccgcctcgacctcccaaagtgctgggattacaggcgtgagtcaccatgcccagcctcaagtaggtttttaatgaatttcttatacttttaaaatacaacattatggcaataaaagactattccacttcttttctaatctggagattgtattgatttttctagtgtaattttctggctcatacctccagtacaatggtgaatagtggtataagtagaaattctcgtcctgttttcaaacttgcagataaagcccctagtcattcaccattaagtatattagcttttggtgtggagtttttcatcttggctcactgcagcctcaacctcttaagctcaagtgatcctcccaccttaactgcctgagtagttgggacaataggcatgcaccaccatgcccagataattttttttttaatattttgtaaagatggggattccctatattgtccagaatggtcttgaactcctggctttatgcagtctttccacctcagcctcccaaagttctgggttacaggtgtgagccactgcgccgggccaattttggtttttcatggaggacttttagcaggtctcaaaagttttcttctaatagttttcttggtgttctatcattcataggtgttgaatttaccaaactttttctatttcaagtattacatttttactttgttcaagtaatattgtatcatattaaatgaacattgcattgtgaaaataccctgcttagtcatggtatgtaatcatccttatacctttttgtattctttttttaaatatttctgagaatttctgtgtctaaatttaaataggatgttgtttcgtaatcatcttgtgattcttttgtctcctttgggtattattggctaatagatgaattaagaaatgttacctcttctactgcttgaagtttttgtgagaaattgatgtttttcattaagtgttgatgaaatgtacaacttaagcagtttataacagctattctatctaaaaagatataatttttttgttctatggatataagtatattctattatatatataatgaaacaattcataggatgttttttcagtttacttttgtaatccatctctatcggtattttttatttcatagtatgtcatgaacaattattctaggcacttgacatggaataatttgaaaaaatagagaatgagtcccgtactacaatcaataaataactcaaaattttttccatttttaggatgaagaatatgaatatagttctgttacgtaatatttgtgtttactgtgtgagacaaatgagttactgaatgtaaaaataattagtaaaactgccctttgattttggaatgtatgaagcaggcaaatgcccctaccttctatttttatcaatatttagataaggcagacaaataaattttaataagatatacagaataatcttgtatttgaagaatgctatgaaaaaagatagtttggaggagtagttagtatttggctcatataatgtgttaggtaactattctaagccattaaacatttgtatgcttaatacctaagagtttaaagtgaagaaatcaaagattcattgaaaaagaaaaattaaattttaaaaaaattctatttttaattgaaaaataatagttgtatatatctgtctacagtgtaatattttgatatatgtttatgttgtaaaatgattaaatcaagttaatgtttataacctcatataatttttgtggtgaaaacatggaaaatagtctttatagcagttttgaaatacacattgtagtcaccattctgtgcaattgatcactaaatcttatttctcctaagtgaaacttggtacactttgaagaacatttcccctctttttattcaccccatctcctagcctctgtcacattttcattcatactaggtaacattaagatcattatggaaattaactttttggtgccccacaactaaatgaacataaataatgttaactttgttaggaagttatagtaattacgcataggaacaaacggcagctatttttgccagtaaacaaaggatgcgcattattttcaaatattagatataagtattttaggtggtaaagtcttaggcctaaaatacgtcattgagtttattaccccagaaacccagcaggtcatattttctgaacattgtaaataacaatagaaattatatactaaaatgttaccagcaagtactatctcaccacatgaaaattgcattgaaattttttaatctgtggttcaaatggaagactcaaagagattcttttatggattcagg

SEQ ID NO: 565 - DNA, 2032 bp, Homo Sapiens
aaatgtactactggtagtcatgtgctcactatctctgccttactcttgattcctgcctccagtgaacccaggatgaaggagtgtttcgactcatctgactcattatgccttctttgccctggatcttacacagaaatgctctccataccttgccactgctgctgggaaggaacaggggaggagtgacattgagattcaagactatttttcctacctcttcagtgcctctttcagccatatgaagttaaaaccaggtaatgggagaagaggagagtaaaagtgaagaagaaagaggcaaaacaagtgactagaccacacgctgaacaagttgtagctctcatttacttttcagagaatgtaaaatgttacaactgctttggataacagtttggcaatttctttaaaagttaagcatatatatatatatatatatatatatataatcatataatctagccatttcacacatcagaatttaccctcatccccaaataaaagcacaaagatgtgaatgcccatagcagctgcatgtgtaataactcaaaactataaaaaactcaaacactcatcaacagtgaataattaaacaaattgtttacattgcaaaaacattatcagttgaaaggaatgagctactggtagcagcaacaaggtacacaaatctagaaataattatgctgaggaagagaagccagaaaaatataatatatattatattatctcatatatattaaagaatagagaatgcaaactaatctatagtgacagaaaacaaatcagtggcaatctgggaatgagggtaaggggtaagaggaagggattaaaatggggcatgagtaaaattttggaagtgataagtatatttattatcttgactggttatggttttacagatacatacttaacggtgaaaactggcagattgtacattttaatatgcatagtttatgaaatgtcaattatatctcaataaatattaagattatataagaataatctagagaaataaaacatttttaaaaaaattatagtaagagttgttctctaaccattgtagttaatcagttttactaaagaataaccacatataaaaccttgttcccttatttacagaaagtttctcccgtacagtttgtacactgtctattcatgtgagctaatgctttaaaaattaacatattaattttcctatattatatgaacctagtgttttatcccaataaattaatcatcacattttctttataggtgtttttttgtggaaaaaatttaatcaacccatatcatttttgtgtgcgatctttccttagtgaacattaaatctaatcatttgttatttgcatttgaagtaattattttaacatgggctctttcctaagcactttgaaaattagtcctctaaagccttttgttgtatataactttctctcttgtgttttgtataattattattatatagtagtataatttaaaggggaaatgtgcaataaacccatatgctttattattaaaagtaggtactgtaagttttactcctatgccaattggatggaagatcaagagttgtgatgatcgggaggctgaggcaggagaatggcatgaaccaggggggcagagcttgcggtgagccgagatcgcaccactgcactccagcctgggtgacagagcgagactgtgtctcaaaaaattaaaaaataataataaaataaaataataaaaaaagagttgtgatgatcattttcagtttttagtttaactgaagataacagaaacagtccagaatggtcaaactttgacatttattaaaacatttagagacactaaaacatacaaacaatttttggtggttaagaccatgtgctctggaataagaaattggtatttaaattctttctatttactgttacatttaaggctttgtttaaatgtttatgtgtaaaaagatcaaaagcactttcatatatttctttaaataatgtatgccattcaatttttgccgaaagagataataaatcagagcagacaatgaaga

SEQ ID NO: 566 - DNA, 3923 bp, Homo Sapiens
aggttttcagtttcagtttcccagaaaggaggtgtctctgtggtgacgagcagggcttcatccagtgcctctgtccccaccgaggggactatgggagacatggagggtgtgtgagcaacaggtgagactggagccagctgaaaactgggagaccgacccagccaacaaacaatgtcggtctctgtcttggcacctgcaggaaacaagctcctacttccagaaaaagtgctcctgggactccaggataccagccttgtttcccatatgagtagactctcccttagctgggaaagcctgacgaacgccatctggccccttgatttacaagacattaagggctacttacccaacccccttcctcaaagagttaacctgcgtaagcagatcctcagcatttcaaaggagcccaattagctgataaggtactggaacaaacaatgtacgaagttcccaggattttgctcaaaagcataacaacataaagccttgagtctgtgtctggcatagcatccatatctaactcttatgaaggatttagagcccggcacctggttccgttgctttttttgtaaccatttgtcttttaaattgtttatttctctgtaaccatttgttttttgattcttgcatgtttttacttctgtagaattattgcatttgagctccgctccccttccgaaccaaggtataaaagtaaatcaagccccttcctcggggccgagagaattttggaaagtcaagccttctcttggctgccggcttaaataaaggactcttaattcgtctcgaagtgtggcgttttctctaactcgcttgggtataacactttgagcctgcgaggcagagtttgcagtgagccgagatcacgccactgcactccagcctcggcaacaagagtgaaactccgtttcaaaaaacaaaaacaaaacaaaacaaaagaaccctcacaatcttcctgcacccaactgatgaaatcaccattgcaaaagttatatcagtgagaacattagaacagtaagctaagctaacccaaaccccaccttacttttcccttaattattcctgggctactgggtcgagctaactttggaagacatttaggctatggtttaaataacaggccttgccaaaaactcaaccacttatttttttgagacggagtcttgctctgtcgcccaggctggagtgcagtggtgtgatctgggctcactgcaatctctgcctctgggttcaagcaattctcctgcctcaacctcctgagtagctgggattacaggcgcatgccactgagtagctgggattacaggcgcatgccaccaagcctggctaatttttgtatttttagtagagacagggtttcaccatgttggtcagactggtctcgaactcctgaccttgtgatccacccacctcagcctcccaaagtgctgggattacaggcttgagccaccgtgcccagcctgctttttttttttttttttccttgagacagagtctcattctgtcacccaggctggagtgcagaggcaccatttctgctcactgaaacctccacttctggggctcaagcaattctcctctctcagcctcaggagtagctgggattacaggcgcctgccaccaagcctggctaattgttttgtatttttagtagagatggggtttcacccatgttggccaggctggtctccaactcctgacctcaagtgatccgtccaccttggcctcccaaagtgctggggtgacactgtgcctggtctcaaccaccctttttttttttttcctctgtcacccaagctggagtgcagtggcatgatcttggctcactgcaacttccgccttctgagttcaagcaattctcctgcctcagtgtccggagtagctgagacgacaggtgtgcaccaccaccccctgctaatgttttgtatttttagtagagatggggtttcaccatgttggccaggctggtttcgaactcctgacctccacccgccttggcctcccaaagtgctgggattacaggagtgagccatcactcctggcatagaaagtttttctcatccattgtcctcctcctcttctttcttcatcttcctcttccacttttttccaggcaactttagcaggaccctttgcaccgtcaaactttcctttcaacttacagtcagcaacctcttcctcatatttcttcttcagctttgccgccttagtgacgtcaacctgcttttcactgtcacttcagctattccacatctcacccagagctttttttttttttttttttttttttgccacatctccaatagagatgccagggtttgcggatttgatcttggggtggaattctgaacagaacatgaagaatccagacagttggttgggtgtgatggctcatgcttgtaatgccagcactttgggaagccaaggcaggtggatcacctgaggtcaggagtttgaggccagcttggccaacatggtgaaaccccatctctactaaaaatacaaaaattagccagacgtggtggtacgcgcctgtggtcccagctaatctggaggctgaggcaggagaatagcttgaacctgggaggcggggcttgcagtgagccgagattgcgccactgcactccagcctgggcaacagagcgagactccgtctcaaaaaaataaataaataaataaataaattttaaaaaataaaataaataaattaaataaaataaaaaataagagtccagacggtggccttttggggacattaggctctttcttcttgcttcccctttagctgctctataatccttcatttcccgatcctagtgtactttatccgcctttgccatttcatcaaatttggacttctctttcactgacactgtcttccaactctcagaatatttcttggaaaattctgcaaaattgacagggacctctgggtttttcttcttcttcttcctttttttttttttgagatggagtttcactctgtcgcccaggctggagtgcagtggcacgatctccgctcactgcaactttctcctcccaggttcaagcgattctcctgcctcaggctcccgagtagctgggactataggcgcctgccaccatgcccagataatttttgtatttttagtagagacggggtttcaccatgttggccaggatggtctcaatttattgacctcatgatccgcctgccttggcctcccaaagtgctgggattacaggcgtgagtcactgtgccaggccggtttttcttcttatgttcttctctgtacatctgcacaaaaaaactataagcagacattttgccctttggtttcttggggtcaccattagccatcctgactgtattgtttgctagtctgggcagcgcaggacacttgttcgctatttttctaaacttttcccccaatgggtgtaaaaaagcatattattattattattattattattattattattgagacgagtttcgctcttgttgcctaagctggagtgcaatggcgcgatctcagctcattgcaacctccacctcccgggttccagtgattctcctgcctcagcccccttagtagctgggattccagacgcgcaccaccacgcctggatagttttttgtacttttagtagaaacggggtttcaccatgttaggctggtctcaaactcctgacctcagatgatccgcccgcctcggcctcccaaagtgctgggattacaggtgtgaaccactgtgcccggcttaaaagcatattattatagtaaatactttttttccctttctttctttcattttaaacactggggtctccttatgttgtccaggctagattcaaactcctggactcaagcgatcctcccacctcagcctccctgttaccctgttgccatgacagccctgataaaataactgggaaagttctct

SEQ ID NO: 567 - DNA, 2031 bp, Homo Sapiens
aaatgccttggaagagacctcagaggataccagtccgggtttaggatgcatttgctgattattacttaagtgtgaatcatggcaatacagtgaaagacagtgatttactgcttttgagggcgtgcatgtatatgattaacggatggaagtgcaggactccaagatttacttccttccctttccagcagaattacctgagacgagtaaaatctactggtggagtcactccattattcttatctgtggagatctagatcttgatttgaaagtttctgagaaaatcttcagctcagacttgagggtcaactttaccagctgaagtgactacatcctgcctgctttcagctccagtggaaaatgcattaatcccagagtctccgtgaggtttcctgtttgatgacataatcagaaaatcctcctcacattgcccttggggttgctgtctggatgttatgttgtcttggtgggtgtaactcagccatcaaaaaaatcagcacaggccataaactcaggacctgaaatgcattaatataatgttaaacgaaataacgctgtgggtatgtctgcagcactggtagggaatttcattaaactgcagattctccctggcatcagatgcattggctggtgactccggtacatatggcatgagctgctgcaatgccactagcaggaggtatttgaactgctccagtgtaagctgttagactacatctcgtggaaaaataacacacacccttgactaccagagtttggtagtgttgatttaagtagttcttcccttccattcccctctggggcagcctgtttacctaataacgttttgcctttggtgttgatcacaggaagctgcaaaaaagaaaactagtgggaagagtcagaaatagaagatgaggatacactttaaaatgagaaaagcaaaagatggcatctgacatgtagagtgggttttaaaagttttaaagataagatattgtgaggcagaaacttcagtagctgtgaatatagttggaaagaagaaaccttgatataaaagtagaaccaagagtaggatatttagataccaaagggcacgtacaattttacaagtttagaagatattggcataggaaattgagcatatgcttaaatatggatttcctttgctatttggagaattttttatattttttttattgttttggtaggctgccataaccctccatttggttgtcttggatggaatatctcttgccttggatcttggaaatccaagcttgattggcacttggtcaggatgagaacaaggaatgggcctcttaggatgttttacaagttctagaagttacctccatgatcctccctcctgttgttgtaccaaactctttcttgcatgtgtcttcctgggggtggagagaggtggtgagggagctggtgggagaagcaggcaagatacagcttgatagagcttcactggagagaagttaaagaggaaggagaggtctaagctctagccagttgaaagcctggggtgatgtcaccattcctacctccttatatcagaaatattcttgggttttccataatgtattccaagcagcgggacacctttcacagatgcttctcctgtgttaggggaatctggactaatataacactaggagggagaaaattgtgtttctttatcgctactgtgaacgttgttgttttttaaaatttacagctgactactgaataaactctaaaacttggagttctggatttcaggttctgtgatctgttttcttgtatagctctgtgatggttacgtgaccaagctgtgagcatttactctcaaaacagcttcatttaaaccatcctatgccttgtactagaataatgctaccccagagcgggaagggctctgaaagatcacatctaatgggtgaacctctttacccaggtgtgttgtgacaagagtgggggagactatgatcctttttattctagatatgtagcgcaggttggttgtgttagtgaatgtaccatctcacacatcatattgagctgaat

SEQ ID NO: 568 - DNA, 3955 bp, Homo Sapiens
gaccgcgtccgaagaccgccgaggcctcccgcagctccgcggtgacacccgggtcaggggcgcggggccgggcgccggggattgtgggaggcgcgggggggcgcgccggccgccttcggagccccccaactcgcgtcctgcaaaggccgccgggccctgtcgagaagacccgaccgcagatggcggggaggatgctcccggcggcgtgggaaccgggtctgactcccgagccaccgccgcttccgcaggggcgccggccccgggaaagtcaagtcataaatccctgaatctaaaactccattctcagagaaaaggcctccaaggacgggcgccgtgcgcggcaactgcctgcagttttgaagccctttgactatttcataacaaagacaaggccgggcggcttggacgcttaggaaaatcctggggctttgcaaaaacaacaggttaatctagtcgtgtgggatgatcaccaaaacaagacaggaaagaagaacaccgtgtcaatgctgaaaagccagcccctgtgagccccaaagtgcacgttttccacagtcccaaggaacacgtgactgtgtgtttccacacttgagaagtcaggataagaccccttggataatggaacaggggatgggggtgggagcaagcaccctacctggtcacctgcttaacttagaaaccagcttttaaaacctgtaactgcagtatgagctacgatcaaatttgtcttaacgtattttttttaatgtttttaatacccagaacacagggcttctactccagggtttcctcgccagggaaccccaaacacacaggacctggagaagccgggtagagctggctcctggccctgcgcttgggtggtcggctgccttaagaagaactgcaccccagagacaggctcgcagctgccgaccttatccactcgccctttctgctggagcccaggcccagtgctccagcaaggaggctgagaaaatgctgaagactgatgcccacgggggacagcttgggctaaggataacgtttgcaaaacaaacctttaaaaacccatagcaacctgtttcctagagcacactcttcatctctccacccccaaactagtcccgactcggatcctccttttcctatcctctttctcttgctctcccgtctcctattcacttttcttctcctttcctcttgattattataaacaaatgctttccaagtcttaccgccatcatatgtgtacatatgcaacccttactgttaccaatttgttgaagtcaagacaggaggaggcaaagtttaaaaatcagaagtattgcaggaaatgaaaatggagtgagtgttgcctgggtatcataattttttttttttttttaacagttcctctacttggctctcctccaaaggtacgcggccacagcaggcaggggcttggcagtgtgggaggagacaccacagaagacagggaagaactaccaggccttggttcatctccacactggcgagagaggacgtgcagttacctgctacctgttcgactcagtcttttacgttggagtaacttaacacattgctgcccttaactttgacttacttgcttttaaagatgatgaagctggccaggcgccgtgactcatacctataatcccagcattttgggaggcccaggcaggtggatcacgaggtcagcagttcaagaccagcctggccaacatggtgaaaccctgtctctaccaaaaatacaaaaattagctgggcgtggtggcgcgtgcctataatcccagctactcaggaggctgaggcaggagaatcacttgaacccgggaggcagaggttgcagggagccgagatcgcaccactgcactccagcctgggcaatagagcaagtctccatctagggaacaacaacaacaaaaagattatgaagccttaggaagaacagggatattcacctgctgctgagcccccctccgctttgatcttgtgagtctgcactctcctgctcccctgtctcagtctcctctagctcctgttccttctcctaccttgtgttctctgccaatgatatgactggggctactttcttttttccttctcacactctcttcttgctaatttcaaccaatttccctgcatcatctccacctgcaagctggtcctttacagcagagcttggggccctgctgcccagtagcactctggacaccctcacatcatcatcatcatcctatttttatttattttttggaaacagggtcttgctctgtcgcccacactggagtgtagtagtgcagtagtgcgatcacggctcactgcagccccgatgtccctgggctcagatgttcctcccgcctcagcctctggaataactgggaccatagatcccttccactgtgcctaatttttgttttttgtttttgtttttgttttgagacggagtctcactcttcttgcccaggctggagtgcagtggcatgatctcgactctctgcaaactctgcctcccgggttcaagtgatctcctgccccaccctcccgagtaactgggattacaggcacgcactactgtgcccagctaatttttgtatttttagtagagacagggtttcaccatgttggccaggctggtctcaaactcctgacctcaagtgatccgcccacctcggcctcccaaagtgctgggattacaggcatgagccaccacgcccggcctaatttttgttttgttttgtttttttgtagagacggggtttcaaccatgttgaccaggctggtctcaaattcctgagcttaagcaatcagcctgtcttggcctcccaaagtgctaggatacaggcgtgagccaccacgcggggccttcatcaccctattaatatatactttctgatacttaattgccaggcaataagctaaacccttttattcactgtctcactttaatccttacagggaagtatcggctgccagatagggagctgagacttcaagaagctaaataaggtgtccaacaccacagagcatggagcaaaggacacgggactgcaaatcttcctaactcgtgtgctcatctggctatctcaccagggccttaaatttaatatatcccaaactgaactcatctttaccccttcccactttgcactcctcaaatgtccttgtttaaaatagttacctttatctttcctaacccagaaactcaaaacctggcatcatctttgacttctctctttaccttcacattcaacagtttccaagacttaaaggctttatttgtaggatctctaccactgatcctctacagtttcacacctacatcccattctcgttcccaaatccccataactcctctcctggcccatcccttaacactgaaatcctggcttggaaaatatggtcacattcacagcagctgtccccaagaaggaagccaaggcaacagtatgcacaatgaaatcactctgggagaaactcactgccatgttgtgacaacactatggagacgcccaggtgagggactgaggcttcctgccaacagccacatgaataagattgggaacagatcctccagccccagtcaagccttcagatgactgcagtctcatgaaagaccctgtgccaaaaccacccagcttgatgaaataatctgtacaacaaacccccatgacacaagtttactacaacaaacctgcacatgtacccctgaacttaaaagttaaaacaaaaccaccaccaccaccaccaccacccagaaaaaacacccagctaagccacttctgaattcctaacctacagaaactatgaaataataaatatttgtattttcaaaattagctgggtgtggtgccatgtgcttataatcccagctacttgagaggctgaggcatgagaatcacttgaacctgagaggcagaggttgcagtgagccaagattgtgccactgcaatccagcctgggcagcagagcgaga

SEQ ID NO: 569 - DNA, 2170 bp, Homo Sapiens
gggcaatgaggggcacagaggacagtgtgtggctatctctgggtctctgttctcccaggtggaccagtgggggttgtggcgatgctgtccagggtgaggtccagctacggttgccgtcctgtctgtcagcaccagcacccagcacatctgtagggcctgggccccggacccagcctgagggttatgaggaggtttcctgaaggagaaaagccagagtggagtctggaatggagcaggggggaccatggcctgccctcagtctgctaggtggggctggaacctggggttttgcttgggtgtgaagaaggaagaggctggggatgcagctaggtgctggttcctcatagaccgagtcatgatttatggggaccctcaattatatccccttagcaggggccacaaagtctcaaatctgcccagaaatccacacctcggagctcaggtgaggtcttcttcaggttctccctctgcagtgcagatactgtcagaaagagcaagctacaaatggagaagtcaacaacactctagtgagaattaccctgccaattaattttctcagaaatcggggactcagggaccgcttgctgccgaggctgccacctcagctgcctgtctgtgaaatgggtccatgtgtccccatgccttggcccgtctcctcttccctacaacaggctgctgtgcagcctggggccctttccaggccaccttctccatctgctcactgaggagggacccctgagtcagcgaggctccagcttggctgcacccagctgaaaggttatcctgctgataccccaccacttatggaatgatggaccttttccccactggattagaatgtcctttttgtgtatcatcgaccctgaacaacccaagtttgagccgtgtgggtgcacttctacgtggattttcttcctcctctgtcacccgagacagtaagagccacccctcctcctccccagctgactcaacgtgaagatgacgaggatgaagacctttacaatgatctgcttatgctgaatgaatatcttttctcttccttactttactttattgtaatacatgaagcatacaaaatgtgttaaaacccgggaggcagagcttgcagtgagctgagattgcgccactgcactccagcctgggcgacagagcgagactccgtctcaaaaaaaaaaaaaaaaaaaaaaaaaaaagctggaactgtgtagtcccagttcctctgtgtagccccccaagtctgctctatttcaatcttctcttaagggaactccttccctccgtttttcttttcctccatttgatacatcacacttatagatagggcatcttccctaattactggcttcatcctcaattcccgggacccataccttcactggcttcctaaatttatttaataattctcatatacctttgagaagtttctaatgataggcaacaaatgaatattgactacctttcttattttcctttattcaccaaaatgatttttaggatgtagacaatctgtatgcttcaacatacaccaaacttaccatttttgaaatattttacaatctacttgaaaagacttctttagaccctatattcatgtattgtaatatttatcctcttttatggctatactcaaatgccacatcactatagtgccttccctcatcactgatagtataaaaggcaatatttccatttattatcatctgtgcttttcaaagaaactctgtgagtccaacagggcgataatagaagcaactgccctttctctccccctttaaatgcaacccaatgtcaaagtccgtagcatccccaaatgagtgtattaaaggtgagaaattcccaaagtcaaactcagtagcatccttataattgtttatagtagtatgttatgattttttaacttctgtggtatcagttgtaatgtctcttctttcacttctgagtttgttttcttttttcttagtctatgtaagaatttgttaattttgtttatcttttcaaaaaacaattcttatttttattgaaattttcagtttctattatattatttctgctctgatctttgttatttgtttccttctgctatctttgggcttgtattgttctctaattttctcgctcctttaggcataatattaggttgcttatttgagatcttttttttcttttttga

SEQ ID NO: 570 - DNA, 1770 bp, Homo Sapiens
aaaatttttagttcttcctggcaattgcatgtatatttttttctgcatgttatttggatgtgaggagctgtcattattattttaggaacaaatatgaaacaatctctggaaaatggaatttgattttgattcaacaacaggagaattctactgtttttctccagcagctccacgataaaagggaaccctgagcagaacacatgcacaaactcatgccataccctaagggacaaggttccccacatctacttggaaatctttgggatgctcaatggagaaaaacaaggagagaaaaatctaaacccagcagaagagaaagtttaagaaagcggtcgtcgccaataccaaaattagctatgatattcaggaagaaaaaaatggaaacacgataaccacagtcaataaagaccaaggccacattccattgaccagagctcagccacgcgccacacctggctaaagagactctggctgaagaattccctgaatattttaatgtagctctaggttataacacagaacaaccacaaggtggcagaagaactccattcttgtaaatctcttagttgcttctttatttcatcttccctattccatctaatgttccctgaattttactattttgttggtttgaaaatatgtgtgacttacgtcctttaaaggatttggttcgtaaggttttgaatagactggaatataaaacatttatagaaaagaaaaatacctacagtatgatgttagtgaactattaataatccaattaaataaaatatatttgctttggattaatacatattttgttttgatgtttgctaaataaaactaagcattaggaggccaaatagccacaatgaacattttcatattatttaataagccagtttcaaggcatacatgctaaatttgttcttaaggaaaagttgaatttttgctttcatttttacacgtgtaaatccaatgtgttctgaagtttaaagtgtcaaaggctgttggatttaaacagatcttgtatgactctctgtttcatctcttcagaggttgatagtaagcaactttggcagcaactcacagcttctgctgtaacatgaggctaataatgacgactttataaggttgttgcaaagagtcagggatgccacaagcaacgttctttatatatgcagaattttaaaaataaagtaaataaaaatattccttcctctattccccatttttctaacattatttgcaactggtgttttaatgcaagaccaaaggctaaaatatacatgtagctagcagaatcaaaacctagatcagatgttcaaaagcatcatgctgctaaaagatttcagagtctaaaacctgtgctcactcttctgaaacatctttccacttcctgtttaaaaaaaaacgtgatattctttgaagctcattttttgggcttcatgtgttgtaattatacatttgttatatagggtatatgatgacttacgctctaaggtattattcagtacattgtagaaaaaggagaataaagaatgttgtttgtcagtaggcagctctgtcctctttatccttgactgtaatttactaaagagctgacaaaattacagcacaggcagcaattcaccatattaccctgcagacagccaagagactgacattgagatgatgcgttttaacttgggtccatgtaaggaacctgatggggttatatgaattcttttctgtactatgaaaaaatgaagttgctaataagaaggaggtacaaaagtgtgtactctgcgc

SEQ ID NO: 571 - DNA, 2541 bp, Homo Sapiens
agacggccctatccctgtctcccttggctgactctcttttcggactcagcccgcctgcacccaggtgaaataaacagccttgttgctcacacaaagcctgtttggtggtctcttcacacaaacgcgcatgaaatttggtgccatgactcggatcggggtacctcccttgggagatcaatccccagtcctcctgctctttgctccgtgagaaagatctacctaggacctcaggtcctcagactgaccagcccaaggaacatctcaccaatttcaaatctggtaagtggcctctttttactctcttctccaacctccctcactatccctcaacctctttctcctttctatcttggcgccacacttcaatctctcccttctcttaatttcaattcctttcattttctggtagagacaaaggagacacattttatccgtggacccaaaactccggcgccagtcacggactcggggaggcagccttcccttggtgtttaataattgcgggggtgcctctctgattattcacccacgaccccactgaaaatcggactgttcaactcatctggcagccactcccagagcccctggaactctggcccaagcctctctgactgactccttcccagatcttctcggcttagcagctgaagactgacactgcccaatcgccttggaagccccctagaccatcacggatgccgagcttcgagtaactctcacagtggagggaacgcgcatgaaaaaaccaaacaaacaaaaaaatttcttttggtagcagaataaaaaaacaaaaaaaaggactttttcttctggactgaactatatttaaatctcaaaggatggacatctcacaaccttcctacagcaagtactgtgagagctgcatcttgtcccactggatggtcttcagagacaataatacataatggagctgtcatctcctatgataacaatgccttcttctggatacctcctgaaggacctgcctgaggctctttcactgttagtttttttttaataagtagaaggattacactctaaaataataagtgtagtatagtaaatgtataaaccagtaacataatggtttattatcattatcaagtattacatactgtacaaaattatatgtgctacaattttatgtgactggcagcacagtaggtttgtttataccagcatcaccacaaacacgtgagtaatatgacacaccatgatattctgacaaccatgacatcactaggccagggaattttttaggtccattatcatcataggcgaccacagttgtatatgtgatgtggtctgtcattgactaaaatctcattatgactgtacttagtctctaaaccttattctatttctttcttttcttatggctttttcctctataagaactcaaagggggagagaaaaagacgaaaaatatcttcaaagaggagaacaaatctgatctttctctacgtctgcttagttggcgtaactttaggatgtccataagttgtagctttcctgggaaaatttgattttacactggttatcccaacataatattaatggtatcctcttagactctcaatagtgtccggtttggatgacaaattctgtggtctttttagccaactgctactgaagtggtcagatttattgcacaaaatatatttttaaaaataagtagcacaagatgaaatatggcctcaaatttcttggttagtttccactagaaagttttaaacattaaaaagtacaaaattcattacatttattgaatgataaagtataacattgtatgaagttgatgactattaaaactatttgagtgtttaagttttgtcaggttctctttggtgatgtcagttaagtgtctttcattaattcttatatgcctcacttttcctgtaaataacttattaaccacccactactttttttctgactgattaaatggtataaatgtcgagaaaaacaacatgaatgacataaatgccaagaatcagttgaaatgtaaaaatatatttaatacagaggttctgtttatgactccttaaaacatacttaaggaagcacacagttaactaataacagcaattaactaggattggtagaaaacctttattttcttattctatagtccatttgtgaggagcttaatataagaaagttagtaggtcaaactaataatagggcaaagtactgttccaagaacttgtctaatgatgttccagtgccaaaaatgctctgaaaaattgagataattgaagtctttgatcagaagggtgtaaaataatgttggaaataatcaagtgaagatgtaaagctatgactcggtttcccatgctgagcatgttaacattcttcactgtttcttcttgcatgctgtacatggccgacatttttcaaagtaatgagaaacactatttggtgaagttcttttcatctttgctgtccacatgtatcactcccatccaaaagttgcagttgcatttagcagttgcaaaggaaaggattttctcacgtaggcatggatacttgaaggggctg

SEQ ID NO: 572 - DNA, 3084 bp, Homo Sapiens
tgttcctctccaccgtggaatggtgtgctggtggatctgcacagaccttgggtcatctcacttttgagggagccccagaacaaaaggctctggcagtttaatggcccctggggctgaggagaggagaaggagggcaggggataagtccctctgtgggtccgctttctccttctgtgaattatggatcatattttccacttcatgtgaaaatatcaaagcagttaacacacgtgcagtgatttttacaagcgttcgcgggaaatcttccatgggctttggccatcagcagtagtcatcttagcaatgctagggcatggtggcagacaccagatactcaaggggcttaggtgggaggaattcaaggctgcagtgaggtatgacagcattgcactccagcctgggcaagagagtaagaccctgtctgcgggggggaaaaacctattaagaatttcaagatggcaacagcagagtgttaaaccaagtgtgagtccctactccaatgtcacttccttggctgaaggaaaaatcagtcctcattgattccattctgtccacagaaccattcatcaatttatattatctttcctagataaaatactttaacaagtccaattactaagctgctgaaaggacatacataaatgtttgtaaataaatagaggtttggaagatacaagatgattgtgacaaatgtctgtccctgaaagatgataatcattgaaaagcattacatttattttgaggaaactggtttttttctcaacagaaaaaaacatatttgtagcagctggaataagaggtaggcatagtatgagaataatacctaatttcatagcaagtccgttttatttcttatgatttgctgttccattgtgattacagtttgttgactagtggccccttcaacctttttatgatttgttcttacaaccaatcattcttctctttcttctacagtgttgattcctcttcctcatgatagcatctcattttgatctagttatctgtttgagctttgctctactattttcttagcattttctcttaacatttctttgttcttacatcagctgttttgcatacatcttaaatgtggttaggtaaataaatgcacagagacctgtcagttttttgccaacagccaggcacctgttcatgtcagcaattgtcaactaatgtactgtattttttgttttttgagacaggttcttgctttgttgctggaatgcagtggcgtgatcatggctcactgcagccttgacctcctgggcttaagccatcctcctgcctcagcctcctgagtagctgggaccacagatgcctgcctgccacacacgggctaaatttttatgttttgtagatacaagatctcattatgtttcctaggttggtcccaaactcctgggctcaagtgatcctcccgcttcaacattccaaagtgctgggattacaggaatgagccactgcatccagcccactgtaattttcacatactcaccaatgctggctctcattgatcatatgaaattatgaaatcacgtgaaaacaatgcctagttcagtccaagggaagcagataccactgttttatagaaagagataatagtaaacctataatcatgtccaaggaagtgatgtacacagtattagctagatgagtgttttctgttacaggtaccatttctggatttgacgggtatattagtcatgcgaaatagtctttgctccagatataaaggaaagaatagaaggcaacatgatgcggtagaaaataatgagctatggaaacagataggcgtgaatttaaatttctgctttacttcttcctactattaagattggacccactgagcttcaatatttttacctgtaatatgaagataatgaaacaaatgtcacagagtattacatactagtttctaacttttttcttccttcgaatcaaaaaagaaaccacatgtgtttaaaatatgcaccactcaacattctaagatggaaatagcttaaagtaccaaatttgagattgatgtatattgggggatggagattattaaatttccttgttcagatgaaacataattaacataatcagtttggaacttttttcatgcctaattcactttctagtccaaaaataatgctgtgcaaattattggcacgttgtttcattttcatgcctaatttaaaaaaaaaaatcttttccttgtgctcaaatgcctatttagttccatttgggccattttctttgaactaaatgcaaatgagggaggttgcatgtatttcataatctccctttaatcaagatcactatgaagcatcagccccctgggtgacgggtgacataaatcatattaacttaattctgtgtgtttcattaaaggatttagtatttttatgaaccagaatatctgggtcactgccatagaagcttcaatcaagctgcagatcttatggagtcaatgatgtgttgcttatttgatgagatgaagatgaagtgcctactcccatctcatactggcctcattaacacatggttgctttaagagttcatgagttttggccaggtgcggtggctcatgcctgtaatcccagcattttgggaggctgaggcaggcagatcacaaggtcaggagatcgagaccatcctggctaaaaaatacccccccaccaaaaaaaaaaaaaattagccaggcatggtggcaggctcctgtagtcccagctactcaggaggctgaggcaggagaatggcgtgaacccgggaggtggagctagcagtgagccgagattgcgccagtgcactccagcctgggcaacagagtgagactccatctcaaaaaaaaaaaaaaagttcacgagtttagaagagacagttgggtcctggcctcaggaaacaaagaagaaatccagatcttatacaatgtgctggacataaaagtataacaatttttgattctcttccccttcaccattgaaatctatggtttctctatatgactgttttctcaacaatccaaaaaggcaaggttggcagcatgcaatctgctgaagaatcctgcctaaatacccttttccacttcacactatc

SEQ ID NO: 573 - DNA, 9203 bp, Homo Sapiens
actccctctattgcctctccagacccagacttcaccctcaggtcaccctcacctggactttggggtgccccacaccccgccccaggccctggcctctggaatatttggaaacttgaactgggccagaggcttaagctcacatctgtctggagcctcaactttctcctctgtaaaatgggctaacactgaaagaaccttgcagaatctcagcaacgtcacagaggacattgttagcacagccagcgggctcctgctgggctgagtttgtgggtaatccaagcctcggcaggtacagttcctccctcagcccagtgcagatgcatctgacttacgaaacttcagtgacacctgctctgtgccagacactgaagatggagcagtgaacagcactgacccagcctgtcctcctgttgcctgcaggccagaagcaaggtctcgctgtgttaccctggctggagtgcagtggctacttacaggcatgatcatagcatactgcagcctcgaactcctggactagagcagttctcctgcctcagcctccagagcagctgggactgcagacacgcaccacagagcccagcctgagtcattttgattctgtaactggcttcctctcggcgggcaggctcacaccctccacccccagctggagatggaaggaggatgctcaccgcccattcctcatgcaggccatcgatggaaatgtcagacagtgcgagtccacgcctgaacacttctggggtccgctctgggactgacactggcagatccatcggtgagctcccgcctgccacctctgggcctgcattgcggtgatagggccaagggcctgggccttcaattctccagacttgccaaaatgctcagcgcaggcctcgtcggcaactgcagacaagcagaggcagcacctgggctctgcctgtgcctggcacagtgaagcgagggtgggggcaggaatgagggtcctctccatgcaaggggggaagatagaagaacaaaatttcaccctaatgtagtgtctttagaccgtgcaatgttgtgctcctgttagtctgatatcaggggcttgcagcctggcaaaggaaaaaaaacaggctgaggcacatgatagaagacaggcagggatgccacaatcataaccatggcaaagaccaggatcagaaaggcccaccatctctgaccccaaatccctgggcagatggttccagaactcagaattttcccagttgtagaaagatggggccaggtgcagtgatccgcctgccttggcctgcgataaaattgcacagaagtaaatacacacacgtgaggatacggaaaaccggggaaacctgagcaagagcagtcagaccccggctgtgatggcgcccagtagttctgcgagatgttaccattggggaaactgagtgaaggcgggtacctgggatccctctgttttcttttttgttgttgttgttattttgagatgaagtttccctcttgttgcccaggctgggtgatccacctgcctcggcctcccaaagtgctgggattacacgcgtgagccactgtgcccagcctctctgttttatttcttctttttttttttttttttttggagacgctctgtcgcccaggctggagtgcagtggcacgatattggctcactgcaagctccgcctcctgggttcacaccattctcctgcctcagcctcccgagtagctgggactacaggcgcccgccacctcgcccgtctaattttttgtatttttagtagaggcggggcttcaccgtgttagccaggatggtctcaatctcctgacctcgtcatccgcccgtctcggcctcccatagtgctgggattacaggcatgagccaccacgcccggctgttttatttcttataactgtacaggaatctacaatgattgtaacaaaaatttcaattaaggccactctaggcacatggcctgtggggtagccctgctcaacaagaagccgtcaaaaaaatgttttttaattaaaaaatttcttcaattaaaaagcgttatcttcctctgcccggaaagggttaagtgagtcactgcagttagctccccttcccccacaaccacctagaccaggccagggaccagcgggcaattgcctggcagctggagttttcctccactgtggactgtacttcttgcgtcactctgaatgtctccagtctttattccagaatgttctggtcctctcccacttttccaaggacaggaattccctagtggggctccagaagaggctctggaggagaacaagaaaggcccttgtcatccattggcctcaggctgggaaatctcggttccactcccagcccagcctcaatattaggttgtcagtctggagtctgagagccatgcccccacccccttagtccttcacctccaggagagttggggatactggaaagaatgttgagtgtcagagcccctctcagtggctcacgcctgaaatcccagccctttgggaggctgaggcaggtggattgcttgaggccaagagttcaagaccagcctggccaacgcgacgaaaccctgactctactaaaaatacaaaaattagctgggcgtggtggcacacacctgtaatcccagcagctcgggaggctgaggcaggagaattgtttgaacctgagaggtggaggttgcagtgagctgagatcacaacactgcactcaaaaagtagttaattaatttagtttaattaaaaaagaatattgagtgtcaggcaatctgggtagaacccattgtgtttctacaggatagaatctgctgtgttctctagcggaacttccggatcaccttcaccgtatgactctagacaatccctgtccactcttcagttttagatgccccattcaaagaatgaaagaattgtcctagatgatcctttagggtcttccaggctgatgacaagggggacctggcccctctgctgctggccaaagaggactttacttcccattccgtgtggttgaacaagaattgctgggctccagtcctgcctttggcccttccctacatgtgaccttgggccctctttgcctttcagaatcaatacagtgagagagttaacacaagctcaggttagtaagtcattcaacaaacatttactgagcgcttatcaaatactgcatgctggagtggacactggagaaaaaggtgaggagaaggccgggcgcagtggctcgtgactgtaattccagcactttgaggggcagaggcaggtggattacctgaggtcaggagtttgagaccagcctggccaacatggcaaaaccccgtctctactaaaaatacaaatattagccaggcatggtggtgcatatctgtagtcccagctactcaggaggctgagcaggagaatcacttgaactcaggaggtggagcgtgcagtgggccgagattgcacctctgcactccagcctgggcaacatagtgagactctgtctcaaataaataaataaagtgaggagaaaaaaataccatctctgtcttcacagaacttatagtttgagaggggagaatcccacaagtaaattataaatctcagctgagattatgcaaagaagcaaaggccggacgtggtggctcacgcctgtaatcccagcactttgggaggccgagacgggcggatcatgaggtcaggagattgagaccatcctggctaacacggtgaaaccctgtctctactaaaaatacaaaaaaattagctgggcgtggtggcgggcgtctgtagttccagctactcgggaggctgaggcaggaggatggcgtgaacccaggagcacaggttgcagtgagccgagatggcgccactgcactccagcctgggcgacagagcgagactctgtctcaaaaaaaaaaaaaaaaaaggaagcaaagtgcccagctgggatggtggtttcagaggccacagtgggagcttcccagagaagggatgattgagctaagtctaagcaaaaggggtggtcagggcagcagctgctccaaaacaggggctgggggcttatgtggagagagaagacatggagagaccatgcccagaaggaggcggcggcttcagtgaacagtgcaggggagcaggtccgaggaggccgcctaccaggggaaggagtctcatctccatcctagacaaaaaaaggatcttttgagatgcattaagcaggggagtcacagattggatttgtgttttgagaatctcctgcttacctagagaagaagggcatctcctgggccctcactgttgccttaaatgatttttattgtgtattacttaaacatgtgcaagcataaaatgagatataaactccttgtagctcttatacaagcatcagaccaagacaaattgacccatcacgtacaaaatcgattcaaatcagattaattttatgtgacatgttattatgccttttgtctgaaaccctgccaccacccacagtgcaattatggcccaaccactgtggtgttctgaatttgtgggacagagaatattggccttttaaacacgtgcatgcatgcatttgcgtgtgcgcacacacacacatcccaaatgattttttcccactatatatgaagaactcctacaaaccaaaaagaaaaaggcagacaattcaagagaaaaatgggggagggcttgcattaaagtacttcataacaagagtacttaggaggccaacaaatacacgaaaagctgctagcttcatgactcatgggggtggcttggtcagttcaggatactgtaacaaaataccttagactgggaaatttataaacaacggaatttattgctcacagttctggaggctgggaagtccaagatcaaggcagcagtagatccggtgcctgagcccgttccctgcttcaaacatggcaccttcttgctgtatcctcacatggtggaagggggaagacagttctctggggcctcttttataagggcagttatccaattcacaaggatagagccctcatgacctaatcacctttcaaagatccccatcttctaacaccttctaacaccatcaccttggtgattaggtctttttgttgttgttgttgttgagatggactctcactctgttgcctaggctggagtgcagtggcgtaatcttggttcactgcaacctctgcctcccgggctgaagtgattatcctgtctcagcctcccaagtggctgggattacaggcgtgtgccaccatgcccggctaattttcatatttttagtagagacagggtttcaccatgttggtcaggctggtctcgaactcctgacctcatgatccgcccacttcgtcctcccaaaatgctgggattacaggcatgagccactgcacccagccgattaagtcttaacgtatgagtttttgggagaaactcaaacattcggacaatagcaaggagaatacaaaaccacagtgagctaccgcttcagacaccagagaagtttaagtgaaaaagactggcaataccaagtgctgatgaggatatggagcaaccagaactctcagacattgctgatgggaatctaaattagtataaccaccacgaaagcatccgtaaggtttaattgtgttgaacacaccctgccctctgaccaagcatttccactcctgggcatacaggcaaaagaaatgcatccacgtgttcatcaaaagatgtaacctgtgccaggtgaggtggttcatgcctgtaatcccagcacatcgggaggccaaggagggaggattgcttgagcccagaagttcgagagcagcctaggcaacaaggcaaaacctcgtctctactaaaaagtagccaggcatgatggtatatgcctgtagtcccagctactcaggaggccaaggcatgcagattgattgaacccggaaggtggaggctacagtgaattgtgatctcgccactgcactccagcctgggtgacagagcaagatcttgtctcaattaaaaaaaaaggaagaaagaaagacataacctggaatattcacaccaacactattcaggatagccctaaactggaaagaatctgaatatcctccggctttagaacagagagaaattatagactattcattcatacaggggatgattgatcagctttaagaataaacaaaccgtacacaacaatatagatgaatctacaaccttaatgtgcaaaatagttcacatatataaaggacaaaaacaggcaaaactactccatggtgttagaaataggggtagaggttaccctcatgcggcaggagggttagtgataggggatttggaagaggaggagcccaatggactgaacagctgagctggaaacagcaatttgttccttaaagttctgaacccaactgttatccagcatggagtctgtctggagaggccagatgtggggcctctcacaggggaatgagaagtgcctctcagggtcccacccatgatccccctttccttgcccacacaaccaccaactggcaagtagtaacccaggacctgtagcccccactggcttgacacagagcataatgcaagcttttcctgctccaggtcctggacaccactttgccctttgccccacacgtacagccccctgaccaaaagctgggtactctggcttgactagagggagctagactccaggaataagtaaggagctgggcttccacgctagagaacaagagcttctctggggaaaggggcttcccatgaagccctggggcactgggagattaatgggcagacctctggcctcagcttccagggaaggggagggtgtgggccaacatgcggtggctacactgaccacaagccgatgaccccagccagcctcaggatgtctcagctctaggcatggtttttcgttttgttttgtcgtgttttgtttttgagatggaacctcgctctgtcgcctaggctggagtgaagtggcaccatctcgtctccctgcaacctccacctcctgggttcaagcgattctcctgcctcagcctcctgagtagctgagattacatgtgcgtgccaccttgcccagctaatttttgtatttttagtagagatagggtttcatcatgttagctaggctggtctcaaactcctgacctcaagtgatctgcctgcctcagcctcccaaagtgcaaggattacaggcatgagccaccatgcccggcataggcatggttttgacaatctgtctctttgtgccctggctccttctccaactcctctttggaggaggcacaggaggaggggtcatttcactgttcctgaaaagtagacatataacctacatgcaactgccaggtgataagggccccatctgtctggcatgacgttggaggtccacaaaggctgattagatgaatgctcagctctggggcctccccacagagctcacagacaggcgtgaaggaaagcaggactcttattagaatatgttcagagttttcactgaagaagcctcctgtgtgggccaggcactgtgctcagtgctttgattcacagtctcatttaattctcaccatttacagacaagaattcagctaagatccttttcaatcaagtctggcaatatctgcctttcaatggcagtgcctagtcctttcatatgtaatatacttatcattatgggtgggtttaagttttatcatcttgctatttgttatctatttgtcccccctcttttgttcctcctttactgccttctatttggttgagacttaataaaatattttattccatcttctctacttactttttagctatgcctccttatatttttggttgctggagtgttacaatatgcattcttcaatatccagtctactttccaataatattacaccacttcatgtataacgtaagaacgttacaaaaatataatgccagggctgggcgcagtggctcacgcctgtaatcccagcactttgggaggtcgaggcgggcagctcacctgaggtcaggagttcgagaccagcctgaccaacatggaggaaccccatctctactaaaaatacaaaattagccgggcatggtggctcatgcctgtaatcccagctactcaggaggctgaggcaggagagttgcttgaaccggggaggtggaagttgcaatgagccaagattgcgccgttgcaccccacactgggcaacaagagcgaaactccgtctcaataaataaataaattaaataaacaaatatatatatatatatatatgtaatgccatcacatcttctccggcctttggtgttattgtggtcatatactttatttttgtatgtcttatagatcccagaatgcattgttatttttactttaaaaggtggattaatttttaaagaatttaagaaaagaaaaacagtctttggactgctggccacaaattctctgttttatttatccccaaatagttttatttttccattttgagagagattttcactgataccattcggagttaacagatttattctttcatcacttttcagatgccgttccattgtttgctgactttcattgattctatgagaagtctgcagtcttttgcagcgttgttttcctatgtataattgtctcctcccaccccactcaccccagctgctttccacattctctctctttgattttcagcagtctgcccatgatgtgcctaaataggactttctttgcattcatcttggctggggctcactgaactttctgaatctgtagattaattttcttttttcaataaaccttggaatattttcagcataatttttttcctgtcttcttctctctcttttctcctctgaaatgccaattaaatatatgttagactgctttatcctgccccacaacttactgaggcgaaatttttcaatcacttctctttgtgcttctgatgacactggtggcccatctggagtggccgctgccatcacaccagctgcagggggaggtgcagccaggctgcacattccatggagccagcaggaactgcagacaggtgggagccccacctcttctgagctagtggggcaggagctccctggatgcagccgcagccacccaagttatgcctgtggacccgggcctcccactgcatgaagcaggcagaaaccccaccccactaggcacagctgccacccaagttgtggctgcagacccagggctccctgggctcctgctaggggcaggagcaggcagaagccctgcc

SEQ ID NO: 574 - DNA, 1714 bp, Homo Sapiens
gagccgccgcgggctccgaggagtcggccgagctgctcccgcgccctggccggctgggtcttcatcctcattgtactcccttggcatctcatggtgacgtgacttagaaggtggtgcagagacgtttgaaactattgctttgctgaaaacatctgactgccaggctaggatgtgacacttaagggaccagggatcatttacatactgtggtcttgcattactgcgatgaaatcttccaccactcccaccacccactacaagagatggaattaattgaaactacagccttcaagagacatttggagcaatactcttccagttctttcttccacattttatttgtgggtacagcgtctcccaggatgtagtgtgctgtaattattcttccacccttttattttctgggagtttctctatctgaatagcacagaaatattagtggataggaagggaatataatattctatccatctgaaaattaacacccatgttgaacagaatcccttttcagtttcctgtttactacagggtccaaatctctgagctgagctgtgcagcagataataggagaagaaaaaaagatacctgctcctctttcaaggacgtggacttttctgttttgtgaagtgatacttggataggctactggatattttctcattcttgactcatcaaccttataattggtctaagtttttcccaaatttgtagctctggatttcctgtcactcctagttttctgtgttaaagttttccattttgatatgtatgatattgacaactgggagaggcagtgcccaggggatggtagccagatgccattttgtaccagaagtcttttattatctacatttaatggttataaataatgaatgcctttgttgggagtactttcatttactcattccaacaaactcttagaccaattttccttgagatcaattaaattcaatccctcctgtatgccagactttaaaaaaatgcccaatactaagtagaataaaaaatgtcttttgcttcagagtagtatgattaggactataacagagttgggttgaaaggtctatagtacaccagagtcaagactacgtttgtccttgggaaattggaaaggctactggagaatatgaaacttcagtgaatcttggggtatcactggatatttagaagctgggttgaggggccaggggatccttggcagaaagaaaagcatagtgacatgagagtgcatcatgagatcaggaagtcatgataggttgtaggcaattaagctgaagaggtttatgaggcccttatttgtgtggatagtggacaggtgctgggaatgatggatggcaggaagatctgatactagagcagttaaaattatctaggcaagtgagatggggaaatgaagtcaaacagcagcagcagggatggagggaaagtgacaagtttatgagtctaaactggagagagagaggatgagggaagaagaatgtagaatttgaagattgtttggttcttctggtcttccaattatgttcaagtatatgtgagatgcaatggtcaaagtaataggtacataataaataaaccatttctgttttcagcatctgtagatcaaactttagcttgccttagtttatcattcgtgtgtttagactatgatcaaataaatatattcattttcacactctatttttagtggtactaatatattttttgtgacgca

SEQ ID NO: 575 - DNA, 2824 bp, Homo Sapiens
atacgcccccggcgctgctgcggcggctggcttgggagggggtcgagggagcgggagcttggggtgggcttcgggagcgcagggaacggcgggagccgggaggtgacggctagcagcgtgagaaggccgctggctcctgagaaatccccctcctccaggtggttttgtccttttggaccaattatctaacctgggcctggactccatctaccactgtcctgcctggttcactgcagctcacttcatcttcctgtgccttctctgaaagggcccctccaaaagtttcctgggtatgtcccctcaagaaactctcaaacaactgagaaggtgcctcgacatctgatttgccccaaacctctatacactggacatcttctgaataaggctgtgttgtatgttgggacaagcaaagggatggaaatcaagaattctgggttttagtcctgactgtcactacatggctgtgttacttctgctttctaccaccctcgtgcttttgggagggcctgattcagatgaagagtctcctgagagcatggattgtctcagatgaagagtctcctgagagcatgaactgtctcaggtatccgtgtgttcctcagtgtctggcttggtgactggcacacaatcttgcactagatactggcttttgaattaatgcacgccgtgaaagagaacccagaaagtctgcacagctagagcttctcctcaccctgggttctttgtgatttgacttgctggtgatttctatttatcctgctaaactcaactcaggggagccctggaagcccctcctagtacgctgacactggggagatatgatcctccttatcacaaggtatccccagtacctgtccccccaggtggttctccccactctgagtgtctacatctcattcattcctccagtcccagtccttggcacagtgcttggtacagaataggtgccagtgactatttaatgtgtgaatgaggggctgaagctagtgcaaacaggagcttaaagttcaggaaagattggagaaagcgacacttaacaagctccttctgtatgccaggtatatgaaggacagcgcagaacacggcaccccaaaatatgctactttggcataggattattttgagctgacaaccattgagaagaagcagatacatgaaaggctctctgcttgccctctatttgcccaaaagcaagacacaaattttttttttttttttttttgagatggagtttcactcttgttgcccactctttttactcccaggctggagtgcaatggtgtgatctcggctcactgcaacctctgcctcccaggttcaaacatttccgctgcctcagccttgtgagtgtctgggactacaggcatgcaccaccacacccggctaatttttgtattattagtagagacaaagtttcaccatgttggccaggctggtctcgaactcctgacctcaggtgatccgcatgccttggcctcccaaagtgttgggattacagacatgagctgtggcgcctggcccaggacaccaatttgtaaaggtttctcctcctctcctctctaccaagaaggacagaagttaatcactggcgagaagtctagacctttataaacccagagagggcaccagaggaatacgtacgtacgtgtgatgcacatgttaatctatttttcgtcagttgaatttacagggccccagctggaaaatttaggagagtagagggaaaaagattttcttcccctacgcattgtacaaagtccttgcatactttctctcttttaatttttacaaccccttgaggtaaattctactattcccattttacagaggaggaactgaagatcagagctgttaagtaacttactcaaagtcacacagctcatcaaaggagggcctcctattagcgtccaaatataacgttgtgccttctactgcacagtgatgtagggtgggctggagtcagaacactcaattgtagcccatgagacactgctgggtataaggacccctttctttgcctgctgcttgcctgcaacattaccaccttcaccccttgaagccagtttgtctgcatattgatttgatttaggcttacaggacttcagggtctatttccattgtgcttctcaaggaacattttgcaatatttgtttcattcacttcaagttcttaagacttatgttttcccatttatgggtacatggaccaagaagctgatggaatcagtaagtgtattttgctgaaactcttgaccagtgtgtcttacagtgaaaactaagactaaaatcctaagcccccagtcaactgcatggacccactcttggtcaaggggaacccccgagacagccgaaaaacagactacctggccataatgggaaggagggtcagaccagcctcattatacccactcccttttggagtttaggcacaactggccagccttaatgttaaaatagagatcacaagactgacaaaacagattctttgtggcactaagattccagattttaaaccatgcgaggccagggtgaagtcatgcctgcaggccatcaattttgctatgtagcatccttatcttaatttaaaacattcttttttgctgacgccaaattttagacagagccttactcctttaaccaactgtaaattaaagaatatctgaatccacttataacctgtaagccctccacgtcaagatatcccgcctttttgggtcataccaatatataccttccatgtattgatttatgtgtttgcctgtaactcttgcctctctaaaatgtataaaagcaaactaatctgactgcctttggcacactttttt

SEQ ID NO: 576 - DNA, 1695 bp, Homo Sapiens
attctttgggatgaattttgcctaaaaaggcattacatattttctatagttctcaggtttcggtttgtgatgtttttgagaaatacttaaattctgaaactcttacagccctcttctgactagccttggggcaacttcagtagtaggaacattctagatgtaaattaaaacattttagcaaggtaaagctattcaaaataatgactcagtttggcagtcagaaagtaattctcctggaagcattcacactggggtattcaccagcaaatgagaaacacttaactagaagattgaaagggaagaatgaaatcattgtttccaattctcagcagctttcacttctattcttccttaactagtcagttcacaaattgttgtgagagaatatagtttaggttaaatcttcaagtcttacctgtagtgttatttaagtgatcttggtatatgtaataaacacacaattgagcagctaattgttgcagcataactccaatccaattgcacattcactttcaggtgccacagggtcttctaagccctggtgaatgctgtaaagcaaatacatctcatttatctctttgcatattccacaaattttaccatataacctatatgtaggaactctcattccatacttatctttagtctgtgtatagagacagaatattgaccgagaatagaaaaataaggctggttagattacctttgtcaagcttatgctacaccctaatggggttcaggacacactatcccaaaatgtagctagacaatgagttctctgagagcaggatccacctatttggttgtaatagttttgtttctataaatgttgaatgagtggatcgatttatcaaaatagagtttatgaacataaaaaattgccttatgcaaccaagtttgataataacaacatgaccttgatattaaactgaaaaaaggcatcttccagtctctactattaccacctctccccaactattatagccattcaaatctctaaccaggctgaatattaaataaaatggtttaccatctgatgttaaggtataaagataagatttttttttttctgaattaaaaaaaatagtccaaagaagaaggaagaagaaaggggatataatgagaatgtaagtatccaagaaatattgactgttttgatttatgtaatgaaattaaaaagtcgaaagccagttttaaagcatttcaaagtaatatcacagaaattaatttgaaggatacatttaatgttttgaatcataacctgtcaagcctggcatgcattttaactgagttttaaaaaaaagcattctgacgctattgtatggacattagagttttaaatacaacagaactacctaagaaataatgatacaatagaaatcagtttcctggctgtaataaagtatttcagttgaaatcatgataaatgttaaaggaaatattttgattatttaaataacaaaattggctgtttgtaaaacctggttaaacctgataacttctagaacaatatttctgattttaactccattctgctttccttaattttgtacagacacacacatgcacataagtttattaaattttcacaaactgaacacccctgtgcaaccaatacctggatctaaaaagagaacattttcaacccaccaaaagcccctgcgcccaggtgaaataaacagccttgttgctcac

SEQ ID NO: 577 - DNA, 5760 bp, Homo Sapiens
agtctcttttggagagctgtgaacgtgaccagacctattaattacttaactgaggtgctgaactttgaaaatgaaagttccggtggggagttctgtcctttccagcctggggagctctgtcagggctctcctgagcgtctctttcagcttatcaagctcgctcggggaccgtctctggtgatgtagggagaaggtggagccaacactcagcccactgcccatcagcagtaaggccaaaggaagaggaaattcctcacctattaacatggacaatgagaccatggggaggacagttcaagggtcttctggctttgcaaagggtcagatctggatcaccgaatacatgttggaagatggaatactgctttcctgttaagtccatgtatatggctctcatgcaccattcctgacaagggcagaccagtttttcttcagctaccacagtttccacctgagtggattcttcatagttgtactggaagaaatcttgaagagcattgagttcagggttcccttctgccccactatcagactggggttcctagataaacttgcccctctccaaattttcatctcagagaatggccatttcatgcttctagttgtttaggccccaaaccgtatttttctaatgcaccatatgatatggtttggatttgtgtccctgcccaaatcttatgtcatatcataatcaccagtgttggaggaggggcctggtagaaggtgacttggatcatgggggcggacgtcccccttgctgttctcgtgatagcgagttctcatgagatctgtttttttgttgttgttgttgtttgttttgttttgttttgttttgagacaaggtctcactctgtcatccaggctgaagtgcagtgtggtgtgatagctcattgcaacctcaacctccttggctcaagtgatcctcccacctcagcctcccaagtagctgggaccgcaggcatctgccaccatgcctggctaacttatttttgcatctttttttttttttttttttttttcgtagagatgagttttgccatgttgccagactgagatctggttgtttaaaagtgtgtagcacctcctccttttccccttccccctcctcccagcatgtaagacgtgcctacttcctcttcaccttccagcacaactgtaagttttctgaggtctccctagccatgcttcctgtgtagcctgcagaactgtgagtcaattaaacctcttttctttataaattacccaggcttaggtagttctttacagcaatgtgagaatgaactaatacaccatatctaatccaacagcacatcctgttggatctactttcagaatagattcagaatccaacaacttcttacctctgccactgcaataatctcttacatggaggtcccagtgggtgaatgggaactgaaacccaaccctgctccactggctgagctgtgtacctttctccaaggctgcacccacctggaagaaggggcacccttttctatatataccaagatgccctctacaggcatctagcaacttcccagtagttcgtgttacctctctgctcaaaaccctctcactcagaagaaacgccaaaatctcacaatggcagcactatggaacttggcccaggtacctctgtgatgccatgtccttcagccacactggcctccggcgagctccgcctttacactcactattccttttacctaaattggctaactttcccacatccttccagtttcttcacagggggcccttccctggattgtagcaccccaaccctggtgtgtccatctctttggccctccatagccacatcctcatctactgtgcctaaaattgtgtcccctaaaagttatattcaagacttaacgcctaagacctgtggatgtgaccttgtttggaaataaggtgtttccagatagaatcaagatgaggtcatacaatcaagatgaatcaagatggattcaggtgggcctaatccaaggactggcatcctgatctggaggctgggatgtccaaggcacttgtgggtttggtgtctaacaggagctcggtctttgtttccaagatgatgcctcgttgctaccagagaggatggatgctgtgtcttacgtggtggaaggggcaaaagggtaaaaatgggcctggctggttccctccagccctttgtaagacactaatcccattcatgagggctccaacctcatgacggaaccacctcctaaaggccccacttctgtgactactgccaggttggtgattacgtttcaacataggaattttgggggacacatttaaactgtagcagcaaggagcacaaaggattgcagaatccaccagaaatggagaaggagaaagacctggaacaaattctccctcagatccttcagaaggaatccaccctgctgacaccttgatcttagacttctggccaccgtaactgtgagacaatacatttctgttgttttaagccaccaagtttgtggttctttgttatattagccctagaggaaacaattaccccgtccaccatacaatatgttacttattaatttgcttagggtctgcctccccattaggagggagaggattctgtctgtgtttattgccacgtctcctgtggctggcatggggcctggcacagagtagatgccacaaatacttcctggaaaaatgaataaaagttcactcagctgaacctggtatgtgggtctcccagcacctcctgtggccatttctgatgcatcctccgccactcccacctgcagcgggtgactgactcttcagtgacagaggagctgcacacaggtggcgaaacgcatctcatgtggacgtctgaacctagtgcctgcccaggctgctagatacctgagactgtgatatggtttggctgtaatcccacccaactgtcatctcgaattgtagctcccataattcctacatgttgtgggaggaacctggtgggagataattgaatcatgggggacggtttcccccatactgtccttgtggtagtgaataagtctcacaagatctgacggttttataaggggttccccctttcacttggctctcattttctctcttgcagccgccatgtaggaagtgcctttagccttctgccatgattgtgaggcctccccagccatgtgcaactactgggaaagtgaggtgcagaggtattttgcaacgtgcccacagaaccccagcgagcccgtgttggagttacaactgtgcctcagggagcattctcaggcagcattctcttatgcttcaccgtctcacagatgataaggtttcattcaaggacttacaacagcaacccggagggagcattctcagtggctggtagatgccatttgtactgagcaggacaattaagcccaattctggaaaaattctgctttctctattcaatgcattttataaatgtcttcactcagcacatttaccctactaattatattttgctttgtgatcatggtatgtcatttgcattccttcagcacacactgactgatggggaagagatgttgggtgacccaggcaagccaaacaggattaaagcctgctgtctcaccaggtggataatccactttgaacacttgagaggggagtgttgagatcacaccccttcccatgggacatttttctgggaaataaaatcggtgacaaacaccacgcttgaacactcacattgactctagggtgcaggctgagctcatctggtgcaggggagtaatgcagaggcgaggcctgagtcagcgccaggcacaggaaggggatgcaggatgcaccacagcccatgcctcttaggagaaaatctgggccttctccatggctgtgtctctattaatttgctaaggctgcccaaataaagcaccacacatgggcagcttacataacaggaatttattctcagttctggaggccggcagtctgagatcaaggtgtcagcacagctggttccttctgaggactgtgcaggagaatctgttccaggcctctccctgaacttctgggggtcactggccatatttggcattccttggcttatagaagcaataccccaatttctgccttcatccgcatgtggcattctccctgtgtgcgtgtttctgtgtccacatttttcctttttataaggataccagtcatgttggaggtctaccctactccttgatgaccttatcttaactagttatatctgcaacaaacctatttccaaattaggtcacattctgaggtcctgggggttaggactttaacatatgaattttaagaggacacagtccaacccataatagtaactttgtccctctctctcttttgacacaataatgaccctatgcagggatatttctaggtggctactgtctgtgtgtgtgtggtagggggacttctagtactgttttggattactgttgacagacagcagcctgaggctaggaagcactttggggccatgacttagagcaaagctagtaagttttctcaggaatttgaacccagaatttcatccccatggcactttaatccagtacatttaatggctcagatgaccctggccttatcagcctggtgctctaagcagctgacctaacagtgtgtgcatgcgtgtatgcacatgtgtatgttatgtgcatatataagtgcatacacataatgttggacacagaaatatctctgagaactgtccctttatcacccttcagataaaattattctcagcttgcttagttgcagtgtttcttactttgcatctcctaacactttcatacatttctcccgaagtgcataggcaaggagcttcaacggaattcaatgtcaacctggtcatcttaccatgatttctaggaaaaaatgtgtgtaattggttcatgccctccttctgtacagattacaattctccttttttggcatgaaaacctccatctgtcttttgaaagcacatgtcacttatttattaaagtcctccccaacttgttcaggttgagtttcactagtacctttctggagtattttatacctatgttatagccccatatgttatactttggatgtctgtttacctgtctgtaagactgtctgcataattcatgggccttgtacaaaataagaattcagggactcttgttacaagaaactattaagaatttcaagatgggtcaggcgcggtggctcacgcctgtaatcccaacactttgggaggctgaggcgggcagatcacgaggtcaggagttcgagaccagcctggccaacatggcgaaaccctgtctctactaaaaatacaaaaatgagctgggcgtggtggtgtctgcctgtaattccagctactcaggaggctgaggcaggagaatcacttgaacctgggaggtggaggttgcagtgagccaagatcgcacggttgcacttcagcctgggaaatggaatgagactccatctcaaaaaaaaaaaaaaaaattaagatggagatagcagaaccatataggaagtgtggggtccttgtaagagtgtggtccataaacttggctttgtctgtctgcctggttcatggattgtgactatcctcagttccccagtgcccatcattcaacaaatgttagatgaataaatgaatcaatatgtgaatgactgtaagaataagcttttgatgaaaggcagccattttgtaagcaagacattgctgcttttaattgtccgcagaaagcctcacagaatcactgcggtgagaggaaaaaaagtgtctgcatgcaa

SEQ ID NO: 578 - DNA, 1997 bp, Homo Sapiens
ggaagcgtggtaggagaagatgcctgtgcatgccgctcatgtttccagcagggcaatgtagatgcatgtcaggaaagatgattagatagtttagaaccagatccttgtctgagatggaaactgcagctgctaattaagaagagtagagctcgaggaagccgccagctgccagcctggtgctgcctctcctgcaagtgtgaagtgtggctgcatccagaagcactgaaaataattgattagaaagagaaagagactgaaaatgtcataaatgaggagataattggagaaaatcattgtgaagaggtatgaatggatggcaacacaaatggagtaagacttaaagagatataagcctaccaaatgctgacatgatttttgtgagttgtgaagatttaaagaaatctgtttgaataacaatttttgaggctacctataaatttgtgttcattacttccactaagcaaggttcttttgattattctttgatcattgaaatgttttatattttatttaatttacagcaacaaaaataactcttgagaagaaataaatgtgaacctatggagataattatttagtaatgtttgaaatatatgatttagaacatttcattgcacttattaatgagtataagaatattatgaaaacagaaaaataatgagccttgtaagagttcacacaattattttatgtaattggtattctatattcaaggagagcttgaatgcagaaattaaagaagcatatgctcatttgaaaagagacaaatctagtagtgtaattaaagcttgtgccttataacacaataaaaatattcagaaggattttatccttaattgtgacataaaatgatttctaacctttattttttgagtcagaaaaaacggaggaagcatgggttcttctttgctatatgaaatcaaagtaactttacaaatttgaagtgcttagttatctaaaatcatatcatggaaagatatatatttatattttgattgttttatgtatgtaactttttaaagatcagagtgatctgggcaagaaaccagtgctatcagccagtattgcattttgtttacatgtaatagaaatccaactaaacaaggattttattttcatcatgttacagaaagttaggatataggaagtccttccttgtagttgctcaaggaaatcatgaaggaccaagtttattctagcttcctgctctgccacctttagcaagtggacagtccccctacctctcataggcaatgaacttcttcatatccaagcatgtgcttagggcagaagaaagggattggtgagaacaaaaatcacatgccagtgaagtctgttcatcttatattaggaaataatagctcctgcaaatgtcttacttgataggcttctaccactggaactgcctcacatgactaccactagatagaatggaatctggcttgatgagtatttttaagtggatacatttacttcctaaacaaaaccaatattctattaataaaagagaaaggaagaaagattcttgtaaggcagctaatatttctgtcacacagagaaaaacaaattgataatgcagtacaaggttgatattttaaggtagagatttttagcttgagcatttagcatccatttgttcttttaatgtaaatgtcaaacaaaatacaaaaatcgtatgtataattaccaaaaactatttaaaagtaaatttataattcactcaatagagtaatatagattaaataatttttgtaaaatttaacgtgtttttgctttcaaaaaatacaaaagataaaaaaagaatatacagctaaacagtctatatggaaaaaaccataaaagtgtcaaaagtaagatgatggcttatgaaaattacatttttacatttatggatgtgacctgaatgtaaatgtaagtaaattgtaaatgtattataaatgaatgtaaaaaccaaaataaagttgtttattggcaagattgatttaaaaaaaagaaaa

SEQ ID NO: 579 - DNA, 3547 bp, Homo Sapiens
atactgagactaaggtagaaaaagacacttccaaagggtgtcaatgacaagagagaaatagacatagagtggtcacttcatttaccaaccctggaaccgcagacctctgggcttcctgataaagaaaatgggtacggccaagaccatagacctagtgattgtcagatgaacaattagacccacagaaccatccaagctacagaggacgcattctgccttcccttggatcctgtggtttgaggatggaggtctaggaccgtggcaggctttttgtcccatgagggaaggccatggagctgaggaaggggaagaacacacacacctaatggaatctcgagagaaagttcagacatcaaaagacagaagcgacagagacccagatggagtctcacccagcctggagtacagtagtatgatctgcaacctttgcctcccaggttcaggcgattctcctgtctcagcctccggagtatctgggattacaggcacgtgccaccacgcccggctaattttttgtatttttagtagagatgggtttcaccgtgttagccaggatggtctcgaactcctgacctcgtgatctacccgccttggcctcccaaagtgctgggattacaggcatgagctaccgtgctcggccatgcctggctaatttatatatacatatatatatatatatatatttttttttttttttttttttttttgagacagagtcttgctctgtcacccaggttggagtgcagtggcatgatctcggctcactgcaagctcgcctcccaggttcacgccattctcctgcctcagcctcctgagtagctgggactacaggcgcccgcatgacgcccggctaattttttgtatttttagtagagacggggtttcactgtgttagccaggatggtctcgatctcctgacctcgtgatctgcccacctcagcctccgaaagtgctgggattacagacatgagccaccgcacccagccttatatatatattttttattagtgaagaggtttcgccatattggccagactggtctcgaactcctgacctcaggtgatccacccacctcggcctcccaaagtgctgggattacaggtgggagccaccgcaccctgcctaaaatgcaaaagattttgaatggcgagaatggcgacatgatgccacaagtggaaaattccacacctggctgcatgtaatgggttgaagtcaaaatgcagtcaaaaactttgtttcatgtacaaaattattaaaaacattgtataaaatcaccttcagactatgtgtatgtgaaacctaagtgaatttaatggctagacttcagttgcattcccaagatctctcattatgtatatgcaaatattttgaaattcaacctggttccacacattttagataagggatactcaagctgtaattaacaaataaacttttcacagtccaagcagccaaaggcccactgtccctgttccctcagctcacgcccccttccgtgcacagccttatctaatccttctacccttcgttgtgtttggacttcagactctttttttttaagacaaagtcccgctctgttgcccaggctggagtgcagtggcgcgatctcagctcaacctctgcccccaggttcaagcaattctcatgtctcagcctcccgagtagctgggattacagacacccgtcaccacggctggctaatttttgtatttttaatggagacggggtttcaccatgttggccaggctggtctcaaactcctgacctcaggtgatccgcccccatcagcctcccagggttttgggattacaggcgtgagccactgcgttcggtctggacttcagattcttgagctggctgcaagactccaggtcccctgtgaaccacactcaataatccctccctaatcgctggtccccagcagctcagattggctgctgtttgtccagtgaggaggtgggcaagggtgcccttggtttatgcccatgataaaaagaaaagcagctatggtgcagtagatgctcagaactccagcgcgcatcagcctctagagaggggcctggcctctgcttgaacagtgtatttctttctctccttcctggacatactgcaatcaaagcattttctaagagtcgggtgggactccacagatggtcttgtccaatagcctcactttgcaggtgagaacaatgcatccaggccaagcgttttttcattttactgcccgctactctccaagtgcagtctcttaacagtttctgagtctgaatgcaactcttgttaactgctcagtaaaggaattctgtcaggaaagctgcagtttacatcagtggttctcagccttgatgacacattgaaatcatctggggagatttacaagctactgacacctgggtcctgctcctagcggttctgatttatttttgtttgtttgtttgtttttggagtttcactcttgttgcccaggctggagtgcaatggtgccatctcggctcactgcaacctccgcttcccgggttcaagcgattctcttgcctcagcctcctgagtagctgggattacaggcgcccaccaccatgcctggctaagtttttgtatttttagtagagacagggtttcaccatgttggcctggctggccaggccagtctcgaactcctgaactcaggtgatccacccgcctgagcttcccaaagtgctaggattacaggcatgagccaccgcaccaaggctactgatttattttaattagggtgcagcatgagcactgggatttttttactccccaggtattcccaatatgcagccataattgagaaccactagtcaatatggagtgtgtgtgtgtgtgtgtgtgtgtgtgtgtgtgtgtgtgtgtacatttctaggtatgggtgatatttgcatgcagcacgtatctgtgcacatagacacatacacacacggaaatctggacttcccaatacacagagtaatacatgctgaggtcaccagcaaagcaggacaataaagaaagtgagaaaaaattttgagagccagacacggtggctcatgcctgtaatcccagctttcagggaggcagaggcaggaagatagcttgatcccaggagttcaagatctacctgggcgatatagcgagaccccgttctccacaaaaaggaaaaaaaaacaaagaaaaagtttttagaacatgatatttaagaaacaaaaaagtcatcatggagaaaataacattttttttttttttttgagacagagtctcactctgttgcccaggctggagtgcagtgacgcgatctcggctcactgcaacctctgcctcccgggttcaagtgattctcctgcttcagcctctcgagtagctgggattacaggcacgtgccaccatgcctagctaatttttgtattttcagtagatggggtttcaccatgttggctgggctgatctcgaactgctgacctcaagtgatctgcctgcctcaccctcccaaatgttgggattacaggtgtgagccactgtgcccggctaaaaatcacattctttattg

SEQ ID NO: 580 - DNA, 1728 bp, Homo Sapiens
aggtgggcagcagggcccttcctttccccacaggcagggaacacttgtgtttcctttgtttacttctttagcttatgtcttccgcgatgaaacggtaacttcctgaacgctctgcagttcatcgctacactcttcctccatatctagaacgtggcctggcacatattagatgctcaatcatcattttaaaataaacgagtagtgatccattcaagtaacgtggataaacatcaacaacaacagctgctttcaggaaaaaagggcagactctgaattatgaagaatgtgagaaacttagatcagtatcatgaagattgtgtacttttactttttagggcagctttattgagggacaaatcacccattttattttttagttttactgaggtatgattgatataaaaaatggcacacatttaaggtatacatcatcatgagttaagacatatgcatgcgcccatgatgccatcgccataaccaaaggttaaatatatccattaaatatatccatatctccagaaattgccttgtgctattttgtaaatcatccatttaaaatttataattcaggctgggtgcagtggcttacacctgtaatctctccactgagttcgaggcaggagggtcacttgagcccaggagtttgagaccagcttgcacaacatgataagactgtctctacaaaaaatttaaaaattagccaggcatggtggcgcacacctgcagtctcagctattcaggaagctgaggtgggaggatagcttgagccagggaggtcaaggctgcagtgagccctgatcataacactgctgtccagcctgggtgatagagggaaacccccatctcaaaaaaaaaaaaagtgctaatttctactagacttctcgttagttactgtatcagaagacatgtaaaaattatagggcagatcatgagtgttgaaactttgaataattgtatttccccaagtgtttatttttgcaatctcttgttataatttgcaccacttccttcccccagattatgtttgtgcttgtttgtactggagagcatggaagagctcacaggagaaattgtgcctccttcgccatccaggggatgttgtataggaatcaagagcttggtagacagaagtcttagaggcggagctgcctagattcaaattctgactctaccacttcctagctgtggcaagtgactaaacctcctacctaagagtcacgcgggctggagtacagtgtcatgatcacagctcactgcagcctcaacctcccaggctcaagcaatcttcccacctcagcctctcaagtagctgggaccacagttctgtgcattctgtggcaagacaacaaatagatgggatgatttctgtggaagtctacaggtgacatttaatcatggctacagtatttcatgtgagcacaaagaacaagccaagactcatttggggaaaaaattaatcattcatctaataaatgtcttttgaatgcctgtcataaccaggaacagagccaggtacgtgatgaacaaataggctggtccctgccctgatgaaagttataggctagtgtggtcacagactatgaacgaataaacaaatacatatagacaagtcatcatccctcatcaattattttgatatcacaaagactctgaaaagtatttttttaacccctttagcagtaaaacctaatttgtattaaaataaagcattatttatttgtctatcca

SEQ ID NO: 581 - DNA, 8508 bp, Homo Sapiens
aaacccccctgtgcaagttaccttatctgtgcctgttggctattctttggtttgaaagaattcttccaaggatccaccctaactgcctgcctgactcgtttcttcctttcccctctcagtaagggagatgtttcctattatccttgataatgtgccatgaacatatgaaaaaacatagaaacatgaagaaaacaagaagacaaaaatcactaacatctggttggctgtatagaaacaaagctgattctggtctcgctctataccccaggttggagtgcagtggtaagatcacagctcactgctgccttgacttcctgggctcaagtgattctcctgcctcagtctcctcagtagctcggactacagcttgcaaatggatcttacagacgttgtcacagagacaagaaaagcatataaaaaaataaataaagatgagctcctttcaaggtgactgactagaagcagctggtgtgtgctgctctcacaaagagaagaaagagtggtgagtggaccatccaggtggacacattgggattcatcaaggaaacaatacacagaaaacagaagaatgagacaggacaatcattcacccagaagtggcatagagccgggagatggccctcaccatggttagtaagtgagagtccccagggagtcacatttctgccacagacctttgcaaccctgggcccaggcgatcccccatgacacccgtgccccaccagggcctctggactgacatagacagctacatggagtgtgggcagaactgccactcaggcactcatgaaatccttggagcttttcatccccaggcaccctggtaccaatggctgcagctgcggcaatgggggaggacaggctctcttgcatgtcctcagaataggaacacaatccatggggctaagcagtgggtggactgtggggctcttctacacagcccgttgccagactggcctgggatcctagcatggtcacaaaagtcccacctgggctcttgaggaacagatctgtacttccctggcatggaactcctggaggggatgggcaggctgctgtttttgctgctccacagccctcactcctgttgccctcagtcttgggagtgagcacagtgattggggactaacatagacccccagcacagtgtacagacttgcagaaaagcagccagactcttttccacatgggtcctcacccctgctactcttcactgggcagcacctcttgaccttggcccccagcacaaccaacccgcccccacatgaacgctttgtcagtgatggctctgtgtttctctgaggagaaaaatccaaaagacaatccataagccttctgctattgcagctgcagtggtatggcccttactaccttcaggctggggaaagaacgaaggacttggtccttacactggcccctccagcacaccatcgccaccatatggagaagagcccagtctctcttccccgtaagcccccactcaccactgttcaccaggcaaggcccctagttggggacagcagagcagctgtcctacccccggatgagaattcccactgctattggctctatattttcctgaggtgggcctcccagaagcaattgacatcccctctgtcactgtcatggcagcagttctgcccttactgcactcagactggggaaagaacaaacagcctgaggtcttcactcacactcctagcacaacacagtcatgatatggagaggagcccagttgttcctcctggtgagcccttgacctcctacttttcatcaagtgaagcctccagcttgggctagcagcgtagccaccccacccactggctgaacattctcagtagcaatggcttgcgtttctctgaagtagggctcccagggacaacggaaagcacctctcccactgccactgcagcggtactgccttgctgcccttggactggggaaggggcagagaccttgagtgcttaacccacatgtccaggaagtgacagctgccctaaggagaggaggccagtctgtctcctctgtgagacccctgccacccttgcgcatcaccaggcagggcctccaggcatgggttcacaatgtagctgccccaatcccaagcccatctctccaattagtagtggctctgcatttctctagggtggagccccaagagacaagtgaaaggccctctgccacagcaactgccaaggtcccttcccctgttgccttcaagctggggagggaaaataaagccttagctcgcccctagcagcagtgtgcagcccaggagtgccaaggccagaccttaagccagcactggagtgggaaagggagcccacactttcagagcactgagagggagcatggctgcaatcatgaagaaatacagaggagccacgtggtggagcaagagcccacctactggccattacacttcagtgccatctactggatcatagcccaaactccaactccaaaaatgcttgctaatatacccccctctgtgaaaacaacgacaagatttcaacaacaaagaccctgcacaaaacctcggccctcaaaaaacattcaaaaaaggagtctgcactcaattacaccacagttaaaggagcatcagcccacacagatgagaaaaaactggtgcaagagctctaacaactaaactacagtgttttctttcctccaaataactgtactagttcccaaggaagggttcttaaccaggcagaaagggtggaaatgacagagagagaattcaaaatatggataggaataaaggtcatcaagattcaggagaaagtcaaaacccaatccaaggaatctaacaattacaataaaacaatacaggagttgaaagacaaaatggccattataagaaagaaccaaactgatctgatagagctaaaaaacacactaaagaattccttaatgtaattgcaagtattaacagcagaatagaccaagctgaagaaagaatctcagagctcacaggcaacatctctgaactcagtcagacaaaaataagaataaagaagaatgaacaaaacctccgagaaatatgggattatgtagagaccaaatctatgactcactggcatccttgaaagagaggaggagaaagcaagcaacttggaaaacatatttcaggatatcatctatgaagacttccccaacatcgctatggagaacaacattcaaaatcaggaaatgcagaaaatccctgtgagattctatataagaagaccatccacgagccacatggtcgtcagattcttcaaggccaaaacaaaagaaaaaatgttaaaggaagctagagagaagaggcagatcacctacaaaggaaacctcattaggctaacagcagatcattcagcagaaatcccacaagccagaagagattaggagtgtgtattcagcattattaaggaaaagaaatttcaaccaagaatctcatatctagccaaacttagtttcattagcgaaggagaaataagatcctattcagacaagcaaatgctaagggaattcagtaccaccagacatgctctataagagatcctgaagcaagtgccaaatatagaacagaaagactgttactgaccactgcaaaagcacactaaaaacgtagaccattgacactgtaaagcaaccacacaaataaagctgcataataaccagctaacagcacaatgacaggatcaaatcagcaaataccaatattaaccttgaaagtgaaggggctaagtgccccaatgaaaagtcacagagtggcaagttggataaagagcaagaccctggccaggcaggtgactcatgcctgtaatctcagcactttgggaagctgacacaggtgaatcaagaattcaagaccagtctggccaacatggtgaaaccccatctctattaaaatacaaaaattagccctggacatggtggtgctcatctatagtcccaggtactagggaggctgaggcgggcggatcagttgaacccaggaggcagaggttgcagtgagctgagatcatgccactgcgcttcagcctaaaaaaaaaaaaaaaaaaaaaaaaaaaaagcatgatccaactgtatgctgtcttcaacagacatatctcacatggatccataggcttaaagtaaagggatgaagaaaaatctaccaagccaatggaaaacagaaaatagctggggttgacagtcgaatttcagtcaaaacagactttaaaccaacaatgatcaagaaagacaaaggaagacattacagaatagtaaagggttcaatacaacagaaagatgttactattgtaaatatatatgcatccaacacaggagaatccagattcataaagcaagttcttagagacctatgaagagatgtagataactggacaataatagtagtagacttcaacaccccacagacagtatattacacagatcactgaggcagaaaactcacaaaaatatccaggattcaaactcaacattgaccaaatggactcaatacacatctgtagaactctccaccaaacaacaccagaatatatattctactcatctgcacagagcacacactgcaaaagagaaaacacaattagccataaaataatcctcaggaaatcaaaaacaaacaaacaaaaacaaaatcatacaaatcacactctcaaaccacagcacaataaaaatagaaattattacttaaaaaaccctcaaaaccataaaattacatggaaatttttaaaagccctgcttttgaatgacctttgtataaacaataaagtcaaagcagaaatcaagaaattttttgaagttaagaagaataaagatacaacataccagaatctctgagacacagtaaaaacagcattaagaggggtgtttatactgctaaatgccacatcaaaaagttagaaagacctccaattaataatctcacagcacacttagaagaactagagaaatcagagcaagcaacctcaaagctagcagaagacaaggattaacaaaaatcaaagctgaatggaaggatattgagaagcagaaaactgtacaaaagttcaacaaatataagaattgatcctttgaaggaatagattagatagatagacccctagtcagaataataaagaaaaaagggggaagatccaaataaacaaaatcagaaatgacaaaggtgaacactaccactaaccctacaaaaatacaaaaagcccctagaaactactgtgaacacctaaatgcacacgacatagaaaacctagaagaaactgataaattcctgaaaacatacaacctcccaatattgcaccaagaagaaattaaaaccctgaacagaccaataatgagttctgaaatttaatcagtaataaaaagcctaccaaccagaaaaatcccaggaccagatggattcacagatgaattctaccagacatattaagaagacctggtataatccctactgtgaatattccaaaacatttaggaggaagaattcctctctaattcattctatgagcccagcatccttctgataccaaaacttggcagacaaacaacaataaagaaaactacaagccaatattcctgatgaacaaagatgtaaaaatcctcaacaaaatattagcaaactgaattcagcagcacattgaaaagctaaatgaccacaatctcttaagctttattcttgggaggcaagaattggttccatagaggcaaatcaatcaatgtaattcattatataaacaaaactagaaacaaaaatcacatgatcatctcaatagatgcagaaagggcttttgataaaattcaatgtcccttcatgttaaaaactctcaacaaagtaagcatcaaaggcacatactcaaataataagagccatttatgaaaaattcacagccaacatcatccagaatgggcaaaagctggaagcattccgcttgaaaactaaaacaagacaagaatgccctctcttattatttttattaaacatactactggaagtcctaagcagaataattggccaaaagaaaagaaaaaaaagcatccaaatgggataatagaaagtcaaataatccccttttgcagacgatatgattctatacctagaaaaccaaatagtccctacccaaaacctccttgatttgataaacaatttcagcaatgtttcagaattcaaaattagtgttcaaaaagtagcattcctatatagcaacaatatccaagctgagagccaaatcaagaacacaatcgcattcacaatggccataaaaacaataaaatacccaggaatatagctacgcagggaggtgaaacgtgtttacaatgagaattacaaaacactgctcaaataaatcagagatgatgcaaacaaatggaaaatccccccatgcttatggataagaagcatcaatattgttaaaatggccataatgtccagagcaatttacagactcaatgcttttcctatcaaactactaatgacatttttcacagaactagaaaaaaaaaactattttaaaattcatgtagaaccaaaaaagatcccaaatagcaggcaatagtaagcaaaaagaaaaatgctagaagcatcctgttacccaactttaaactatactacaaggctacagtaaccaaacatcatgggtttggtacaaaaatagaaatgtaaatcaatggaacagaatagagagctcagaaataatgccacacgcctacaaccatttagattacctttgacaaagctgacaaaaacaagcaatggggaacggagtccctatgcgataaatggtgtgggataactgactagccatatgcagaagattgaaactggatcccttccttacaccatatacacaaatcaattcaagatggattgaagacttaaatgtaaaacataagactattaagatgctggaagataatctaggaaatagcattctgggcataggccctagcaaagatttcatgacaaagatacaaaaagcaattgtaaaaacaacaacaaaaaacggacacatgagacctaattaaagagtttcagcacagcaaaagaaactaccaacagaatgatatgatttgactctgtgtccccacccaattctcatgtcaaattatagttttctcagtgttggaggaggggcctggtgggaggtgattggatcataggggcaaacatcccccttgctgttctcatgacagtgagttcttatgagatctggtggtttaaaagtgtgtggcacttaccccttcactctcttcttcctgcttctgtcatgtaagatgtgtcttcttcctcttcactttccaccatgattgtaagtttcctgagacctccccagccatgtttcctgtacagcctgcagaactataagtcaattaaacctcttttctttataaattactcagtctcaggtagttctttatagcaacacaaggatagacaaatacatagagtaaacacacaacctgtagaatggtgaaaaatatttgcaaactatgcattcaaaaaaggtgtaatatctagaatcaataagaaacttaaacaaattaacaagcaaaaaacaaccccattaaagagtgggcaaagacactactcaaaagaagacatacatgtgaccaacaagcatataaaaaattcttaatgtcactaatcattagagaaatgcaaatcaaaaccacagtgagataccatctcacacctgtcagaaggactattattaaaaagtcaaaaaataacagttgcagctaaggttgtggagaaaagggagcacttacacactgttgctgggaacataaattagtttagccattgcagaaagcagttcagagatctctcaaagaacttaacacagaatgaatgaccagttgatccaacaattccattattgggtatgtactgaaaggaatataaatcattccaccataaagacacatttatgcataagttcactgcagcactaattacaattgcaaagacatggaatcaacctagatgaccattaatagtgcactggataaagaaaaagtgataaatatacaccatggaatagtatgcagttataaaaaagcatgaaatcatgtctttttcagaaacatgtatgctgcaggagaccattatcttaagcaaactaaagtagaaacagagaacaaaataccacgttctcatttataaatggaagctaaccattcagaacacatggacacaaggaagagaatgttagacaccaaggcctacttaagtgacgacagtgagagtggggaaaggattgaaaaactgcctattgggtactatgcttattacctgggtgacaaaataatctatacctcaaaacttcatgacatgctatttacctagataacaaacctgttcatgtacccttgaacctaaaataaaagtttaaaataatcctgaaagtaggtaactaaagtttagagaaaaactataaaggagatcaagagataatctagttaatggaactgaaataaaaagtattcaaaataactccacttatatattataaaatt

SEQ ID NO: 582 - DNA, 17978 bp, Homo Sapiens
agcggccggtcggattaaaagtaaccagactcgtccagaaaactgcgtccaggaaggaagtgacagaagacgaatgggaaaaggagaacagctcacagcgtttgaaacatcgcgtaaaaaagactgggggtggtgggggcgggggggattgaaggatactgggaggggaggcgggggtggtagggaagacggagcacgaatggttggggttctaagcagcacgtccgatgaaatgtcttttgcctccttttttccccctttatttaattttgtccttgcctttgcttcgcgctgcctttttctctccgtctctctctcccccacaatcccaaaccgttgactctttcctcgcgagctggagaaatcatcagtttcactcttgcaaaaggggggcgggactagacctcggagcattttaataaaacaaacatacagcagctccctcctcacccctccagtctcaactagattgataaattactccactacactactttaattatgtatatggtatgcagaataaatcactgaacatcagtacctcaatcaagcacttttaaatgataattgcatcttggtgaatcaatctttccattcctgacattttgctaattttagttttacggtggggtaatagcacatgccatacgcaaacctaatgacaattctttattgcacgaaatgaagacaacacggcgagctgcggctccctgctcctctcgcggcgcctctgcggaggacgctcggagagaacctagtctcccgctgcggcgcgctcgcttgctctccggggacgctgcgagccagccagcaggaaagtccttctaaagtcgggatctttcctctgaccaataggagcgcgaccctaatagttgctcttgtgacttttcccccttttggacacgcgttagccacttctctcttccaccggtcggtgcgctcctccgttactcacgcgtaaaaaccacggtccaggatgtctgcagcactcgattccagcgtgcttttcctgcacgcccagaagtcgcggttttcaccctgagaggttggagcgctagaaagcgagccgaaaggtttctctaatgttagtaatgtacgaaataataaaataattaccagtatttgagatctcgacttcatcgcggggccatgaactttctaatcagtttggaaatatttaccgaggaagcagcttcctcggagttccccccctccccccactctatcttttccacaccttactggacttcatccaggtcattaacatgtaaaccaaaccaacttcccaaatgcattaggctaccctagccgatagctgatgacttcacttatcctgaagagtttcagctgcacaggaagcagaaatagagactgataagggaggatacttatgttaaggttaaagcatgataaacacttttccttacaaaaaaaaaaaaaaaaggctttaatatttaggctactagagattgggcacctcccgccctaaccaactgttaatatataccatgcccaataaagccaaagataaaatacatcaactagtatagaatcatgaaaagacaagattgcatgccagtagaattatagattacataaaatgtttaaaccaaactattttttaaaaaatattgtgaaagcaagaagggaaaattaatagaacatggaatatatgagattagacaatagtatattgaaatatctagctaactaaagatttcctcactttagaaaattccttttagcactacgtttaacccaatgactagttgtatttcctgttaagttcagcaatatgcctccagatgactattttaatatatgaggacagtatggttcaaaaagcctcctgcttcaatgtaggaggtatttgatgtgagtagcttctctcagaagagtggcctcaacatttaggcaactgtcccaaggcttcacttgaaaggggaaggtttattttataggcaagtacaactagatctgaacaatcttcaagttccagctcatcattgtgactatcagcaaaactaagaccattccctcccttttattataggaatgcatcacaaactgtcacaaagcaaaaaccatctgaaatagtagtatttcttgcagattagtatttacaatgtattttgtttgccggtttttcaaatgttgagtttgccattaccatgaattcattttaataatatggcagagaacatctgtatcaggtttccattcaaagtacaacttctctgaaaatccaaaaatttaaagggcaaagatatttcgaatactaagatatgtctatatatggtggtaaaaataaaattaattttcttcaagattcacgaaggtcctgaaaaagcaaagcatttgaaggaccatctaagtttattgccataatacctaaaattaatgcagtgagttacaacagtctatttgacatgagcaaacacatagccaatacatgaatttcagccctgctgtttttaatgaattatagagggtatttctgtttaccacagtacacttcagttttagatgttctttcaaaaagaaattattttattttaccttttcatattttaaataattatttaataatacccattataacaaacccataattattaatgatactgcaagcattcaaaaataagtataaccccacactggataatttgaaaataatttggatctggaatgtatcacagttggccttttaaaatacaggattttcccctcagcagatttagcttcttaattatgtgtgacctaagttaatattaccattagttttcttcccatgagcctttacagttgaagcagaagagatatgaagaaatatacattagaaaatcacctgagatttaaaattattcatgagtaatccacaaagtagttaatccagagtgtgctttgtattctttaaatacttctggacttttggtttctgtttctgtttttgttttttctttaaaatcatcctgatccttgccatctaatgatacttggttaggatcagactattttctcatgtagggaggagcttgtactaggtgtcaggagacctggattctctatctagttcaaaatttgtgccttactaagggatttgtcctttctaggcttcagttcgcttatgtgttaaatgagttctgtaacctattccagttctatcattggaaaacagaaaatgtttctaccctttaaaccaattggaaggtagggtctatccagttaaataataggtgacaattcctttaaaagaaaattatgtctgggattgatgtactactgtaccagcttttatttttttctaatcaccaaatatttctcctacattaagttgtaaatgctttattgttaatgtaaatatagagtcacttgtttttccctcaaaagaattatgtttagcaatatatttaattaaagtgtcatagaagttacagagagcatgctcctcgggattttaactccagggaaagctaatattgcaatttctgttcagagctgcataccatcttactccaacctcctctcttcactacttccctacattaaagcagcggtccactaaagccctgtgcactgggtctgcctgcttttaagcctggcccacgctgggtgtagctcttgaagtgagctttaaaaattattttaaagtgaactggggcggttgccacagcaacccaccctgagatgaagaaaggctatagattaatgtaccccttaagattattcaactgtatagtatttgttcctcagccagaatacttttaacacaaacatgataagtgaacatggtggtttagaaaaatctaaaaagcagtgaaacacaaattccaatagcattacatattttaatctttgtctaattatagtattgatgatacacaggacttcccatgaaatagattaattttataagatacagtacttgcaaaagtaggccctgaaagatgacatgatctttaagcaaaatgatatgtcattgcttataatataaagtgtatggtggtcatttaactctttattattgttatacacgtctattctgtaaatacctaaggccaaggagtttggcagttttacctttatggtaactctgtggtaaatgataaaaacaaatgtgagcactcaccacatacacttctttactgccacaatcatttgccttccgttctttacttcatctcttcatagaagttacttcacagtttgcaactcttctttggcaccttcaaatgtggaagtgcaaaacagtatatagtattttgttaatgctgatatgaaaatactttcaaatagatttatttctaaaacttctaatctgaagtaacaatattctgattttaaaccaaagtgttttgaatataagacaactgaaattgtcatgcattgtgataataatctttaacataaatagtgccaaatatctaaatttcaaaaattcactaggtgcagcattaacccaagaagaatatacagcatgtggaatgtctgtgattgagaatttgcaatatacaaaggatttgttatttcaagacaaggtttacacatatctaaggattctatgtttatctgtatttctgtaccttcagttttatatctgatagagaattacagaagaatgtcaaatccattatatccgaagctaacacaatttgtcaaatcgggaaatgtttgcaatgcagttgaggttactgaaagggcttattttatgcattgcctaaaggccaatttaaaatactttgggattagtgatgtgtattcagtacggtttataaattctattaccaataataccttatttttccaagcagtgtttaactatactgagcacagacaaatgctcctgtgttctgatttctgttttagtctggctttccatgactttgtgcacacaaatgaacctttccttggcttcagactgaggctagtcccagaaagagaaccagccttgagacacatcagaccaggatggtcaatatctcttttcccatttgtaatagcaggaggactttgcatagtgaagaatcatttataaagcctctatatttgggttgacatctctgaggtttatttttaagttgcttcagagtcaaagagaaatgaaaaattttggccagttttactttatgggtgttagttgagtttaggtttttaggcttaggcccacagtgagtgagtccaaacttggtcttgtagtcactaccaagtgatttggtgagttctctttcttccagttgtgcttcattttacagtctattaagtgagaatcataatacacatctcccagggcctattcaccttatagaaatgcaatcttcatgaaataacatctgaaaggtatggtaaggttttttttttttttttaaacgacactacaaattatgatacatttctttcttttcctgtaatcagtatgtccaaataaggcttgatcagtaatttgcttgcaagtgtgtggctgattcaaaaataaccacatgcatgaataaatttaatgcgactttacctttacttacaaaattgttaaatgttgttcatcagaacattgattctatcccatttcttgaaatatcacagaaaccttcaattcaaggaatggattttcacacttccccttttaactgtttcttctagataccttactatgtgtgtgctttttcattttaaaaaatctttacccggggttgtggtggaagtggggattaaaaatctcgtcctgcgttttggtgcccacttctttgtttggaaagcagagcgctgggactcaatccggacggccctcaaagacccagacgagggacgcctctagtttgagcaactcactccgctgagttattgattgcaggcagcaacaatccctccggttgatttgtgtgaaaagtgaatccgctctggctgggcgttcagcagaggcgcaacagctgcaacgccatccaattattgccgatcctcccctccaacactgctctcatcacctatatactcttctctctgcccgtctctgcttccccccccttccccccccccttttctcccggccgacggagctgaaggggcgggggttccttccttggagtgtttctagagctcggaggctgctggtagggggtgagtgcgccacgtgcgtgcgccacgggcgagcaggaggcaggctctgggccctcctggggacctgctggacctgctggacctgggtgcgacgagtgggcggccacgctggtttggcgcggggaaggaagggggtgtgccgacttgtatttagttgggggttgtggaagtcacggctgggggaaaagcgtccggtggtttgttggtaaagagggtgcgtgatgggctctggggaatggaggagggcgcaacggctgtgggtggactgtggaaacgggcggtggcagtgccggggtagttgtcctgctggtctggttttgggatcctgggctggagaaatgcgatccaaaagagctcgggatgggctcagagcgacccacgaaaataccaggggccaagtaaaatgaacccaccctttaacagtgcacaaagcgctggcacacggtccacgtctggtgacgcaggctgcccgaagcgctccaaccattttgcaaacctgggagagcaagaggggctctgcaggtctagccgccgcccctgtcccactctggccagccggagtttttcacctgacagaccaataggaaagaacacgggccccaaactggattttatagtctgagctctcagcatctaaggaattatatttcaaaaaacaaaagccaactcatagctctattaagctaacgcgtgtgcgagttttggctaggaaaaagccacaaagtaaagcaagaagtagggtattcaggataaaacacacactttaaagacaaaacagaaaacttcctttccccttgtaccccctttatttgttaacacaggggaacggttctgggatgtcttacaaaaatgctgtcactaaatgcagatatctgtgctgttctttgacctgtctggcattgtggaatactcaattacatcgaaggtgtaaaaacgtttatgttatcatgttcttgaaacatttagcggctaccaagatggtagctatttaaattaattaaaataagataaaataaaaataaattctgtccctcagttccactggccatatttcaagtgctcaatagccacatgtggctagtggctcccttactggacagcgacatgtcaaacgtttccatcactgcataaagttctgctggagaatactgctatagagttcaaaatgaatgctggttaaaaaaagaaagaaagaaagaaattactttatgactgataccagccacattttaggacactcttggagtttctgttacttggcactagtgtgagaagctttaaagtcagactttcagtatcttcctgctgaaagagaccttggggaacacttcacccagacacctaatttttttataggcaagagaaatcaggcccagagaagttaagtgatgcccccaaagttatgtcataaatttggaaagaagataaggtcccctaacagggtccagtatactttgtgccagacaaggacatctttctaggcaaattcatcttacagaaagtcaacttgactgaaaattttaggcaagagtacccttttacaagaaaaaatactgctaagtattcctccaggaagaaattccatttaacaaagaatgaggagcatggggaataatactatctcccaaactaaaaatgtattattggtagtgtcatagattcatataatgccttttctaagaggctaattgggataacactgtgcttcattctactttaaaaattctgaggaaatgggattatcctcttaaagagctaaaaagcattcttaaggtcagggaggaaaggtgtcacctaaagtgaaaatttttagcaaagcataatctttctcaaatttgataaagatatcggagacattgattatgatataactaggatggaattggctcagaaatgttaataaccaaccaaccttttttttttttttttttttttgagacgcagtctcgctctgtcgcccaggcttgagtgcagtggtgcgatcttggctcggctcactgaaagctccacctcctgggttcatgccattctcctgcctcagcctcccgagtagctgggactacaggcgtccaccaccacgcccagctaatattttctttttttgtatttttagtagagacggggtttcaccatgttagccaggatggtctcgatctcctgacctcgtgatctgcctgtctcggccacccaaagtactgggattacaggcgtgaaccactgcacccggcccaaacaaaacattattacaaattacactatctgaaacatataaggcaacagaatacatcataaagatttagacaaagcataagctttcttattagttttattgttttgttttgttctgtcttttgggtttgttttgtttttaatgccatgtttgtattctatatatcttattgttaattaggagtgaactgttggtattaattctgctcttttatagtagttaccttttaacttaacacttagttaaggatccccgaagtgtccaaataagagtacttatgaatattaaataattttaaattaataacaataaattattttaaaagtgtagatttacatttttatttgaattattgtctttattgctcttcttaatttaccatttgcgtgtggttcagcattcttcccattctccctaaaatccagtatccttagagaaaatgtttcacttcttcaggtgcttgtagacatggaagaaggcctcaccttctccatggctgacaaccgagaaggctggtctgacttggaagaagctgtgtggccaacagccaattggctgtatcacatggtaactgtttgattatgcatatggtttaaatctccctttgcctcagtttcctcatttgtaaaatgtggaacaaaatgtgctatcctcaaaactttgtttaaggattaaatgagctattcagcataaagcacagggctggaaaagtgacaaactgcggtaaaaattagccattcttaatctaatgcaaagaatttccacttctataccattaagttctttattcacctatactggggttatcacagcagaaagaagtaggtcatccgagaggtgggaattggttcaggatgagatttaccttggaagaggtaaaatgttttaaaataccatgacttaagtgtacaggttgccttatttccctttcactgacatcatgcctctaggatattttttcttttttggggggatgctttattatacttgttagccacttggttgctgaaaaggcactgaaaactcagagtctatcctcttttcaccctggttgacctttggaatgctattgtcagccaagatgacattgatatcttcagtctccccctagcttgaattctttaggtcagagtccgctcagattgtctcctgatgtcattccaagtgtctgatggccgtctatggcaactgggttgggcaaaagcctgctgggaaggggtagcccacagaatgcctaatggagcgttctgttcaagaggacctagaagtagttctgttagacatatgatcaacactacagctgtgttaggggactgtaccatttcttgaaaaacagaagcatagtcattttgcatttttggttctaataaagtcccacctgagatgtttatgatttatactgattttatgattaagtatgtattacagaaaaaaacagacttagagaatgtcaataaaaattttatatctgatattcacgctaacactagttattaagtgaagaccccaagttaagacagaagagtttagaaaagaaggaaaagagctaccgcatggcaaaatgtacattattctatctttctaggtatttttctttttctttcttttcttttttttttttatggagtcttgctctgttgcccaggctggagtgcagtggtgtgatcttggctcactgcaacctctgcctcccatagagatggggtttcaacatgttggccaggttggtcttgaactcctgacctgaggtaatccgcccactttggcctcccaaagtgctgggattacaggcttgagctactgtaccaagccatttctaggtaattttttaaatgactatgttctacttatctggatcttacaaaattatttataaaatattttatttataatcctaaattttaaaccaagcaatataatagaaaatgttatgttttcaagaaggtaagatcatgcatagatctatatgctttcaatacgtaattttatagaaattgtggaacaaggaggcacataattatatcaatattctaatttcttaggaagaaacagaattttcactgggaggagtttctaaattattttgtaatatggtgagaattaaaagtaaaactcaataaaacttttaaatttaagtgagtgattaaaaccagtttgtttcaccaaagtactgattgagtcaaagactcaaacaaaaggccagatttcctacggactattacttatttattcatttatactaaatgtgtagttaaatcttttaaatcagtaatgttcttagtcataatacaatgatatctggagtatatatgcaaaaataatactatcttattagaatgtgggttgaaatgaatatttgaagtacctaacatttaatggccacatactatttgtcaggctctgtattaattgctttataaacttttgtttccttttattcaaagaacaaccttttagacatgtactattattgtccccattttaagattttacacactaaagctgtgagtgctgacatgacctgcccagggccacatagttcctaagtgccaaacgacataaaaccaatgtgtttgtttccaatactctacccttagctatgatgctatactgcttccttgtattcataacgtttgttcacttatagtgataatataatagatatttttgtcccaccagaaaatatttcagaaatacatatctaaaggcatgtcatcctctttaaggtagacactttagaagactattcatttatttcagtaatgttgtctttgctcaagtctatttagaaatctcctcagggatttgctacacagtcttaaaactggcctgattgttggcaaatccttatcattaaggatgaattttttccaaaagtaaatccaagccaaatgtagtaaacaggatgaaaactaagatttgagtataaagcattagattatttgatatttgtctcataaattgacactaattgaagatataaaagaggaatttcaaagtatttttgatatgattttataacctttaaggagacagttttgacaagtaacactcgtaaaaggtctggtatttttttaaaaaagtcattttcactaaattaatagttatagatcatgtataaacagcatgggaaatgttcttttcaaagagtataaaatgggcagcggagggtaactaggaaactctggagcagaatccacgtttagacactaaataattgttttgaccttaattttctaaatgccctttttgtaaaatggggaaggtggcaggaactacccatgataatgattttgccgagagaagcacatgaaattgtacttctgtggccacttagtgcctcgcatatagaaaattctcaataaatgttagctattatataccatttcactttcaagaaataccccatattcctggaaaacatctcaatgttgtagttatgtaatgatattttaaaagatgttttcttttctgtcagtttcatgcttccaaacagttattttatgtaaagtatttgatatataaagtaaatataaacatttatggtcgtatgtttattcagttaatatgtattatatcaagaagtcttacatgttggactgctaactatattatccttgtcagtgttctatataatattgtctttagataaacttttttggggtattcttattggatttcatcagacttatgaaagtaatgacatacccatttgcccagaatgatgctccaagattttattttttagttacctcagacatcttctaaattgtttattcattatataatcttaaatttaagggaactgagcataaatatgttgaattagtggcttcctattagatcccagtgaactcctcttaaaacagggctcttatctgtgtagcatatgcgcagttgtgatgttgtgaaagtttgtctttacatcactctcttccctatactcaccttcagcaggccctgctttcactttggcatgctccactcacccagcagcaatttttacaatcagtaatagctctttcacgagtgcttctttctcctctgggccttccactgatgcgacctacaaagtcctttcatccctcagccgcccctttatgtccgcggaattctttccaactatgttctatcagaggagccggccactacagccgcctaatccatgacacggtatcattgtgcaatcactttaaatgaacctctcttcaaaagttttctgaaaagaattcataatccaaaggagtatccatgcttccacagataccctgctgtgttggtcaggtggtgttttagggagcactttcagtatgtctcaggtccctcccaccagcagccacttcatttgtccacacagatctaagccttggatgcaagcaaatgggaaacctggcccttacttgaggaagcaattttgtttttgaaaatgttgggattggaagatgaactctctatcagcaaaatattaagatactccttgaaaatttatatacttaaaaaattgtacattgcattacctgttcccctggtctctttttctattccctctttgcaatatgaggcaggcagccactgcgtgtcccttgtaccatagtgactatgttgtcactcagacttaccctgtgtgctctcccttctgccccaccaaagccaccagaggtgtaattagtgattatttatccagaaatgtcttgaacagggtttaagaactctttgaagagaatatgtaccacttgttggatgaaagagagaatttgaaacggttggggagaggtttagggacagagggcaaatttcattctgccttctatctcctctattaaatcacagataaagcatcttcctatgtgcaaagacagggtacataaacaaatatttcccaacttagtgtagtcttaaatctttaaataaagagtatccatatcaaatggaatgcaattttatattaaaaatcatcactcaagattcaaaaggaagaaataagattctaagtaaaagattttgaacactactaaagtaagaaacattctacaactttcttattccttttgacccctttagcaaaggctaaatagctagccaacagatttcctcccaactattccatttaacttcctttcttccttccatctgtcattcattcattctttccttccttccttcatcttttctgcttcctcttttcattttcaagttgtaaattctttagtatcagttgtgaactcagtaaagctacacacacacacacacacacacgcacaactggttattaacaggatttttcctttgcgttggaaaattacattttctgtttcagaaccatagggtattattcttttttgatttatcagaatcacttcaaaataaaataccttcactaaaggagcttatttctaaacaattgatgatgcatgttatagataatatggtcatagaataacttctatgattattttttgttattaatcactgtaattactctatgattgcaatgatgattaacttacaatgaataaggtctgtgcttgtgttggttatatagtatttgtgaaggatttatgttcatgcatccacacagtctcatctcatccttacgtagccgtgagattctagtctgtgtagcctacggccgcaaaataaactcacccacaggagaataaagcctatggtttctctcacattatcagtgggctataagctcttaaactccacaggtcagtgatgattaactgagcattctaaaacttggtgaatgtgtatgctctacactctcatacgttccataataagcactgtctgtattgtttgaatgactgtcctgaagagttcgctcaagccgttttatcacatttcaagctgtattatttagcatcttaaacttaagaaaaacttaagaatgattttttttctggcttttcactagtatttgatgacacttattttccagtctacataagataattaaaataaatgaactactcaacacagtagtgtttaattatagcagacaatacattttaaaaggtaaagtctatacttgtgtgcatatgctccctttcatcttttgggacttgggatcactaaatgttagttttcctgttactgtagagcaggagaactgatcctcttcacaaaagagggctccttgtgaggatgttaacagtctagctcaaagaaccaaagtgcctcagaatcacccaggtgcatgttaaaatccagattcatgggccccacctcaggcccacttagctgcaatctcaggaatctgcattataacaggctcctcaggtggttcttccatagcacttatttgcatgctactctcttaaggtgaggggaagcataagatccacaggtccctctaatgccataatttttttttctctccgtttgttattcactcctgttctctccactaatgttcacaaattttgtggaacttttaaagtcatgagaacctttcaagatagtaagatgaatcttgattcaaaattgtaaacaagaaaaaaagacatgccacaaatattctgcctgttgaaattagaaaaccagttaagcaatatggaaacctaattatctcaaatttctgtacaattcttcatctttacttaattgagggatagccattatcttttcttggatggaatcggttcattgggtcctgatacctctgcaaaacctgtaaaatgggcttcagatccagggacctctaccattggtgataagtgactcccaaacattttcatccttcagtgactgccacctgctgtgagcctagactccaggaaaataggactggcactggtcatagtcacttgaggaatgtggcttctctgtaaagagattttcaatcaatgcagatgttccttgtgacctcagtaatcacctccatctgccaagcagtcataaagggcctgcacatctttgccaaccttgtcaacagagtgatccatatcttaggtctttaacctcttttgtattaagattttttaaaaaatacattaatcatgttttaattctgtcctcatgaacataaaaatagcaataataaatgattattactattgcaaaagtattgctttagtttacaagttttccttaaaaatattgaactccccagctgtatttatccattctttcattccatttattcatcatacataacctaaatacctatatgtagcagacatattgtactaggattcagatatttttaacactgtttcttgttccaacattttcctgacataaataaatatattatcatgctggcttacagcattgtgtgtggagaatatctttctaagtttaaaaattttcctgtcattctataaaattaaaaatattaaatgaccattcagtacttttttgtcaattcagccttatagtgcatactgaaaagttcaaagcttcgtgtcataacataattttgagaatgagactttttgtattatgttactagggtccccaagtggaaaaaataaggcctgctgctctggagtatattgcaaagtgattttgttttccccactgacttcacaggctagatagtgtgtcagttttaattacttggaatgcttacatggtgggctacttatagcaatagggatagggtggggcccagtcattgcagacaggaacccaccaataatattccagattccttttgagacttcctcacatgaaacagaggaaatatctttcattggataactaaaacttactttcctatgatttgtacaaaatggccaaaaaggcccatccattcattagcctcacagaggttaagtgacttgtttccagtcacaaaatgactttgcagtgaaacagagagtctaactcaaatcttcctacttctgctctggtgctctttgaagaacactctttaactctaatgaggaagcctctatgatccttcaaaagcagataccggacaagtcacttattttcactaaaacccctttgggatgcagggcaatgattaaacttgcctatctttcaaattgctagaaatggatgctatttactattttgcttgcaattgatttgcatactgttattacatattgttaaatggtttgttgattaatgactaatgttgatttggactaaatgtaatggaataagcaaatatattttcaaatttagatatacaatttagttgctaaatggtgttgttagtcataaaaatgttgattattttagatcaatcccttgcaggggaaccctagccacaatttccctccatattttttctcaatattttaagctttaccccatctctttttcttattaatttacatgtctgggttttaaagctaatacttcttataagcaagtactgttccaaagcccaggactaaaataaattcttataaattcagaatgtggtagatttcaactaaacagtttcttttctggagatccagaagacaaatatttggcttgaatattaatattttcatgaccttgaccagatcaatatattgcacaaatattatcaacaaattatataaatagaccatatttactaatataattaataattttggaattaatataagatagttatatatacacacacataagctagtcagttgttaagtcagttatatgaactatataatgtattatgcacttgatatatacatatacttatgtgttagtatattttgtatttttaattactcccaatcttaaaaaaaaccctatattccaacttatatttttgatttctacatttatcttctaaatatatgtattacctttgataatttttttatttctgctatttcatatacattcataaatatttccagtttggaaatccatttaaatggtaagacaaataaaaaacttttgtaccatagatgttttagtacatttatagtctttgtattttttagaactacattttaatatgctgtgataaaaatgtgtatttctctaacaaggtattaaatttggtgactgaaaagggttcttcaaaggaatataattcacattaattttccatgtgatcattgttacttatagtttactagtcaacatgcttaaagtctaattagaaaaaaaatccctggatattaagttgggaaacagacccaagtctgtatctacataaaggtcaccaccttggtgacctttggtaaatttcatttttgttctttgatttcattttctttgaaaatgagaagctgaaagctttaaagctttcttcccataactccgaaatagtttatgagctcaaaagaaaatatgactaaaagaaatgtgtgggcatcattacctggctgcccagtattttcatggacacagacttgtaacatattctgaaagttcctttaaggaaaataactctatagatatggacagcaagggaaaagggatcaataagaaaaagaaagggaaatgagttaatgacaaaggaggaatggtaggcagtagaaatgattccccacttacttgttttttatctatagtctagttattcctatttgaaaacctactggcaccaggtattatcaacagggatgagtaatatgtaatttttatctttactgggttacatttggcacatggacagttgacagctgtcagtcaggtggctggtcaatgaggagatacatataaagctgcc

SEQ ID NO: 583 - DNA, 21197 bp, Homo Sapiens
acttgctgagcgttcagagatctgtcagggccagaggcctctgggtagcctaggctaggagatgacacgcaaggtggcacgggcggttcccgtggggaggaggtggggtggtggtggggggcaggggtgggagcaagaggttgtggggcgacggtggagggtttgatgggaccaaattctggaacattcgggactgcggcaccttacggcgggaccaagatttgggtctgcgcaggcggcgatgggtggtccgacgggcttcaggacttgatggcgtaacccccttcttcccccacaggactcaggagagtgcagcttgctctgtgagtgggtgacaacctcttggcgactcaggctcagctgaggatggtgccagtgtgccggagacagccgtcatactgccggatagagtggctcacttgcatgtatttggaacaaaaaaaggagatgcctggcagccccgctctctgcagtaagtattcatctgcattcttttacattcctttatttcttcgaacatcagaaatgggtagatgtttattgagcccagccacctgctatgccttctccattcttctcccacacaccccacccttagtcctccagaagagaggactagattgattttctcatgctactggatagctgcagagaagctagaatttgctgttcagcccccacacatccccctcacatttgggagaagttgattttccctaaaatggagccaacagcctgtgtccctcagtgtggagtgttaatgggctgcctggaaggaccctgtgtgccctcacggcccccagccgggaagtgaggctccccattggctggcagtgggaggatggtccttgccagcacctagcatggttctctgccaagttctagctccacatctccaggctggtaggaacctagactatatatagcattgtgctaagcaattcttatcagacgtgtctgccctcccctgtgggagtggagcacttctatcagagaaccagaacctagagagcatgagccatctccaagggccttttattctgggaaggggtgtgtgtgtgtgtgtgtgtgtgtgtgtgtgtgtgtgtgtgtgtgtctgtctgtctggttcagggctgcttactttcctcctgtattgcagatgctgatagattgaaaggtcgtgctagatgaaggtgctgatgtgggatgagggccaggaagggctaatagctctgcgatggatattgagcttagagggagagaagctaggggcatgtgacatggctgagggtacagttgagccctgcctccgctttctcttcctggtttcctgtttgccatgctttgcctaaggatgtcttttgacctctctcttccttctttcggacctcttgcattccctgccttcctccaccacttcctcctccctttgattttctttaggatatatgagggcaaacacagtgactggcatcctgggtctgtgtctactcttcatccttacccatttggggtttctggagatctggctccagttgggcagagagggctcagctgtcctctggaggagttttggtggtgggtgagcatgttgtgttggctggttcagggcagggtgggttggatattcccctctttcctctcataggtgctgttgagccaccaatttttgtggttttgtgaccacaagtgctgactgatgcgacatgaccccagtcttgtcagtgaatcatcaccaggctgcttactggaaactggatgcagcaaggaaataggatttaaccgctctctgcctcccaggtaagtccagtgtgggctgctccctccagccttcccccatcctccttccttcccacgaacaccattttccttattccgccggggaatcctcagacgtctccattcagaatctcccaaacgattgttctcttttttgcattcttctccttctggcttttctgtgtggggttagtaaccagcacagggttgggggcagaatgggcagctgaagtggtcgggctgtgcggacgtgtgggagatagctgggtagtgttgctgggtgtggcagttggcagagcatttgggcctcccacagtaatagaaactctctttggctccagcatccagcaggaggttctgggtttaacccctcggtaatcctgggagccttcctggtgcctggggattctctcccctgtgtagtctcagtggatggcctgtcttaactctagatacattttgccttgagggggcttagtctaggttggtggtctggagtttggactgggctgagcagtgagctttgggactctccctaattttggggtttctttgaatgagccactttcttcctctaggccttcattacctttgccttaaaaaacaaaatccctggtccagtaagccattgcaaagcatctctaggaagttgacaaagaaatgcttttcttctgcctcacttgctgccgatcacagtaatagcaatggtgattaaaaatgaaaaatgatgacggcctgcagaatcagggaggtcagtggcatcattgatacaattcacaaagcagactctcggtgcccacacatcactaggaagtctctctcctatcgagtagatgactacagcattcttggccagtaaagccagttggaattagccaacagcagattggtctgggctctaaagataaaaggaattatgttgggtaattttcggaggtacctatgggatcctacctctggccacacagtggtcgcctctctctgctcatatgtttcggtgggggtggggggttcctcttccccatgctgctcccgttgctatccagggaagattggccaattctgcttcctgttatttcttcttctcctctgtccatttgaggtgagtctctaggttggctgtgaacagcctgaggaacccagggctgtttggaagaatctgatgtctcttccttcaaggaccctgacaggtctcagccctccagcagtactgcagtgagggatggcagggggtgttggagtggagagatatcgacttgggtgcagctggggagactaaaaggagtgagccaagtccctcaagaagtgttggctagagtctggccagccctggctgtagggctggagccagacgtagctgctggctgtgcttgggagtctcagccctcatatgtgcagtgtgtccctgggcatggctcttcgtgatccccactcccacgaatagccctgtccttggttagattgggaaaaccagggtgggaagtaaaggggaggttggttttgctcgtggtcatgcagttatctctctggcctctgatgtttccagaattgggattggtgcttccctgctgattttcctatttttgtccctcatctggttcttttcctccttgctcaccagcctgggttctacacacatgacatggggcattgtgtgttcccaatgaggatagcagaacagttggtatctcctgagagaggggccagcatatctggcacttttttcttgacctttgaatttctgaggtctgggagtcaggaggcagcatggggcctctccatccgggatccagcagaggttaacagagttggtggctctggagctgaggtggtgtggcttggctgggagttgtgggggagaggccctgccaggggccctgattggtcagtaccttctctattccattgaatcctggtccggtcagctctgtgaattgtttaatgcatatcttggctctgtcccctggctcgagtgtccctaaggctgcagccacagctttagagaggatctgtaccttgtgctggtcactttttttgggcgtgttacctccctctgagatatgtaagagataccaccctttcccaccagccggctgtctgtgggaggccctcattttgctttgcttttctgagacttggagtgactgtgaggaaagcatggactgagtttgctttcttgctggttccttccacaagagctgctcatgggctgataaagccagagaacacctccagggccccatggcctgtgcggagcctggtaccatagtgtcaagcctacagggatggactggggacatgggggcagatagagccacgtggggaggtggtatgtgtggttagatcacaggagcaagtccaggagggtgtgggaggacaagtccagtgctcagccagggctgcctgtcatggcccaggatggatgtgtgcatctcctgtgaaggatttgcgtctgagtgcctggtactgaaggtaggatggtgccccgatcagggtctataatgaggcatgaaggtatgagatgggcatcagagttgttggtccaagggaaactgacctttttaaagggctctcctctccttatctgatttcatcctcagaacaaccatatgacatagggatcacttcccttttatagttaaagaaacagattaagtgacttaacccaaggttatgcatttggtaagtgaggttgttgagatttaaatgcatgcacttcttattccaaagcctctacgttatctttactcttttgggctgaagtcagacatttttgtgaactaagattctcagaggactgatgtgaaccagagtgaaaaggcagacacccgaaggaactttccagtcactggggacggttgtgccgcattcctttagggggaggcagggcagacccaaatgccctttggtagccatggacaggcagagctgagtaaggccagtacatggcgtctgctgctgtgtacggagcctctgctatgtgccagggactgtgccaggcgctagagatacagaacttgacaaagccaactttccactttcatggggcatacattctagtgtggagagacaccgctaataatgatttttaaaaagaatttaaaaatgtacagggtagacatatatggagattgtgtggggatgaaaagggggaccccccacacacataaggaggagaattcagatgatggtcagagggttctagagacttaggacctcagccatctgaagccacatcaattgagctttccttcagggagttaggactgacacaaactaaccccctcttttttcctaataacttgggaaatccatccaaggtccccatggcttacaggaacttgtcgtgagtcagggatcaaggtggagtagatgtcaagcctttggtctccggcagactggttctctcctgtctgccatggttgctgttggccttctgcctcacaccctcccaggcaccagctgacttctttcctcagcctggtcactgtgccccacacttgtccatgcagcacagggaaacgtgcaggttaggtctttgccgagccattggtcaaatgttcctgcaggaggctggttctgaactcagcctgtcctgccagaacgagccgttcccagagctaatcgtctcacgatagggaagggatgggcaccaggcatagagaagtgacctgtgccagatgcttggttgagctgtgtcttgagaggcggaggcaggttggtggtgctggggacagggcaggcatgtgtcatgtgttcagcgcatgtagctccagggctcgggacttgtttacttggtggaagaggcagcggacctgcggagtcaggccatgtgattgttggctctttggctgatcatggacagctgacccgccggactgcacacactgccatctgctgccaggggtctgaagttgcacagggatgaggtagtgtagttgggggtgctcagggaggaggagggtcaggaaagtggggtttgtgttgctctgtgttgagtcagccgaccctgattctggtcctagctcttgttggtaaaaactcactcactttcctcctttcagctccagtttcattatctatgaaatgaggggatggaaccagaatctctttggaggttccagctgtatcctggggcctccctgaatgttcatggagatgttccttagccagtaattcaagatgaggaaaactaggcccaggtttccacaagagaaggggagggatcttgatgacctgtctcagagcggctgaagtggtactgttggaattagggtgggtgggtgggaggaggtagtttttaaagacctcccagaagtggaagcagagggctggaggtttcgtgaaggtgttgatgaggatccaccgggtggtaggggacatggctacgcgcttcccccgggaggcttgttggagatgggtttatgtgggagctgctgggggtgcctgctgtcctgcaaggggctgacccaagggaccctgctctaggaaagatgctccgtcctgtctggccctaaaccctggagagagaatgcagctgtggtttgagggagggtctgtgccccttgctgtcaggaagttttcctttatatttagccttctcttttcatgtattttttgaggccctcgactaaaaaattaaatttaattttaaaaaataacaatgaaaaaaataaaaaataaacaaaaatatctcagagccactggttccattttggctttttagtcttgagtcactcttaaaaagatagcaaaataaaacacatgcaggaaagccgaaggtcccaggcccagccagatgggggctaggagtggctgggactctggcctagcttctccatggcagcgttagtcccagacgtacaccacttctgcaaggctgtgtgggtaggagcccctggggctgagggggcacattgtgcaatctgctaagcagaatgtagagttttaaaatagctacctttctccaagacactatctgcttgccgctttgtgggatgtttacctgggattaataatagctgagtgccaccccactgccagtatggaatagcaaacagcgatctgggctaggactcaggcaggagaggaatggagtaataaccatcgtatcagctcacatagttcttttcatacttgctggctcatttggtcctcacacaaccctgagagggtaggtggtcttatccttgtcgttggtaaaactgaacctgagagtcaatcctgccaagatctgactgcttgtagccgcttctcgtgggtctcccatctaggtcctctgacttcagctgttatttctctgggttctgactagtggggcagggacaggagtaggggagtggagtctttggcagtttccttaatttctgaaggccttagagggcctagagatgccttttctatgtgttgaatgggaaacggaacctcagcatgtccaggttctccaactctctgattcttcagacttcttggagctcttgtgagaactggcttgcactttttggctgggaagccagccactcaccatgtgttcttggagaggtttcctgtatttggaagcttctggaatatgtgatgcatcaaaccactgtgacacatctgtatggcacctcatgcctatgcacacaggcatgcttctgctgagtgcagctcacttagagatgaggcccagtgtagggtttttgaaatttttccaacacatttgtaagagatgccctgagccttgcccagcatgcatgttgtgtgtatgctacctgtttgctggctaatgtacagcgcctgctggaagccttggctaatgtacaatgtaaagtaagggactagaaacactggctttagttctgagtgtctgcttcatgattgacttgaaaaagtagggcttacccacagagagaaaggtgggtaagagaactcgtgggtgtcagttttccttaaaggcagagcataatcccccactctttataagggctggtaaggcagagtattggacagcaggacttcttggccagttagccctcttgagtgacctttgtttaaatagacccagaacttgtatgaaggaggaaataatggtttatctttatttacagcggatttagccatgatggtttaggctttttctgggggtattcctttaggacagttgaggttggacaggggcagcatgcatatgtgtctctaaatgtctgtcctttggtatttcctgaatgcatccttggctcatactgaaaccctgtgatggggaatccacagcggaattgttttagtggataaagccttctgtagcttcatgtgtgaagatttgtcatgttggatccagttcattctgtccacttgaaggatggaaaagagagtgggcagaacttgcagcaaggagagtgatttgggctagacttctgggagaactgtgcatcacctctgctgagggttcctgaggaaagatgaagcctctttatttgaggtaggagactcggtgtcctccacaggatcctcccagtcccaagtctgtggcactttgagacagtccctggaacagcatgaggtttgggtgccaggatctagagcaggcatttctctccatctttcccatctgtcttcaagacaggcccaagctggatgcaattgaggggatgcatgggcagggtacaccaatgtggtcatcgaatctggaactttgaccttgtttccctttgcagagagaacttctggcactgatcttataggaactggtgttatttgcatataaaaaaagagaaaggcatgttgtccctcatcttttccaggaaagagtgctgagctgctctaatcctatggtggggagggaggagggccgtgtagaggacgcaaggccagacatggtttgctgggaagaaggtaggaggtgggagaggaacatcccagggcaggcccacaactctgggagccacagacattgcctgctatactaaaggcaaagggatgtgttcaaataggcctactatttagcggtaacccacagtctgaaataaatcagttaatggctaaatgagagttgtattaaatatggaaaatcatattttttgtgtgtcatcaccacctacagatttagcatcaacaggcctgaaaggctgaggatgctgaaatgggccctgtccgtaagatcatgcttattttataatgactttttgtctcttttcattactatttcccactcttattccttaggtctacgtgaatatttatttatgcagttgtgttatttccttggggtacagttcttccagtgtcattggcatcaatgaatatgtgactttgatttcaagtgtaaacaaaccactggttcacggcagggacaagccatctctgagacaagggctccagcagctgcctacagatgcccttcccccaatagccctggactgtttcggccagacgcctgagacgagagtcaagggtgttcttgcagggacctgcccaacgctatgtcatgtgtcctgcctggagggtggtgctcacacatgcatcttccagccttattagctggtactgcttttcagcttgacccgaggagtggtattggaagtttgagaccgtacatcccttgctaggtgagaagggggtcagagaggtcaggcacagacagagaagggaacgcaggctcctggccactagcctctctcaagacaggtgaactttgtgttaagcgaactcatttaatattttgggcctaatagaagttatttgtattttctctcctctcttttccctcctctctctcactcaccctccccccactccccagcctccaaagaatttaatctgctggacaacaaacaatactgttataaaactttgaaaacaagagggcgcggcctccctgacaaggagaagggcatgttgggtaacggcctgagggagcgtgccaggcctgagatggagccgggcgagagcccagttggctgggtacctgggcgcctgcccctgcatagcccactagccgcgccatccccaggccagaggggaaggaaccaaaacaaaatggggggcagagaaacgcttgaaaagggaagttgcacatgttcccctctctctgatctgatgggaatgcactagactgtgaaacttcctcctccacctcttctcccgagtccctccctccctcttaccctccttcctcctctctcctccctcctttctcctccttcctcctcctgctactcactgttcttgagtctggcagacagaggtcctgatagcagaatgaggctggaatagcaccataggtgcagctaccagctgggccagccaaagaggaaggagagaaagtgggcttgcagttggctttggattcaaatctaccctctgtctggcccagcctccctccattctattagggaagtggaactacatcacgccacagggtgtgcccagtccatgtgtgtggaccaggtgtgtgcccaggtactggggagaactgccactcagagattagttcaggaagcaccctgggcttcctggtgccccccttgggctgtgctctgctctggggagagtgtttgacttgttgaaatgctctctcctttgagatgctgtgctctccctccagggaggagcagaggctgtgctgcaagaggctggggcatgtctctggaggagctcttgggaacaggaacgtgcttctcccagcgagagcagccatgccgtcttgtgagtgtggtgcctggtaggatactgcatctgttagttacttcccagtggctgaaggaagtggtcaccagctctgcctgggggaggtgggggagctgggctttggggcgtctccctccctacctccagagttaggtttcacctgagactgtggtttcacttttgactccatcttcactgagtcaagcagatgatttaggaatgaccagggagcagcattggtggtttgcctttggatctgcattggtttggacccatgaactctgtggtgggcattgtgtttgtgtaatagaccattggtatgctcatttttcctcttgcagaaagcactagctttcttgaaagcagttcagggacatgcccatccttctgtgccagagctgagcccttctactgggggaacatggagacacgcgagctccagtcttcattccactcctcctccttccctttgccctccactgtctcctgctgtccccccagctcatcccaggggcagggtaaccttggtgcatcctcccatccagccagcagtcccgacccagggcccccgtgcctggactgagtctggggtttatgtcagtagtgttaagggagggatggaaaactgaacttttaggagtgcagctgcctaggaacatagacctccatacctctgacgcaggggaaaccagaaaaaccgatgctgggtccacgtaggcttggaaggctgttactttttgccttcttacctgaataggaatttgaggggcactgtgggtttggaggatgtgattcccacactggggctcagggcctgggaaatgcagtggtccctgggttctgagtcctcctttgaaggccaccctgccagaaaggaagagcctgatggaggtttctggggactttgggccagccggtaactccatgctccctctgctccacccttggcccctcatgtgtataccattccttttatcacccttccctctgattcacagcccccaccctgacagctaaagacagaatgcccaggctgctgcctagaatgacaggaagctggactgccctttcagtttatacatgcaatggcctgggactgtctcttgagggcaagacattccccttttacaaaagagccttccccaggcccctctctcaccaagatgagctcttccttgctgccaggagccctgaaatcagcattcccagaggaaagaagatggccatctgggcttggcttccggctccccccatctggctggaacacacatcagtcacgtaagtagctgtgactcagcacccagcactgccttggcagaaccttcccacgttctggatttgcacacactgtggtagcgcagcacaagcaagcagggttaggtaactggggaccagtgtctgtttgttcagtgggtttgcctatggatttcagaaagaaggattccctcaccttcccattttcctcccatgttattttttaggtaccatgctaggctttaaagacaaagcatcatttatagaatgaagtagaagctgtctttgcagtctccaaactatttttaaccaacagcctatagatggtatttaaccctcaggtgtgtttggcctgcacgggtttttgtttttgtttgagacagggtttcactctgtagcccaggctggagtgcagtggcacgatatcagcttgctgcaacctctgcctcccgggctcgagcagttctcatgcctcagcctcctgagtagctgggactacaggtgccaccacacctggctagggttattttaatgtatctgattttgcatgcatttagacaaaatatggcctctccagttcactgtatttctgctgcatgctgttgctgcttctctgtctcaggtttcctgcccaagccctccgagcatttgaatgtgctgtgagcagcctacctcagcctcctctctttacacatgaagacactgaggcccattcagggcaagtggcaggtccctgttctcagagttggggccaagcaggtattaaaaccattgtgttctgattcactgtgtgcccaagcagattaatgccctggtgtgaggtcgagaagcctccaggtagaatgtggggacagaagtggaccaggctagagtatagctcccacacctttcccatgcgtggcagcactcgtaagactgacatgcccacccttctggatgggtggttttcctccccagacagccctgccaaccctttcaccttcagccagtttgtttggagtcattaggctgaggtgggtaaaacccatcaccctccttggatggcagagctctcagcaggctgggattttcatgggctgccttcttacaggtctaggtggccttcaggcatggtgccagggaaagcaagccccttccagcccttaccaaactaactggctgcttcctagtagggaacagccaccagcttgtttcagcgaagagtcattgctcagctgattctgagaggagaaaactggttctgttgggagggctgagacctgaaggaccccttttatccagtggaattggaaaggcaaaggatttcaatactaacatgatttttttctccacttcttttagagtgtttaattaaagtgatgcattgttaatggcttcttatctcttcttccagagagtaaagagttaaattttagaatccaggagtggggacccagactgtggcttctgttaactccctcagtggcagtggcgtcctgctatgcacagcccctctgctgtactccgaatggtcccttacgggtagcaggagagacattaaataatcacactgatgaccaagtgagataagtggtttttgaaggaaagaacttgaggctggcgaggaccacttaaccttctagcaagggctggactcagggaggctttcctgagctgcggggaggatgacaggttccctggagtggtggtgggtgggggcggggctgaggggtggtagccaagggagggtgaaggagagtattccagaagagacaacagcttaggcaggcaggacctcgccatggaggaaggtgctttctgatcactgcgggacacctgtgtgatagctcatagggagggggtactggtaactaaaagttgataaggaagagtggctaaaatgaaaagcagaaaagtgagaatctcatcaaatcccctcatttgacaggatttggactcccagtagtaactgtccttaaacactcactcctgaccttacaaccctggctgttacctggttaacaagccccaggtgttggctacaggtgtcatcactgagagcccttgtgtgcagatctgccccagctctcccacctgtgactgaggctagcaagtcccccgtgggctgtagagcctagcgctggtgtcagaatcgcttgttgcaggttcatcttcagtgtctttcccacagccacatgctggggaaagacggcaaaggcgctagaggagcaggagaacaaagcaagctgccccagaccacccggctttcgcagaacccagatgatgctcctgtctccccctaagtataacgtgttatgtagtcagtatgatcccattcagtgcagaagtatcgcctaggaatttcctgccccacccaccctgttttgttcttaatgaagttcaagaacaaaatgagatgatagtcaagttatggagcaggctgcagtggatacaagggcagaaacacagtctttggagttagacctgggatctgcattgattggttgtgtgactgcagacaagttatttagcctcattaaggatgaatttcttcgcaaaaattggaataatacctgccccatacgactgttgtgagaattaaacaccgcaacttttgatgttcaaattctatttcttctccttctagcaacacatactgttagtgccaggaaccataaaaattataaggctgtatctagaggcctgaaaggaagctaaaatatacagtgtctactctgtctcttttctcttggttatggtatcagaggaaatacacatattttcttagcttcaaaccaccaaaaaagatgatgcagtaaggagatgggaaatctaatttggaatacagtgtgcaaatcttattttcaagcagactttgaaaataaaactcaattcttacgttagaggattatctgcttaatacaattatagggtaccagtttttgaagtcacatcggggttaaataagattgcaggttcatggggtcatatttgaatgttctgatacttacatatggggtgggaaggaggaatgcatgcttttctcaagttaagacacataaaagagttgtcctggcccaggtgagactcgcctttgtgtagcagctggagcttcattccacaggcagatagggtgcttgtgtcctgatgaagtaagagaatatatctggaaacactttgtgtactgtgaaatactatacaaatgcagggcagtacaaatgtaaatattaatgtattttagtaataattttagcttttatttcatcatatataataatttgtagtgactggtgtgaagttaaatagaattaacctagaattaatgagttttgtattgctctcatctatttgaagcatcagctgtgcctttcatgttgccttgtgcagccctgtgtaacctcctctgtgcctttcccatggagcactgtgtcatatcacaagtagaactacaagaagatatttctcctcagggcagaggctgggtcttccgattgaatctcccttctttcttcattgagatcctcttcttctggaagctggtttcacatggtggcttagatttttccatctttgtatctagcaccatttgaaatcagtgttttaggagtaagaattgcagcacagccaagggtggactgcagaggaactgctgctcatggaactggctcctctcctcttgccacttgagtctgttcgagaagtccagggaagaacttgaagagcaaaatacactcttgagtttgttgggttttgggagaggtgacagtagagaagggggttgtgtttaaaataaacacagtggcttgagcaggggcagaggttgtgatgctatttctgttgactcctagcagccatcaccagcatgaatgtgttcgtagggcctttgagtgtggcgattgtcatattctgttggataacaatgtattgggtgtcgattgtcatggggcaggggagagggcagtacacctggaggaccattttgtccacatcgacaccatcagtctgctcttagaggatgccctggagtattcggcgttgattgcggggcacccgaaatcagacttgccacctggactgtcgaggtgcagaccctgggagcaccactggcccatctcttacacaggctgaccgatttctcctggtgttcagagtctgtttttgtctagcaccatttgaaatcggttatgatgtagggggaaaagcagcagcctcgaagcctcatgccaactctgggcagcagcagcctgtggtttcctggaagatggatgggcagagaatagggaaggaagatcatgcttttccctactaacttctgtaactgcatgtatgatacattattgcagaggtaagagatagtttaatggatttttaaaaacaaattactataatttatctgatgttctctagttgcattttgctgaaatgtagtgctgttctaaattctgtaaattgattgctgttgaattatctttctgttgagaagagtctattcatgcatcctgaccttaataaatactatgttcagtttatcatgtctgtgtttttcatctattatttcccattcataattctgtgatgataagaagtgggtcctgaaaaattaattggctgtgcagatcttgcctacttcataaagaatttgaagtaggttacagccagccagacattaaaaatgaagcccattaagagaagaatgaaattctatgagccaagaaataaaatgagagaaaagattagggaagagaagaaatgttgaagatcaaggctgagggatgctccctactgaatgggaaaactccttagttccacatgggctgtagacacagcccttctgccagcaactgttcctgcaaggaactggtgctcaactaaacatactgtcacatggttccttgaaggggcacagcactgatttcacttgcattataaaagattgagtggtgcttttgactattagtttatgtcaacacttcaaaacaagatgagccagtttttttttgttttttttttttgtttgtttgtttgttttagacggagtctcaccctgtcacccaggctggagtgcaatggcactgtccccgctcactgcaacctccgcctcccgggttcaagcaattctgcctcagccttccgagtagctgggattacaggcgtggcacctccacgcccagctaatttctgtattttgtagtagagacggggtttcatcatgttggccaggcttgtctcgaactgctgaccccgtgatccacccacctcagcctcccaaagtgctgggattacaggcgtgaaccacctcgcctggcccagtgagccagttttgtaaagctattcagagattagccagatttgatttgataggggatcaagcttgtaggatcttcaggaaggcgggctgtggccccttgatcaggctttttgcacaggaggtgcatgactatgaactaccctcagtagaactcttttaagccagtggcttgcaataaatgatggcaaatcagccacctaggaagccatttctaagcccaaccccctgccacagtcttcctctagatggctgccctgcccagtgggctgagagtggggggcggaagtagcatttgctgggaagacttgccagtacatatgttgcaccccctcactgcagctgcagtgctatttcaggctgttgatggaagaacccatgttctaatccccaggatgtggtgggaagaccctaagtggtggtgttagttaagaccctaagttatattgttttgttcacttcccactgagataggctacaatagtattaaatacctataggtcagacatttttggggtctgttgtactacctaccaattaaacagtttttgatccgcccaccacgctcaaagctccagcctaggtgttgcaaatacagacgacagatttttgctctcaggaggccctgattccagtcctcaaacgattacagattccagaagcctgcaatcagctcactggactgcaagggccacccgccctctcagaagcgccgggagagaacaggttttcttgccttcttcagctgctagagctgcgttctttggcttgcacccccttcctctgtcttccaagccagcggggcagtcttttgcttcagtggccatgttgtcttctggcacagtcacatctccccctgcctccctcttagaaggacccttgtggttacatttagggcccccacctggataatccaggataatctccctatttcaattttcttaatctcatctgtaaagacccttttgccatataaagtaacattcacaggttccaggtattaggacttggatatctttagaggccatcatacagcccaccacaaacagctccttaggcactcattagaaatgcagaacctcaggccccaaccgataccttttgaatcttctgattctaatttaagaagatcaccatgtaactcactagcacactaagacttgagaagcacgatgctatgggaacctaaccaaagaattctcaagtcccaacttaaatacaaatttacagagtatttttcctaggaacgctttcaggtggaggagattaatcagacgatagataattttcctgaacaccattctgaagtgcttctctaagcatttgttcctgaattctctctcaatgaagccacaagccccaaacaccaggattactgtttacaggggttcctgtttacagtagtttagcacagggtttgccacactgcagcatattattatagtttagttttgtaaaaagctacatgagagaggtaaatcttataaatggaggtggagtctcctaacaccagttttaccacctctgtacaggtttccctgggctatgtactatcgaatcaggaatcaggaagggcggctttttcaaatgttatctatacttttggcaatttgttcaaacgttctgctggtatgtgagagggaaggaaaaattgtttattgaccacagatccacaatattatacttctcctatacttaagcaataagggacagcatttaaaactcttttaaaaatgttaatcttggctgggcacagtggctcatgcctggatccccagtaatttggaacactgaggcaggcagattgcttgaggccaggagttcgagactagcttgggcaacatgcgagagcccgtctctacaaaaaaaaaaaaaaaatacaaaaattatccaggcatggtggtgcacacctgtagtcccagctgttggggaaagctaagttgggaggatcccttgaacccaggaggttgaggctgcagtaagctgtgattgagccactgagctccagcctgggtgacagagcgagatcctgtgtcaaaaaataattttgatttcacggaaggagaagaggactagtcttataccatatcccaaatgaaattgaaaatgtcttctgggaatcacagcaatgactcaaacttctgaatagtgactaggtttgagctggtaaggaagggattgtcaaatgccgtgacagtccacaggagggcagcagtgctccgatttacaaaggattagtcatactagtgtaaccttttctgagtgagcctagaaattctgatgaaaacagtgtagtccaggaaaaaaaaaaaaaaaatctgtatgtacaatcactcaattttgaatcatttctggaagttattagactccatgttaaatcctacttaagtacaagtatgcaaaatttaaaaatatgcagaaaagctcattcttggttaaaatgttagctgaaagacattactaagttttagaataccatagagttgactatttcccacaaaccctaaaatctacttgaacaccacaaattcatattccttctaatcccaagtcccttcagcattcttacagatttattgttagttaccttacaaagtaactaactgtccccatgtattttatcccaatttaaaaaatacattacagtctcaaggtcacataagattttccaaaatgctctattcatagtcaatataattttcaggccgggtgcggtggctcatgcctgtaatcccagcactttgggaggccaaggtgggcggatcacctgaggttgggagttcgagaccagcctgaccaacatggagaaaccccgtctctactaaaaatacaaaattagccagacgcggtggtgcatgcctgtaatcccagctactcaggaggctgagtcaggagaatcgcttgaacccagaaggtggaagctgtggtgagccgagatagtgccattgcactccagcctgggcaacaagatcgaaactccatctcaaaatatgtgtgtgtgtgtgtgtgtgtgtgtgtgtgtgtgtgtatatatatatatatatatatacacacacacacatatatatataattttcacctagtgttttattaaacagaatgcttctgtatttttatgtttatttgagacaatgcttctgtatttctaaacaacagctagccttgttcagttagccaaacaacaaaaccttaattcaagtcttcaatgaaattttctgatttaataggctgaattaagaaagccataattttcttctataaatataagcctttaacttctatctttacaagtttatatagaaaaatttactgtggggcttgagatttactaatgcatgggttttcaaccttagctgcactttggaatcatttaggacgcttggaaatccctacacccaaaccacatcccagatcaattacactagaaatctctaggggtgggacccaggtgtctgtaaatatcccccggtgattgcaatgtgcagccatggttgagaaacactgaagcctgctctgagaaatttagcaatccgacttaattcaaatctgcagagagagcaacaatgatttttgcagaaacaaccaaatcctactagttacataaattttatactttgttaggacttgggtttttatttagctctacatatgcgatcataggatgcagaagatatatcttctactggacacgtatatatagatgcttaaatgtggctatcccaaggttaggtaataataaagactataagagctgggcagaaatcaggcacagtttcatgaagggtaatatctgagctgggccttggaagatgcataggatctcaacaggacagtaggtgtttcaagcaacaatgaactaggaatacagcagaaagcacaggggaaatggtcaggcttgactgagagtaggttatttgaagaagtgcaatagaaaatgcttggggaagaaagttgggatttaattgtaaaaggtcttcaagtatcaggctaagaaatgtggacttcatccagtaggtaatgtgatgtcactggatatctgtgcagtatctatgtgatgggttgggagtggagaagcctggggatacttaagggtctgagctaggagggacaggaggaatggctgtgggagtggaatggttagaagatgggcccaattagaaacatacttcaatttgagacaaaacccactagaaataaacacatcatcatgaaacatctccaaatgtacaat

SEQ ID NO: 584 - DNA, 4122 bp, Homo Sapiens
agtgtttcctagagccatctgctgacaacacgaacattgggcatctgacagaggagaaatatttataaggtttagctccagtatcacaggcagagcaatggaggatggatttggagctgcaaggcaataaactggtaactgaacaaaaccagtccaagaagattgtatataagagacacctgataatttcaaaatcctaggcccacttcctgagctgagcaagcatgcaacctcaaagagaaaagtttgaggaaatcacttcaaggacaaaaaattgcaatgtaaagagaattatttatctccaaattccagattacccccctgcccaacccctgccagcagcaccgtccacatggtttctcatttagttttgtgttagtttaacaaagtagactctgcaatctggataaaatagtaagtcacctcaggtaggtgccaataggatgctcctttggacattgcagattttaagtactgtctttttataatacaggaggcatgtacaagtctgtcatatgtggaaatgttgtgaacccatcatatatacaatgtgctgttttagaagatagattgtccatttaggtgtgttataacaacctagatgggaagttactttccggtgtgttcaaagttccttatctgattctgcagaggctgggatctgagcaggtcactctatctctggaggcctgttacttgatgataaatactaataaacatctcccgtcagacatctcatctttttgtggattcctgtagtactcttaccctttctacaaacatgtaaataccatccattgatataatttttttttttttttcttttgagagagagtctccctctgttgctcaggctggagtgcagtggcacgatttcggctcactgcaagctctgcctcccgggttcgcgccattctcctgcctcagccacctgggtagctgggactacaggcgctcgccaccacgcctggctaattttttgtatttttagtggagacgcggtttcaccgtgttagccaggatggtctggatctcctgacctcgcgatccgcccgcctatataatattcttatttaacccttggttaatatattggcatcagtttgttttaacaacaataacataattatccctaataatcagcattataaaagctatcataatcgcttacataactacaactattatctagacaataataggttagattaataagaattcagtgttattcaacacattgctaaaatgtttccatgtacttttatcttataagctaaatcttaggagctgttactcctggaatagaacaatatttcattaatatatttaaaattttaaattagtaaacatttttctgagagattctgattctatggagaaaaaataatgtgatcaagaatttctattgctggaaacaaactaacaaatcatttagttcgaaagcccctcttacaaatgcaggaactgagctgattgactcttcatttaatgataatactattaacaggtaatgcagttttgaaggaaagcacaggctgaatacagaaatctctttccaagaggtggtgagtctttacgacaattgaatacgtgttatttttattcactaaaatttggctaagattgaaagggtaaactttgtgggtctttcaggagatcttttactaaaataagtagggccttaatcactgctgaatgaactttgtacagaatgggcccacaggcctcatctgttgtagctgggattgctttgagagaagtggatttgttgaaaagtggatggaagaacacaggatttagaattggcatatttgactatagcttctgcatccacctatctctgcgctatagaaatgattaaagagaagtgggaaaaattcataaactttatgattatttttaattttaaggaggacatgggacctttattaaaaaaaatattcccatatatgaaagattcttatttctataatggggaaatggcgagactatgaaaaaaaaaaaacaaatatgtaattgaactttaatgtataataccaaaataaactataggtcacctttggcagtatatatgtttaaaaataatttcgacgtttaaaatgccttaagagaggaccattaaggtcagattgagaagataaaagaattgatcttttagggtgccattctactctatagctctgtaatttctatggttatgatggttctcttttgttaaataaggacttatagaaattatttattttatctgtttgtatttatttatttgcctgttggtactagtcaactgcttccccttacttccctccacttgctacaactaatcaaatgtcatattttaagattatttaccaaggttgctttaaatttttgtctcctttttaaagtgtgaaaattatttattttaaagttagcattcatttcattattccttctttaataaagtatttattggccgggcacagtggctcacacctgtaatcccagcactttgggaggctgaagcgggtggatcacaaggtcaggagttcgagaccagcctggccaacatggtgaaaccctgtctatactaaaaaaacaaaaattagctgggtgcagtggtgcacccctgtaatcccatctacgcaggaggctgaggcaaaatcgcttgaactcgggagacagaggttgcagtgagccgcgatcacgccactgcactccagcctggatgacagagcgagattctgtctcctccgtctcaaaaaaagaaaataataaataaataaataaataaataaataaataaataaataaattctttattgaatgatggaattcatgtacttccaaagttctgagaggcaaaacatggtgatggctgattctttgcctgtaatatcttgctatgttatcaaagcaagtcaaatatataattataatatagtttaagaagtgccgtaatagatgaacagtactactatgggaattctgaagaaaggaatgcaaatcggacagggggaagagaaaatgttttctgtttctgaatagccagggatatttatgacattggactgataaatgcagagatctcattcatgcctccctgagctaacatgtatgtttcccttactactatgcaaacttcaagaagggaaacgttttctacagtatctagaatagttttttgcatagagtagacatacatgaaacaatgatacacattaattactttctcagtaagcttgataaaatggaagatgctcaataacagttcagtttcttgtcccttgagaagtggtgcatgaattgtagcctgggtaagtttcatgtctttgtatgcttttgtttcttttttatgtctaaatagtaaatcaggaggaatttcttggatatgctggtggttaagacttgattctttggttttaataatgttaatatattgaggtttagttgtgactgaatataaaattcattgtttttaacttaaaactttaaaatcaaattgcagaagccttggccaaggaataattgtataaaatacagtgtctgaacttgcaagctgttcttttatctgatttgtgaacatttattaacatgaccttatgtattagaatgtcctatacaaacatgtcaaacaatcaaaattcaaagcttttcattttcaaaagctgcctaaaatgccactctctctagacaatcaccctggaagtaatggtctcttctctgaaccatcataattctctggttctttcaagaaagagttaaatgctttccagtagtttctttctgatcttgattgttctcaggggtctcctcagagttattttatatattttccttgaaattttaaagagttatttgtggatgaattctcatagaatatatttaattatggaggttctcattatgcttcatacatgggaagtaattctgaaacaaagaaagtaaaaggccgtaaactctctatgggctgctttattaatcaaaggagatatagaattaacccattagaagtactctactttctctgaggggaacttctttgttctgtagattggtatataaattgaaatgtaattatttgctcagttttattaacatatttaaaaagtaattgaatatttgcagatgagagagaaagaa

SEQ ID NO: 585 - DNA, 6708 bp, Homo Sapiens
aatgtgtgaggtggtgctatgtagcaggaacccctcttgctttgcaaatagttttttgtttgttttcctttttgcccaatagagccctgctctactgacccttcaatgtgcccgtgtgcctaaatattcctggtcgtgtgaaaagaacccaggtattagctgaactaaggagcacaattctgcaacattttggcacccaaacacggggcttgagaaatgaatgcaattggagaaactggttgttttaccaggcgttgattggaaatgtgtgcttccctttaagcagtcaagctcaacttgcagaactgatgggaaccccttgggaaaactggcctcaaatgtttgtctacacagtccacatacagggttcttaacctgcggtgagtaaagaatgtcactttccaacaggcccagatatcatatgctcttgggacctcaagaagagaggagtttacccaattcataggtgtgtgaggataaaaacctagggctgggctcagctttaaatggtcttatctgagattctttgtgaaacagattttcatgaaagccaatctagagggcctacgtagaaataattgtttttgctgcactttatgcacataatcaagccaattataagactaaagtctatattgcaagcaacacactcctattatgatttgtttttaacagaaatgaggacgagacagagagaaattatgtttcaaaacttatcatcattagtttctagacttattatttctttttaagtttttacctacattttagactgaccctgcttgtgcctgtgaaccaaccaacaatctctggctgcagctcagaaaggacaaaagagaatgggtaatgtaaaaacctggatcagtattttagttctgaacaattatcctgcaaatcctgccagctgatgggaataaataggatgcccatgatccggaggtttactttttgggaaagtaaaaccaagggagctaaccaaagtaaaaccccatacacccaaatctgagcaagcataactatagccaccagttatctgggtgtgtcacaagacactcttttctttcctttgttggaggagaactcatttccacagcttcactttagcattatggcttatgttaaggagtctatgcaacttccatgctgagacacgtttttggtcccaaagttaattccaagctttgtgtcaaaggcctaagaaaactggatcttagggatccagaagccagacaataatgaaagtcaaaaggcacagcacaggtgagcatgactaattcccgctgattaagccaagcttcctgtttcatggataaaggtcatgctagtatccatggcataaatgaggtctagagaactaaaaggctactgccagcaggggagatagggaggacataagacagggcagctattcccatcccctagaccccctgttaacatggatgaaagccactttgacacccatgggtggcaccctgtcacagttggtgggactcagcaatacagggacagaggaaagaaagaggaacaactcactttctctccctcacacaccctgagtatttgctagaaaaagaaaggaaccaggcacacatgctcccctatttctagatgagtagccattcatctttagtctgcacccttttagaacatgtcctgaacccctgggactcttctgaaaaaaatgccttcttttttcctttttcttcctctgtcctctattcactggtaggtaggtaatggtgtcccataccacagaacacttccctcagatgcatccttctaactgggaggagttaatttctcaaaccgtagactaattggcttaggattaggttcaggggaagggaacacagaaacatgacatgccagcaaaagggtaaaaggttttttttccccgttgggcttttggcctctctctccctgtgcaaactggtaaaaggcgtctggattttctagttgtccttacccactgcttgtttcgttttgatacatattttctaataacctgtttgtctcttctcacttttaggccatcaaactccagtctgcacctggagccttggatgatggccttttttactgggaaccctgaaataggcctctgagggaaatctgattgccattttcccaaaacagcttccctgacaataggaagcaattaagattggtcttcatccttatctttatccttattctaatggcagttagaggtacttctttagaggggggaatgagacagccaaatgcctaggcagataaaaaggtgtacctggaaaatttccaacccgtcacacaagtgtttacatcagatgcttttgtgtagatgagggaaacttcccagggcttgtctgggtatgcccacagtggactggagcccaaaatgcacactggaggaagtggatggagccacgtggatgtcatgccttatgcaggggaggagcctgctctcttcagctcctgtggtaatgtgggaatcgatctgtgaggaaacactttctgaaaatgtcagaactcttgaaaacatggatgaggaaaagcataagtactgctttatgcttttcttatgaattttaaaagatgtaatttaaagattgaaactcccacaactttggcagaccaactcctcagaaaacattattctttgacatcaatatgttttgcacaaaattgaatggcaagtgaaaggcatcaaatggtgagaatctagaaaatagtgcatgtacgggaaggctttgctcaatacaaatcacttgcatgggacagtcttctttagtgagtttattatatacgggaacagagaggtaatatgaaatggaatatggaatatggcactagcaagcacaaatattcaaatatgtggaggaacaactggatgtgataaaacactataaaaaaaatagagagaaaaatgacagtaggaaaaagactgtatatattttttgagaataaaagatagtttcatttcattggtggacatgagatgagttgatgcagcatgcaggtggataccatttttttcaaagaaaatatgaacagagtctcaaataaataacaaatgtttatatgtgggtttcaaggacagagaataataaaataaccaaatatacataatgttccagtaaaatgatccatcagggcttacagaaagcgtaactagagagagacattaacttgcagatgatttgtttctggctaatgttgtgacaggagtgtagcatttcctttcttctcagtttcctatctcacttaccttttgaaaagacatgattccatattatatttattctgtttctctctttctttattcatttaccctactttactgaaaaatctcaaacatcatagaaacatgcatgtcttggttctccaagtttgaaaggaaaataatgtagaaagctctgttttttttgccctggcatttatatactctccaatctcactactcccatatcactcttctacctctcttagagcaaaattgcctcttaaaaaaggacattgcacccagcatggtggctcatgcctgtaatcccacaactttgggaaattgcgccagtgcactccagtctgggagacagagcgagactccatctaaaaaaaaaaaaaaaaaaaaagtacattgctgattccatttcagcatcactcaattaccattctctaactgtctctgatttgtctttaccaaaagccacatctggcataattggcaaaagactttttttttttccccaccattccaatgaacacaaaaatgacattctcaacatcaaatcaaatgatcacatttttattcatattttactccaactgaaatgaaggatataactaatttgtccatttttctttaagcacatatctgtattcattttgataacccagcactcttgattgttcccttactgaatgtttgtctcttagtatcctttgcccattctactcctttaaaaaaactgttgcagtaaccaaagagttatttttgattccacttctttgtcaaactaaagtcagctctttgaggcttctggattttgatattaaatatgtgtttagcagttcaaattttatatatgtatattctagctcagatccagaaatctatttccttcttatcattctcacttggattcctcaagcaatttaacatgctctaaatatttcttccatgtttatttaggtttcaactctacatacagaatagactaatttaataattttatacaatccttggccttttactttatatgatcttctacatccaatagaaggttgttcagttaaaccttaaaaacctatcgcacactttttaattctctgaattttcatcaacaccacggtagaaacctcctcaatacagagttttgtaataattgctctttaaattcccaccatgatatgttactatatattctgctcagaatgaaaaggttcactataaaacatggtttaaaaaaacaaacattgatttctctgcttcaggagtttcctttcctatggtagatgaaactaggtacaataatttgttgtttgttttggagagctgtcaaggcatgctccatggcctctgaaactaggtagattgtatcacatacactccagaccaacatacttgctactttctgatttgattggattaacacgatgtcaacaatatagtggaacaatgtgatattcttgtcaggtacagtctctttggactatgtcagacaaatggcatgagagttaacatagtcctcgagctaattcataaatgtatattgttaccattttacataaatgtaatcgttgatgcccttattttctcagaggggtgggggaaaattgctattcccacattaatgtctgtatgttagtgaatctgagtgagtgccaatctacttgagcaaataaacatctggaatagcagctgtaattggatctatgattttcttgaatttgcattcatttacttttattctccagagtgcttttgtaagggtcacactggtaaatcaaaaagaggatgtaatgagggaatatcacctgtgtcattttttcaagaatatccaatctcatattttcccctgccacacaatactatattacttttgacacaatatgttgagtaggaagcagcacttattgataattctacttgcccttcttcactactgcagatctcaccctactaaccaaggaacaaatatgaacatttttttcagctgacagaatataatgtttattccaattatacatttgtgaaaaagggaagtgaaaataagtcttttgagccagtggacccattgtaagcccaaactatgctaggacattatttattacttgaagtctcattagctgcattcttaaaggtggatctctttgtatcaatcctcaaaatatcagggtattaaaacaataaaagttaatacttattctttgtatatttctactgctggtcctcaaggggctctgctcattgtaatcaaataggcaccaaaggtgcagcagtccccagcatctttccctgtagcctttgtggtattgggtatcagtgtttgtcacgacgaaggaggacaacttagagaattgtgcccctgctgttagacggagtctgacaaaatccagacacataactgttttatgagtaaattgccaatgccaatcacatgatctaaaattaatatggtgggtaccaaaggagaggcagactatgtgtgttagtgagatctgatagtgtctgccacaacacttaataatttttggagaattttaccatgggcttgacatttgaatattcaatttaaactacttatttatgaaatagttataggaataattaggaactttatggcaactctatgttttaattaactttctaagtggtgaaagagtgaattattcataaattacttctggaaacaggactcttctaaaaagcatgtaagggaacttgaagcagcatctcaatttgtgcaatatgataaagaaaaaaaactgtgggatccagaaaacaatacacaattacttttatttatggctaccagaacttcaggaaaccgactaatgtttgtgcacataatgtttttattatggatctatctggggcatattgaacatacagtgccctcaaaaatggtcagttttactcatgcccaatcccatatattttttagggtaatttttctggtccagttaagttagaccaggacattttcacttgacaaatctgagtaaacttctctggaaaaaattgtttttgaccattcgcctagaatgaatctctgggtaaggaagatgcatatagtcgtataatttactgtagttattttgacaccttttcttaacgacacaccacagatttattgctggatatttttttccttcctaagccacttgccatatagttctactcttctctagctctagggaggcttcctcatacagactaggtcaacagattccattccactggctcgtggatgggtttggctaccgagaagcagttaagagaagatcagaattatagggagcagggagtaggaaaaggtgaagaatttattttcctgcttccctgctgatcccctcccaggctcctacatgttggtcacatttctctaccaaatggtagttcctgtggggttcttgtaaattcaccttcctctttccatagagacaaaagctccctgctttcattcaccttcgagtactgcaaactttttttttttttttttt

SEQ ID NO: 586 - DNA, 2236 bp, Homo Sapiens
ttacaggcatgcaccaccatgcccagctaattgctttgactttagacaatttgactataatgtgctctggagaagaccttttgtattctatctgtttggggattgcttggtgtcctgtatctaaaaatccatatctcttgctagacttgggaagttttcatctgttattttgttaaataggtttttgaacccttttgttctcttttcatcttctgggatattggtaattcatatatttggtagctttacggtgttccactttccatatatcatgaaagctttgtttattcccttttctttatttttgtctgactgagttatttcaaaagacctgtcttcaagttctgagattctttcttttgcttgatctagtctgttgtggaagctttcaaatatgatttgtatttaatttaatgaattcttcagttttagaatttctatttagttctttttaatgacatctatttctttgctaaatttcttattcatatcctgaattgttttctaatttctttgtattgttctttggaattctcttgtatctcactgagcttctttactgtcaaaattttgaattctttttctgtgattttgtgaaattttttttattgagatctgttactggagaattactgggttcctttagaggtgtcatatttccttgcttttataagtttcctgtgttcttacattgataccttcatatttgctattattgtcacttcttccaattttttgtatttgctttcacaggagagaaatttttctgacgatgcattaatggtgttggtcaggtatggccctttggcttttattttgggtgcatactgtagtgtagtctctctgtacaatttctttggctgtaaacaatatcagtggtattcgtgatttccttggtggcttagggtatggttattagtggaggctctggtgagctttggctggaaacagagatgccagatgggccagtcttcagcctccagtggtggcagtggagggccaagcatccctgttcttggaccccaggatggtgtccactgtcaccagtgtcagcaggtccaggcaggctgattcttgggcctccagggtggcttgttcagatgctagtattggcggcagtgggttgggcatgtgggcaggttcttcagtccctgggaagaaagtatggtgtgtgtgatggcagttagtagtggcagatgaccctctgggtcctgagaagtgtatatttgtattggtgatggctcgatgggctgggcaggacagtccccaggctcctaggtagtgcatgtgggtgggtgctggcagtggtgttggtgtcaggttgggtgggcccatcttcaggttcctgaagggactgcacagatgccagaggtggtggaatgggtgtagtgatccccaggtcctaaggcagcatgcttgggctctggggactgggcctctctctgggctgcctctccagtcctctgcctgccactgttttcattgctatcattatttctgtttctctgaaggtagagaatgctgccaacctgctctgccctcctcagactctctcgtctgacagttctataaaggcccctccacccagcctctagcccatttctttctctggcttttgcagggtaacagaagacagagaagctacaaaaaaagcctccaaaacatgaattattgaaatgatcagatatggttcacaaaataacgatgctttttacatttatgaaataaattccaagcttaaaaacatccgtgaaaaggaaactctaaaatttaatgtgacatattaagaaaaaaatccaaaaatataatactcaaaattaagatgggcttaagagcaaatgaaatgtagctaacatttttaaatggaagacaagaagaaaacatcctccagaatgcagcacacagaaataaaagggaagaattggaaaagagtggataagaggcataagtggtcagtgacaagttgtagcccagaaagtgtgaagggaatgggacagatataaaattggaagaaataacagctctgaatttttcaaaagtaaaaacgatatcaatctacaactttaagaatctccatatatcctaagcaaaataaattataagaaactcacacccagacattgcagcaaaacttcagacaacaatagacagagacaaaaatcttaaagcatcagaaaagaagcagttactttcaaaggaagaacagttagactgagaactgacttctcaatagtaa

SEQ ID NO: 587 - DNA, 3630 bp, Homo Sapiens
ctataggagaacacgaggaaatatattttataaactgtaaagcactactaagacgtgagcagcggctgctgcatatccaggtcaacctttatgggcctgaagacaacctctccttcgtttgggcactgctaggagtcaaatctacctagacttttggtaaggaagatggtactcatgctcattgtcattgagacaattatctaatgcttagaagtcaagactagaaagcaaggcattaaccatatcagcacccaaacaagggaagacaagttacaagaaagccaaataaaacagcaaacatttgtttagtgctttatggttaacatatatgatctcttttaatccttacaatcctagggaaaaagtgaagctcaaggaggttgacacctgcccaagactagacagtaagtggcagagccaggtcatctgatcctaaatcccgcactccttccactatgataaaataccaggaaagaaaagtgatcaggatatgaggcacattctgatccatcaaagatgcttatatgctttgcctttctctagaaggaaaacggaccccactgaaggtagagatgcaatcccagactttcagagggggggtgtggccaattgctatcagtagtttaggactcacatctggcatttctgtctaccaatacatctattttgacactgcttgtgctgaggtcccaaatgtctattatctccaagtactgtggctttctattcctatctgtacctgtcccagggaattggtcaaggactcacattagggagaaatgaagtactgggtatctgttactcacgtcccttacacttaggtagactgccagtattagcagtagtggtccgcttccagtgaccgtcatattatctgttcagcttcctctggggaagccaatctgccccaatcttcatggttttgtgtctccttttttacccatatgaccatctctctccaccgtgtctccctcatcaaataaagagaagtttagcaactaagtacctgaggaggtgggaaaggaatgctactcattcctcagctctcctagttacctttccactcccttcatccccccacattccctcatttctctcacctggtactcctgcaccacctcctccaaaggcagcacgctgtgctgtttgtggctcctggattctcggcacaccacacagatggcctctttgtccacctcacagaagagtttcagggcttcctggtgtttaaagcacatgccctgatcattactccggtttccccgataaggagtggggcacatctggcgaattatctggaccatgttggccagctgcaagttgggacgaaagctgcgacgtgtaaagctctttcggcactgggggcaggtgaactgccctggaaggggcaaggaaggaggcgggtggatgtcaggatacagctcttcatcttcgtcctcatcgtatgcttccagtatttcttcttctcggtagacatcaattctcaggtcaggtctcaagcctcctaggtaatagtcctgatcttcctcttcttcttcttcctcctcgtcccacatatagtctacgttgtcccaattagttataccactgtcaccgagccagagttcatcgtcatcttggtcttggaacaactcttcgtcagcattcccccgatacaacacctctcgaatggagccgtcccatccatccatggcccccaccgcttcctcgtcctcctcctcctcccattcatcttcctcctcgttctggtcctcctcgtcctccttactccacagctgggtcacacaccctcggcagaagttgtgcccacagctgatggacacggggtccttgaagtaatccaagcagatggcacacaccgcttcctcctgaagggtctgcatggggctgggagtagtggcataaccagccatcttaatgcccgccggcaggtgtagatacgtcagcttggagctgaggagcggggacgcgcctgcaggcctgcctccaaactactctggtgacccgaggctgtcctcaaccttgctcttcttcctcggggccgcaggggagctttgaccccctctctcagggtgcgaacgcccagatccagactcacagcctctctctgggatcggtggggacagagcaggctgcagcccccagctgctcggtcctgtcacgtctctcgctaccctcagggtgtgccctacactgcggcgtccgcctcagatgcagccgctggctaccctgcccgaggcgacgcaaaatgacgtctcgctcctgcacacgctctggagagacgctctaggccggcggaggaccacgtctctatggtgtgccgggggccgcgcgggccgggagttgggtgggctgggggacaggcgcgcccgcgccgcccgctccagctgggctagtgctgcacattccggccagcccctcctcaagaccccattcccaagccccttctcagctccctcgggccggcagagcggctctgatcagtaaaatgctgttgaaggcccacgggcatgactgcacccctcactaattggtcattggtttggggaggacaccactgtcccagtggaaccttgagcacaccttggagccctcctcttcctctccggacctgtgccaaactgtgagtggcacagagcaaggactgtatgtgttctcttctttgttgcatactcagttccttgaccacagtgccaagcacacagcgagcactccctgtgtatctgctgagtaaataaacgaatgaacaaacccaacacatttcagccaagtcctgctgatgtttctcctccgatctagctcctcctttccagccttacttctgccactccagatttcacccccatcagcttcagactggataaaaggaaaccatttctctaaaggatcacttgctctctcatttcaggccatcctgcagccaccagaaccttccacatgaaatgaaaggctcaccacttcataggctttaaggaaattcttggccaggtgtggtgcctcactcatgtaatcccagtgctttaagaggccaagatgggaggattgtttgagccagctgtttgagaccagcctgggcaacgtcatgagaccccatctccacaaaaaaaaaaaaaaagaaaattggctgggtgcggtggctcatgtctgtaatcccagcaattttggaggctgaggcgggtggatcacttgaggtcaggagtttgagaccagcctggccaacatggtgaaaccccgtcactactaaaaatacaaaaattagccaggcgtggcggcaggtgcctgtaatcccagctacttgcgaggctgaggaagaattgcgtgaacctaggaggtggaggttgcagtgagccaagatcatgctgctgcactccagcctgggcaacagagtgagactccatctcaaaaataataaaaataaattaaaaaaattaaaaattacctgcgtgtgatggtgtgcgcctgtagttccagctacttgggaggctgaattgggaggatcatttgagcccaggaggtcaaggctgcagtaagcagtgatggtgccactgccctcagcctgggcaacagaacaacatgcaatcttaaaaaaaaaaaatcctggccaggcacagtggcttatgactgtaatcc

SEQ ID NO: 588 - DNA, 3751 bp, Homo Sapiens
agacctcaccctgccctgccgtgcgctcaacagccagatgctgggcccagacaagcgctcttccgctagtgtgccgggatgagcgggggctggacttctagaaaggggtctgcgggcgcaggagctggggtccgcggtctggggccgccaacacaagccatcagccccatgctcagctcccagcaggcagagcgttcagaagcgccagcgccatcatcttgggagcctgcagtccacacaccgctgaccttacctacttcctctttccaggtcgtagattacagactctcctctgggaaattgcccccagatctaacaggagtacaagaagctgggtagattggaaaacagcaccgaattcccctggaactgaggacggaagccttcccagtcctgcagccacctgcagactctcacaagcacggtgctcccgggagaagaccttgctaccccaggcccaaggcagtcgagagaaaacgggaagccctgaaggtttttcaccccgggggtgagagtgtatgatcgaagatatatttgagggtaattgtacagatagtcccaacttagcattgttcaactttatgatggtatgaaagtgatgacattcagtagaaattgtacttcaagtgccaatacaatcagtttttcacttttggtgcagtattcaataaattacatgagatattcaacactttactttaaaataggctttgtgtaagatgattctgcccaaatgtaaggctgatgccagtgctctgagcacatttaagggaaagctgggctaagcaatgatgttccacaagttaggcatattaaatgcatttttgacttagaatattctcaacttgcaatgggtttatcagaacatgacatcgttaatcactcaaggagcatctgtaccactaatgacatagatgctggttgcaggaaggcagccagaggagggcacagtgtggaagaactcaactttttaaagacagagatcagctttaaatattgctaagaaagaacttggagagagaagttggtgataccggagacagcaggcaacagacagagtgagaggcccgaagaacaagaggaggagggagtctcttctgggagcagaaggagtgtcgacttaaatattagggagccaaagatgaacctcgcagagaacctgcaaaacccagttgcagaaatacctgcccacacctaaaaactcagtcactgaaagtctgaagtcaaatgattatgtgaaatcttagtagtgggtacatgtggtttcattagattattctttgtatctatatttgtactatcttataagcactataagttttaaaaccatacaagaggctctatggaaaataaattggacttcattaaaattcaaaacgtgtgcatcaaaagacactgtcaagagaatgaaaagacaacccatatgatgggagaaaatcacgtatctgacaaaggtctacaatccagaacatattaaaaaactcctacaattcaacaatgaaagaccgccacccagttttaaaatggaaaaaggacttgacgtttccccaaagatgtgctcgtgacgaatgagcatgtgaagagatgctcactgttggccgggcgcggtggctcacgcctgtaatcccagcactgtgggaggcggaggtgggcggatcacctgaggtcaggagtttgagaccagcctggccaacatggtgaaaccccgtttctactaaaaatagaaaaaattagccaggtgtggtggcaggcgcctgtaatccagctactcaggaggctgaggctggagaattgcttgaacctgtgaggcagaggttgcagtgagctaagatcgtgccattgcactccagcctaggcaacaagagtgaaactccgtctcaaaaaagaaagaaaagaaaagatgctcactgtcattagtcataaaggaaatgcaaatcaaaagtacagtgagatgccacttaacacccactacgatgggtaatcataggatgggaaaaataaaataagtgtgggtgaggatgtggaaaaatcaaccctcacacactgctggtgagaatgtaagatggtgcagctgctatgtgaccgtctggcagtccctcgaatgattaaacatagagttataatgtgacccagcaattccatatatacccaagagaaatgagcattattcctaatagacaagggaagaaacagccccacggttcatcagcccatgagtagattaactaaatgtggcatatgcatataatggaatactgttccgccatgacaaagagtgaggtgctgataaacggtaccacgtgcagggaccttgaaaacagattaagtgagagaagtcagtcaccaaagaccacatattacctgattccattcatctgcacggtccagaacaagggagtctacagagatagttggttagtggttgcctagggcttggggaagaggtctggggagtggagaagtgatgggtatagtatacacggttcctttttggggtgatgaaaatgttctaaaatggactgtggtactggttgcttattttaatatatctgtgaatatattaaaaaaccattgaattgtacactttacatggatcagctatacagtatgtgaactatttctccataaagctgggggtttttttgtttttgtttttgttttttatttagatggagtctcactctgttgtccaggctggagtgcagtggcgcgatctcggctcactgcaacctccacctcctgagttcaagcgattctcctgcctcagcctcctgagtagctggaattacaggcacacgccaccatggccagttaatttttgtatttttagtagagatggagtttcaccatgttggtcaggctggtctcaaactcctgacctcatgatccgcccgcctcagcctcccaaagtgctgggattacaggcgtgagccaccggcccagccaaagctgtttttaaaaaaccatacatacagtgagatatcacttcatatccactagtctgggccatcatttttaaaatggaaaatcacaagggctggtgaggatgtggagaaattgtaacactcatgcaatgttggtgggaatgtaagatggtactgccactttggaaaagagtgtggaggttcctcagtaaggttaaacacagaattaccatatgatctagtaattctactcctaggtacatacctcagagaattgaaaacaggtgttcaaacagaaatttggacttaatgttcatagcagctccatccacaatagccaaaaggtggaaacaacccaagtttccatgaacagataaacagatcaacaaaacgtgctatgttcatacaatggaagagtattagctccaaaaggaagcactgatgcattctacaacatggttgagcctagaaaacatgctaagtgaaagaagccagacacaaaagaccaatgtatgactccactgatgtgaaatctccagaatggaccaatccctacagaggggagcagatcagtggctgcccagagcttggaggaggggaatagggagtcactccttcctgggcaccaggtttcggtttggggtgatgaaatgttctataaccagacagtggtgatggttgcataacattgtaaatatgcttaatgccactggattgcacaatttaaaatggttatgatggtaaattttatgttatgtgtgttttaccacgtacacacataaaacttattttgtgccattaaaaagaaaaagctctatgaagcacct

SEQ ID NO: 589 - DNA, 5758 bp, Homo Sapiens
accgaggcagctctctgcctcgaggctggagggcaacgcggtctgaggcagccaaagaccgggccaactcgctgccaaaaaggggccggattgcttccggatctaggaggcaagcgggacttctccctctccctactggacgcacaactcaggatcctgatggcttcttaccgccccgtcggctgttttttttctccagaggaaagcgtacacaagaaacctttcctggagaaggaataggtgataagaagacgggaagaaacaagcatctgttgctactgtccccattttgctgatgtggaaactgaggcttgaaagggaccaagaacctaatgaaatgttcccaaggttgaaatggtaataaatagccagaaatgaggaaaaggcaaaaagttatccaggctcgcaagtcaaagccatactggatctaagctaaactttcttatacaggatagtctacaaaaaacaataaggggacattaatttattcatattaaaaatacttactgaagacacactacgttccagtgactagtactgggaataaagaggcgagcaaaagagacttaccaagttcctgttgctaaatcagtaagactcaaggaagtagcaacaagttagagtagacgtggtaactaccttcaagaaatttacaattccaaacgagtcgttaggaaatacagtatgaggtgaaaacagttaaaaagtgaaagaaataaaactaaagataatgatgttaaaaaaaaccccacattatcaggcactgttatagccttcatatgtcatttcatcttgtcaaagaatgtctcaaaagacagccacaggaaagaaaagaaaaactttatttgcaaagctgcaagggagtgagacttccaaaaggactgattcaccaaatatgagacatcaagttttaaagattagttaaagtatagagggaagaaaagaacacagaattaaattgactttacatgcactgaaagggaatctaagccaaggaaagttggaatggtagcctgtaaggggacagctacagaaagggccagggaagaagaattcctaattgatgttttcctatgccatttcctgagttcgtgactgtggacgagttatctctccaaatctcattgtccgcttctgtgaaatgctggtagcagggatgactgcaaaggcttgtggtcaagattaaataacataagaaagtgctgctagactataatttcatgtgtgtgaaattcaaggggaaaaaggaaacaatacataatccagtctgtagcttctcatggatcgtgcaaagcaccaccaggacagacatctcaagcacatttgaagagctcctgtttcctaagtaagacagcagcagcaagactgcaatcatttctgggaaggcagtatcatcataatgcaatattagctactgtgatcttctatcatttccttcctggagagttatgactgtggcattgaagatttaagacctacagcctcaacactacttactacaaatctctcacaaagctgctgcaataaatctcgtggaggaaagtcattgcataaaaaaatcctcaactccagggagttggccatttattttcctagaaaaggggctgtgatgagagacactccatgctcctttaactccatggaacagaacccaacaaaacattcatcatggaaagttgactgatgggcccagtgagactagctggggaaggaagatggaaagagaagtgccccatccaaggcctgctccttttcctagctgcagcccggagggatttcctcttagcttgaggattgactttccatagaatcagcaccactgagggtaagcttccctgaagacaaactctgtcattggagagctcagccaggggtctaaaactggaccctatggactccacagatttatttagtctgcacagtgtttaaaaatgtttttagttagggccaggcatggtggctcccacctgtaatcccagcactttgagaggccgaggtgggtggatcacctaaggtcaggagtttgagaccagcctgcctgacatggcaaaacccagtctctactaaaaatacaaaaattagctgggcatggttgctcaggcctgtaatctcagatacttgggaggctgaggcacaagaatcacttgaacctgggaggcggaggttgcagtgagccaagatcgcaccattgcactccagcttgggtgacaagagtgaaactccatctcaaaaaaaaaaaaaaaagtttctagttagttcccaacataaaaaattaacaattttgcaaagaaagataaaatccagattttgggctcccctaaacaaattgggatatctgaaaacagtgggccacattcctacattcctgcccctgttgacagtatgcgcctgctctaattttacttccccttttaccctaactgccctgtagggaatggagtttgcaatccccatactaatccatcaccctgcaggtccattcccctcctccctgacctctgttctgataaggggtgagagaatgaacccccatatgtattgaatggaaaatacatgtattggccaggcacagcggctcacacttgtaatcccagcactttgggaggccaagatgggcagatcacctgaggtcaggagttcaagaccagcctggccaatatggcgaaaccgtgtttctactaaaaataatttaaaaacaaaattagccagacatgatggcaggcgcctataatcccaactactcaggaggctggggcaggagaatcgtttgaacccaggaggcggaggctgcagtgagccaagatcgcaccatggcacaccagcctgggcaacaagactgaaactccatctcaaaaaaaataaaaataaaaatacatgtattgatgagaaaatacaactgactaatcccacctaaaccatgacctcatataaattcagaagatctttctaacatggcagggaggcagcctagtataaagcaaagagcacatgctttgcgaatgtaaaccaaaaataaaagttgaaggccctcctcaccatatgaatggtctccttcctttgccagggcaccctaaaatttaactggttgaggccatgatgggtagtaggggttggacatgcctcattatacccttccagcagtaacatcaacacagactttaagtctgataagaaacatttacagtctattttctctaaagcctgctacttggagatataaaacctaggtctccacaacccctattgtaacccagccatttctttctaatgataataagtctttcaaccaattgccaatcagaatatgtttaaatcttcctatgacctagaagcaccccactctttgagttgtcccacccttccagattgaaccaatgtaaatggttcaattgattgatgtgttatatctccctaaagtgtataaaaggaagctgtacctcaaccatcttgggcacgcgtcttcaggaactcctgagtctgtgtcacaggtgtgtccttaaccttggcaaagtaaactttccattacttataatggcaaaaactgcaattacttttgcaccaacctaataaatggattgagacttgcctcagatacttattggtttatacctagaggcagaccttggctcaaatcccatctctcccttactctgggatattgtccaacttgctcagcctcttgaaacctactttgcttacagcaaaatgggtataaggggatctttcacccaagccttttgtgaggactaaatgtggtaatggacattaagtgccagaccccttgaatgtgccatcttctctcagcttctataatgtcatgctgtcagttccctccttttctttttttcttttcttttcttttttttttttttttttgagacggagtcttgctctgtcccccaggctggagtgcagtggcacgatctcggctcactgcaagctccgcctcccgggttcacgccattctcctgcctcagccttccgagtagctgggactacaggcgtccgtcaccgcgcctggctaattgtttttgtatttttcttagagactgggtttcacagtggtctcgatctcctgacctcgtggtccgcccgcctcggcctcccaaagtgctgggattacaggtgtgagccaccgcgcccagcctagttccctccttttcatggcttctttgcttcatcttttctgtctcctttgaaggtatgccttcctggaatataccataaatgtcagtgttcctcaggattctatcttgacctgactcccccgacccaactgctagcttttccctctgtctaatgctggtacagatacataaactgataggtagattacaacacaattcgattttctgttttgcttttttttttggcttattattacataaactttttttcattgctgccatacattcttcaaaataaacacttcggggggcgagctggcccagcactttgggaggccaaggaggtggatcacttcaggtcaggagttcgagaccagcctgaccaacatggtgaaacccccatctctactaaaaatacaaaaattagccgggtgttggtgcaagcacctgtaatctcaactgctcgggaggctgaggcatgaaaatcacttgaacccgcgaggcagaggttgcagtgagccaatatagtaccactgtactccagcctgggcaacagagctgcgagaccttgtctcaaacaaaacaaaacaaaacaaaataaacacttcatggctgaacaatatgccatttcctgaatagattgtaatttacctaatcatttctctaatagtggacacttaggttgttctaattttgaaaggcaggaataccaagaatgttttcttgcacatggcagattatttctcagtataggctcatcctttcgagtatatggcatcttttcttctttccctcctctctctcctcagaagtactcaaggccccggagatactttggctgtatccccaccaatctcatcttgaattgtagctcccatgattcccatgtatcctgagagggacccagtgggaggtaattgaatcatgggggcaggtctttcccgtgctgttctagagatagtgaatgagtctcacaagatctgatggttttataaagggcggttcccctacacaagttctctcttgcctgccactttgctcctcatttgctctctgccatgactgtgagccctccccagccatatgcaactgtgagtcaattaaacctcttttcttaataaattacccagtctctggtatgtctgtattagcagtgtgagacagactaatacagcccttatgtgtccagaagtactgactttcttggatgataccttaagtaaagcctaataaagctttagtgactgatacatttttaaaaatgaagtaattatttatgtgtaatgagacaaattatttatttcagagtgttatttgccttactctcttcccccagcaaaaggagtcctcaagtggccagccacattttctcatttctcctttcttcaaaaactgatgggatcttgcttgatgaagtcacataacaagtgaatacagcaaagagagagggaagggggaggaaatagccgttgggaatggagtgttgttggatgagctttgtgaagtgtgggaagagaaagatactagaggagaccgagacaaatggataggtgaagaaacagaattttagtaagtggtgctgtatgctatatatgtggatttgcctcaaagttttaaaaaatggcaagcag

SEQ ID NO: 590 - DNA, 1518 bp, Homo Sapiens
aacaacagaaattacccaatctgaacaacaaaaaaatacactggggaaaaaaaaagcgcaaagtctcaaggacccgtaggactataaaaaatgatgtcatggcactggagttctgcaaggagtgaagaaagagcagggcttaaaaagtattcacagaaatgacctccaaatatatcccaaatttaacaagctacatcaaccaggattcaagaagctgaacaagctccaaacaggataaaccccttcaaaaaacactctaagacaggttataattaaatttatgaaaactgaagaaaaaaatcttgaaagcagccagaaaaaaaaaaaaaaatgacaccttacccatagggggaaatcagtctgaataacaggagatttgtcattagaaacgatggaggctacctggaagtggcacaatattttttaaacgctgaaagaaaagaacagtccaccccagaaccctagactcagcaaaatgccaccttcaaaaataaaggagaaatgaagacattcttagatgaaggaacactgagaatctgtcatcagcagatttaccctaaaagaatggctaaaagaagttttctaaacagaggaaatgataaaaggaaccctgaagcctcatgaaggaagaaagaacacactgatttcctccatgtcttctatggaagattctgtccgtcccactggtttatggtttatggtggcgcctctccatatcagattatgctttcacgtgtcccaggtggatccagacagcctaggtgcaaatagtgtccctgtcacttagcagctatgtgatttggggcaagtgcctcgtttctttacatacaaaatgggacaatagcatctgcttcacggactgtcaggagataacatgagtttatgactgctcaggcctgcccagcacagggtaaatgcccatcaccgttgcctcttctctgttaggctagtcttatgctaagagccatgaaaatgttaatggggtggcttgtagttttgtattgataaggcaatctccattcattagggattgccttatcaatacgaaactactagctacccccatttttatttttctagaaatatagctattttcatctatttattattttatataaactctagaaccattttatcaagttaaaagtatcatttatgctttcaatatggtttgtgacacgtgaataagcaaatttggggtgaatgcacgtgtttaaaatattcagtcattccattcaagagcatggcatttcttttatcttaatatctcccagtaaaatttttttatttgtcctcatttctgcttcaaacttttctgattaggctggtagatgtaatggtgaaacagatgggttctaccaactctaccatgaactagctgtgtgatctactggcactgaagctattcaagtctcagtttcctgcctataaaatgacataggaggcactactgtatggattgctgtaaagcctattgatatatggttctaatcactacttaagcagaatagaggttac

SEQ ID NO: 591 - DNA, 3831 bp, Homo Sapiens
gccccggcccgcatacaacgctgtctgcaccgctcccctgccttcttccgggctcccagagcaccgctatggagatgctctcccggcatttgaggaagaattgattgtcctcatcctgcaactgtacttgcccaaccgatatttattgatgcctgcagtgtcctgggtgcctaccaaggggcacagaactggatccgacgcagaccctgcctgccttcaggttgcttgaagatgaacagagagatcggacctctgcatttggcactaccaccatctggtctgtatgtaatcctttacagtttgcaaggcacttttacatccattatatttaatttgattcttacaaccaacttgtgagataggcaagatgtgaagtcgatattttatagacaaagcagctgaagcataataggagcttaactggtgggatccatttatccattttctcttccatggagcatcttgttgtattcatccaaatccttgacagaaatgttgaagaggacctctagaggctaagcttatcctgaattcttaaatagcactgactgttacagtttaagcaagtcagtttcacctaaaagtgtgattatccaacccacatgttgcctttctgttcaaaaaggatggtaccaaagacagtcacagtcacctggcttactgacataaatattaatactaatcaaatgagtaaaaagcccatgaggattggctgccacaaaaaattttcaacctgtatctaccaagaaactatcataccaactaaggaagccaagtctctctctctttcaaaaccctcacggggccatgctttattataatggtctgccacaggtcctaacccacactgtatttgattatatacagtctcataattaagtcattcctctttatcacacccagcacttagtccactgctgcccatgtaggaggcactcaaattggtaaaagagaaatctatgcaagggaatgatcttctggaccccctccaaaaacaaacttgtgactagaagaggcaccagccatagccacattcctactaacagggctgatttaaatgccctttttattggcttggtcatagtctccaacaggtgccaaggcttttgctagttaaaccagttttcattggatcattttgttttctatgtgtgttttgaccaaaaacaaagataggttctctaacaacagggagagaatatatgaaataggaatatgtctataaaacgacagtctaccagtaaggaaaataagtgatccataaaacaaaacatctgactgtaggtctacccaaagaaaggaaaaaggactaacaaacaagaatatagtgctttaccatttacaaatctttcacatacattctcatttgaccctcacaacaaccctgtgaggtaggcatcacggacattctactcattaaacagatgaagacagtaaatctcagagtagttcactgataatgcccaaggctctacagttagtgagtgatttgtattaatatcagtctttggcctaaaaattcagcacccctcttccccttatacttgtcccacctacttcacagggataatgaagataaaatgaattcaaggctagaaaaatactttgagggagaaaagcactatataattatacctacaaactatgattttccccaatatatggctcattcctcttctcatctcagcttgtgtgtgaacccagagttgtatattgcctctgtcctgtgctcagtaagcaaataaggcaggcagggggtacagtgtgatcctgtttaaagttacataaattacaatcagggtaactgctattattaggcaaattgaaaaacagcacagaaaggccagtgtgcaactaggacccactaaagctcagaggaaagcaatgcaagattatcagacaggcatgattgcatagaaggaaaatgtggtgtcagagttcaaactggcacacacacacacagttatctaaggcaaagtggtggcaaagaagttatttgttccatgtcacacaaacaagagcagaagattcatgggaacccgtacaaaagcatcttgtgtcacacagatctctccagctgcctatagggaatatacagaacagtgtcaccttcaaagaatgactgtacctgtgttcatatcctgaactgcaccaaggaatagctccatgctaaactgtcttggctaaaatacaaccagtgccatcattcctaatcagactaataaacagaatgtcttttaaggtaatgagttagatggctgtgtttaggttttgttcaggatttactttggattctcctgctttaagacccaaagaaagttatattgagtttttattgatgattctatgtgtttttaacagagtgtgataggtgaattaaacatattaaaagagttctatagcatctgttcagaaaagattatatactatacaaactattcaagtcatacaaaaccatttttcattgtctttcaaactgagaagaatcctattcagcacgcttctcctcctgaggtggttcatactgagcaagctatggggcaaagacagaggaatttaggtgaattttattctaaattgagtaaaaaatagtaaaacaaggtaactgttatattcaacttagttactgtcagtaaattgtattaatatcagtttctataactatccattttaaatcattcagtgatttaagatttaatacaatcaaatctaatgaaagccctttttatataaacctttaaaattgctttgaaactaaaatttcattccagttcatgactgcactgttcaaatacttgatatgcaataaactatatcttcccaaagattcatttgcttataaggaactttcttcctctccagcaaaagtttactgaaaatacccactgaaaagtagataaagagttaagtgacatgtcttaacttaaccagccaataaacaactactaatgtctttgagttaaaaggttccaaagagttaactagcactacacattgtggaatcttggataatttaaaataactgcattttcttttatgctaagtgtggttccttgcaagaacactaggctaacattagggttctgccaactacctgttggagttgagaagcttattagacttcactgtgctttcgtttcctcacctataaagtggcttgtgtacttgtttcacttatctcacaaagttgttgagaagataaaatatattatgagaaatacttagagtaatgtaaaatacattatgtgattaagaatgtggtaagacctgaaagacttaagagttgactaatttgaagttcatgaaaattctcacaggactttgaaaaaagaaaaaactggctgggtgaggtggctcatgcctataatcccaacacttcgggaggccaggccaggaggaacgtttgagtcatgagtttgagaccagccagggcaacataatgggaccccatttctacaaaaagtttaaaaattagccgagcatggtggcaaatgcctgcagtcccagctactcaggaggcagaggtggggggattacttgagcctgggaagtcaaggctgcagtgagacatgactgcaccactgcacacaagcctgggtaacagagaacctgtctcaaaaaaagaaagaaaaaactttagcactagataaaattaagtcctaacaaatttacagagggccgctacatatggccttgcaaactatgaaccatacaaattctaagaagtgccatttacaaagcagtcgccccatattggcctacttaaaatcaactgcttaagaacctcagaactgaccatttacttataaagaacattaaccaatattctca

SEQ ID NO: 592 - DNA, 1560 bp, Homo Sapiens
taaccagaggctgagatgggtgcatgtggggtgtgggggataggatcaaggaagagaggttggttaatggatacaaacacaattagatagaaggaataagttctaatgtttgaaagcagagtagggtgactatattgatcaagtttgaataggataaaaatatttttactttttttttttgcaatttacatgcaagattttttaaatgtgtttttaatataagcttctctctctgccaccaggcttattactctaggcagggagcaagcctgccgtgggaaggcaagggaatggcctcaatctgctctgtttcccttttttcgtgtgggtctactgctccccctacaacacagttgggtttgatagaagggggtgtggggaaggccacagccatgttggtagggaaggtaacgggcagggagagttcatctgcctgttatgttgggacttggtttagcaacccaaatacatatgtactactattagatttggtgcaaaattaattgcggtttttgccattacttttaaatcacaaaatagtctataatgcactttagcactggcaatgtgatattatgtatgtatacattggttggtccaagctacacccaagaatagtaaagaattcatattccaggatggtcagctagcatttatgagaaaggccaaactccaaaagcttgcttcccttatctttatctcccaacaacacccaactgattttgctaaattagcagagtgaatatgaaaatgagatgccattgatgaaattattaccttgtttaattagcataatggatgttaaaaacgggttctcatgtttaattgtttatattaaaggtatattacatgatgttttgatattgtggttttgattttcatttccctagtgactagcgatattgaccaaactaattactaccttttcaacatcggctactcaggaggctgaggctgaggtgggaggatcacctgagccagggagatcaaggctgcagtgagctgcgacggtgccacttcactcaggagcctggatgacagagtgagaccctgtctcaaaaaaaacaatcatccagcaggggctctaaaaccctgtaaatattctctccttggctcatcccttctgagaactggcaaagagctgctctcccttactgaagtgggtcttataaacttagctttgcttgatcaacaggttttcaaggaatccacagtggtattcaagacaagtgaatgcgaaaatgagagacaaaaacattgttcacacactctgttttgtaagcatgatacaaatctccactctctatactttaagcttcagaacaaagggcatgaacaattcttttgtctgagggctaataagtggatagcagaatttgatctgagaatcaacttcattttaacaattaacttggcagaaaggttacttctaagctttggcaattacctgttgctaccaaactaaacccactaattaaagcatacccaaattggcttaggtcagtctgcaaaacaaggtactgcccaggtcttgattccaaccgtagatgaatcacccaa

SEQ ID NO: 593 - DNA, 7349 bp, Homo Sapiens
acagccattttacaactctatctgtgaaaagcacagaacgtattttgaccttttcaccgtgggatcctgaaggggacttaaagaacagccttcaggtcctgctggtcccttcctgggaagacttttattccctcggagctaagaaagacacctagatggtgccttcctctctcttgtgctgcttggaaggcatgggctttggggtcagctagaccctgggctagctcttggttatgttcccaacacctctgagaccttgggcaactgacttattgttcttggacatggctttctttgaaaaccataaaacttatagaatgggatgggagcattttaaaatacatttatgggaaattaacacagaagaccttgtttaaacattatttttagtggtcagccaatggcttcagcttaggaatgactgaggcaaaagcactaattaaggatggtaattttattcatctttgtatctgtttagtgtcaagttgtaggaagagagggtttaaaatatgagctagtaacccccccacaccccgagactctttaaaactatgaataaagttaagaaaactgtgcaagaactaagagaaggtcaaaggaaaagaagcgatggacattgtaggttcgaagcacaccaggcaccttccaggagaggagaaagttcaggaatgtggccctccctgcactgcaaatccctttgtggccccttcaagcctctaagctcttttacctcagctcatcattaatgctgatctccccaggtaggggagaggaggtggacttaggaggcttaactacattgcttaggattgtatatttcagagacactgactgatgtgagtcacacaattatagttctgagtcctcctctgttcttgagtatagagattggagaggaaagctgtgtttgtgattttagagtgcccgggtcaggcacttcctttttgtatgtgttttgggcaagccccttaccttttggagcctaacttaccacccctgggaagtgagggaactgaacttagtgctctctaaggccctgtttgagtttgcatgccattgactctggacttttctaaataaacaagtaaacttacagttaccatggagaatgtctgtgtccttgctgatcattgtaaatgtccctgatgtcaaaatgcaggatgataaaaagtgaagttgaaaaatgaggaaggagtgtgacagggagtgatcttaatcgttttgcagggtgtgcactttttaggctgcctaagggcagaattgaaatatatgccttctgccagcatatttcagagtcagccgaactacattttggttaggaactaccttgtccagaaagagaggggatgataatcaaagcaagggcagtcccagagctcagatgatccctttttcctggtgaaggatatccttggatggttgattttctattgagcctttaaaagagaacgctaggcttaacaaagggtcaagagtccacagctgaggaggccgagaggagccagggaaaggaagtggtttaaaagacttactgctattatattagtaataaattttttcgaatttattattgaaatttatatatatatttcaaaaatataccaaaatagagtgaagtgtatgatggatctctacattcctatcaagagtcaaccatcaattcatggccaatctagtctaacctgtatcttcatttaatcttgttttaacaaaattcttttgagacaaatcttgttcaatttcatctgcaaatatttccaaaggtatttctaaaattaagggcctttttaatttaaaaggcaaatgcaataatgttaaaacatctaaaaattaacaaaaaatttttaattgtattcactagcaagtcaatgtttaaatttctccaattgcctcatatacatatttttttaaaaatttgtctgaatctcgatcctaataaggtccatagaaagctattggggaatatgtgtcttaagtctcttttactctacaggtttccttccatctttctttctttctttctttctttctttctttctttctttctttctttctttcttgtgaagaaactaggccattttttcctgtgaattttctgattttgatgattaaatttctgtgttatcttttgatatgttcctcagtcttttctatttcctgtaaattgatatctaaatgtatgattagattcaatgagttttttttggcaaatatatttcatacatgtgtcatgtattctattaggagacaaacaatgcttgatagtctcttttttgtggtatcagtagccattattaatcattgtccagatcccttaattcattagaggctgcaatacaatatattcattctatgaatataattccttttaatctagtagttgtaatatttctagaagaaacttttcctgtttgattacactgaggaaatatatgttcattatattatctgtatgtaaaacccaggctaaatactggatttaacccctcatttccagtttcagcctattttgcagccttcttcagaagtgaccaatgatagctgtgtgtgttttaaattgtatttttttgaatgcatggacttaaaaatatttagcctggaaattttcgagtcagatgaatataggtttgagctctggccctgcctgttacctcagagagtctttccctttcttctcatggctaaagcctagtcactttgggctctcatgggtcttctgtagggaagctttccttaactttcctgagaagggcaaatgaatctctctgagactcagttttctcatctataaaataggggccatactactgatgccatctgacatagttgtgaagattaagtgagatagtgagtacagaaccatccattataggcattcaaagttctccacttttattgttattttgtatctaacaactttggacacttaactcctgtggtgaattgttttgctattatctctatcttgaaagtattgttggagaaacaatcatgaaaaaatatttttctacttctgtttatgaagatgcaaagtcacatggcaaattatcaatattttttatgaagatgcaaagtcacatggcaaattatcaatatctaaaatgttctgaaaggtggaagagaaagaaacagtattcaagagtcttgtcccaaggtgttgtgggggagacaaggtaataattgagaactatatataaaaataagtacaaagaattatatgaagcaattaaatctgatgggctggatggacttacttacgttagggaagggtgtctaggtacattggattcaaaagcggaggaagaaactactttggaggagtctttgtgagtggaagggaaatcctgaagttagggttggtctccttctcaaaaaaaggaagttgttgctttaggagggttgactaaataccctgacaatactcacttgactaaaaatatctcttccatgggcttgaagtcctaaagccagaaccagaagcgtagcttgttcctgctgcacaccgttctgtgttccacctccggaatcttgcccaggcttatccttcctcgggaatgtccttcttgtttgccttcttcacctgcttactcccacttattttacacgatgccaggagtcagggctttagagggtctttctcagtcccttcctttactgcaccattggggtagggcctcagtgacgttttcccatcttatcctgtacacgttcccatcacagcattcatcatactgctcatatccactgacttctctggactccaagcaccacaagggtagagactctcttaatcttctctgtaacctcagcacagtggccagcacatatgtgtgcttaagaaataataaatacaataaatttgtagctgggtgcagtggctcttgcctataatcccagcactttgggatactgaggcaggaggagtgcttgagctcagaagtttgagagcagcctgggcaacatagcaggaccccatctctactaaaaataaaaaaaaatcagctaggcattgtggcccgtgcctgtagtcccagctacttgggaggctgaggcaggaggatcacttgagtccaggagttgaaggctgcagtgatctatgattgtgacactgtactccccctgggcagcagagggagaccctgtctaaaaaaagaaagaaagaaagaaagaaagaataaatgggtgattgaagttttacccgtttatttgtaaatttaaatttggacaagttacccggaagtgtagaccagtaatgtgttaacacatgaacctaaatgagttatctggttgactcctttataggagcaggaacagggtggtggtgagttagcatgggccagcaagctggtttgggggcaggtaggcagaacaggctggctttcagtcctggctgaggcaggtttgaaagagcaaaggtgaatggcctggattgtattattcttattcttgttttcctagtactgcccttgggtgaaaagtgggagaaagtaagaagtgtttagggaacagcaattagccttttggattttcttggctagattgtggaaactgagcagatgcaaaccatatagaggttagatgggcctggatgattgctggggagctttggaaacacagccatgtgacaaggttacatgtagacatgtccatcttaggaatgcatagtagtctgtccaagaaaaagccatttgatattagtggggtgttttgtatatttgcacagaaaacttgctcatttatcgttcttaaagcactcagttatttgcctaaggaagatgccttttcacataaacaacggtctacctggtatcagaatttctcaacagataagacacccttgtgctcaggaagtaacttctgcaggcagatagcataccaaacttttattgttaatatgggaagaaaggcatgcatcagaataacaggaaaacctgctcttgtgtgtttgcacctgaggagggggaggggacaccatttttatcaggcacactaaaagcagccgttcattcttgcaagatggactgttctagattttgttgctttatgaaatttttggtacacaatttaagtaagtttttggcacaatttaagtaaaacccaggattatttcagacagttagaaatgaacaatagcatgtttatcattagaatcggactctccttgttatatttcatagggtttagcacttgtctgttaatacccatctcactaaatgtctccattcataacataggttttcttcccctgggtgaagggatggggaggagtgaatctttttctaatttctttttcttccatcatgtttatatgtataaaatttcacagaccaacattttctagaacctctgtattcgcggaacaagttcctttaaatacaaagatttctaagtgacattttgacttctgatttacatgaatcttagtaagttatgccaaataaactcttaaattatactgagtaagaagtctgattaagaagtttttcttctcaaaaggaaaataaatgttttcaattctttttaaaataagtttttgtgtttggcagtgccttggtctcacagcagtaaagagattaagtaaaatgctaacttgtagtaactctatatttttaaatttcttatcctaaaaactaatacagagataattcctgagaaacctcatttccctggcaagtcaatagcttactttgcttcttgttatttgcttttaacagtgacagggatttttattctttttttttccttttctttaatttgcagagtcaattaaactgcttaaccaaatagatcttaatagtgttgatagattcttattatattcctgtcataattattttttaaaactggcaggaagccttcagtattcaacatcatttacgacctcagtgaatggtcatgtaaatggacaatttgcagaaattccagctggggttaaccttagaacagggttgttccaatataaagctgctggcttcctttacattattatggatttctgtttgttttctttttatttttgggcaggcttcccctgagaagtttagatggacgatttaagggaggtgtgtttttaggaggacttagtggtgatattggaaaaatcttagtgaaatgacagccgaggtcattataacatggccttgagtctcataactcgggaggaagtaggtaggaggtggtggcagaaaggcaaagatactgaggtgtttctaacacgggcacaggaatatgaggcaataatagaacattactaaagttctcctctagaatgagtcattgacaaatataatttgaggctttaggcagccccaagaaaatatcaatttctatgatttttataaacttacactttggaaaggttggcaaattgatagacaatgaataaacgcatttagaattcaaagttgacattcatattatggcctcaatttagctaggtgagatatttagtgacacttggatgtctttccaagggtcagatttgttaaaacattatgctaaaacaatttgagagataactttaagtattctaggcttaactagaaagcaaattttgcattacagttcaggagtagatagtaactttgcaaacccaaatcaagaaatctaaccacattaaagaaatggattttgttgtaaaactaaaatgattacatactatatttcttaacttaatgagggagaaatgtacctctggtctaataagctccatattgttaaatgtcagtgttagcatctctcttcatcagtgttatccaaaatttaatgctaatattattttactgaatctgtgaagagattgtactatttttcttttctttctttctatttttggaggttggggtgtgtggagggatggtgtttcaaagtttggtgttgagattgtatgtatttccaaagagtaatactgaaataggttgtgaaattataaccagagttctacatcctcaactctttatattcaagaagttttgccatttcaaagaaagatgagaagttttaaaaaaaaaaattatgacaggactgtagtaagagtctatcaacactattaatatctatttgggtaaacagagaggcagataccttttcccacatgaactattttttgatcagtataaagtatgataaaatatgaaaaaaagcaaaattcaggatacttttgtaggtagacacgtcagatattatataaaattagcttaaatattcaaacactgtaaaatgagaggcagataggatatcgtctccaaagaggacatggtgaaaacgatactttgaaatgataaatagtcaaatatgggcataactttttcatattagagaaaacttattgcctagacaaatgtagtagt

SEQ ID NO: 594 - DNA, 5416 bp, Homo Sapiens
atccacagcgctgtgttcaaggaactcttattttacatggttataacccccaaccacaagaggagtgatgctgacaattcggatctgcctaagaaaagccataaagtccttcctttaagtgaaaagtgaaagttctcgacttaataaggaaggaaaaaaataacttcatgctgaggttgctaagatctatgataagaaggaatcttctatctgtgaaattgtgaagaaggaaaaagaaatttgtgctagttttgctgctgcaaaagctactgccacagtgcacggaaatgcctcttgaatgggagaagctgctgctcccccaaattgctggggaagaaagggagttcctgatctttcttattgaggctcatggagcttctgtcctggagattcagtatacttcagtaatggctctggagaagagaactcaggatcctcaagacccaatggctcgtgatgataaaagcctttgggtctaccgacattttccctacgtgctcagacatgtctgcatgcatttattggcatatttttccatactcaaagcaagttgctatgtgttagtactaaagcaacccataatagtaaaaacgaatttctgcaccaagagaatgaatcggcagctgagaaagtcagagtgaagaggccccagtaatatctctacctacttgaaggttaaatattcctaagactctaggaggaaagaggagagaaagtgggccctgttctttcctccaggatgtaaggtttttccaggctgctttgaaaagtctcaattactccaggctatagaagaatacaatcagaggtgagttccctgaaatcaaggacactgccttatctaatggtgctgggagtgcagcgaacttgctggggacagtttgaaggatcatcttaagctctgaaaccaggttgctgccacctgctacagatcacccacagccaatgtccttggctgagtgacacagcttccccgtgaccgccactgatccagccaccaagtatgcagcccaacctatgaagctgagcccagaagtggctcaaaaaaacaagccacaacccagaactgaatcacaacagccttttcctttaacactatacttgctctatttaacctccgccatggccaattcaatagattcacagaaaatatcagcaggacgccttggttctcaacaccaagtctggaaagctgggtttacacgccccacctgagcaagcctgatcggtgattgtgttgggctcattcctcacttggccccttcaagcagagataggccctgcaagaactctctctaggaattgttttctcaatattttaaaatccacttttcctatatcctatcaatgggcacggagtgagagtgatacaggcatgtggaatttcacaaggctagatgtgccagcttcaagactactgagctttaggtatacacttgttatggtttggatttgtgtccccacctaaatctcatgtcgaatcgtaatctccaaagttggagaagggccctggtgggagatgattggatcaggggggcagatttcccctttcctgttctcatgatagtgagtgagttctcatgagatccggttgtttaaaagggtgtagcacctcccccttctctctcttccccctgctctggccatgtaagacgtgcctgcttccccttcaccttccaccatgattgtaagtttcctgaggcctccccagccatgcttcctgtatagcctacaatagagtaagccaattcaacctcttttatttataaattacccagtctcaggtatttctttataacagtgcaagaatggactaatacaacaacaccgaaacacacatgccagccagtattcaccctgtcctgtcctcaacatggtgacctaccagtatcactccttccaagcccatttccattgctccttcatgttcttctttgcctcttgagtaaacaagtcaaatctatccattcatatccccacgtattcacttgcttatccaacattttctgagcaccttctctgtccaagccactggccaggtgctatgggggttggggggctcagagatgactctcagagcaggagagagccctgctaactcatctccctccccatctgctccctgcataaccagcattttggaagctcagacctcgctacacccttagccctagccacaatgacctggatgaaccaaaatcaaattcttcaatagggaaagatttagagaccttgtcctcttagagaaggtaaaagcaatgttcctaaaatcaacagtatggtgtttcagttagaaaaataaaagttcaggttagccaaatattgctgggtaccaggaaatctgtgcaggcagagaaattgtctgccgtgcctgtgccaagataatcttctgtccaatcttctgggaggtcagggcgggccaatgcactgactcaccagggagggctttctaagaaagaaggctggccaggaatcttctagggggaaatatgctgtttttattgtgtctggtctccccagctccctcctaaatctgttgaatgagggagttcatctgctgggtgtttgagagctcaaactgtccaacattgtagtaaacatcaggcaaagggcagtaaacagaggctccctgtcccagctgggaggagcccagatattgatgagcacagcggacagccacagacacacagaaacacaaaaacaagtgccaggagcagtggctcacgcctgtaatcccagcactttgggaggccaaggcgggcagatcacctgaggtcaggagttcgaaaccagcctgacccacatggtgaaaccccgtctttactaaaactacaaaaaatagccgggcgtggtagctggtgcctgtaatcccagctactcgagaggctgaggcaagagaatcacttgaacctgggaggcagaggttgcagtaagctgagatcacaccactgcactccagcctgggcgacaacagcaaaactctgtctcaaacaaacaaacaacagcaacaacaacaacaacaacaaaaaaccaagcaaacacatgcagggctgcccataacctctggaaagaaagaactctcctggtcaggaatctcctcttgggcatgagtgtgaaaataaggactcttgaatttgcttgccacatcagaggcagcattgcagggaggcctttacttcagaggcagcattgcagggaggcctttacatacgtatgtcatccagcctcatggcaaaatagataatagattgtattaccctcattttctccaggggaaacctgaggctcagaggtcatcttgcctacagtgactatttgcaggactgaggttggtatacaggtctgtctgacttctccttgtaggctttcccagaaatcaaagcctcacacgaccccctcctctaaggcatgacagaacccagttgtctgttcaggcagggggaaggagggggtggcccacctgggggatttcaggggtgctgccacctggaaagtaaccctcaggagctcaccagcagtgcctggaactcagaccaaaatcactctcttgggtgtttaaattgtaaatatgtttacctgtattcaatctcaccctgtttattgtttgcttctcctcagtccacaaagcattcaacactcaccattctaaaaataataaaactgggctgggtgcagtggctcatgcctgtaatcccagcactttgggaggctgaggcaggtggatctcctaaggtcaggcgttcgagaccagcctgtccaacataaagaaaccctatctctactgaaaatacaaaattagccgggcgtggtgacacatgcctgtaatcccacctactggggaggctgaggcaagagaattgcttgaacccaggaggcagaggttgcagtgagtcgagatcccgccattgcattccaggctaggcaacaagagtgaaactctgtctcaaaaaacataaataaataataaataataataataaaactggctaggcatgatggcttatgcctgtaatctcagaattttgggaggctgaggcaggaagattgcttgagcccaggagttcaagactagcctggaaaacatagcaagatcccacctctacaaaaataaataaaaataaataaattagctgggtgtggttttgtgcgcctgtagtcccagctactggggaggctgaggtgggaagatcgcctgagtccaggagttcgaggcagcagtgagctgtgattgcaccactgctctccaacctgggcaacagagcacaaccatgtctcttaaataataatgacaataataaaaccaaaaacttttcacacctctgcctgcccctctatttatatttacaatcttacctttgatgttccaactctttggaaaagtgggatcacagcaccactgcattttcttatcctcctataacaagttctggagttgctaaaacaacgtattcctaaggtgcctagtaggtgacttctaattgtcacctgtaatggtatctttcagtcttctgcttacataactgttctgtggcattcagtatctacaggccaccatttccttgaacagtcttctttctcaccttctgacaaattcgtttgttcttatttatttatagcattttgatgattccccatcttctttacctgcatgctagactgatctccaatttgcaatccatcccttcttctgtttctccctctttacctccctctcagccaaagatctctctttagaaaccatcacccaaggtagaggaatgaatctctatgctttgacacctccttctattcctcttttcctcactctccacattcattcctacaaagtctttttttgtttttgtttttgtttttgagacagagtctcactctgttgcccaggctggagtgcagtggcatgatcttggctcactgcaacctccacctccagggttcaagcgattctcgtgcctcagcctcccaagtagctgggactacaggaacccgccactacgcttagctaatttttgtatttttagtagagatggggtttccccatgtgagtcaggctggtctggaactcctgacctcaagtgattcacccatcttggcctcccaaagtgctgggattacaggcatgagccactgagcccagccacaaagtcttataaattctgccttttaaaattcatcctgccgcctccattagatctgctcatgcccccttttaggtcacttttaagtagaaggctcctagctggtcttcctgctcacaatatttccccaacctccacatggctgtcaaagagatgttttagaagaacaaatacagcaaatacagccacgttaagacataaatgcaagtctgtctgactcctccttacttactgtaagttcaggtctgaatgcttcctggctagtgtgtaagcctcttttt

SEQ ID NO: 595 - DNA, 5499 bp, Homo Sapiens
atccacagcgctgtgttcaaggaactcttattttacatggttataacccccaaccacaagaggagtgatgctgacaattcggatctgcctaagaaaagccataaagtccttcctttaagtgaaaagtgaaagttctcgacttaataaggaaggaaaaaaataacttcatgctgaggttgctaagatctatgataagaaggaatcttctatctgtgaaattgtgaagaaggaaaaagaaatttgtgctagttttgctgctgcaaaagctactgccacagtgcacgatttttaaagaccagatctcccaaagagtgaatctgccagagaataaaatctcatcggcaggagaacaagaacagcatacctggaaatgcctcttgaatgggagaagctgctgctcccccaaattgctggggaagaaagggagttcctgatctttcttattgaggctcatggagcttctgtcctggagattcagtatacttcagtaatggctctggagaagagaactcaggatcctcaagacccaatggctcgtgatgataaaagcctttgggtctaccgacattttccctacgtgctcagacatgtctgcatgcatttattggcatatttttccatactcaaagcaagttgctatgtgttagtactaaagcaacccataatagtaaaaacgaatttctgcaccaagagaatgaatcggcagctgagaaagtcagagtgaagaggccccagtaatatctctacctacttgaaggttaaatattcctaagactctaggaggaaagaggagagaaagtgggccctgttctttcctccaggatgtaaggtttttccaggctgctttgaaaagtctcaattactccaggctatagaagaatacaatcagaggtgagttccctgaaatcaaggacactgccttatctaatggtgctgggagtgcagcgaacttgctggggacagtttgaaggatcatcttaagctctgaaaccaggttgctgccacctgctacagatcacccacagccaatgtccttggctgagtgacacagcttccccgtgaccgccactgatccagccaccaagtatgcagcccaacctatgaagctgagcccagaagtggctcaaaaaaacaagccacaacccagaactgaatcacaacagccttttcctttaacactatacttgctctatttaacctccgccatggccaattcaatagattcacagaaaatatcagcaggacgccttggttctcaacaccaagtctggaaagctgggtttacacgccccacctgagcaagcctgatcggtgattgtgttgggctcattcctcacttggccccttcaagcagagataggccctgcaagaactctctctaggaattgttttctcaatattttaaaatccacttttcctatatcctatcaatgggcacggagtgagagtgatacaggcatgtggaatttcacaaggctagatgtgccagcttcaagactactgagctttaggtatacacttgttatggtttggatttgtgtccccacctaaatctcatgtcgaatcgtaatctccaaagttggagaagggccctggtgggagatgattggatcaggggggcagatttcccctttcctgttctcatgatagtgagtgagttctcatgagatccggttgtttaaaagggtgtagcacctcccccttctctctcttccccctgctctggccatgtaagacgtgcctgcttccccttcaccttccaccatgattgtaagtttcctgaggcctccccagccatgcttcctgtatagcctacaatagagtaagccaattcaacctcttttatttataaattacccagtctcaggtatttctttataacagtgcaagaatggactaatacaacaacaccgaaacacacatgccagccagtattcaccctgtcctgtcctcaacatggtgacctaccagtatcactccttccaagcccatttccattgctccttcatgttcttctttgcctcttgagtaaacaagtcaaatctatccattcatatccccacgtattcacttgcttatccaacattttctgagcaccttctctgtccaagccactggccaggtgctatgggggttggggggctcagagatgactctcagagcaggagagagccctgctaactcatctccctccccatctgctccctgcataaccagcattttggaagctcagacctcgctacacccttagccctagccacaatgacctggatgaaccaaaatcaaattcttcaatagggaaagatttagagaccttgtcctcttagagaaggtaaaagcaatgttcctaaaatcaacagtatggtgtttcagttagaaaaataaaagttcaggttagccaaatattgctgggtaccaggaaatctgtgcaggcagagaaattgtctgccgtgcctgtgccaagataatcttctgtccaatcttctgggaggtcagggcgggccaatgcactgactcaccagggagggctttctaagaaagaaggctggccaggaatcttctagggggaaatatgctgtttttattgtgtctggtctccccagctccctcctaaatctgttgaatgagggagttcatctgctgggtgtttgagagctcaaactgtccaacattgtagtaaacatcaggcaaagggcagtaaacagaggctccctgtcccagctgggaggagcccagatattgatgagcacagcggacagccacagacacacagaaacacaaaaacaagtgccaggagcagtggctcacgcctgtaatcccagcactttgggaggccaaggcgggcagatcacctgaggtcaggagttcgaaaccagcctgacccacatggtgaaaccccgtctttactaaaactacaaaaaatagccgggcgtggtagctggtgcctgtaatcccagctactcgagaggctgaggcaagagaatcacttgaacctgggaggcagaggttgcagtaagctgagatcacaccactgcactccagcctgggcgacaacagcaaaactctgtctcaaacaaacaaacaacagcaacaacaacaacaacaacaaaaaaccaagcaaacacatgcagggctgcccataacctctggaaagaaagaactctcctggtcaggaatctcctcttgggcatgagtgtgaaaataaggactcttgaatttgcttgccacatcagaggcagcattgcagggaggcctttacttcagaggcagcattgcagggaggcctttacatacgtatgtcatccagcctcatggcaaaatagataatagattgtattaccctcattttctccaggggaaacctgaggctcagaggtcatcttgcctacagtgactatttgcaggactgaggttggtatacaggtctgtctgacttctccttgtaggctttcccagaaatcaaagcctcacacgaccccctcctctaaggcatgacagaacccagttgtctgttcaggcagggggaaggagggggtggcccacctgggggatttcaggggtgctgccacctggaaagtaaccctcaggagctcaccagcagtgcctggaactcagaccaaaatcactctcttgggtgtttaaattgtaaatatgtttacctgtattcaatctcaccctgtttattgtttgcttctcctcagtccacaaagcattcaacactcaccattctaaaaataataaaactgggctgggtgcagtggctcatgcctgtaatcccagcactttgggaggctgaggcaggtggatctcctaaggtcaggcgttcgagaccagcctgtccaacataaagaaaccctatctctactgaaaatacaaaattagccgggcgtggtgacacatgcctgtaatcccacctactggggaggctgaggcaagagaattgcttgaacccaggaggcagaggttgcagtgagtcgagatcccgccattgcattccaggctaggcaacaagagtgaaactctgtctcaaaaaacataaataaataataaataataataataaaactggctaggcatgatggcttatgcctgtaatctcagaattttgggaggctgaggcaggaagattgcttgagcccaggagttcaagactagcctggaaaacatagcaagatcccacctctacaaaaataaataaaaataaataaattagctgggtgtggttttgtgcgcctgtagtcccagctactggggaggctgaggtgggaagatcgcctgagtccaggagttcgaggcagcagtgagctgtgattgcaccactgctctccaacctgggcaacagagcacaaccatgtctcttaaataataatgacaataataaaaccaaaaacttttcacacctctgcctgcccctctatttatatttacaatcttacctttgatgttccaactctttggaaaagtgggatcacagcaccactgcattttcttatcctcctataacaagttctggagttgctaaaacaacgtattcctaaggtgcctagtaggtgacttctaattgtcacctgtaatggtatctttcagtcttctgcttacataactgttctgtggcattcagtatctacaggccaccatttccttgaacagtcttctttctcaccttctgacaaattcgtttgttcttatttatttatagcattttgatgattccccatcttctttacctgcatgctagactgatctccaatttgcaatccatcccttcttctgtttctccctctttacctccctctcagccaaagatctctctttagaaaccatcacccaaggtagaggaatgaatctctatgctttgacacctccttctattcctcttttcctcactctccacattcattcctacaaagtctttttttgtttttgtttttgtttttgagacagagtctcactctgttgcccaggctggagtgcagtggcatgatcttggctcactgcaacctccacctccagggttcaagcgattctcgtgcctcagcctcccaagtagctgggactacaggaacccgccactacgcttagctaatttttgtatttttagtagagatggggtttccccatgtgagtcaggctggtctggaactcctgacctcaagtgattcacccatcttggcctcccaaagtgctgggattacaggcatgagccactgagcccagccacaaagtcttataaattctgccttttaaaattcatcctgccgcctccattagatctgctcatgcccccttttaggtcacttttaagtagaaggctcctagctggtcttcctgctcacaatatttccccaacctccacatggctgtcaaagagatgttttagaagaacaaatacagcaaatacagccacgttaagacataaatgcaagtctgtctgactcctccttacttactgtaagttcaggtctgaatgcttcctggctagtgtgtaagcctcttttt

SEQ ID NO: 596 - DNA, 1881 bp, Homo Sapiens
gagattctggaattcctatgaaaatgggatctctaagaaagattcctaacaactggctttggagacgagtaagtgtgtattttcacctttaagtccatgagctgcagggagccacttcatgggaggattttgatgacattttactttgtgcatgctcattttaactgtatgacattaaaacagcaattacacatatcaaaagagagaacggatagcactggggaccaaaaggctcactttcccacaaatagtcccttcttctggatttcatgggtacccattagtaccagaatttcctgggtttggctatggaaagtttcaagtatatattacatatatattataagatgaggacaacttgaagccactacctgtcgtcagtgtgtaaggagggaggtagtttttcttgggagggtggaggtgggaggtagcccagggaaaggcatgaagggcaacaggctgggaggagggaggaagtgcagtcagccttggaaccttagacagactgagtgctgcatctgggcacaggcggtcagcctgcactgactcctgaaggcaaagcaagggaggggagaagcatgtggctaaacagagaaggggaggattctagccagaacacactgtttgcttttataaatgccaggggtggtgcattggtaagcaccctgcacagaagaatggggtgggagggctggaggaatacctggtccagtccatccaggagtcctcccatacctgcattccctgcccatgatgcgatttgatgctcagcctacatcaaataacactatgtgctgaatgggaaatgagaggaaaatacgaggaggccttattattcttcacaattttgcctatgtccaattccattcagcatgattgcttttggtgcccagagaagctgagtttctatcaaaaacatgtatatataggtgagtgtatctgtgtgtttgtacatgtatgtatatgtgtgtgtatacatgtatatataagtatatgaagatggtggtgttcctgctggcatcctatggccaacttgacttcagagtacccaggggaaggcctggctggccggatgcccttgcagatgtcagctccagtgtggacatggtgcaatgacagccaggggtgtgggagcatcctgaatgtgtcccgtgggagggcagggcctctgaaagggtcctactcaggatatgtctcctgaaagccaccagggggtggagagagaagtaggagcccaacaatggctccatccctgctctgcttttggcggttgtataacatccctgagtcccagattatttgtctatcaaaaggacaaatgaggtggctcatgcctgtaatcccatcactttgggaggccaaggtgggcagatcatttgaggccaggagttcgagaccagcctggccaacatggtgaaaccccatctctactaaaaatacagaaattagccaggtgtggtggtgcatacctgtaatcccagctactcaggaggctgaggcagaagaatctcttgaacttgggaggtggaggtttcagtgagccaagatcacaccactgcactccagcctgggcagcagagtaagactccatctaaaaaaaaaaagagataacaatatcccctttgcagaatggtgatgggcatcagacatgacatatgtaacatgtcccatgcacggaagggtgctccatgactgcaaacctggatgatgatgacaacgacgatggagatgactaagactgtatttaaaaatggaattgctgttgtttcctggcttcctgatggtcctgttttttaccttctgctgctttttacggatttattttttcttgactgattcgtacctttttgagcaatgggaacctttggtggtgtaaagcct

SEQ ID NO: 597 - DNA, 2352 bp, Homo Sapiens
ttatgacctgggagctgggcccattttatgaccaaggagatggggagttggaatggtggtactaagaggcataggaagttgagtgtgaataccattggtgatgggtccaggagaactagactatggttcttgaatatctgtccacaaagaatatactaacttttgtcaacttctcagaactcccaactggagtcggtgagacctaggattttctgcacttccacacatgcctgttccaagtgtggctgtcagccagtcaacaagtttgtactatggcccattctctgatcaccaggattacaggaactcacacactcctcatacttggcctgtagtcctacttcttgttagaagtctccaagtctggccagtcacatgaccaagtgttgatttttctggaggaaaaattttatggaaatgatataggggaaaggtgggaggagatgaaagaacaggcaagagctgtcagggttaaatccaggcccgggcatgagaatggaagtgatcagggagactcggtccttgttccaagtctccaaagaagaccaaagtgggtcccttgagcaatgaagaatctgagataaattctcttcaagtatcatgtacaaaatctgtgagccagagattttgacttgagcaagccatggaaatgcatggagcaagggtgacactctgtggggagacagaagaatttcaactatttaatgtccattttgttgtttttaccctttcttatccaatagatggaatgcacatgaaatgaccatattaagcctctctctatttacatcccaggctcactgggatgtgatctactgcagttacattttcttgtaacggtttctggattagaccctagggaaagtgagtaaggagccagtttctgtttaacattctagttttactcattttaggaaggctgtgagtgaggcttgtctcctttaaagtttcttctccaatggaaaccaagaacagacaaaatttagagctcagctgtggtctcttctcatcttctgctcttttgctttgaccacagtttttctactcttcccatcaacactagagcaatggctgtgcaaataggaataggaaatactaccacaatgatagaaatattatccacactatcacgtagggaagaacaatatcctgaaagagaataaaacacgaataaggtgatgtacccacattaatctgtgggtttgtggaatgagggttgcaaagttattgggaaaaggaaagagcagagttcacccattcaaaaaaaaccttttgtctactaatctctagtgtaaagaaaatgtagttcagataccattcattgtcttgggtcatgcttagtgcccccaagaagacaaacatatttattcttgggattctgataggcttcaatatgcaaaggacaatggaaaagtttagacactctattttcaaaattttataaacttgttttattggggaaaatgtccaaattgctagacacattctaagttctgccttggagaatcctactttgtctgagattgaggcagaggaattgttatcctgggcattactcagctcaggaacatggagcctgtggttcatgccagtgtgtgtcttcatgcagtctctccacaagagcaacagtaagaacatttctgttttaaatttcattttaaaatattttattatctgcaattcaccactgctctgggaaagcaaaaggaaagttcctgttgtgtgtgaagagcctcttaggctataaggcttcccagccatagtcagctatagctattcagagacagcaggttcttccagtctttgttcctgggacctgatgttttgagcaactcaggtcactgataaagtggaaggactaagacactgtggtcacagatcccagcaacatcaactcacactcaatccatgtggtggtccacattctgctactcttatccacccatgtggtcattgagagcctttctcagagactcttctgtgtgtttgattgtgcccaggtggcccagggctagctggctctaacaactagcatgacagcctccaatcagaaaggcaggtaaggggacagggtgaggagaatgggcagatactgacagaaattaaagtaaagggattgtgaaagtaaagagctcttcctgattctcatcttctcttttttctattacaaggcattgaacttggcacttcctgtattctttgtgatcactattgagtgcattagttaacacccaaggggatggcttgattgggaatgtagtgaaaggagctgatctactgtattgtaatgtaaaacagctacagccagttattttgtaagattataagttgttcattaaaaaatcagcacac

SEQ ID NO: 598 - DNA, 1531 bp, Homo Sapiens
acccaacatgctactcagcccaattcccaaccctttgcaccaggtttggcttctgtttttatttttgcaaagtctgttcctcttggctccaacttccgtctttggagttgttaatggagaagttagggtgctatgtagattcaccaggcgagttcagtactactaccctggggatgaatgttggtgagaagccattccagatagacccccaacaactctgcttcgttgaccctcagaacagtaccctgtgggactcctgagccgtaaggagtctccctggtagcgcgcagcggggccaggctctgtgctccggcccccgtgcggtgcccagctctgcaggttcccgaaagtgcgccccggggtggggttgcaatccgccccgtgacggcataataaataattagagggtttaagcgtgttagccacagctcatgctaatgagccagataagggctcacgctaacccgaagtgacagtttgcatataggagggaagaagaaaaaatcctgcttccccccccacgcacaaacttgattgctccttctcaaattcatgtccccaaatcccttcccccattcctcggacttccctcttctcacatgcccccacttcagccacaacacacacactatccgtttttgacccttcctttgcctttcaccgggtcagacggcattgtgacgtcacaaaacccctgggtgcctatatctgacctgcgcggaaagttcattctgagtgcgtcctggcgagtctcagcccccaagcgggtggaacgcaccaagggtctcatccgcgaggaagggctttaacgctcagggtcaggaacctctgagagctcttggggacttgcgcgcccttggatgctcttgcgttcaacagggctaggagactaccggctggggcgaggaatgcaggcgcctagagccttggagctcctgaaacgttcctgccgcctccggaaagcaagggcagtttaccgaagtgactgaggccaagtatttgcagcacgggcagggaccagtaactgattttcaggccttttgagaggaagaggaagagagaggaagagaaggatttctaatagtagatattcactctcatggactctttaggaaacagcaacaaagacaagattaagaacaccaaattgtgtgactatccacacaaaaaagcatcttcataagaaccaaaaatcagagggcaaggaaaaaggctgaatgcaaaaccagaatgtcaacagggtgctaacggagaccaatggaaggggcaactgactctccccagggaaggtaggcaaggagattgagggaagtagcaatgaaaggagagcttgcaaaatgaagtcatcagagctttgcataagaaacaattcatggaccttagatcaagtagtgaggattaaaactatgtctatgtgaggctttggctagtttttctacctaagacatccttacctctcctttccacttgggaatcatcttcctttcctaaccatcatcatcaaccctcaaggcagtcaggggcatctgtg

SEQ ID NO: 599 - DNA, 1759 bp, Homo Sapiens
ttttttaaatttttttcagaatttcaacctttattttagatttagggggtatatgtacaggttggttacaagggtatattggtatattgggtgatgctgaggtttgggatagaaatgaatccatcactcaggtagtgagcatagtacccaatagttagtttttcaacccttcccctttccccactcctccttctagtagtttccagtgtttattgctgccatctttatgtccatgagtacccaatgtttagctcccacttataaatgagaacaagtggtatttggttttcggtttctgcattgacttgcataggataatggcctccagctgcatccatgttgctgcaaaggacataatgtcattctttttatggctgtatagtattccatggtgtatatgtaccacagtttctttatccagtccaccactgatgggaatctaggttgattccatgtctttgcgattgtgaacagtggtgcaatgaacatatgagtgcatgtgtctttttggtagccgtatttactttcctttgggtaatgagatttcagggacccagtaatgagattgccgggttcaatggtagttctgttttaaattctttgagaaatctttaaactgctttccacagtggatgagcgaaattacatttccaccaacagtgtataaatgtacccttttcaccacagccttggcagcatctgttgattttcgactttcttataatagccacctggctggtgtgaaatggtatctcattgtggttttgatttgcctttctctgatgattagtgatgatgagaattttttcatatatttgttggctacttttatgtctttttttgtgaagtctctgttcatatcttttgcctatttttaatgggattatttagtttttgtttgttgaattaagttccttatagattctgcagattagacctttatctaatgtatggcttaccaatattttctcccattctgtaggttatctgtttactctgttaatagtttcttttgctgtgcagaagctcttcagtttaattaggtcccacttgtcaattttcatttttgttgcaattggttttgaggacttagtcacgaattatttcacaaagcagatgggcagaatggtgttttctaggttttcttctaggaatcctatagtttgaagtcttacatttagatttttaatccatcttgagttaatttttttatgtggtaaaaggaaggggttcagttttattcttttttaaatatactttaagttctagggtatatgtgcacagcgtgcaggtttgttacatatgtatacatgtgccatgttggtgtgctgcaccaattaacttgtcatttacattaggtatatctcctaatgctatcccttgcccctccccccaccccacaacaggccccggtgtgtgatgttccccttcctgtgtccaagtgttctcattgttcaattcccacctatgagtgagaacatgcggtgtttggttttttgtccttgcgatagtttgctgagaatgatggtttccagcttcattcatgtacctacaaaggacatgaactcatccttttttatggctgcatagtattccatggtgtctacgtgccacatttccttaatccagtctatcattgatggacatttgggttggttccaagtctttgctattgtgaatagtgctgcaataaacatacgtgtgcatgtgtctttatggcagcatgacttacaatcctttgggtatatacccagtaatg

SEQ ID NO: 600 - DNA, 10568 bp, Homo Sapiens
acagacaaacaggtactggcaagatagactatgctgatggagtaaccaagtttgtgagtatatgaaaataacgagggatgacatatgggaatattacacaatgataaagttggaatgtcacaatgaataaacaaaatctgattcagagactatgccaagccaggtgataagatcttgaagaaccaagatccagagagaagtgaaaggaatcagtgttccatggaacggaagtgcatcaggaaaggaaagagaaaacagattcagactaaagcacgtgcctgacaatgtgtctgctgcattgcatgaggcagccttgctgcagccaaccatagtggggtccaattaagaggcttaattgaagaattccaagttagcagactgtcctggcactcagaggatattgtgcctggtaatgatagtgttgaattggacagaaagaatattcacaaaggtggctgtccatatccatgggttctgtatccatagatgcagaattcttgaatacagagggttgactgggagatctgacatctgcaggttttggtatccgtggaaggttctgcaaccaatctctggtggatgtgagaggtgattgtacttaagcttcaagaaaggcctcctctgctaaaaatgctctctgattagccattcactgcttcctgaactatgaagacatcttctaggaatactcaggatcttctgctatgtggctttaatttattttaagattaattcctcattaccttcttacacaaagccaccattagcatatcaagcacagctgtacaaatttttaaaaggccaaaagatgtatctgccaattctaggaggatataaacctgaaggcacaaatctgggctggagcacatggtttcccttgtgagaagaaaaagtctccttcctctgaatggacacaccttgcacaccagggcacaaggtttgtctagaagagcacagctgaacatcataaagtgcagaaccacacacctggcatccttgtccctacacaagagaagccagaagttgcagctcaatgcaccatgaagctgagacagaaatggagatcccccagccccacctctctggaacaggaaagatgaatgaggaagaaacacagggcagtatggggaagagggtcatggcggacatgggggtagtgggctggtctccccaccttctcatattatgctaacagggacaaagacacattcagactcctttaaatagccttttcccattctgtttcaagatgggtgacaagagacatcagacacccaccctccccggtaaaagaagcaaaattataaatgcataatcatatctctaatagaacatctaggatggaacactagagaccaatgacaaagtcatggaaaacacccaagacacagaaggagaaaaaaagcaaggggccagcttggctgagattggctgggagcctgaaggggcttggtattgtgtgaaaagcctcagtgaaggagtttcagtggttcacatacccagtatggacttctgcaatctgaaccatgggaaaactcctttaacctaatgaactgtgacactagcatgggtggtgacttggagaccacacaaggccatagcatcagagaacttatacagggttactcaaccccttgccaagacctgagtgctgtggcaaggcaccacttggggagcacagccatcacaggactacatccagcccccttatctccacatcctagaagatcctgctgacatttcccagtgtccacctggaggactatagtggcattgcactggctagacccaaagatgttgcatgtccccaggactctagctcacagggattactacccactgttgaaaggacagtgcaacacacaaaaaaatggtagcccatgggacaagggaaaccaaagtatgtgcttcccagagtctgagaggtctctgtctgggactatgagaagttactctgccctcaacagttgcacaaactctgtgcccagttttataagcagagagtaaattctcctaccactggcagagcagcctctgcactaaggctcagaagtagagaagtagagactaggacttctccgcctcaaaacacccaactagtgtctctgccagatgctttagcaagtgagctggagggctgcctatttggggtgccacagagagcaggagctctgtgtcctgcagcatgtctggagttgtgggcagtaaccccacactgcagccaccacttaaatcagcctgcatcacttgggtccaagagggtcataccaccactagcactgctgtaacccacaccatgctggctgcccagggacctgagcaccagcccacccacttggcccaccaccgccatgactagaattcatgcaagccacctggaatcagcccactggtaaccaccaacacaagttctcctgtgcactgcctttgggcacaaagataggcatgctcaggccacctctgcaaccaccaggacctgaagactggaccacgtggcttcctagtccttagcacaaccttatcatagccttcaataataaccacactctaaccctctgaggaaatcacagaaagcactaatgctgtttacagctaagtacatcttacagagactgtaccagtacagacacccagaattaaagccaaagtgcttaatccaaccaacaccaccaatacatcttcagaaaaatgtcctctatgaaagtaaattcagaaacaagaatcaactgttacactagatatgcagatatcaatgtaaagacacagaaaacattttaaaaagcaaggaaatatgacacttccaaaagaacacaatgattctttagcagtaaattcttaacaaaaaaggaatttttgaaaaacaattcaaaatatgaatttttaagaagcccagtgagatataagagaattctgaaaaaaaatacaaataaatcatcaaaacgattcagtatatgaatgagaaatttaacaaagtgatagatatttttaaaagaaccaaatggaaactcttgaactaaagaattatttgaaggaaatacaaaatacacttgaaagattaaataatagactagatcaggcagaagaaagaatcccagaacttgaagacaggtcttttgaaataattttgacagacaaaaataaagaaaatagcttacaaagaatgagcaaagcctttctgacatttagaacaacataaagtaatttaatattacaattattgggatcactgagaatgaagagacaaaggaaggattagaaaacctatttaaggctggacatggtggctcatgcctgtaattccagcattttgggaggtcaaggcaagccgatcacgaggtcaagagatcaagatcattctgttcagcatggtgaaaccccatctctaaaaatacaaaaattacctgggtgtgagatgctgcatgcctgtagtccctgctactcaggaggctgaggcaggagaataacttgaaccccaggaggtggaggttacagtgagctgagagtgtaccactgcactccagcctggcaacaaagcaaggctctgtctcagaaaaaaaaaaagaaaaaaaagaaaacctatttaataaaatgatagatgaaagcttcccaagtttgcaaaagatttagaaattcagatagaggagtctcagcaatcttcaggaatatgcagtgcaaaggccttctccatgacacatgatagtcacactgcctaaagccaaagataaatagtgtatcctaacaagggcaagagaaaaatgtctaatcacccataatgaaaacctatcaaactaacagtgaatttttctgcagaaactttataggccagaaaagtatgagaggatatattcaaagtgctgacattaaaatcaaaacaaaaatcccagctagcaaagaatactagatccagcaaaattatccttcataaacaaaggagaaataaagtctttctggacaagcaaatgcagaaggaatttgttaacgctagactggccctacaagaaatgctcaagggagtcctaaacctggaagtgaaaggatgatatgtgccataatgaaaaaaatacaaaagtataaaacacactgataaagtaatcacacaaaggagaaaaagaaaggacactaatggtactactacagaagtctaccaaaccacaataacaatcaataagataaaaatgaaaggaccaaaaaatacatactacaactccaaaacaatgaacaatatgataggaaaaaagcctaacatatcaataataagcctgaacataaatgaattaaattatccacttaaaagatatagaatggcatatggattaaaaaacgtgatccaaacatgtgctgcctacaggaaactcatcctaccagtagaggcatgtgtagaccgaaagtaaagcaatggaaaaagttaccccatgtaaatacaaacaaaaagtgagcaagagtagctaaacttagatcagacaaaacagactgtaagttaaggacattagaaaaagacaaaggaagtcactatataataataaaagaatcaatctagtaagaggatctaattctaaatatatatgcacccaaaactgcagcatccagattcataaagcaaatattttatctaaaaagagaactaaactatgatacagtaatagcgggggattctaacaccccactgtcaacattagaaagatcatctagacagaaaataaacatagaaatatgggatttaaactggactttagaccaaatgttcctaacaaacatttacagaacatactatatacattcttttcatcaggacataaaatattctccaggataggccatatatttggccacaaaacaattctcaaaaaatttttaaaaaatcaaaatgatatcaaaaattgtctgagaccacaatggaatggaactagaaatcaataccaagaggaactttggaaactataaaaatacatagaatttaaataacatgatcctgaatgacctgggtcaacaaaaaatatgtaaatttaaaaaacttaaaacaaatgaaaattaaacacatacaaaaacccattgcatacagcaagagcagtactaagagggaagtttatagcaataaatgcctacatcaaaaaacaaaaagactacaaatttacatctaacaatgtgccttaaggagctagaaaacaagaaaaaaccaaacccaacattagctaggaaaaagaaataatacaaatcagagcagctgtaaatgaaatagaaactataaaaatataaaggatcaacaaaataaaaaggtgatttttcagaaagatacaactgataagttagtagctactaactagtctaatcaggaaaaagataagagaagacccaaataaagaatatgagaaatgaaaaggagacattaaaacagatatcacagaaatataaaatatcaccagactattatgatgaactaggatactgacaaactgaaaaacctataggaaatggattctttcttggagacataccacttaccaagattgaatcaggaagaaatgagaaacttgaacagagtagtgagagtcaataatgagtagtgagattcaatcactaataaaaagtctccaaacaaaaaaaaagtccagatgggttcatagccaaatactaccaaacatgcaaaaaagatgtaatgctaagcatccagaaactattccaaaaatgaaagaggaggaaattctccccaactcattctatgagaccagcatcaccctgaaaccaaaaccagacagtcacaataaaaaaagaaaatttcaggcaatatccctgatgaatatagatgtataaatccttgaaaaatattagcaaacacaatccaacagcacatcaaaaagataattgcctgaatagccaaagtaatcctgagcaaaaagaacaagctagatacattacattacccagcttaaaaatttattgaaagtctatagtaaccaaaatggcatggtactggtacaaaatagatatatataccaatgaaacagaataaaggacccagaaataaagccacatgctttacagtaaattgatcttcaacaaagctggcaaaaacttttaatagggaggggacaacctctttaataaattgtgcttggaaaattggatagcaacatctagaacaataaaactggacctgtctcttccatcatatacaaaaatcaactaaaagtggattaaagacttaaacataagacatgaaactacaaaaattctagaagaaaatttagggaaaagtcttctgattgttggtcttggtaaatacttttttcacagacctcacaagcacaggttacaaaaacaaaaatagaccaataggacaattcaactaagcatctgcagagcaaaggaaataatcaacagaattaagagataacctgttgaatgggagaaaatatttgcaaagtgctcatctaatagtggactgttatccagaatacacaaggagctcaatccaaaagaaaaaaataccacataataccattaaaatgtggacagagaatacaaatagatatttctcaaaagaagacatagaggtggtcaaaagttatataagaaatgctaaacatcactaatcatagaagaaaggcaaatcaaaaccacaatgaaatattctaccccagtcaggatggctattattaaaaagacaaaaaataactcatggtttggatacaaaggaaaggtaactcttactcactgtttggtgggaatgtaaactagtacagctacaatggaaaatagtatgaagatttctcaaaaatctaaaaatagaattaccatttgatccagcaaccccactactttgagtctactcaaaggaaaagaaattaatatatcaaaggcatacttgcactacttgcatgtttattgtagcactgttcgcaagagcaaagatatgaaatcaacctaagtgtccatgaatgaatgaagaaaatgtagtatatatatacacaatggaatactatttaaccataaaaataatgaaatcatgtcatttgcagcaacatggatggaaatagtgtctgtattagtttttacactgctataaagaaccgcccaagactgggtaatttacaaaaaaaaaaaaaagatttaatcgacccacagttttgcaaggccatatcattatcttaagttaaataagccagttaaataagccaggcacagaaatatatttcacattctcactcatatgtgggaactaaaaactttgatcacatggaggtagttactggaaagactataatagagactgggaagggtgagtgggggggagggagagaatgtaaagaagtgagttaaagtttatagacacacagtaagctagaagtaataaattcaatgtttgatagcagagtagggtgacaattcttaacaaaaatgtattgtactcaggtgctagataccctaaatgccctgacttgattatatacatgcaacaatttttagattgtataaatgggagaaagttcaaaagcacttcatgtatttgaaaaagcttttgccctatatattctcgtagtagttttacaatttctggttttacatttaggtttttaatccattttaagttgatttttgtatatggtgtgagatgagggtctaatttcattattttgcatgtaattattcagtttttccaacatacttttttgaagagactttttcccattgtatattcttggtgacttgttgaagatcaattgaacatatatgtttagatttatttctggactctccattttgttccacaggtgtatgtgtgtgtgtatatatatatatatctgttttgatgctagaactgtactgttcagattactacagctttgtagtatattttgaaatcaggtagtgtgatacctctagttgtgttcttcttgctcaagattgctttggttgtttggggtcttttgtcattccatattaattttagattttcttctgtttttttaagaaatgtgattggaattttgataggaatttcatggtaagtatcttgtatctttgggtaatatggacattttaacagtattaattctgatccatgaacacaggatacctttccatttatttgtgtcttcttcaacttctttttatcaatgtttactagttttcagtatatagatatttcatctccttgattaaatttattactatgtgttccatttattttgattttattgtgaaaatgactgcttgcttaattttttggtcacttggaattccagtaatatactaaatagaattggtaagaacaggtattttttttttttttttaatcttagagaaaaagctttcagcttgtcaacattgagtaggataatctttttaagatacagtgctggaacaactggacatccacatgtggaaagatgagtctagacacagaccttatgtcctttccaaaaattaactcaaattgaatcacagacttaaatgtaaaatgcgaagttggctgggcgcagtggctcacgcctgtaatcctggcactttgggaggccgaggcgggtggatcacgaggtcaggagtttgagaccagcttggccaacatgatgaaaccccgtctctgctaaaaaatacaaaaaattagctgggcgtggtggcgcgcggttgtagtcccagctacccaggtggctgaggcgggggaacagcttgaacccaggaggcagaggttgcagtgagccaagatcaagccactgcactccagcctgcggacggggcaagactccgtctcaaaaaaaaaaaaaaaaaaaagcaaagttgtaaaatggctggaagaaaacacaggacaatatttagatgatcttgggtttggagatgtcttttagacttttagaagctaatctaaaagaagctacacacggccgggtgctgtggctcacacctgtaatcgcagcactttgggatgctgaggcaggtggatcacctgaggtcaggagttcgaaaccagcctaaccaacatggtgaaaccccatctccactaaaaacacaaaaaattagccgggcgtggtgacacgcgcctgtagttccagctactccggaggctgaggcaatagaatggtgtgaacctgggaggcggagcttgcagtgagctgagatcacacgactgcactccagcctggtgacagagcaagactcggtctcaaaaaaacccaaacaaacaaaaagaagctacatattatatgattccaactatatggcatcccggaaaggcaaaattatggagatggtaaagagatcagtgattgctgggggctggggagaggaagaaatgaatacatggaacacagagggtttcagggtcagaaaaactactccttgtgtgatactataacggtggatacatgtcattatgtatttatccaaaccaatagaatgtacaacaccaagagtgaactctattgtaaactatagacattgggttatatcgttgtgtgctatggtctaaatgtttatccccaccaccactaaatttatatgttgaaatcctaaccttcaaggtgatagtgttagaagatgggaccttttcgaagtggagccctcgtgattgggattaacacccttatgacagagaccacagagggctggctagtccttctatactgccatgtgtgtacagtaaagagatgattgtcaatgaaccaagaagcgggccctcagcagacactaaatctgctgacaccttgattttgacttcccagtttccaaaactataagaaataaatttcttttttaataagctacacagtttatggtattttgttatagcagcctgaagagagtaaaaggatgtagaaatataggttcagtaaccataacaaaagtaccactctgtggaagatgttagtaatgtgagaggctatgaatgaggtggcgaggaggtggtatatgggaaatgtcactttgttctgttcagttttgctgtgaatctaaaactgttctaatagataaagttgaatacaatattaaaacaacaacatgttactgtctttgtaactattcaatgacatttaggcagggcagaggctattggacattatatatatccttaaagtctccctttatatatatacacacagatataaatatataagtatagataaagatgaagcctaaaaacctagtttaattatgttaaatttcattagggaatatgtaattttacctctcgcttttattataatggtcttgacttgagctggccatgcacattttcaccatgctgaatttaaaattgggctactttatagagttttgaacaaaatgctgattcccctcagactctttacaacattgctctgaatcatatgaattgcccttaatcaataaagcagcactcatttgactggccctgtaatgtgtaaccttctatttccaaatatggtaaacatagagaagccatctatgtgagaaggtttgagtaggctttactcccatttaccctagtattgatttctatatatggcaggaaggaggaaaagggatgttttcatcccttctcagttcctatccctaaatttttatcttaccaagaactcaaatgctgtttcctt

SEQ ID NO: 601 - DNA, 3729 bp, Homo Sapiens
gaggagcccgaagtcggcgcgccgagtgcggctgcgcgggccccgccgacggagcccgcggccgggaccccgaacccccgcctcgagcccgccgcgccggggctctctcaccggaacgcgagtccccgcggggccaccggcgcgtggcggctgagcggccgcgtttggctcccggagcgcccacaccctctcgggcttccggctttctcccgaggcccggctgcgcctggcttgtggtagcatccgctgtggccaggctcggagctacactcaggaaaagtggagttaatggaggttcctagagacactcacacaattctcaatccacatttcaaaaggctcccctgagacgcaccctgtcggcccctttccgaaagcacgcgaacttaaggctggcaggtgctttaaaagacactcctcccaaggactaggaagcctctgaaatgggcttggaagtttctaatcccaaagacttcgaacccaggatctggatagcaagcaaaaatatttagatatttactcagttgaaaacgtggggggtggcttcgtggtctcttcgccagccaaatcgcgtggaaaaccacgacctcaatttttacaacagcacgaagacttacaagtgagcgtagcagcgacttcctggaacctcaaacaatgtgggacgctgcaataatgcctgagggcttttgacttacagttgccgccggagacctggggagggggtagtacttgggccggtgagtccagcctcaggaactgtcctttcaaaaatggtgatggatgtaacaagttgcatgtctgggctttatttcagtgtattaattgtgcgatcttttaaaatagctgtatttttaaaactgttttacagaaatctctttaaaatgtgattattctctatattcttaaagaatacaatggctaattaaatcctttgttgataactgactctcaaaccgatatcttggccatacgtttaagtcccagaggattgctgcggtgtatagaatccctactttggtgctctctttttttccctctttggaatgttctcatcacctcttctaaaatccttcactgcttttcatctcctcatctgcctctatccactctgatccttcctcttattctttctgctttactgtttatttttcattcttctctcctttctcggctggttttctctgcggctccaggtgaagattgatgggatgtttatgtccacagccagctaatgagaggtttcttttcttctggttgtaaatagggcagtggtatcttgagatattttcattgctcttcactatcagaagttctttccctgtgagagatgtttccttttcttaacttttggatttggccctcttcgagacagctggcaagttgatcttggaataattgaagtataactgtatattgtttcaaagtatgaggattttatcagagtgtgggcgaatggggtggcttccccatcttactgcccaactatgcttggtctgagactaagatagtggtttccaaacttaccgctaagctaatactttcctactctgcttcctactcaggagctttttgaaaatacagaatcctgcaatctaccccctcaagattctgattcctttgtccagggagaggccaagacatggcacttttaaaaactatatttaaaaaaatatgtttgggacatgcctacatgtaaaggcagagtaaagaagatcagctgtttttgaaggagattaacacataatttaagaatgttattgaagacctagagattgtagtcaataatatgcaatgcagtaaggtgaagtaaagtgaagaccaaggaatttatggcctttggagagaagaaaacccacacataaatgaccctagcatgtgcaccagtatgagttctctgggaacagagagagggtcaagaaattatgttggctttgaacaagttctcttctcaatgcttcactttttttttatcaataaaatgggagccattttcaatcctcatctttcttggcctctcaacaatactcaacactttgaccactattctttcttaaacatttcttcttcctttgacactgcattttcttggttttcctccttagtttcctaggcactgcttctctgattcctttgcatattcctgctggtctccctaactattaaatataacagtaccttaaaattcagttttagattcttttctgttttcattgtaatctcttggcctaagcagcatcacccacgccaatggctttagttatcatctatatgccagtgatctccacatatatgcctccagcccagacctttcctctaaattccaaatctgatccactagtcaaagtttgaccctacctctaaattccaagcttcactgacatggccacttaatatctcaaagttgcaaagtttagtccaactgagttcatgaacacttgttttccttatcccccatctctctagttattcaaatcaaatatctagtagtcagtaaccgctgatgtctccctcacctccattcttccattctccatatttgttgcagcactaactcctggcaattttatttctaaaatctaattggtctacttctttccaatcaccaccaatctaattcgatctcactgtatacaatctgggatcctccattcagtctccattttgcagccaaaattatcctctaagaaagcaaatgagactatgtcactactccaaaaatctccttaaacagtttctcattgctttaggataagtctagaattcttaaggcagcctaaaagaccatacgaggtctggccttacctgccttttccagcctcatctcacaccattttcaccttgtttcctgggcagacttcctggtcttcttttagtttctcaaaaatgctatgatcccaacaaccaaaggctctatgtacatgccattctctcctttagttatcctatctcttactcatccttcaggtctcagcttgaaagcgacatccttgggaaaaacatttctgacctcccagatacattcaagataccttgttatgtcagctctcttaccaccatataccctcccctcttatgacttaccacagcttgtaactacattttggtatgtgtaactactaggttaatgtctgttgctccccacattaggataaagaccatgtctatttgggcctgcacagtgcctggcacatagaagctacccaataaatatttcttgaatgattattgtcctatgagtttatttctgggattctagaaggttgttagatcgggaaattagatcactgatcattttcaagagagcaatcttctgtatgactagtgggaagaaatgcagaaatgtgctggaagacaattctctgtgggactctagtatttctgcatgtcttgtgagcagaggcactaacagcttttgttttagactatattttcaaggatttttttttttttttggtcaaactgccttggaaaatatacatagtgtcccctgccctgctccccctccccgccaagagcaggggcacatttgtttaccatccaatatagtgaagataatgtctttggaggtaaaggtcaagcaggttttcttgcagcctattataaaaagattggggatttcctaagcttagatagagtttctcagctgtgaggcaaacccactgcaggtgcatcactcacctgaaccacaccatgtagctccaggtaagacctgggggcaagggaactgac

(The sequence listing continues in the following parts.)

1. A method for diagnosing or treating a cognitive disorder including but not limited to Alzheimer disease in a subject at risk of having or developing a cognitive disorder, comprising:
(a) isolating a biological sample from the subject;
(b) detecting a level of expression in a ncRNA (miRNA and/or lncRNA) signature, the ncRNA signature comprising or consisting of at least one ncRNA (miRNA and/or lncRNA) selected from 406 miRNAs listed in Table 1 and 1008 lncRNAs listed in Table 5 in the biological sample from said subject;
(c) comparing the level of expression in the sample to a level of expression in a reference, wherein an increased or decreased level of expression in the sample compared to the level in the reference identifies the subject having a cognitive disorder or being at risk of developing a cognitive disorder.

2. The method according to claim 1 wherein the ncRNA signature comprises ncRNAs selected from the group consisting of:
(i) miR.99a.5p;
(ii) 7 miRNAs of miR.99a.5p, miR.378d, miR.100.5p, miR.193b.3p, miR.34a.5p, miR.1306.5p, and miR.1229.3p;
(iii) 3 miRNAs of miR1220.3p, miR378d and miR99a.5p;
(iv) 11 mRNAs of miR.99a.5p, miR.1229.3p, miR.100.5p, miR.378d, miR.193b.3p, miR.1306.5p, miR.195.5p, miR.532.3p, miR.125b.5p, miR.34a.5p, and miR.6880.5p;
(v) 15 miRNAs of miR.23a.5p, miR.6880.5p, miR.7111.5p, miR.6812.5p, miR.6738.5p, miR.5196.5p, miR.6894.5p, miR.8085, miR.4463, miR.2392, miR.144.3p, miR.192.5p, miR.193b.3p, miR.194.5p, and miR.122.5p;
(vi) 13 lncRNAs of lnc-DLG5-1:1, lnc-EBLN1-1:4, lnc-FAT1-7:2, lnc-PRR5-5:1, lnc-RBKS-6:1, lnc-FOXD4L5-35:1, lnc-TENM3-3:3, lnc-FAM133B-2: 1, lnc-ZNF726-1:3, lnc-AP3M1-1:1, lnc-DUSP10-6:1, lnc-TPPP-1:2, and LINC01206:20;
(vii) 7 lncRNAs of LINC02345:11, lnc-EBLN1-1:4, lnc-TPPP-1:2, lnc-TENM3-3:3, lnc-FAT1-7:2, lnc-DKK1-5:3, and lnc-TACSTD2-2:4;
(viii) 12 lnc RNAs of lnc-TPPP-1:2, ARRDC3-AS1:7, lnc-TENM3-3:5, lnc-TENM3-3:4, lnc-QRFP-5:1, lnc-CRYBB1-1:1, lnc-MGST3-1:3, lnc-FAM49B-8:1, HAND2-AS 1:70, lnc-TMEM185B-12:7, lnc-CNDP1-7:1, and lnc-C21orf58-1:2;
(ix) 3 lncRNAs of lnc-TENM3-3:3, lnc-MARCH4-2:7, and lnc-LRRC1-5:2;
(x) 7 lncRNAs of lnc-TPPP-1:2, lnc-TENM3-3:3, lnc-TMEM185B-12:7, lnc-NAXD-6:5, lnc-HECA-6:1, lnc-COMMD6-10:1, and MIR29B2CHG:46;
(xi) 18 lncRNAs of lnc-TPPP-1:2, LINC02345:11, lnc-ZNF273-4:4, lnc-TACC2-8:6, LINC01206:20, lnc-05orf67-3:1, HAND2-AS1:58, lnc-PRDM9-20:1, lnc-CLK1-1:7, lnc-DNALI1-5:4, RORB-AS 1:6, lnc-TPPP-1:3, lnc-BMS 1-2:1, lnc-ADRB 1-4:1, lnc-XXYLT1-5:1, MIR99AHG:104, LINC01748:17, and lnc-AKR1E2-15:1;
(xii) 28 miRNAs listed in Table 2;
(xiii) 74 miRNAs listed in Table 3;
(xiv) 33 lncRNAs listed in Table 6;
(xv) 60 lncRNAs listed in Table 7;
(xvi) 32 lncRNAs listed in Table 8;
(xvii) 84 lncRNAs listed in Table 9; and
(xviii) 94 lncRNAS listed in Table 10.

3. A method according to claim 1, wherein in step (b) the expression level of ncRNAs is detected in combination with another biomarker suitable for detection of a cognitive disorder such as neurocognitive tests, neuroimaging methods and/or CSF biomarkers.

4. A method according to claim 1 for monitoring the development or progression of a cognitive disorder in a subject suffering from a loss or impairment of cognitive function or dementia, said method comprising steps (a), (b) and (c), and (d) designing the therapeutic treatment according to the said identified cognitive disorder.

5. A method for treating a subject suffering from a progressive impairment or loss of cognitive function or dementia, said method comprising:
(a) diagnosing the cognitive disorder associated to the progressive impairment or loss of cognitive function or dementia in said patient using the method according to claim 1, and
(b) adapting the therapeutic treatment to the results obtained in step (a).

6. A method for adapting therapeutic strategy to a subject suffering from a progressive impairment or loss of cognitive functions or dementia, the said method comprising the following steps:
(a) diagnosing or monitoring the progressive impairment or loss of cognitive function or dementia in said patient using the method according to claim 1 and
(b) modifying consequently the therapeutic strategy of the patient.

7. A method according to claim 1, wherein the biological sample is selected from blood, plasma, serum, saliva, tear, urine or cerebrospinal fluid.

8. A method according to claim 1, wherein a cognitive disorder or any dementia type is diagnosed (differentiation versus healthy controls) or wherein the specific type of dementia is diagnosed versus other types of dementia including and not limited to Alzheimer (AD), mild cognitive impairment (MCI) of AD type, Frontotemporal dementia (FTD) and MCI of FTD type, Dementia with Lewy body (DLB) and MCI of DLB type, Parkinson's disease dementia (PDD) and MCI of PDD type, Vascular dementia, Progressive supranuclear palsy (PSP), and corticobasal degeneration (CBD).

9. A kit for diagnosing and/or monitoring a cognitive disorder including but not limited to AD, comprising at least one reagent for the determination of a ncRNA expression profile comprising or consisting of at least one ncRNA (miRNA and/or lncRNA) selected from 406 miRNAs listed in Table 1 and 1008 lncRNAs listed in Table 5.

10. The kit according to claim 9, wherein the ncRNA expression profile comprises ncRNAs selected from the group consisting of:
(i) miR.99a.5p;
(ii) 7 miRNAs of miR.99a.5p, miR.378d, miR.100.5p, miR.193b.3p, miR.34a.5p, miR.1306.5p, and miR.1229.3p;
(iii) 3 miRNAs of miR1220.3p, miR378d and miR99a.5p;
(iv) 11 mRNAs of miR.99a.5p, miR.1229.3p, miR.100.5p, miR.378d, miR.193b.3p, miR.1306.5p, miR.195.5p, miR.532.3p, miR.125b.5p, miR.34a.5p, and miR.6880.5p;
(v) 15 miRNAs of miR.23a.5p, miR.6880.5p, miR.7111.5p, miR.6812.5p, miR.6738.5p, miR.5196.5p, miR.6894.5p, miR.8085, miR.4463, miR.2392, miR.144.3p, miR.192.5p, miR.193b.3p, miR.194.5p, and miR.122.5p;
(vi) 13 lncRNAs of lnc-DLG5-1:1, lnc-EBLN1-1:4, lnc-FAT1-7:2, lnc-PRR5-5:1, lnc-RBKS-6:1, lnc-FOXD4L5-35:1, lnc-TENM3-3:3, lnc-FAM133B-2:1, lnc-ZNF726-1:3, lnc-AP3M1-1:1, lnc-DUSP10-6:1, lnc-TPPP-1:2, and LINC01206:20;
(vii) 7 lncRNAs of LINC02345:11, lnc-EBLN1-1:4, lnc-TPPP-1:2, lnc-TENM3-3:3, lnc-FAT1-7:2, lnc-DKK1-5:3, and lnc-TACSTD2-2:4;
(viii) 12 lnc RNAs of lnc-TPPP-1:2, ARRDC3-AS1:7, lnc-TENM3-3:5, lnc-TENM3-3:4, lnc-QRFP-5:1, lnc-CRYBB 1-1:1, lnc-MGST3-1:3, lnc-FAM49B-8:1, HAND2-AS 1:70, lnc-TMEM185B-12:7, lnc-CNDP1-7:1, and lnc-C21orf58-1:2;
(ix) 3 lncRNAs of lnc-TENM3-3:3, lnc-MARCH4-2:7, and lnc-LRRC1-5:2;
(x) 7 lncRNAs of lnc-TPPP-1:2, lnc-TENM3-3:3, lnc-TMEM185B-12:7, lnc-NAXD-6:5, lnc-HECA-6:1, lnc-COMMD6-10:1, and MIR29B2CHG:46;
(xi) 18 lncRNAs of lnc-TPPP-1:2, LINC02345:11, lnc-ZNF273-4:4, lnc-TACC2-8:6, LINC01206:20, lnc-05orf67-3:1, HAND2-AS1:58, lnc-PRDM9-20:1, lnc-CLK1-1:7, lnc-DNALI1-5:4, RORB-AS 1:6, lnc-TPPP-1 :3, lnc-BMS 1-2:1, lnc-ADRB 1-4:1, lnc-XXYLT1-5: 1, MIR99AHG: 104, LINC01748: 17, and lnc-AKR1E2-15:1;
(xii) 28 miRNAs listed in Table 2;
(xiii) 74 miRNAs listed in Table 3;
(xiv) 33 lncRNAs listed in Table 6;
(xv) 60 lncRNAs listed in Table 7;
(xvi) 32 lncRNAs listed in Table 8;
(xvii) 84 lncRNAs listed in Table 9; and
(xviii) 94 lncRNAS listed in Table 10.

11. The kit according to claim 9, wherein the at least one reagent comprises specific oligonucleotides complementary to the ncRNAs of interest.

12. A targeted sequencing panel for next generation sequencing, comprising nucleic acids specific for at least one ncRNA (miRNA and/or lncRNA) selected from 406 miRNAs listed in Table 1 and 1008 lncRNAs listed in Table 5.

13. The sequencing panel according to claim 12, wherein the at least one ncRNA comprises ncRNAs selected from the group consisting of:
(i) miR.99a.5p;
(ii) 7 miRNAs of miR.99a.5p, miR.378d, miR.100.5p, miR.193b.3p, miR.34a.5p, miR.1306.5p, and miR.1229.3p;
(iii) 3 miRNAs of miR1220.3p, miR378d and miR99a.5p;
(iv) 11 mRNAs of miR.99a.5p, miR.1229.3p, miR.100.5p, miR.378d, miR.193b.3p, miR.1306.5p, miR.195.5p, miR.532.3p, miR.125b.5p, miR.34a.5p, and miR.6880.5p;
(v) 15 miRNAs of miR.23a.5p, miR.6880.5p, miR.7111.5p, miR.6812.5p, miR.6738.5p, miR.5196.5p, miR.6894.5p, miR.8085, miR.4463, miR.2392, miR.144.3p, miR.192.5p, miR.193b.3p, miR.194.5p, and miR.122.5p;
(vi) 13 lncRNAs of lnc-DLG5-1:1, lnc-EBLN1-1:4, lnc-FAT1-7:2, lnc-PRR5-5:1, lnc-RBKS-6:1, lnc-FOXD4L5-35:1, lnc-TENM3-3:3, lnc-FAM133B-2: 1, lnc-ZNF726-1:3, lnc-AP3M1-1:1, lnc-DUSP10-6:1, lnc-TPPP-1:2, and LINC01206:20;
(vii) 7 lncRNAs of LINC02345:11, lnc-EBLN1-1:4, lnc-TPPP-1:2, lnc-TENM3-3:3, lnc-FAT1-7:2, lnc-DKK1-5:3, and lnc-TACSTD2-2:4;
(viii) 12 lnc RNAs of lnc-TPPP-1:2, ARRDC3-AS1:7, lnc-TENM3-3:5, lnc-TENM3-3:4, lnc-QRFP-5:1, lnc-CRYBB 1-1:1, lnc-MGST3-1:3, lnc-FAM49B-8:1, HAND2-AS 1:70, lnc-TMEM185B-12:7, lnc-CNDP1-7:1, and lnc-C21orf58-1:2;
(ix) 3 lncRNAs of lnc-TENM3-3:3, lnc-MARCH4-2:7, and lnc-LRRC1-5:2;
(x) 7 lncRNAs of lnc-TPPP-1:2, lnc-TENM3-3:3, lnc-TMEM185B-12:7, lnc-NAXD-6:5, lnc-HECA-6:1, lnc-COMMD6-10:1, and MIR29B2CHG:46;
(xi) 18 lncRNAs of lnc-TPPP-1:2, LINC02345:11, lnc-ZNF273-4:4, lnc-TACC2-8:6, LINC01206:20, lnc-05orf67-3:1, HAND2-AS1:58, lnc-PRDM9-20:1, lnc-CLK1-1:7, lnc-DNALI1-5:4, RORB-AS1:6, lnc-TPPP-1:3, lnc-BMS1-2:1, lnc-ADRB1-4:1, lnc-XXYLT1-5:1, MIR99AHG:104, LINC01748:17, and lnc-AKR1E2-15:1;
(xii) 28 miRNAs listed in Table 2;
(xiii) 74 miRNAs listed in Table 3;
(xiv) 33 lncRNAs listed in Table 6;
(xv) 60 lncRNAs listed in Table 7;
(xvi) 32 lncRNAs listed in Table 8;
(xvii) 84 lncRNAs listed in Table 9; and
(xviii) 94 lncRNAS listed in Table 10.

14. The method according to claim 1, wherein the method further comprises a step of administering at least one therapeutic agent to the subject in order to treat the cognitive disorder.
